(19) United States
(12) Patent Application Publication
(10) Pub. No.: US 2024/0301373 A1
(43) Pub. Date: Sep. 12, 2024

(54) FANZORS ARE RNA-GUIDED NUCLEASES ENCODED IN EUKARYOTIC GENOMES

(71) Applicant: Massachusetts Institute of Technology, Cambridge, MA (US)

(72) Inventors: Omar Abudayyeh, Cambridge, MA (US); Jonathan Gootenberg, Cambridge, MA (US); Justin Lim, Boston, MA (US); Kaiyi Jiang, Cambridge, MA (US)

(73) Assignee: Massachusetts Institute of Technology, Cambridge, MA (US)

(21) Appl. No.: 18/406,066

(22) Filed: Jan. 5, 2024

Related U.S. Application Data
(60) Provisional application No. 63/578,625, filed on Aug. 24, 2023.
(60) Provisional application No. 63/510,866, filed on Jun. 28, 2023.
(60) Provisional application No. 63/507,968, filed on Jun. 13, 2023.
(60) Provisional application No. 63/450,947, filed on Mar. 8, 2023.

(51) Int. Cl. C12N 9/22; C12N 15/11; C12N 15/90

(52) U.S. Cl. CPC C12N 9/22; C12N 15/11; C12N 15/902; C12N 2310/20

(57) ABSTRACT

The invention relates to compositions and methods for targeting polynucleotides with eukaryotic RNA-guided nucleases. In particular, programmable RNA-guided DNA endonucleases termed Fanzors, can be harnessed for genome editing.

### FEDERALLY SPONSORED RESEARCH

[0001] This invention was made with government support under EB031957 awarded by National Institutes of Health. The government has certain rights in the invention.

### REFERENCE TO AN ELECTRONIC SEQUENCE LISTING

[0002] The contents of the electronic sequence listing (M065670531US03-SEQ-EAS.xml; Size: 6,974,866 bytes, and Date of Creation: Aug. 15, 2023) is herein incorporated by reference in its entirety.

### FIELD OF THE INVENTION

[0003] The present invention relates generally to methods and products of using programmable RNA-guided DNA endonucleases for genome-editing.

### BACKGROUND OF THE INVENTION

[0004] Prokaryotic and eukaryotic genomes are replete with diverse transposons, a broad class of mobile genetic elements (MGE). Transposons of the highly abundant IS200/605 family encode a pair of genes: TnpA, which codes for a DDE class transposase responsible for single-strand ‘peel and paste’ transposition, and TnpB, which has an unknown role in the transposition mechanism (Kapitonov et al. 2015; He et al. 2013). TnpB contains a RuvC-like nuclease domain (RNase H fold) that is specifically related to the homologous nuclease domain of the type V CRISPR effector Cas12 (Zetsche et al. 2015; Fonfara et al. 2016), specifically the Cas12f systems (Harrington et al. 2018), suggesting a direct evolutionary path from TnpB to Cas12 (Karevelis et al. 2021; Bao and Jurka 2013, Altae-Tran et al. 2021). This relationship is supported by phylogenetic analysis of the RuvC-like domains, which indicates independent origins of Cas12s of different type V subtypes from distinct groups of TnpBs. Bioinformatic analysis demonstrated that, along with IscB, IsrB, and IshB nucleases, TnpBs are components of obligate mobile element-guided activity (OMEGA) systems, which encode the guide wRNA nearby the nuclease gene, often overlapping the coding region. Biochemical and cellular validation demonstrated ωRNA-TnpB complex forms an RNA-guided DNA endonuclease system (Karevelis et al. 2021; Altae-Tran et al. 2021).

[0005] RuvC-containing proteins are not limited to prokaryotic systems: a set of TnpB homologs, Fanzors, are present in eukaryotes (Bao and Jurka 2013). Mirroring the diversity of TnpBs in bacteria and archaea, Fanzor nucleases have been identified in diverse eukaryotic lineages, including metazoans, fungi, algae, amorphea, and double-stranded (ds)DNA viruses. Identified Fanzors fall into two major groups: 1) Fanzor1 nucleases are associated with eukaryotic transposons, including Mariners, IS4-like elements, Sola, Helitron, and MuDr, and occur predominantly in diverse eukaryotes; 2) Fanzor2 nucleases are found in IS607-like transposons and are present in large dsDNA viral genomes. Despite the similarities between TnpB and Fanzors, Fanzors have not been surveyed comprehensively throughout eukaryotic diversity, and they have not been demonstrated to be active nucleases in either biochemical or cellular contexts.

### SUMMARY OF THE INVENTION

[0006] The present disclosure reports a comprehensive census of RNA-guided nucleases in eukaryotic and viral genomes, discovering a broad class of nucleases termed Fanzors. Fanzor diversity was used herein to perform phylogenetic analysis revealing their evolution from prokaryotic origins and to validate activity through biochemical and cellular experiments, demonstrating the programmable RNA-guided endonuclease activity of the Fanzor. The invention relates, in one aspect, to the discovery that Fanzors comprise programmable RNA-guided endonuclease activity that can be harnessed for genome editing in human cells, highlighting the utility of the widespread eukaryotic RNA-guided nucleases for biotechnology applications. The invention relates, in some aspects, to the discovery that Fanzor programmable RNA-guided endonuclease activity can be harnessed for genome editing in any type of organism (e.g., eukaryotic, prokaryotic, and/or fungi).

[0007] Accordingly, aspects of the present disclosure provide compositions non-naturally occurring, engineered composition comprising: (a) a Fanzor polypeptide comprising an RuvC domain; and (b) a fRNA molecule comprising a scaffold and a reprogrammable target spacer sequence, wherein the fRNA molecule is capable of forming a complex with the Fanzor polypeptide and directing the Fanzor polypeptide to a target polynucleotide sequence.

[0008] In some embodiments, the RuvC domain further comprises a RuvC-I subdomain, a RuvC-II subdomain, and a RuvC-I subdomain, wherein the RuvC-subdomain is a rearranged RuvC-II subdomain.

[0009] In some embodiments, the Fanzor polypeptide comprises about 200 to about 2212 amino acids.

[0010] In some embodiments, the reprogrammable target spacer sequence comprises about 12 to about 22 nucleotides.

[0011] In some embodiments, the scaffold comprises about 21 to about 1487 nucleotides.

[0012] In some embodiments, the complex binds a target adjacent motif (TAM) sequence 5′ of the target polynucleotide sequence. In some embodiments, the TAM sequence comprises GGG. In some embodiments, the TAM sequence comprises TTTT. In some embodiments, the TAM sequence comprises TAT. In some embodiments, the TAM sequence comprises TTG. In some embodiments, the TAM sequence comprises TTTA. In some embodiments, the TAM sequence comprises TA. In some embodiments, the TAM sequence comprises TTA. In some embodiments, the TAM sequence comprises TGAC.

[0013] In some embodiments, the target polynucleotide is DNA.

[0014] In some embodiments, the Fanzor polypeptide is selected from a sequence listed in Table 1. In some embodiments, the Fanzor polypeptide shares at least 50%, at least 55%, at least 60%, at least 65%, at least 70%, at least 75%, at least 80%, at least 85%, at least 90%, at least 95%, at least 99%, or 100% sequence identity with a Fanzor polypeptide listed in Table 1.

[0015] In some embodiments, the Fanzor polypeptide is selected from a sequence listed in Table 4. In some embodiments, the Fanzor polypeptide shares at least 50%, at least 55%, at least 60%, at least 65%, at least 70%, at least 75%, at least 80%, at least 85%, at least 90%, at least 95%, at least 99%, or 100% sequence identity with a Fanzor polypeptide listed in Table 4.

[0016] In some embodiments, (a) the Fanzor polypeptide is a Fanzor polypeptide; and (b) the fRNA molecule is an fRNA molecule. In some embodiments, the Fanzor polypeptide is a Fanzor 1 polypeptide. In some embodiments, the Fanzor polypeptide is a Fanzor2 polypeptide. In some embodiments, the Fanzor polypeptide further comprises a nuclear localization signal (NLS).

[0017] In some embodiments, the Fanzor polypeptide further comprises a helix-turn-helix (HTH) domain.

[0018] Further aspects of the present disclosure relate to compositions comprising one or more vectors comprising (a) a nucleic acid sequence encoding a Fanzor polypeptide comprising an RuvC domain; and (b) a nucleic acid sequence encoding a fRNA molecule comprising a scaffold and a reprogrammable target spacer sequence, wherein the fRNA molecule is capable of forming a complex with the Fanzor polypeptide and directing the Fanzor polypeptide to a target polynucleotide sequence. In some embodiments, (a) and (b) are comprised by one vector. In some embodiments, (a) and (b) are comprised by more than one vector.

[0019] In some embodiments, the composition further comprises one or more of a donor template comprising a donor sequence, optionally for use in homology-directed repair (HDR), a linear insert sequence, optionally for use in non-homologous end joining-based insertion, a reverse transcriptase, optionally for use in prime editing, a recombinase, optionally for use for integration, a transposase, optionally for use for integration, an integrase, optionally for use for integration, a deaminase, optionally for use of base-editing, a transcriptional activator, optionally for use of targeted gene activation, a transcriptional repressor, optionally for use of targeted gene repression, and/or a transposon, optionally for RNA guided transposition.

[0020] In some embodiments, the linear insert sequence comprises DNA. In some embodiments, the linear insert sequence comprises RNA. In some embodiments, the linear insert sequence comprises mRNA. In some embodiments, the linear insert is comprised by a viral vector, optionally wherein the viral vector is Adeno-associated viral (AAV) vector, a virus, optionally wherein the virus is an Adenovirus, a lentivirus, a herpes simplex virus, and/or a lipid nanoparticle.

[0021] In some embodiments, the integration comprises programmable addition via site-specific targeting elements (PASTE).

[0022] In some embodiments, the transposon is a eukaryotic transposon, optionally wherein the eukaryotic transposon is CMC, Copia, ERV, Gypsy, hAT, helitron, Zator, Sola, LINE, Tc1-Mariner, Novosib, Crypton, or EnSpm.

[0023] Further aspects of the present disclosure relate to engineered cells comprising (a) a Fanzor polypeptide comprising an RuvC domain; and (b) a fRNA molecule comprising a scaffold and a reprogrammable target spacer sequence, wherein the fRNA molecule is capable of forming a complex with the Fanzor polypeptide and directing the Fanzor polypeptide to a target polynucleotide sequence.

[0024] In some embodiments, the engineered cell is a mammalian cell. In some embodiments, the mammalian cell is a human cell. In some embodiments, the engineered cell is a non-mammalian, animal cell. In some embodiments, the engineered cell is a plant cell. In some embodiments, the engineered cell is a bacterial cell. In some embodiments, the engineered cell is a fungal cell. In some embodiments, the engineered cell is a yeast cell.

[0025] In some embodiments, the engineered cell further comprises one or more of a donor template comprising a donor sequence, optionally for use in homology-directed repair (HDR), a linear insert sequence, optionally for use in non-homologous end joining-based insertion, a reverse transcriptase, optionally for use in prime editing, a recombinase, optionally for use for integration, a transposase, optionally for use for integration, an integrase, optionally for use for integration, a deaminase, optionally for use of base-editing, a transcriptional activator, optionally for use of targeted gene activation, a transcriptional repressor, optionally for use of targeted gene repression, and/or a transposon, optionally for RNA guided transposition.

[0026] In some embodiments, the linear insert sequence comprises DNA. In some embodiments, the linear insert sequence comprises RNA. In some embodiments, the linear insert sequence comprises mRNA. In some embodiments, the linear insert is comprised by a viral vector, optionally wherein the viral vector is Adeno-associated viral (AAV) vector, a virus, optionally wherein the virus is an Adenovirus, a lentivirus, a herpes simplex virus; and/or a lipid nanoparticle.

[0027] In some embodiments, the integration comprises programmable addition via site-specific targeting elements (PASTE).

[0028] In some embodiments, the transposon is a eukaryotic transposon, optionally wherein the eukaryotic transposon is CMC, Copia, ERV, Gypsy, hAT, helitron, Zator, Sola, LINE, Tc1-Mariner, Novosib, Crypton, or EnSpm.

[0029] Further aspects of the present disclosure relate to methods of modifying a target polynucleotide sequence in a cell, comprising delivering to the cell (a) a nucleic acid encoding a Fanzor polypeptide comprising an RuvC domain; and (b) a nucleic acid encoding a fRNA molecule comprising a scaffold and a reprogrammable target spacer sequence, wherein the fRNA molecule is capable of forming a complex with the Fanzor polypeptide and directing the Fanzor polypeptide to a target polynucleotide sequence.

[0030] In some embodiments, the modifying comprises cleavage of the target polynucleotide sequence. In some embodiments, the cleavage occurs within the target polynucleotide near the 3′ end of the target polynucleotide sequence. In some embodiments, the cleavage occurs about −6 to about +3 nucleotides relative to the 3′ end of the target polynucleotide sequence.

[0031] In some embodiments, the cleavage occurs with the TAM sequence. In some embodiments, the target polynucleotide sequence is DNA.

[0032] In some embodiments, one or more mutations comprising substitutions, deletions, and insertions are introduced into the target polynucleotide sequence.

[0033] In some embodiments, (a) and (b) are delivered to the cell together. In some embodiments, (a) and (b) are delivered to the cell separately. In some embodiments, the delivering to a cell occurs (a) in vivo; (b) ex vi); or (c) in vitro.

[0034] In some embodiments, the cell is a mammalian cell. In some embodiments, the mammalian cell is a human cell. In some embodiments, the cell is a non-mammalian, animal cell. In some embodiments, the cell is a eukaryotic cell. In some embodiments, the cell is a prokaryotic cell. In some embodiments, the cell is a plant cell. In some embodiments, the cell is a bacterial cell. In some embodiments, the cell is a fungal cell. In some embodiments, the cell is a yeast cell. In some embodiments the cell is a rodent cell. In some embodiments, the cell is a primate cell.

[0035] Further aspects of the present disclosure relate to compositions comprising a stabilized Fanzor polypeptide comprising an RuvC domain, comprising one or more mutations relative to wildtype Fanzor polypeptide wherein the mutations stabilize the Fanzor polypeptide. Further aspects of the present disclosure relate to methods of modifying a target polynucleotide sequence in a cell, comprising (a) delivering to the cell a stabilized Fanzor polypeptide comprising an RuvC domain and further comprising one or more mutations relative to a wildtype Fanzor polypeptide wherein the mutations stabilize the Fanzor polypeptide; and (b) separately delivering to the cell a fRNA molecule.

[0036] Further aspects of the present disclosure relate to method of modifying a target polynucleotide sequence in a mammal in vivo, comprising delivering to the mammal (a) a nucleic acid encoding a Fanzor polypeptide comprising an RuvC domain; and (b) a nucleic acid encoding a fRNA molecule comprising a scaffold and a reprogrammable target spacer sequence, wherein the fRNA molecule is capable of forming a complex with the Fanzor polypeptide and directing the Fanzor polypeptide to a target polynucleotide sequence.

[0037] Further aspects of the present disclosure relate to methods of modifying a target polynucleotide sequence in a mammal in vivo or in a mammalian cell ex vivo, comprising delivering to the mammal or the mammalian cell a composition of the present disclosure. In some embodiments, the mammal is a human, a primate, or a rodent, optionally a mouse; or the mammalian cell is a human cell, a primate cell, or a rodent cell, optionally a mouse cell. Further aspects of the present disclosure relate to method of modifying a target polynucleotide sequence in a plant in vivo, comprising delivering to the plant (a) a nucleic acid encoding a Fanzor polypeptide comprising an RuvC domain; and (b) a nucleic acid encoding a fRNA molecule comprising a scaffold and a reprogrammable target spacer sequence, wherein the fRNA molecule is capable of forming a complex with the Fanzor polypeptide and directing the Fanzor polypeptide to a target polynucleotide sequence.

[0038] Further aspects of the present disclosure relate to methods of modifying a target polynucleotide sequence in a plant in vivo, comprising delivering to the plant a composition of the present disclosure.

[0039] Further aspects of the present disclosure relate to method of modifying a target polynucleotide sequence in a fungi in vivo, comprising delivering to the fungi (a) a nucleic acid encoding a Fanzor polypeptide comprising an RuvC domain; and (b) a nucleic acid encoding a fRNA molecule comprising a scaffold and a reprogrammable target spacer sequence, wherein the fRNA molecule is capable of forming a complex with the Fanzor polypeptide and directing the Fanzor polypeptide to a target polynucleotide sequence.

[0040] Further aspects of the present disclosure relate to methods of modifying a target polynucleotide sequence in a fungi in vivo, comprising delivering to the fungi a composition of the present disclosure.

[0041] Further aspects of the present disclosure relate to method of modifying a target polynucleotide sequence in a virus, comprising delivering to the virus (a) a nucleic acid encoding a Fanzor polypeptide comprising an RuvC domain; and (b) a nucleic acid encoding a fRNA molecule comprising a scaffold and a reprogrammable target spacer sequence, wherein the fRNA molecule is capable of forming a complex with the Fanzor polypeptide and directing the Fanzor polypeptide to a target polynucleotide sequence.

[0042] Further aspects of the present disclosure relate to methods of modifying a target polynucleotide sequence in a virus, comprising delivering to the virus a composition of the present disclosure.

[0043] Further aspects of the present disclosure relate to method of modifying a target polynucleotide sequence in a bacteria, comprising delivering to the bacteria (a) a nucleic acid encoding a Fanzor polypeptide comprising an RuvC domain, and (b) a nucleic acid encoding a fRNA molecule comprising a scaffold and a reprogrammable target spacer sequence, wherein the fRNA molecule is capable of forming a complex with the Fanzor polypeptide and directing the Fanzor polypeptide to a target polynucleotide sequence.

[0044] Further aspects of the present disclosure relate to methods of modifying a target polynucleotide sequence in a bacteria, comprising delivering to the bacteria a composition of the present disclosure.

[0045] Each of the limitations of the invention can encompass various embodiments of the invention. It is, therefore, anticipated that each of the limitations of the invention involving any one element or combinations of elements can be included in each aspect of the invention. This invention is not limited in its application to the details of construction and the arrangement of components set forth in the following description or illustrated in the drawings. The invention is capable of other embodiments and of being practiced or of being carried out in various ways. Also, the phraseology and terminology used herein is for the purpose of description and should not be regarded as limiting. The use of “including,” “comprising,” or “having,” “containing”, “involving”, and variations thereof herein, is meant to encompass the items listed thereafter and equivalents thereof as well as additional items.

### BRIEF DESCRIPTION OF DRAWINGS

[0046] The following drawings form part of the present specification and are included to further demonstrate certain aspects of the present disclosure, which can be better understood by reference to one or more of these drawings in combination with the detailed description of specific embodiments presented herein. The figures are illustrative only and are not required for enablement of the invention disclosed herein.

[0047] FIGS. 1A-1F show Fanzor2 protein associates with its non-coding RNA FIG. 1A shows phylogenetic tree of all Fanzor proteins as well as TnpB and IscB proteins. FIG. 1B shows phylogenetic tree of only Fanzor proteins with their host genome of origin shown as a ring. FIG. 1C shows schematic of the Acanthamoeha polyphaga mimivirus (“IsvMimi Fanzor2” also referred to herein as “ApmHNuc”) system, including the Fanzor2 ORF, associated TnpA, the non-coding RNA region, and the left and right inverted repeat elements (ILR and IRR). FIG. 1D shows conservation of the three Fanzor2 loci in the Isvmimi genome, showing high conservation of the Fanzor2 protein coding regions and the nearby non-coding RNA genome. FIG. 1E shows a schematic of the method used for identifying the Isvmimi non-coding RNA. The Isvmimi protein is co-purified with its non-coding RNA, allowing for isolation of the non-coding RNA species and identification by sequencing. FIG. 1F shows RNA sequencing coverage of the Isvmimi-1 non-coding RNA region showing robust expression of the non-coding RNA and its guide sequence extending into and slightly past the IRR element. FIG. 1G shows secondary structure of the observed non-coding RNA species from FIG. 1F showing significant folding of the non-coding RNA.

[0048] FIGS. 2A-2A shows Fanzor2 ribonucleoproteins can be programmed to cleave DNA targets in vitro. FIG. 2A shows a schematic of Isvmimi Fanzor2 RNP purification. Isvmimi Fanzor2 and guide are co-expressed in bacteria and harvested from collected pellet. Recombinant protein and RNA are purified via affinity tag purification and isolated via FPLC to determine RNP-containing fractions. FIG. 2B shows in vitro cleavage by Isvmimi Fanzor2 showing dependence on targeting guide, Isvmimi Fanzor2 protein, and magnesium. In vitro cleavage was performed with purified RNP containing either a targeting or non-targeting guide and incubated at 37° C. with a 7N TAM library target. FIG. 2C shows sequencing of the TAM library to determine depleted sequences revealed a distinct population of depleted TAMs (pink) compared to a non-targeting guide. FIG. 2D shows sequence motif of TAM preference computed from depleted TAMs, showing an AT-rich tam preference. FIG. 2E shows validation of the Isvmimi TAM preference via in vitro cleavage on top-depleted TAMs. In vitro cleavage of validated TAMs was performed as in FIG. 2B, with incubation with DNA target, magnesium containing buffer, and RNP containing a targeting guide. FIG. 2F shows cleavage sites of Isvmimi Fanzor2 as mapped by Sanger sequencing show cleavage in the TAM region with multiple cut sites. Cleavage was mapped via gel extraction of cleaved bands after in vitro cleavage and Sanger sequencing with corresponding primers. Multiple cleavage positions are evident from multiple A sites added via polymerase run off. FIG. 2G shows next generation sequencing mapping of the TAM cleavage by Isvmimi Fanzor2 via ligation. Cleavage products from in vitro cleavage reactions were prepared for sequencing via ligation of sequencing adaptors and PCR prior to sequencing on an Illumina Miseq. Reads were aligned to the TAM target to map cleavage locations.

[0049] FIGS. 3A-3F show TnpB systems with a rearranged glutamate are also active nucleases. FIG. 3A shows phylogenetic tree of Fanzor proteins, showing that Fanzor systems have a rearranged glutamate site in the RuvC catalytic domain. FIG. 3B shows Isvmimi Fanzor2 collateral activity is measured using a ssDNA fluorescent reporter, showing lack of collateral for this enzyme. FIG. 3C shows predicted AlphaFold-2 structure of Isvmimi Fanzor2, showing that despite having a rearranged glutamate in the RuvC catalytic domain, that the catalytic aspartates and glutamates still form an active site (blue and magenta residues). FIG. 3D shows expression of the non-coding RNA for Thermoplasma volcanium (Istvo5) TnpB, revealing a specific non-coding RNA species that associates with the Istvo5 TnpB protein. FIG. 3E shows cleavage of the TAM library plasmid by Istvo5 TnpB, showing significant cleavage activity at 37 and 20 degrees Celsius. FIG. 3F shows DNA Cleavage of Isvmimi Fanzor2 truncated to the 65th start codon position, full length protein, catalytically dead protein (aspartate to alanine mutation), protein mutated to have a canonical glutamate in the catalytic RuvC domain, and Isvmimi full length protein. Cleavage is compared to a condition with no Fanzor protein.

[0050] FIGS. 4A-4E show Fanzor1 proteins are active programmable nucleases. FIG. 4A shows Fanzors projected onto the eukaryotic tree of life, showing that Fanzors are present in all four kingdoms of life. FIG. 4B shows RNA sequencing of the non-coding RNA region from Fanzor1 from Chlamydomonas reinhardtii (Cre Fanzor1). Robust expression of a non-coding RNA is seen. FIG. 4C shows secondary structure of Cre Fanzor1's non-coding RNA, showing significant folding of the guide RNA. FIG. 4D shows TAM library DNA Cleavage by Cre Fanzor1, revealing RNA guided DNA targeting. FIG. 4E shows sequence motif of TAM preference computed from depleted TAMs.

[0051] FIGS. 5A-5A show Fanzor nucleases can be programmed to target DNA in mammalian cells for genome editing FIG. 5A shows secondary structures of modified guide RNA for Isvmimi Fanzor2 engineered for expression off of Polymerase III promoters. Guide RNAs are modified to remove poly U tracts that would lead to premature termination. FIG. 5B shows schematic of delivery and testing of Isvmimi Fanzor2 in mammalian cells.

[0052] FIGS. 6A-6H show Fanzor nucleases associate with their non-coding RNA. FIG. 6A shows a phylogenetic tree of representative Fanzor and TnpB proteins with the host genome kingdom and Fanzor family designation colored. For TnpBs, Fanzor family designation corresponds to the Fanzor family that the TnpB is most similar too by sequence alignment. Fanzor and TnpB orthologs experimentally studied in this work are labeled. FIG. 6B shows a phylogenetic tree of only Fanzor proteins with the phyla of their host species and predicted associated transposons marked as rings. Family and kingdom colors correspond to those in FIG. 6A. FIG. 6C shows a comparison of predicted ncRNA lengths at the 5′ end of MGE of IscB, TnpB and Fanzor systems (****, p<0.0001, one way ANOVA). FIG. 6D shows a comparison of predicted ncRNA lengths at the 3′ end of MGE of IscB, TnpB and Fanzor systems (****, p<0.0001, one way ANOVA). FIG. 6E shows a schematic of the Acanthamoeha Polyphagia mimivirus (ApmHNuc Fanzor) system, including the Fanzor ORF, associated IS607 TnpA, the non-coding RNA region, and the left and right inverted repeat elements (ILR and IRR). FIG. 6F shows conservation of the three Fanzor loci in the Acanthamoeba polyphaga mimivirus genome, showing high conservation of the Fanzor protein-coding regions and the nearby non-coding RNA. FIG. 6G shows secondary structure of the observed non-coding RNA species from FIG. 6F, showing significant folding of the non-coding RNA. FIG. 6H shows conserved secondary structure of ApmHNuc Fanzor's non-coding RNA with its most similar Fanzor systems.

[0053] FIGS. 7A-7H show Fanzor ribonucleoproteins can be programmed to cleave DNA targets in vitro. FIG. 7A shows a schematic of the method used for identifying the ApmHNuc associated non-coding RNA. The ApmHNuc protein is co-purified with its non-coding RNA, allowing for the isolation of the non-coding RNA species and identification by small RNA sequencing. FIG. 7B shows RNA sequencing coverage of the ApmHNuc-1 non-coding RNA region showing robust expression of the non-coding RNA and its guide sequence extending past the IRR element. FIG. 7C shows scatter plots of the fold change of individual TAM sequences in a 7N library plasmid relative to input plasmid library distribution with either ApmHNuc RNP with a targeting fRNA or a non-targeting fRNA. FIG. 7D shows sequence motif of TAM preference computed from depleted TAMs, showing an NGGG-rich tam preference. FIG. 7E shows biochemical validation of individual ApmHNuc TAM sequences including 4 preferred TAMs (TGGG, AGGG, CGGG, and GGGG) as well as 3 non-TAM sequences and 1 non-targeting sequence. ApmHNuc RNP is incubated with DNA targets containing each of these sequences and cleavage is visualized by gel electrophoresis. FIG. 7F shows ApmHNuc RNP purified with either targeting (T) or non-targeting (NT) fRNA as well as two catalytic dead ApmHNuc mutants (D324A and E467A) are tested on either a plasmid containing the correct target spacer DNA sequences or a scrambled DNA sequence containing the 5′ TAM TGGG. EDTA is added in lane 5 to quench the cleavage by chelating ions inside the reaction. FIG. 7G shows Sanger sequencing traces of ApmHNuc RNP cleavage on the 5′ CGGG TAM target, showing cleavage downstream of the guide target. FIG. 7H shows next-generation sequencing mapping of the TAM cleavage by ApmHNuc Fanzor via NEB adaptor ligation. Cleavage products from in vitro cleavage reactions were prepared for sequencing via ligation of sequencing adaptors and PCR prior to next-generation sequencing. Reads were aligned to the TAM target to map cleavage locations. Two separate reactions were ran in parallel with and without addition of ApmHNuc RNP. The cleavage products were amplified in both 5′ and 3′ directions with F denoting 3′ direction and R denoting the 5′ direction.

[0054] FIGS. 8A-8I show TnpB systems with rearranged glutamates are also active nucleases. A FIG. 8A shows alignment of the split RuvC domains of Fanzor and TnpB nucleases showing the rearranged glutamic acid inside RuvC-II versus the canonical glutamic acid. FIG. 8B shows phylogenetic tree of TnpB and Fanzor proteins, showing which TnpBs and Fanzor nucleases have a rearranged glutamic acid site. FIG. 8C shows predicted AlphaFold-2 structure of ApmHNuc, TvoTnpB, Isdra2TnpB, and Uncas12f, showing that despite having a rearranged glutamate in the RuvC catalytic domain, the catalytic aspartates and glutamates still form an active catalytic triad (red residues). FIG. 8D shows schematic of the Thermoplasma volcanium GSSITnpB (TvoTnpB) system, including the alternatively rearranged TnpB, associated IS605 TnpA, and the left and right end elements (LE and RE). FIG. 8E shows expression of the non-coding RNA for TvoTnpB, revealing a specific non-coding RNA species that associates with the TvoTnpB protein extending from the ORF to outside the RE element similar to Isdra2TnpB. FIG. 8F shows sequence logo motif of TAM preference by TvoTnpB. FIG. 8G shows biochemical validation of individual TAM preference by TvoTnpB showing that the cleavage by TvoTnpB is TAM (NTGAC) specific. TvoTnpB RNP is incubated with targets containing different 5′ TAMs and cleavage is visualized by gel electrophoresis. FIG. 8H shows next-generation sequencing mapping of the TAM cleavage by TvoTnpB via adaptor ligation. Reads were aligned to the TAM target to map cleavage locations. Two separate reactions were ran in parallel with and without addition of TvoTnpB RNP. The cleavage products were amplified in both 5′ and 3′ directions with F denoting 3′ direction and R denoting the 5′ direction. FIG. 8I shows ApmHNuc, TvoTnpB, and Isdra2TnpB DNA collateral cleavage activity are measured using an ssDNA fluorescent reporter, showing a lack of collateral activity for nucleases with the rearranged glutamic acid in RuvC-II. DNase I is used as a positive nuclease control for collateral cleavage activity.

[0055] FIGS. 9A-9G show Fanzor are widespread in the eukaryotic genome and associates with their fRNA. FIG. 9A shows Fanzor systems projected onto the eukaryotic tree of life. Nodes and tips of the tree are marked with circles if there are Fanzor in the corresponding taxonomic group. Circle sizes are proportional to the Fanzor copy number and colored by family. FIG. 9B shows phylogenetic tree of Fanzor sequences for which splicing prediction was available. The outer ring shows intron density of the corresponding Fanzor nucleases. FIG. 9C shows schematic of the Chlamydomonas reinhardtii Fanzor system, including the 5′ asymmetrical terminal inverted repeats (ATIR), 3′ ATIR, 5′ target site duplications (TSD), 3′ TSD, and the mRNA and coding sequences for Cre-1 Fanzor. FIG. 9D shows small RNA sequencing of Chlamydomonas reinhardtii showing expression of noncoding RNA at the 3′ end of the CreHNuc that extends beyond the ATIR into the TSD. FIG. 9E shows alignment of all 6 copies of Cre Fanzor inside the annotated part of Chlamydomonas reinhardtii genome, showing highly conserved 3′ ends of the Cre Fanzor proteins along with its fRNA and variable 5′ end composition of the proteins. FIG. 9F shows secondary structure of CreHNuc-1 Fanzor′ non-coding RNA from 4D-E, showing significant folding of the guide RNA. FIG. 9G shows conserved secondary structure of CreHNuc-1 Fanzor's non-coding RNA and its most similar Fanzor systems.

[0056] FIGS. 10A-10F show Fanzor nucleases encode natural nuclear localization signals (NLS) and have mammalian genome editing activity. FIG. 10A shows protein schematic of ApmHNuc Fanzor showing the core catalytic triads of split RuvC domain and the predicted N-terminal nuclear localization signal (NLS). The N-terminal NLS like element is colored in red and the catalytic triad is shown as red space filling residues inside the cyan RuvC domain on the AF2 predicted ApmHNuc structure. FIG. 10B shows phylogenetic tree of Fanzor proteins showing which sequences have predicted NLS elements within 15 residues of their N-terminal or C-terminal ends. The phyla and families of the sequences are also marked as rings. FIG. 10C shows confocal images of a regular sfGFP, the predicted ApmHNuc NLS fused to sfGFP on either the N-terminal or C-terminal end, and sfGFP fused directly to the N-terminal of ApmHNuc transfected into HEK293FT cells and stained with SYTO Red nuclear stain. Images include the nuclear stain (red), GFP signal (green), and a merged image. FIG. 10D shows an ApmHNuc mammalian expression vector and fRNA expression plasmid are co-transfected into HEK293FT cells targeting a luciferase reporter where a Cypridina luciferase (Cluc) is driven by a constitutive promoter and a Gaussia luciferase (Gluc) is placed out of frame from the native start codon. ApmHNuc with a targeting guide against the reporter shows a significantly higher normalized luciferase signal than a non-targeting guide (***, p<0.001, two-sided t-test). FIG. 10E shows indel frequency on the luciferase reporter is measured by next-generation sequencing. The targeting guide with either wild type ApmHNuc fRNA scaffold or T to C mutant scaffold to boost expression is compared against a non-targeting guide. Both scaffolds show a significant increase in indel frequency compared to the non-targeting guide (***, p<0.001, **, p<0.01, one-way ANOVA). FIG. 10F shows representative indel alleles from the targeting guide condition on the luciferase reporter, showing deletions centered around the 3′ end of the guide target.

[0057] FIGS. 11A-11D show genomic characteristics of Fanzor family members. FIG. 11A shows a histogram of the copy number of individual Fanzor members inside their respective genomes. FIG. 11B shows frequency of predicted associated transposons nearby Fanzor (within +/−10 kb) per transposon family type. FIG. 11C shows frequency of the top occurring nearby protein domains within 5 genes upstream or downstream of the Fanzor MGE. FIG. 11D shows phylogenetic tree of Fanzor with the positions of the known Fanzor proteins marked. Phylum and Fanzor family information are also marked as rings.

[0058] FIGS. 12A-12C show purification of ApmHNuc. FIG. 12A shows protein gel showing flow through and eluant of AmpHNuc products during gravity flow strep-bead purifications prior to loading of FPLC. Red square denotes the desired protein product. FIG. 12B shows FPLC traces of ApmHNuc purified with its fRNA and protein gels showing each fraction's protein products with the desired protein product that was pooled labeled with red squares. FIG. 12C FPLC traces of AmpHNuc purified without its fRNA and protein gels showing no RNP product in all observed fractions.

[0059] FIGS. 13A-13D show characterization of ApmHNuc nuclease activity. FIG. 13A shows alignment of ApmHNuc Ruvc domain with Isdra2TnpB RuvC domain to nominate the catalytic RuvC-I aspartic acid (D324) and the RuvC-II glutamic acid (E467A). FIG. 13B shows FPLC traces of ApmHNuc E467A mutant purified with its fRNA and protein gels showing each fraction's protein products with the desired protein product that was pooled shown with a red square. FIG. 13C shows FPLC traces of ApmHNuc D324A mutant purified with its fRNA and protein gels showing each fraction's protein products with the desired protein product that was pooled shown with a red square. FIG. 13D shows native TBE gel showing nuclease activity of AmpHNuc at temperatures from 10 to 65 degrees Celsius. Reactions were carried out by incubating wild-type ApmHNuc RNP on a plasmid with the TGGG TAM 5′ adjacent to the 21 nt spacer target. Cleavage was visualized by gel electrophoresis.

[0060] FIGS. 14A-14C show purification of Isdra2TnpB and TvoTnpB. FIG. 14A shows protein gel showing flow through and eluant fractions of Isdra2TnpB and TvoTnpB products during gravity flow strep-bead purifications. The desired protein product is shown via a red square. FIG. 14B shows FPLC traces ofTvoTnpB purified with its ωRNA and protein gels showing each fraction's protein products with the desired protein product that was pooled shown with a red square. FIG. 14C shows FPLC traces of Isdra2TnpB purified without its ωRNA and protein gels showing each fraction's protein products with the desired protein product that was pooled shown with a red square.

[0061] FIGS. 15A-15C show biochemical characterization of TvoTnpB. FIG. 15A shows TvoTnpB DNA cleavage of a 21 nt target containing a 5′ ATGAC TAM at temperatures ranging from 30 degrees Celsius to 90 degrees Celsius, showing optimal cleavage reaction temperature near 60 degrees for TvoTnpB. FIG. 15B shows Sanger sequencing traces of TvoTnpB cleavage on a 5′ CTGAC TAM target, showing cleavage at the end of the target. FIG. 15C shows fluorescent signal from RNase alert reporter detection of RNA collateral cleavage activity from RNase A, TvoTnpB, Isdra2TnpB, and ApmHNuc incubated with their target DNA sequences for 1 hour. The signal is normalized to a no DNA target condition.

[0062] FIGS. 16A-16C show intron characterization of Fanzor systems. FIG. 16A shows a comparison of the number of predicted introns in Fanzor genes and the mean number of introns per gene in the host genome. Number of introns was defined as the number of exons minus one and calculated from the annotations for the genome provided by GenBank. Correlation and significance values are shown as an inset. FIG. 16B shows a comparison of the mean number of introns in Fanzor genes in a genome and the mean number of introns per gene in the host genome. Correlation and significance values are shown as an inset. FIG. 16C shows standard deviation of the number of introns per Fanzor genes in clusters of 70% sequence identity and 95% alignment coverage. Only sequences with available splicing predictions were clustered and only clusters of two or more sequences are shown.

[0063] FIGS. 17A-17D show characterization of the CreHNuc fRNAs. FIG. 17A shows small RNA sequencing traces mapped onto all 6 copies of full CreHNuc systems in the Cre genome. FIG. 17B shows alignment of the 26 full or partial copies of CreHNuc MGEs inside the Cre genome at their 3′ end. FIG. 17C shows FPLC traces of CreHNuc purified either with or without its fRNA, showing the RNP complex is only stable with the correct fRNA present. The CreHNuc peak in the FPLC trace is labeled. FIG. 17D shows protein gel showing elution fractions of the CreHNuc with the desired protein product that was pooled labeled with a red square.

[0064] FIG. 18 shows ApmHNuc nuclear localization signal characterization. Probability distribution of potential NLS elements across the ApmHNuc protein sequence as predicted by NLStradamus. The default cutoff at 0.6 is used to call significant NLS like elements, revealing one N-terminal NLS and one internal NLS.

[0065] FIGS. 19A-A1 show evolution of Fanzor nucleases and their association with non-coding fRNAs. FIG. 19A shows phylogenetic tree of representative Fanzor and TnpB proteins. From the inner ring outward, the rings show protein system, Fanzor family designation, host superkingdom, phyla of their host species predicted associated transposons, and protein length. Several Fanzor and TnpB proteins studied in this work are marked around the tree. Splits with bootstrap support less than 0.7 out of 1 were collapsed and the tree was rooted at the midpoint. FIG. 19B shows Fanzor systems projected onto the evolutionary tree of eukaryotes (Rees et al. 2017). Nodes and tips of the tree are marked with circles if there are Fanzors in the corresponding taxonomic group. Circle sizes are proportional to the Fanzor copy number and colored by family. FIG. 19C shows comparison of protein lengths (aa) between Fanzor nucleases and TnpB nucleases (****, p<0.0001, two side t-test). FIG. 19D shows intron density of Fanzor genes grouped by assigned families. Statistical tests measured each family's intron density distribution against the rest of the families via a two-sided Student's t-test with multiple hypothesis correction (****, p<0.0001; ***, p<0.001). FIG. 19E shows intron density of Fanzors grouped by taxonomic kingdom. Statistical tests measured each kingdom's intron density distribution against the rest of the kingdoms via a two-sided Student's t-test with multiple hypothesis correction (****, p<0.0001). FIG. 19F shows comparison of predicted flanking non-coding conservation lengths at the 5′ end and 3′ end of the MGEs of IscB, TnpB and Fanzor systems (****, p<0.0001, one way ANOVA). FIG. 19G Schematic of the Acanthamoeba polyphaga mimivirus (ApmFNuc) system, including the Fanzor ORF, associated IS607 TnpA, the non-coding RNA region, and the left and right inverted repeat elements (ILR and IRR). The WED, RuvC, and REC domain is annotated based on structural similarity with the Isdra2 TnpB structure (Nakagawa et al. 2023). FIG. 19H shows conservation of the three Fanzor loci in the Acantharoeba polyphaga mimivirus genome, showing high conservation of the Fanzor protein-coding regions and the nearby non-coding regions. FIG. 19I shows putative RNA secondary structure of the conserved 3′ non-coding region from FIG. 19H, showing strong folding and structural elements of this putative non-coding RNA.

[0066] FIGS. 20A-20G shows viral Fanzor ribonucleoproteins can be programmed to cleave DNA targets in vitro. FIG. 20A shows a schematic of the method used for identifying the ApmFNuc associated non-coding RNA. The ApmFNuc protein is co-purified with its non-coding RNA, allowing for the isolation of the non-coding RNA species and identification by small RNA sequencing. FIG. 20B shows RNA sequencing coverage of the ApmFNuc-1 non-coding RNA region showing robust expression of the non-coding RNA and its guide sequence extending past the IRR element. FIG. 20C shows scatter plots of the fold change of individual TAM sequences in a 7N library plasmid relative to input plasmid library distribution with either ApmFNuc RNP with a targeting fRNA or a non-targeting fRNA. FIG. 20D shows sequence motif of TAM preference computed from depleted TAMs, showing an NGGG-rich tam preference. FIG. 20E shows biochemical validation of individual ApmFNuc TAM sequences including 4 preferred TAMs (TGGG, AGGG, CGGG, and GGGG) as well as 3 non-TAM sequences and 1 non-targeting sequence. ApmFNuc RNP is incubated with DNA targets containing each of these sequences and cleavage is visualized by gel electrophoresis on 6% TBE gel. FIG. 20F shows Sanger sequencing traces of ApmFNuc RNP cleavage on the 5′ CGGG TAM target, showing cleavage downstream of the guide target. FIG. 20G shows next-generation sequencing mapping of the TAM cleavage by ApmFNuc via NEB adaptor ligation. Cleavage products from in vitro cleavage reactions were prepared for sequencing via ligation of sequencing adaptors and PCR prior to next-generation sequencing. Reads were aligned to the TAM target to map cleavage locations. Two separate reactions were ran in parallel with and without addition of ApmFNuc RNP. The cleavage products were amplified in both 5′ and 3′ directions with F denoting 3′ direction and R denoting the 5′ direction.

[0067] FIGS. 21A-21R shows eukaryotic Fanzor orthologs are widespread across eukaryotic kingdoms, associate with fRNAs, and are RNA-guided nucleases. FIG. 21A shows locus schematics of four eukaryotic Fanzor systems from Mercenaria mercenaria, Dreseinna polymorpha, Batillaria attramentaria, and Klebsormidium nitens. WED, REC, and RuvC domains are identified by sequence and structural alignment with Isdra2 TnpB (Nakagawa et al. 2023). FIG. 21B shows a schematic of screening for fRNA expression, TAM, activity, and cleavage locations via cell-free transcription/translation. FIG. 21C shows small RNA sequencing of the MmFNuc locus showing expression of a non-coding RNA species extending outside the ORF. FIG. 21D shows small RNA sequencing of the DpFNuc locus showing expression of a non-coding RNA species extending outside the ORF. FIG. 21E shows small RNA sequencing of the BaFNuc locus showing expression of a non-coding RNA species extending outside the ORF. FIG. 21F shows small RNA sequencing of the KnFNuc locus showing expression of a non-coding RNA species extending outside the ORF. FIG. 21G shows Weblogo visualization of the TAM sequence preference of MmFNuc identified by adaptor ligation assay on a 7N TAM library incubated with MmFNuc protein and fRNA. FIG. 21H shows Weblogo visualization of the TAM sequence preference of DpFNuc identified by adaptor ligation assay on a 7N TAM library incubated with DpFNuc protein and fRNA. FIG. 21I shows Weblogo visualization of the TAM sequence preference of BaFNuc identified by adaptor ligation assay on a 7N TAM library incubated with BaFNuc protein and fRNA. FIG. 21J shows Weblogo visualization of the TAM sequence preference of KnFNuc identified by adaptor ligation assay on a 7N TAM library incubated with KnFNuc protein and fRNA. FIG. 21K shows validation of MmFNuc cleavage by incubating the MmFNuc RNP with its correct TTTA TAM, four mutated TAMs, and a non-targeted plasmid. FIG. 21L shows validation of DpFNuc cleavage by incubating the DpFNuc RNP with its correct TTTA TAM, four mutated TAMs, and a non-targeted plasmid. FIG. 21M shows validation of BaFNuc cleavage by incubating the BaFNuc RNP with its correct TTTA TAM, four mutated TAMs, and a non-targeted plasmid. FIG. 21N shows validation of KnFNuc cleavage by incubating the KnFNuc RNP with its correct TTTA TAM, four mutated TAMs, and a non-targeted plasmid. FIGS. 21O-21R shows next-generation sequencing mapping of the cleavage positions by MmFNuc, DpFNuc, and BaFNuc via NEB adaptor ligation of cleaved DNA targets that were incubated with the respective RNP complexes. Cleavage products from in vitro cleavage reactions were prepared for sequencing via ligation of sequencing adaptors and PCR prior to next-generation sequencing. Reactions were performed with and without addition of each Fanzor RNP. The cleavage products were amplified in both 5′ and 3′ directions with F denoting 3′ direction (top panel) and R denoting the 5′ direction (bottom panel).

[0068] FIGS. 22A-22H shows re-arranged RuvC catalytic residues enable Fanzor TnpB on-target cleavage without collateral activity. FIG. 22A shows alignment of the RuvC domains of Fanzor and TnpB nucleases (TnpB2) showing the alternative glutamate in RuvC-II versus the canonical glutamate that is typically observed in TnpB nucleases (TnpB1). FIG. 22B shows a phylogenetic tree of TnpB and Fanzor proteins, showing TnpBs and Fanzor nucleases with rearranged catalytic sites. FIG. 22C shows predicted AlphaFold-2 structure of ApmFNuc and TvTnpB compared with the solved structures of Isdra2TnpB, and Uncas12f, showing that despite having a rearranged glutamate in the RuvC catalytic domain, the catalytic aspartates and glutamates form a putative active catalytic triad (red residues). Domains identified are highlighted in specific colors and the disordered N-terminal region is colored dark grey. FIG. 22D shows ApmFNuc RNP purified with either targeting (T) or non-targeting (NT) fRNAs as well as two catalytic dead ApmFNuc mutants (D324A and E467A) are tested on either a plasmid containing the correct target spacer DNA sequences or a scrambled DNA sequence containing the 5′ TAM TGGG. EDTA is added in lane 5 to quench the cleavage reaction. FIG. 22E shows a schematic of the Thermoplasma volcanium GSS1TnpB (TvTnpB) system, including the TnpB with a rearranged catalytic site, associated IS605 TnpA, and the left and right end elements (LE and RE). FIG. 22F shows a sequence logo of the TAM for TvTnpB. FIG. 22G shows biochemical validation of individual TAM preference by TvTnpB showing that the cleavage by TvTnpB is TAM (NTGAC) specific. TvTnpB RNP Is incubated with targets containing different 5′ TAMs and cleavage is visualized by gel electrophoresis. FIG. 22H shows ApmFNuc, TvTnpB, MmFNuc, DpFNuc, BaFNuc and Isdra2TnpB DNA collateral cleavage activity are measured using an ssDNA fluorescent reporter, showing a lack of collateral activity for nucleases with the rearranged glutamic acid in RuvC-II. DNase I is used as a positive nuclease control for collateral cleavage activity.

[0069] FIGS. 23A-23J show Fanzor nucleases contain nuclear localization signals (NLS) and have mammalian genome editing activity. FIG. 23A shows a schematic of ApmFNuc showing the split RuvC domain and the predicted N-terminal nuclear localization signal (NLS). NLS is colored in red and the catalytic triad is shown as red space filling residues inside the cyan RuvC domain on the AF2 predicted ApmFNuc structure. FIG. 23B shows confocal images of unmodified super-folder GFP (sfGFP), the predicted ApmFNuc NLS fused to sfGFP on either the N-terminal or C-terminal end, and sfGFP fused directly to the N-terminus of ApmFNuc transfected into HEK293FT cells and stained with SYTO Red nuclear stain. Images display the nuclear stain (red), GFP signal (green), and a merged image. Scale bar, 10 μm. FIG. 23C shows a quantitative analysis of 22 predicted Fanzor NLS sequences. Putative NLS sequences are fused to the N-terminus of sfGFP and the nuclear to cytoplasmic ratio of GFP fluorescence is quantitated (n=3, *, p<0.01; one-way ANOVA with false-discovery rate correction). FIG. 23D shows a schematic of Fanzor nucleases adapted for genome editing in mammalian cells. FIG. 23E shows the indel formation rates generated by MmFNuc across 7 selected endogenous loci. For each locus, two fRNA guide sequences were tested and a non-targeting guide is used as a negative control. FIG. 23F shows the indel formation rates generated by DpFNuc across 7 selected endogenous loci. For each locus, two fRNA guide sequences were tested and a non-targeting guide is used as a negative control. FIG. 23G shows insertion and deletion rates at each base inside the quantification window generated by MmFNuc at the CXCR4 genomic locus. FIG. 23H shows insertion and deletion rates at each base inside the quantification window generated by DpFNuc at the GRIN2b genomic locus. FIG. 23I shows representative indel reads formed by MmFNuc at the CXCR4 genomic locus. FIG. 23J shows representative indel reads formed by DpFNuc at the GRIN2b genomic locus.

[0070] FIGS. 24A-24D show genomic characteristics of Fanzor family members. FIG. 24A shows a histogram of the copy number of individual Fanzor members inside their respective genomes. FIG. 24B shows a phylogenetic tree of Fanzors and TnpBs with the domain predictions of nearby proteins marked as a ring (the nearest 5 genes downstream and upstream). Previously discovered Fanzors are marked in the outer ring (Bao et al. 2013). FIG. 24C shows alignment of FanzorI proteins with closely related TnpBs. FIG. 24D shows alignment of Fanzor 2 proteins with closely related TnpBs.

[0071] FIGS. 25A-25D show Fanzor intron characterization. FIG. 25A shows a phylogenetic tree of Fanzors and TnpBs with rings to show the host superkingdom, phylum, and intron density of the Fanzor proteins. FIG. 25B shows a scatterplot of the intron density of the Fanzor proteins along with the mean intron density of their host genomes. Fanzor proteins are colored according to their family designations. FIG. 25C shows a scatterplot of the mean intron densities of the Fanzor proteins in a genome along with the mean intron density of their host genomes. FIG. 25D shows a histogram of the standard deviation of intron densities within 70% similarity clusters of Fanzor proteins.

[0072] FIGS. 26A-26G show locus characteristics of Fanzor family members. FIG. 26A shows the frequency of predicted associated transposons nearby Fanzor (within +/−10 kb) per transposon family type. FIG. 26B shows the frequency of the top occurring nearby protein domains within 5 genes upstream or downstream of the Fanzor MGE. FIG. 26C shows locus schematics of different Fanzor1 nucleases and their associated transposons. IRL marks the left inverted repeat and LRR marks the right inverted repeat. FIG. 26D shows locus schematics of different Fanzor2 nucleases and their associated transposons. FIG. 26E shows a comparison of predicted flanking non-coding conservation lengths at the 5′ end of the MGEs of IscB, TnpB, and each Fanzor family. FIG. 26F shows a comparison of predicting flanking non-coding conservation lengths at the 3′ end of the MGEs of IscB, TnpB, and each Fanzor family. FIG. 26G shows the conserved secondary structure of fRNAs between the different copies of the ApmFNuc family. Shaded gray area corresponds to conserved sequence not present in the mature fRNA, potentially removed by RNase processing (cut site designated by blue triangle). FIGS. 27A-27C show purification of ApmFNuc RNPs. FIG. 27A shows a protein gel of flowthrough and eluent of ApmFNuc products during gravity flow strep-bead purifications prior to loading of FPLC. Red square denotes the desired protein product. FIG. 27B shows FPLC traces of ApmFNuc purified with its fRNA and protein gels showing each fraciton's protein products with the desired protein product that was pooled labeled with red squares. FIG. 27C shows FPLC traces of ApmFNuc purified without its fRNA and protein gels showing no RNP product in all observed fractions.

[0073] FIGS. 28A-28B shows characterization of eukaryotic Fanzor nucleases. FIG. 28A shows alignment and domain annotation of three eukaryotic Fanzor nucleases (DpFNuc, MmFNuc, and BaFNuc). RE and LE elements are determined by conservation dropoff between alignments of different copies in the genome. FIG. 28B shows secondary structure prediction of fRNAs associated with DpFNuc, MmFNuc, and BaFNuc determined by small RNA sequencing of the locus. Blue shaded regions denotes stem loops and multi-stem loops region in the fRNAs. FIGS. 29A-29I shows characterization of Cr-1FNuc and its fRNA. FIG. 29A shows a schematic of the Chlamydomonas reinhardtii Fanzor1 system (Cr-1FNuc), including the 5′ asymmetrical terminal inverted repeats (ATIR), 3′ ATIR, 5′ target site duplications (TSD), 3′ TSD, and the mRNA and coding sequences for Cr-1FNuc. The mRNA track shows the processed mRNA transcripts relative to the genome and the CDS track shows the ORF coding sequences relative to the genome. FIG. 29B shows alignment of all six copies of Fanzor systems inside the annotated parts of the C. reinhardtii genome showing highly conserved 3′ ends of the CrFNuc proteins along with their fRNAs and variable 5′ end compositions of the proteins. The blue track shows the processed mRNA transcripts relative to the genome and the gray track shows the ORF coding sequences relative to the genome. FIG. 29C shows small RNA sequencing traces mapped ontop all 6 copies of RuvC-containing Fanzor systems in the C. reinhardtii genome. FIG. 29D shows small RNA sequencing of the Chlamydomonas reinhardtii organism showing expression of a noncoding RNA species at the 3′ end of the Cr-1FNuc locus that extends beyond the ATIR into the TSD. FIG. 29E shows secondary structure of Cr-1FNuc non-coding RNA from FIG. 21J, showing significant folding of the fRNA. FIG. 29F shows conserved secondary structure of the six CrFNuc fRNA copies in the genome. FIG. 29G shows alignment of the 26 full or partial copies of Fanzor MGEs inside the C. reinhardtii genome at their 3′ ends. FIG. 29H shows FPLC traces of Cr-1FNuc purified either with or without its fRNA, showing that the RNP complex is only stable when the correct fRNA is expressed and present. The Cr-1FNuc peak in the FPLC trace is labeled. FIG. 29I shows a protein gel of elution fractions of the Cr-1 FNuc with the desired protein product that was pooled labeled with a red square.

[0074] FIGS. 30A-30G show further characterization of ApmFNuc nuclease activity. FIG. 30A shows predicted AlphaFold-2 structures of MmFNuc, DpFNuc, and BaFNuc showing that despite having a rearranged glutamate in the RuvC catalytic domain, the catalytic aspartates and glutamates form a putative active catalytic triad (red resides). FIG. 30B shows alignment of ApmFNuc RuvC domain with Isdra2TnpB RuvC domain to nominate the catalytic RuvC-1 aspartic acid (D324) and the RuvC-II glutamic acid (E467A). FIG. 30C shows FPLC traces of ApmFNuc E467A mutant purified with its fRNA and protein gels showing each fraciton's protein products with the desired protein product that was pooled shown with a red square. FIG. 30D shows FPLC traces of ApmFNuc D324A mutant purified with its fRNA and protein gels showing each fraction's protein products with the desired protein product that was pooled shown with a red square. FIG. 30E shows native TBE gel of nuclease activity of ApmFNuc at temperatures from 10 to 65 degrees Celsius. Reactions were carried out by incubating wild-type ApmFNuc RNP on a plasmid with the TGGG TAM 5′ adjacent to the 21 nt spacer target. Cleavage was visualized by gel electrophoresis. FIG. 30F shows a native TBE gel showing nuclease activity of ApmFNuc with different cations supplemented into the cleavage buffer. Reactions were carried out by incubating wild-type ApmFNuc RNP on a plasmid with the TGGG TAM 5′ adjacent to the 21 nt spacer target. Cleavage was visualized by gel electrophoresis. FIG. 30G shows a native TBE gel showing nuclease activity of ApmFNuc with different NaCl salt concentrations supplemented into the cleavage reaction buffer. Reactions were carried out by incubating wild-type ApmFNuc RNP on a plasmid with the TGGG TAM 5′ adjacent to the 21 nt spacer target. Cleavage was visualized by gel electrophoresis.

[0075] FIGS. 31A-31C show purification of Isdra2TnpB and TbTnpB. FIG. 31A shows a protein gel showing flowthrough and eluent fractions of Isdra2TnpB and TbTnpB products during gravity flow strep-bead purifications. The desired protein product is shown via a red square. FIG. 31B shows FPLC taces of TvTnpB purified with its ωRNA and protein gels showing each fraction's protein products with the desired protein product that was pooled shown with a red square. FIG. 31C shows FPLC traces of Isdra2TnpB purified without its ωRNA and protein gels showing each fraction's protein products with the desired protein product that was pooled shown with a red square.

[0076] FIGS. 32A-32F show characterization of TvTnpB and collateral activity comparisons. FIG. 32A shows expression of the non-coding RNA for TvTnpB, revealing a specific non-coding RNA species that associates with the TvTnpB protein extending from the ORF to outside the RE element similar to Isdra2TnpB. FIG. 32B shows TvTnpB DNA cleavage of a 21 nt target containing a 5′ ATGAC TAM at temperatures ranging from 30 degrees Celsius to 90 degrees Celsius, showing optimal cleavage reaction temperature near 50 degrees for TvTnpB. FIG. 32C shows next-generation sequencing mapping of the TAMP cleavage by TvTnpB via adaptor ligation. Reads were aligned to the TAM target to map cleavage locations. Two separate reactions were ran in parallel with and without addition of TvTnpB RNP. The cleavage products were amplified in both 5′ and 3′ directions with F denoting 3′ direction and R denoting the 5′ direction. FIG. 32D shows Sanger sequencing traces of TvTnpB cleavage on a 5′ CTGAC TAM target, showing cleavage at the end of the target. FIG. 32E shows on target cleavage activity of TvTnpB, lsdra2TnpB, MmFNuc, BaFNuc, DpFNuc, and ApmFNuc. Nucleases were incubated with plasmids containing their preferred TAM site and on-target guide RNA sequences for 1 hour of cleavage and subsequently visualized on a native TBE gel for comparison of on-target cleavage activity. FIG. 32F shows fluorescent signal from RNase alert reporter detection of RNA collateral cleavage activity from RNase A, TvTnpB, Isdra2TnpB, MmFNuc, BaFNuc, DpFNuc, and ApmFNuc incubated with their target DNA sequences for 1 hour. The signal is normalized to a no DNA target condition.

[0077] FIGS. 33A-33E show characterization of Fanzor nuclear localization signals. FIG. 33A shows a probability distribution of potential NLS elements across the ApmFNuc protein sequence as predicted by NLStradamus (Nguyen Ba et al. 2009). The default cutoff at 0.6 is used to call significant NLS like elements, revealing one N-terminal NLS and one internal NLS. FIG. 33B shows a phylogenetic tree of Fanzor nucleases and TnpB orthologs, with rings marking the host phyla and family designations of the Fanzor orthologs and which proteins were predicted to have an NLS sequences. FIG. 33C shows a bar plot depicting NLS predictions rates on a set of known human cytosolic proteins (negative control), a set of known NLS containing proteins (positive control), and all Fanzor nucleases. FIG. 33D shows per family breakdown of NLS containing Fanzor predictions for Fanzor families 1-5. FIG. 33E shows confocal images of 22 different Fanzor nuclease N-terminal NLS predictions fused to sfGFP and transfected into HEK293FT cells for visualization of nuclear localization of the sfGFP. DAPI is sued to stain the nucleus and images are shown with the GFP and DAPI channel signals merged. Scale bar, 20 μm.

[0078] FIGS. 34A-34D show a schematic of engineered fRNA scaffolds for mammalian genome editing. fRNA secondary structures are predicted by viennaRNA fold for FIG. 34A ApmFNuc, FIG. 34B BaFNuc, FIG. 34C DpFNuc, and FIG. 34D MmFNuc. Mutated residues are labeled in red color and the arrows pointing to each base denote the nucleic acid mutations introduced at the specific position.

[0079] FIGS. 35A-35F show characterization of Fanzor nuclease plasmid reporter editing in HEK293FT cells. FIG. 35A shows an ApmFNuc mammalian expression vector and its fRNA U6 expression plasmid are co-transfected into HEK293FT cells targeting a luciferase plasmid reporter. Different mutations on the wild-type fRNA scaffold are introduced as shown in FIGS. 34A-34D to eliminate poly-U stretches in the fRNA. Indel frequency is measured by next-generation sequencing with targeted primers on the plasmid reporter. FIG. 35B shows representative indel alleles from the M2+M5 scaffold targeting guide condition on the luceriferase reporter, showing deletions centered around the 3′ end of the guide target. FIG. 35C show indel frequency on the luciferase plasmid reporter for BaFNuc, MmFNuc, and DpFNuc with different engineered fRNA scaffolds. FIG. 35D shows representative indel alleles for MmFNuc with the M1 fRNA scaffold targeting the luciferase reporter plasmid, showing deletions centered around the 3′ end of the guide target. FIG. 35E shows quantification of insertion, deletion, and combined indel frequencies generated on the plasmid reporter by DpFNuc with the (M1+M3) scaffold targeting guide condition. Rates are shown per base throughout the quantification window of the amplicon. FIG. 35F shows quantification of insertion, deletion and combined indel frequencies generated on the plasmid reporter by MmFNuc with the targeting guide condition. Rates are shown per base throughout the quantification window of the amplicon.

[0080] FIGS. 36A-36C show characterization of KnFNuc Fanzor1 nuclease genomic editing in HEK293FT cells. FIG. 36A shows a KnFNuc mammalian expression vector and its fRNA U6 expression plasmid are cotransfected into HEK293FT cells targeting 6 different genomic targets. Indel frequency is measured by next-generation sequencing with targeted primers on the target. FIG. 36B shows quantification of insertion and deletion frequencies generated on the DYNC1H1 genomic target by KnFNuc. Rates are shown per base throughout the quantification window of the amplicon. FIG. 36C shows representative indel alleles showing deletions and insertions centered around the 3′ end of the guide target.

### DETAILED DESCRIPTION

[0081] RNA-programmed nucleases serve diverse functions in prokaryotic systems, yet their prevalence and role in eukaryotic genomes are unclear. Searching for putative RNA-guided nucleases in genomes of diverse eukaryotes and their viruses, the present disclosure identifies numerous predicted nucleases homologous to the prokaryotic family of RNA-guided TnpB nucleases. Reconstruction of the evolutionary trajectory of these nucleases, which are referred to herein as Fanzor(s), uncovers at least two potential routes for their diversification. Surprisingly, biochemical and cellular evidence described herein shows that Fanzor families, which include the previously discovered Fanzor systems, employ non-coding RNAs encoded adjacent to the nuclease for RNA-guided cleavage of double-stranded DNA. Fanzor nucleases contain a re-arranged catalytic site inside the split RuvC domain, similar to a distinct subset of TnpB ancestors, yet lack collateral cleavage activity. In their adaptation and spread in eukaryotic lineages, Fanzor nucleases acquired N-terminal nuclear localization signals necessary for nuclear translocation, and Fanzor ORFs acquired introns, suggesting extensive spread and evolution within eukaryotes and their viruses. The present disclosure provides that Fanzor systems can be harnessed for genome editing in human cells, highlighting the potential of these widespread eukaryotic RNA-guided nucleases for biotechnology applications.

[0082] RNA-guided nucleases are prominent in prokaryotes, with roles in both adaptive immunity, such as CRISPR systems, and putative RNA-guided transposition or mobility, such as OMEGA systems (Karevelis et al. 2021; Altae-Tran et al. 2021). It is shown herein that the previously uncharacterized eukaryotic homologs of the OMEGA effector TnpB, previously termed Fanzors, are RNA-guided, programmable DNA nucleases. Additionally, the metagenomic analysis described herein permitted discovery of thousands of additional RuvC-containing nucleases in eukaryotes and their viruses, which are collectively referred to herein Fanzor systems (Table 1 and Table 4). As used herein, the term “Fanzor nuclease(s)” is interchangeable with “Fanzor polypeptide(s)” and “Fanzor protein(s)”.

[0083] The phylogenetic analysis shown herein confirmed that the two previously identified families of Fanzors (Fanzors1 and Fanzor2) are distantly related. The Fanzor1 family, as well as diverse other Fanzor families, are present in numerous eukaryotes, including animals, plants, fungi and diverse protists whereas the Fanzor2 family is more narrowly represented in giant viruses of the family Mimiviridae. These two subsets of Fanzor systems most likely entered eukaryotes via distinct mechanisms in separate events. From evolutionary distances of different Fanzor families (FIG. 6A-6B), it is apparent that Fanzor systems in families 1-4, containing Fanzor1 proteins, likely evolved from an endosymbiotic pathway, with ancestral TnpB proteins driving multiple seeding events in different common ancestors, and that family 5 Fanzor systems, containing Fanzor2 proteins, likely originated from phagocytosis of TnpB-containing bacteria by amoeba and subsequent spread via amoeba-trophic giant viruses (Boyer et al. 2009). Notably, during their evolution in eukaryotic genomes, Fanzor nucleases acquired introns at densities that not significantly lower than mean intron densities in their host genes, similar to nuclear genes acquired from endosymbiotic organelles (Basu et al. 2008; Csuros et al. 2011). Additionally, many of these nucleases acquired N-terminal NLS, enabling nuclear invasion for genomic access. These independent evolutionary pathways likely contributed to the wide range of observed intron densities, NLS signals, N-terminal domains, and associated transposon systems across Fanzor diversity.

[0084] Fanzor nuclease association with transposases reported herein suggests a role for their RNA-guided nuclease activity in transposition. This role could be performed through a variety of mechanisms, including 1) precise excision of the transposon from the genome via self-homing, 2) passive homing of the transposon to new alleles via leveraging nuclease-induced DSBs and DNA repair mechanisms, such as homologous recombination, and 3) active homing of the transposon via RNA guided DNA binding or cleavage for direct targeting of transposase activity. The latter mechanism would be analogous to the CRISPR-associated Tn7-like transposons (CASTs) that undergo RNA-guided transposition mediated by CRISPR effectors that were captured by these transposons on multiple occasions, in conjunction with transposase components (Strecker et al. 2019; Klompe et al. 2019). Furthermore, given that Fanzor-containing transposons harbor associated genes with diverse functions, and different groups of Fanzor contain different N-terminal domains, Fanzor might perform additional functions that remain to be investigated.

[0085] The biochemical characterization of the Fanzor nucleases of the present disclosure revealed both similarities with the homologous TnpB and CRISPR-Cas12 nucleases and several important distinctions. Similar to TnpB and Cas12, Fanzor nucleases generate double-stranded breaks through a single RuvC domain and cleave the target DNA near the 3′ end of the target. However, unlike TnpB and Cas12 enzymes, which have strong collateral activity against free DNA and RNA species nearby, Fanzor proteins have a rearranged glutamic acid and do not have collateral activity. Accordingly, TnpB systems with similarly mutated and rearranged catalytic sites also do not display collateral activity, despite having targeted double-stranded DNA cleavage activity. As opposed to the more T rich sequence constraints of TnpB and Cas12 nucleases, the Fanzor TAM preference is diverse, with GC rich preference for Fanzor2 like nucleases. Importantly, the TAM preference seems to align with the insertion site sequence supporting the role of Fanzor systems in transposition. Finally, the fRNA of Fanzor overlaps with the transposon IRR, much like TnpB's ωRNA, but it extends farther downstream of the Fanzor ORF, in contrast to the ωRNAs that ends within the 3′ regions of the TnpB ORF as the noncoding region is significantly longer in the Fanzor MGE. Thus, although the Fanzor nucleases originated from TnpB systems, the properties of these eukaryotic RNA-guided nucleases are surprisingly and notably different from those of the prokaryotic ones.

[0086] It is demonstrated herein that Fanzor nucleases can be applied for genome editing with detectable cleavage and indel generation activity in human cells. While the Fanzor nucleases are compact (˜500 amino acids), which could facilitate delivery, and their eukaryotic origins might help to reduce the immunogenicity of these nucleases in humans, additional engineering is needed to improve the activity of these systems in human cells, as has been accomplished for other miniature nucleases like Cas12f systems. See, e.g., Bigelyte et al. 2021; Wu et al. 2021; Xu et al. 2021; Kim et al. 2021. The broad distribution of Fanzor nucleases among diverse eukaryotic lineages and associated viruses suggests many more currently unknown RNA-guided systems could exist in eukaryotes, serving as a rich resource for future characterization and development of new biotechnologies.

[0087] Unless defined otherwise, technical and scientific terms used herein have the same meaning as commonly understood by one of ordinary skill in the art to which this disclosure pertains. Definitions of common terms and techniques in molecular biology may be found in Molecular Cloning: A Laboratory Manual, 2nd edition (1989) (Sambrook, Fritsch, and Maniatis); Molecular Cloning: A Laboratory Manual, 4th edition (2012) (Green and Sambrook); Current Protocols in Molecular Biology (1987) (F. M. Ausubel et al. eds.); the series Methods in Enzymology (Academic Press, Inc.): PCR 2: A Practical Approach (1995) (M. J. MacPherson, B. D. Hames, and G. R. Taylor eds.): Antibodies, A Laboratory Manual (1988) (Harlow and Lane, eds.): Antibodies A Laboratory Manual, 2nd edition 2013 (E. A. Greenfield ed.); Animal Cell Culture (1987) (R. I. Freshney, ed.); Benjamin Lewin, Genes IX, published by Jones and Bartlet, 2008 (ISBN 0763752223); Kendrew et al. (eds.), The Encyclopedia of Molecular Biology, published by Blackwell Science Ltd., 1994 (ISBN 0632021829); Robert A. Meyers (ed.), Molecular Biology and Biotechnology: a Comprehensive Desk Reference, published by VCH Publishers, Inc., 1995 (ISBN 9780471185710); Singleton et al., Dictionary of Microbiology and Molecular Biology 2nd ed., J. Wiley & Sons (New York, N.Y. 1994), March, Advanced Organic Chemistry Reactions, Mechanisms and Structure 4th ed., John Wiley & Sons (New York, N.Y. 1992); and Marten H. Hofker and Jan van Deursen, Transgenic Mouse Methods and Protocols, 2nd edition (2011).

[0088] As used herein, the singular forms “a”, “an,” and “the” include both singular and plural referents unless the context clearly dictates otherwise. Thus, for example, reference to “a cell” includes a plurality of such cells.

[0089] As used herein, the term “optional” or “optionally” means that the subsequent described event, circumstance or substituent may or may not occur, and that the description includes instances where the event or circumstance occurs and instances where it does not.

[0090] The recitation of numerical ranges by endpoints includes all numbers and fractions subsumed within the respective ranges, as well as the recited endpoints.

[0091] As used herein, the term “about” or “approximately” refers to a measurable value such as a parameter, an amount, a temporal duration, and the like, are meant to encompass variations of and from the specified value, such as variations of +/−10% or less, +/−5% or less, +/−1% or less, +/−0.5% or less, and +/−0.1% or less of and from the specified value, insofar such variations are appropriate to perform in the disclosure. It is to be understood that the value to which the modifier “about” or “approximately” refers is itself also specifically, and preferably, disclosed.

[0092] In some aspects, the present disclosure relates to non-naturally occurring, engineered compositions comprising a Fanzor polypeptide encoding a Fanzor nuclease. Fanzor polypeptides comprise a single RuvC domain. The single RuvC domain is further comprised of three subdomains: a RuvC-I subdomain, a RuvC-II subdomain, and a RuvC-III subdomain. In some embodiments, the RuvC-II subdomain of a Fanzor polypeptide is a rearranged RuvC-II subdomain. As used herein, a “rearranged RuvC-II subdomain” refers to a domain within a RuvC-containing nuclease (e.g., a Fanzor nuclease) further comprising a loss of the canonical glutamic acid in the RuvC-II subdomain and an alternative conserved glutamate approximately residues away. As described herein, all Fanzor members and the rearranged TnpB orthologs, contained an alternative conserved glutamate approximately 45 residues away (FIG. 8A-8B). In some embodiments, the glutamic acid in the “rearranged RuvC-II subdomain” substitutes the role of canonical one in the wildtype RuvC-II subdomain, to allow for effective cleavage activity. In some embodiments, a Fanzor comprising a rearranged catalytic site (e.g., a rearranged RuvC-II subdomain) results in reduced collateral cleavage activity of the enzyme. As used herein, “collateral cleavage activity” or “collateral activity” are used interchangeably to describe nuclease activity (e.g., cleavage) of non-targeted DNA(s) and/or RNA(s). In some embodiments, a Fanzor nuclease lacks collateral DNA cleavage activity (e.g., lacks nuclease activity of non-targeted DNA). In some embodiments, a Fanzor nuclease lacks collateral RNA cleavage activity (e.g., lacks nuclease activity of non-targeted RNA). In some embodiments, a Fanzor nuclease lacks collateral DNA and RNA cleavage activity (e.g., lacks nuclease activity of non-targeted DNA and RNA). The presence or absence of collateral cleavage activity can be measured (e.g., profiled), for example, by co-incubating the Fanzor nuclease and fRNA complexes with their cognate targets along with either ssRNA or ssDNA cleavage reporters, single-stranded nucleic acid substrates functionalized with a quencher and fluorophore that become fluorescent upon nucleolytic cleavage. Other techniques known in the art for measuring collateral cleavage activity are also contemplated for use herein.

[0093] In some embodiments, a Fanzor polypeptide comprises an amino acid sequence identified by any one of the sequences provided herein (see e.g., Table 1, SEQ ID NOs: 1, 95-5029, and Table 4, SEQ ID NOs: 1-3, 5-7, and 9-16, or having an amino acid sequence at least at least 50%, at least 55%, at least 60%, at least 65%, at least 70%, at least 75%, at least 80%, at least 85%, at least 90%, at least 95%, at least 99%, or 100% sequence identity (including all values in between) with a Fanzor polypeptide listed in Table 1 or Table 4 (SEQ ID NOs: 1-3, 5-7, 9-16 and 95-5029).

[0094] As used herein, the term “percent identity” refers to a relationship between two nucleic acid sequences or two amino acid sequences, as determined by sequence comparison (alignment). In some embodiments, identity is determined across the entire length of a sequence. In some embodiments, identity is determined over a region of a sequence.

[0095] Identity of sequences can be readily calculated by those having ordinary skill in the art. In some embodiments, the percent identity of two sequences is determined using the algorithm of Karlin and Altschul 1990 Proc. Natl. Acad. Sci. U.S.A. 87:2264-68, modified as in Karlin and Altschul 1993 Proc. Natl. Acad. Sci. U.S.A. 90:5873-77. This algorithm is incorporated into the NBLAST® and XBLAST® programs (version 2.0) of Altschul et al. 1990 J. Mol. Biol. 215:403-10. BLAST® protein searches can be performed, for example, with the XBLAST program, score=50, wordlength=3 to obtain amino acid sequences homologous to the protein molecules of the invention. Where gaps exist between two sequences, Gapped BLAST® can be utilized, for example, as described in Altschul et al. 1997 Nucleic Acids Res. 25(17):3389-3402. When utilizing BLAST® and Gapped BLAST® programs, the default parameters of the respective programs (e.g., XBLAST® and NBLAST®) can be used, or the parameters can be adjusted appropriately as would be understood by one of ordinary skill in the art.

[0096] In some embodiments, a Fanzor polypeptide comprises about 200 to about 2212 amino acids (including all values in between). In some embodiments, a Fanzor polypeptide comprises about 200 amino acids. In some embodiments, a Fanzor polypeptide comprises about 500 amino acids. In some embodiments, a Fanzor polypeptide comprises about 1000 amino acids. In some embodiments, a Fanzor polypeptide comprises about 1500 amino acids. In some embodiments, a Fanzor polypeptide comprises about 2000 amino acids. In some embodiments, a Fanzor polypeptide comprises about 2212 amino acids.

[0097] In some embodiments, loci surrounding a nucleotide sequence encoding a Fanzor nuclease comprises a conserved non-coding sequence. In some embodiments, the conserved non-coding sequence extends at least 20, at least 30, at least 40, at least 50, at least 60, at least 70, at least 80, at least 90, at least 100, at least 110, at least 120, at least 130, at least 140, at least 150, at least 160, at least 170, at least 180, at least 190, or at least 200 base pairs (including all values in between) past the end of a Fanzor open reading frame (ORF).

[0098] In some embodiments, directed evolution may be used to design modified Fanzor proteins capable of genome editing. In some embodiments, the directed evolution is performed using phage-assisted continuous evolution (PACE). In some embodiments, the directed evolution is performed using phage-assisted non-continuous evolution (PANCE). PACE technology has been described, for example, in International PCT Application, PCT/US 2009/056194, filed Sep. 8, 2009, published as WO 2010/028347 on Mar. 11, 2010; International PCT Application, PCT/US2011/066747, filed Dec. 22, 2011, published as WO 2012/088381 on Jun. 28, 2012; U.S. Pat. No. 9,023,594, issued May 5, 2015; U.S. Pat. No. 9,771,574, issued Sep. 26, 2017; U.S. Pat. No. 9,394,537, issued Jul. 19, 2016; International PCT Application, PCT/US2015/012022, filed Jan. 20, 2015, published as WO 2015/134121 on Sep. 11, 2015; U.S. Pat. No. 10,179,911, issued Jan. 15, 2019. U.S. Pat. No. 10,179,911, issued Jan. 15, 2019; International PCT Application, PCT/US2016/027795, filed Apr. 15, 2016, published as WO 2016/168631 on Oct. 20, 2016, and International Patent Publication WO 2019/023680, published Jan. 31, 2019, the entire contents of each of which are incorporated herein by reference. In some embodiments, directed evolution is implemented using a protein folding neural network, e.g., based on a published approach or on software such as AlphaFold2. In some embodiments, the Fanzor proteins obtained by methods of directed evolution are physically synthesized.

[0099] In some embodiments, the modified Fanzor protein has improved editing efficiency relative to a control Fanzor protein. In some embodiments, the improved editing efficiency is detected in mammalian cells. In some embodiments, the improved editing efficiency can be measured by an indel formation rate. In some embodiments, the indel formation rate is at least 2%, at least 3%, at least 4%, at least 5%, at least 6%, at least 7%, at least 8%, at least 9%, at least 10%, at least 11%, at least 12%, at least 13%, at least 14%, at least 15%, at least 20%, at least 25%, at least 30%, at least 35%, at least 40%, at least 45%, at least 50%, at least 55%, at least 60%, at least 65%, at least 70%, at least 75%, at least 80%, at least 85%, at least 90%, at least 95%, or at least 99%, including all values in between. In some embodiments, the modified Fanzor protein comprises one or more mutations of amino acid residues in the catalytic core (e.g., the catalytic RuvC domains) and/or of amino acid residues that contact the polynucleotide target relative to the wild type Fanzor protein. Non-limiting examples of mutations include one or more amino acid residues in a modified Fanzor protein mutated to arginine, lysine, and/or histidine relative to a wild type Fanzor protein. In some embodiments, the modified Fanzor protein comprises a mutation to arginine relative to the wild type Fanzor protein. In other embodiments, the modified Fanzor protein comprises one or more mutations to arginine relative to the wild type Fanzor protein. In some embodiments, the modified Fanzor protein comprises a mutation to lysine relative to the wild type Fanzor protein. In other embodiments, the modified Fanzor protein comprises one or more mutations to lysine relative to the wild type Fanzor protein. In some embodiments, the modified Fanzor protein comprises a mutation to histidine relative to the wild type Fanzor protein. In other embodiments, the modified Fanzor protein comprises one or more mutations to histidine relative to the wild type Fanzor protein. In some embodiments, the modified Fanzor protein contains one or more mutations to arginine, lysine, and/or histidine relative to the wild type Fanzor protein.

[0100] In some embodiments, the conserved non-coding sequence encodes a nuclease-associated RNA. In some embodiments, the nuclease-associated RNA is a Fanzor (“fRNA”) molecule. In some embodiments, the fRNA molecule is capable of directing binding and cleavage activity (e.g., guiding) of a Fanzor nuclease to a specific sequence (e.g., a target polypeptide sequence). In some embodiments, a fRNA is a guide RNA or gRNA. In some embodiments, the fRNA molecule comprises a scaffold. In some embodiments, the scaffold comprises about 21 to about 1487 nucleotides (including all values in between). In some embodiments, the scaffold comprises about 21 nucleotides. In some embodiments, the scaffold comprises about 50 nucleotides. In some embodiments, the scaffold comprises about 100 nucleotides. In some embodiments, the scaffold comprises about 150 nucleotides. In some embodiments, the scaffold comprises about 200 nucleotides. In some embodiments, the scaffold comprises about 250 nucleotides. In some embodiments, the scaffold comprises about 300 nucleotides. In some embodiments, the scaffold comprises about 350 nucleotides. In some embodiments, the scaffold comprises about 400 nucleotides. In some embodiments, the scaffold comprises about 450 nucleotides. In some embodiments, the scaffold comprises about 500 nucleotides. In some embodiments, the scaffold comprises about 550 nucleotides. In some embodiments, the scaffold comprises about 600 nucleotides. In some embodiments, the scaffold comprises about 650 nucleotides. In some embodiments, the scaffold comprises about 700 nucleotides. In some embodiments, the scaffold comprises about 750 nucleotides. In some embodiments, the scaffold comprises about 800 nucleotides. In some embodiments, the scaffold comprises about 850 nucleotides. In some embodiments, the scaffold comprises about 900 nucleotides. In some embodiments, the scaffold comprises about 950 nucleotides. In some embodiments, the scaffold comprises about 1000 nucleotides. In some embodiments, the scaffold comprises about 1050 nucleotides. In some embodiments, the scaffold comprises about 1150 nucleotides. In some embodiments, the scaffold comprises about 1200 nucleotides. In some embodiments, the scaffold comprises about 1250 nucleotides. In some embodiments, the scaffold comprises about 1300 nucleotides. In some embodiments, the scaffold comprises about 1350 nucleotides. In some embodiments, the scaffold comprises about 1400 nucleotides. In some embodiments, the scaffold comprises about 1487 nucleotides.

[0101] In some embodiments, the fRNA molecule comprises a reprogrammable target spacer sequence. In some embodiments, the reprogrammable target spacer sequence comprises about 12 to about 22 nucleotides (including all values inbetween). In some embodiments, the reprogrammable target spacer sequence comprises about 12 nucleotides. In some embodiments, the reprogrammable target spacer sequence comprises about 13 nucleotides. In some embodiments, the reprogrammable target spacer sequence comprises about 14 nucleotides. In some embodiments, the reprogrammable target spacer sequence comprises about 15 nucleotides. In some embodiments, the reprogrammable target spacer sequence comprises about 16 nucleotides. In some embodiments, the reprogrammable target spacer sequence comprises about 17 nucleotides. In some embodiments, the reprogrammable target spacer sequence comprises about 18 nucleotides. In some embodiments, the reprogrammable target spacer sequence comprises about 19 nucleotides. In some embodiments, the reprogrammable target spacer sequence comprises about 20 nucleotides. In some embodiments, the reprogrammable target spacer sequence comprises about 21 nucleotides. In some embodiments, the reprogrammable target spacer sequence comprises about 22 nucleotides.

[0102] In some embodiments, the fRNA molecule comprises a scaffold and a reprogrammable target spacer sequence. In some embodiments, the fRNA molecule comprises a scaffold about 21 to about 1487 nucleotides and a reprogrammable target spacer sequence comprises about 12 to about 22 nucleotides.

[0103] In some embodiments, the fRNA molecule is capable of forming a complex with the Fanzor polypeptide (e.g. a “Fanzor complex”) and directing the Fanzor polypeptide to a target polynucleotide sequence. The target polynucleotide of a complex (e.g., a Fanzor complex) can be any polynucleotide endogenous or exogenous to the eukaryotic cell. For example, the target polynucleotide can be a polynucleotide residing in the nucleus of the eukaryotic cell. The target polynucleotide can be a sequence coding a gene product (e.g., a protein) or a non-coding sequence (e.g., a regulatory polynucleotide or a junk DNA). In some embodiments, the complex (e.g., a Fanzor complex) binds a target adjacent motif (TAM) sequence (e.g., a short sequence recognized by the complex). In some embodiments, the complex (e.g., a Fanzor complex) binds a TAM sequence 5′ of the target polynucleotide sequence. In some embodiments, the TAM sequence comprises GGG. In some embodiments, the TAM sequence comprises TTTT. In some embodiments, the TAM sequence comprises TAT. In some embodiments, the TAM sequence comprises TTG. In some embodiments, the TAM sequence comprises TTTA. In some embodiments, the TAM sequence comprises TA. In some embodiments, the TAM sequence comprises TTA. In some embodiments, the TAM sequence comprises TGAC. A person of skill in the art would be able to identify further TAM sequences for use with a given Fanzor polypeptide. It is also contemplated herein that TAM interacting domain may be engineered by techniques known in the art to allow programming of specificity, improvement of target site P1 recognition fidelity, and increased the versatility of the Fanzor nuclease genome engineering platform described herein. It is further contemplated that Fanzor nuclease may be engineered to alter their TAM specificity.

[0104] Examples of target polynucleotide sequences include, but are not limited to, a sequence associated with a signaling biochemical pathway, e.g., a signaling biochemical pathway-associated gene or polynucleotide. Further non limiting examples of target polynucleotide sequences include a disease associated gene or polynucleotide. A “disease-associated” gene or polynucleotide refers to any gene or polynucleotide which is yielding transcription or translation products at an abnormal level or in an abnormal form in cells derived from a disease-affected tissues compared with tissues or cells of a non-disease control. It may be a gene that becomes expressed at an abnormally high level, it may be a gene that becomes expressed at an abnormally low level, where the altered expression correlates with the occurrence and/or progression of the disease. A disease-associated gene also refers to a gene possessing mutation(s) or genetic variation that is directly responsible or is in linkage disequilibrium with a gene(s) that is responsible for the etiology of a disease. The transcribed or translated products may be known or unknown, and may be at a normal or abnormal level.

[0105] In some embodiments, a Fanzor polypeptide in a Fanzor polypeptide. In some embodiments, the Fanzor polypeptide is a Fanzor1 polypeptide. In some embodiments, the Fanzor polypeptide is a Fanzor2 polypeptide. In some embodiments, the RNA molecule associated with a Fanzor polypeptide is a fRNA. In some embodiments, a fRNA molecule is a fRNA molecule.

[0106] As described herein, in some embodiments, a Fanzor polypeptide may comprise additional domains other than the RuvC domain. In some embodiments, a Fanzor polypeptide comprises a nuclear localization signal (NLS). In some embodiments, a Fanzor polypeptide comprises a helix-turn-helix (HTH) domain.

[0107] In some embodiments, one or more vectors may comprise a nucleic acid sequence encoding a polypeptide described herein (e.g., a Fanzor polypeptide). As such, aspects of the present disclosure relate to one or more vectors for the expression of (a) a nucleic acid sequence encoding a Fanzor polypeptide; and (b) a nucleic acid sequence encoding a fRNA molecule comprising a scaffold and a reprogrammable target spacer sequence. In some embodiments, a vector may comprise both (a) a nucleic acid sequence encoding a Fanzor polypeptide; and (b) a nucleic acid sequence encoding a fRNA molecule. In some embodiments, a vector may comprise a nucleic acid sequence encoding a Fanzor polypeptide; and a second vector may comprise a nucleic acid sequence encoding a fRNA molecule.

[0108] The term “vector” or “expression vector” or “construct” means any molecular vehicle, such as a plasmid, phage, transposon, recombinant viral genome, cosmid, chromosome, artificial chromosome, virus, viral particle, viral vector (e.g., lentiviral vector or AAV vector), virion, etc. which can transfer gene sequences (e.g., a nucleic acid encoding a Fanzor polypeptide and/or a nucleic acid sequence encoding a fRNA molecule) into a cell or between cells.

[0109] In some embodiments, the vector may be maintained in high levels in a cell using a selection method such as involving an antibiotic resistance gene. In some embodiments, the vector may comprise a partitioning sequence which ensures stable inheritance of the vector. In some embodiments, the vector is a high copy number vector. In some embodiments, the vector becomes integrated into the chromosome of a cell.

[0110] Generally, a vector is capable of replication when associated with the proper control elements. In general, the term “vector” refers to a nucleic acid molecule capable of transporting another nucleic acid to which it has been linked. Vectors include, but are not limited to, nucleic acid molecules that are single-stranded, double-stranded, or partially double-stranded; nucleic acid molecules that comprise one or more free ends, no free ends (e.g. circular); nucleic acid molecules that comprise DNA, RNA, or both; and other varieties of polynucleotides known in the art. One type of vector is a “plasmid,” which refers to a circular double stranded DNA loop into which additional DNA segments can be inserted, such as by standard molecular cloning techniques. Another type of vector is a viral vector, wherein virally-derived DNA or RNA sequences are present in the vector for packaging into a virus (e.g. retroviruses, replication defective retroviruses, adenoviruses, replication defective adenoviruses, and adeno-associated viruses (AAVs)). Viral vectors also include polynucleotides carried by a virus for transfection into a host cell. Certain vectors are capable of autonomous replication in a host cell into which they are introduced (e.g. bacterial vectors having a bacterial origin of replication and episomal mammalian vectors). Other vectors (e.g., non-episomal mammalian vectors) are integrated into the genome of a host cell upon introduction into the host cell, and thereby are replicated along with the host genome. Moreover, certain vectors are capable of directing the expression of genes to which they are operatively-linked. Such vectors are referred to herein as “expression vectors.” Common expression vectors of utility in recombinant DNA techniques are often in the form of plasmids.

[0111] Recombinant expression vectors can comprise a nucleic acid of the invention in a form suitable for expression of the nucleic acid in a host cell, which means that the recombinant expression vectors include one or more regulatory elements, which may be selected on the basis of the host cells to be used for expression, that is operatively-linked to the nucleic acid sequence to be expressed. Within a recombinant expression vector, “operably linked” is intended to mean that the nucleotide sequence of interest is linked to the regulatory elements) in a manner that allows for expression of the nucleotide sequence (e.g. in an in vilro transcription/translation system or in a host cell when the vector is introduced into the host cell). With regards to recombination and cloning methods, mention is made of U.S. patent application Ser. No. 10/815,730, published Sep. 2, 2004 as US 2004-0171156 A1, the contents of which are herein incorporated by reference in their entirety.

[0112] The vectors can include the regulatory elements, (e.g., promoters). The vectors can comprise Fanzor nuclease encoding sequences, and/or fRNA(s). In a single vector there can be a promoter for a Fanzor nuclease encoding sequence and an fRNA. In multiple vectors, there can be a first vector comprising a promoter for a Fanzor nuclease encoding sequence and a second vector comprising a promoter for a fRNA. A non-limiting example of a suitable vector is AAV, and a non-limiting example of a suitable promoter is a U6 promoter. Accordingly, from the knowledge in the art and the teachings in this disclosure the skilled person can readily make and use vectors), e.g., a single vector, expressing multiple RNAs or guides under the control or operatively or functionally linked to one or more promoters—especially as to the numbers of RNAs or guides discussed herein, without any undue experimentation.

[0113] The Fanzor nuclease encoding sequences and/or fRNA, can be functionally or operatively linked to regulatory elements. In some embodiments, the regulatory elements drive expression of the Fanzor nuclease and the fRNA. Promoters can be constitutive promoters and/or conditional promoters and/or inducible promoters and/or tissue specific promoters. Exemplary promoters include RNA polymerases, pol I, pol H, pol U1, T7, U6, HI, retroviral Rous sarcoma virus (RSV) LTR promoter, the cytomegalovirus (CMV) promoter, the SV40 promoter, the dihydrofolate reductase promoter, the β-actin promoter, the phosphoglycerol kinase (PGK) promoter, the EFla promoter, the U6 promoter, and the pCAG promoter. An advantageous promoter is the pCAG promoter. Other promoters known in the art are also contemplated for use herein.

[0114] In addition to a Fanzor polypeptide and a nucleic acid sequence encoding an fRNA molecule, compositions of the present disclosure may comprise additional components useful for gene-editing. As non-limiting examples, compositions of the present disclosure may comprise one or more of a donor template (e.g. exogenous template) comprising a donor sequence, a linear insert sequence, a reverse transcriptase, a recombinase, a transposase, an integrase, a deaminase, a transcriptional activator, a transcriptional repressor, and/or a transposon. In some embodiments, a composition of the present disclosure comprises a donor template (e.g., exogenous template) comprising a donor sequence. In some embodiments, the donor template comprising a donor sequence is optionally for use in homology-directed repair (HDR). In some embodiments, compositions optionally for use in homology-directed repair further comprises introducing specific sequences or genes at targeted genomic locations. Reference is made to PCT Publication No. WO2008/021207, the entire contents of which is incorporated herein by reference. In some embodiments, a composition of the present disclosure comprises a linear insert sequence. A linear insert sequence as described herein comprises, for example, DNA, RNA, or mRNA. In some embodiments, a linear insert sequence is DNA. In some embodiments, a linear insert sequence is RNA. In some embodiments, a linear insert sequence is mRNA. In some embodiments, a linear insert sequence is comprised by a viral vector, optionally wherein the viral vector is Adeno-associated viral (AAV) vector, a virus, optionally wherein the virus is an Adenovirus, a lentivirus, a herpes simplex virus; and/or a lipid nanoparticle (LNP). In some embodiments, a LNP comprises one or more components of the compositions of the present disclosure. In some embodiments, the linear insert sequence is optionally for use in non-homologous end joining-based insertion. Reference is made to US Patent Publication No. US2022/0000933A1, the entire contents of which is incorporated herein by reference. In some embodiments, a composition of the present disclosure comprises a reverse transcriptase. In some embodiments, a reverse transcriptase is optionally for use in prime editing. Reference is made to U.S. Pat. No. 11,447,770, the entire contents of which is incorporated herein by reference. In some embodiments, a composition of the present disclosure comprises a recombinase, optionally for use for integration. Reference is made to U.S. Pat. No. 11,572,556, the entire contents of which is incorporated herein by reference. In some embodiments, a composition of the present disclosure comprises a transposase, optionally for use for integration. In some embodiments, the transposase naturally occurs with Fanzor systems. In some embodiments, the transposase is any one of Table 1. Non-limiting examples of transposes include Ty3, Novosib, Copia, CMC, Tc1_Mariner, hAT, Helitron, LINE, Zator, ERV, Sola, Crypton, EnSpm, IS607, Gin, and piggybac. Reference is made to PCT Publication No. WO2021030756A1, the entire contents of which is incorporated herein by reference. In some embodiments, a composition of the present disclosure comprises an integrase, optionally for use for integration. Reference is made to PCT Application No. PCT/2023/070031 and U.S. application Ser. No. 18/048,238, the entire contents of each which is incorporated herein by reference. In some embodiments, compositions optionally for use for integration further comprises programmable addition via site-specific targeting elements (PASTE). Reference is made to U.S. Pat. No. 11,572,556, the entire contents of which is incorporated herein by reference. In some embodiments, a composition of the present disclosure comprises a deaminase, optionally for use of base-editing.

[0115] In some embodiments, compositions optionally for the use of base-editing are capable of acting on single-stranded DNA. In some embodiments, compositions optionally for the use of base-editing are capable of acting on double-stranded DNA. In some embodiments, compositions optionally for the use of base-editing are capable of acting on RNA. In some embodiments, the deaminase is a cytidine deaminase. In some embodiments, compositions optionally for use of base-editing further comprises changing cytosine to thymine. In some embodiments, compositions optionally for use of base-editing further comprises changing cytosine to thymine without double-stranded breaks. In some embodiments, the deaminase is an adenine deaminase. In some embodiments, compositions optionally for use of base-editing further comprises changing adenine to guanine. In some embodiments, compositions optionally for use of base-editing further comprises changing adenine to guanine without double-stranded breaks.

[0116] In some embodiments, a composition of the present disclosure comprises a transcriptional activator, optionally for use of targeted gene activation. In some embodiments, compositions optionally for the use of targeted gene activation recruit transcriptional domains. Non-limiting examples of transcriptional domains include the transactivation domain of a zinc-finger protein, transcription activator-like effector, the Herpes simplex viral protein 16 (VP16), multiple tandem copies of VP16, such as VP64 or VP160, p65, and HSF1. Other t In some embodiments, a composition of the present disclosure comprises a transcriptional repressor, optionally for use of targeted gene repression. Non-limiting examples of transcriptional repressors include Kruppel-associated box (KRAB), Sin3 interaction domain (SID), Enhancer of Zeste Homolog2 (EZH2), histone deacetylases, and TETI. In some embodiments, the transcriptional repressor is a methyltransferase. In some embodiments, the methyltransferase is DNMT3A. In some embodiments, the methyltransferase is an enzyme that enhances the activity of DNMT3A. In some embodiments, the methyltransferase is DNMT3L. In some embodiments, the transcriptional repressor is a histone modifier. Non-limiting examples of histone modifiers include p300, LSD1, and heterochromatin protein 1 (HP1).

[0117] In some embodiments, a composition of the present disclosure comprises an epigenetic modification domain, optionally for use of epigenetic editing. In some embodiments, the epigenetic editing further comprises modifying histone modifications. In some embodiments, the epigenetic editing further comprises modifying DNA methylation patterns. In some embodiments, the epigenetic editing upregulates gene expression. In some embodiments, the epigenetic editing downregulates gene expression. Non-limiting examples of epigenetic modification domains include histone acetyltransferase p300, histone demethylase (LSD1), histone methyltransferases, such as DOT1L and PRDM9, and DNA methyltransferase DNMT3A.

[0118] In some embodiments, a composition of the present disclosure comprises a transposon, optionally for RNA guided transposition. Non-limiting examples of eukaryotic transposons include CMC, Copia, ERV, Gypsy, hAT, helitron, Zator, Sola, LINE, Tc1-Mariner, Novosib, Crypton, and EnSpm. Other eukaryotic transposons known in the art are contemplated for use herein. Reference is also made to PCT Publication No. WO2022/087494 and PCT Publication No. WO2022/159892, the entire contents of each, which is incorporated herein by reference. Compositions of the present disclosure further comprising other components known in the art for use in gene-editing are also contemplated herein. Further aspects of the disclosure comprise engineered cells comprising the Fanzor polypeptides and fRNA molecules described herein. In some embodiments, engineered cells comprise mammalian cells. Non-limiting examples of engineered cells include human cells, and any non-human eukaryote or animal or mammal as herein discussed, e.g., rodent, mouse, rat, rabbit, dog, livestock, or non-human mammal or primate. In some embodiments, the engineered cell is a rodent cell. In some embodiments, the engineered cell is a human cell. Other mammalian cell types are contemplated for use herein. In some embodiments, engineered cells of the disclosure may be isolated from human cells or tissues, plants and/or seeds, or non-human animals. It is contemplated herein that in some embodiments, host cells and/or cell lines are generated from the engineered cells of the disclosure comprising Fanzor nucleases and fRNAs described herein. It is further contemplated that host cells and/or cell lines modified by the Fanzor nucleases and fRNAs described herein include isolated stem cells and progeny thereof.

[0119] Further aspects of the disclosure provide methods of modifying a target polynucleotide sequence in a cell comprising delivering to the cell the Fanzor polypeptides and fRNA molecules described herein. In some embodiments, delivery of the Fanzor polypeptides and fRNA molecules form a complex (e.g., a Fanzor complex) for modifying a target DNA or RNA (single or double stranded, linear or supercoiled). The Fanzor complex of the invention have a wide variety of utility including modifying (e.g., deleting, inserting, translocating, inactivating, activating) a target DNA or RNA in a multiplicity of cell types. As such, the nucleic acid-targeting complex of the invention has a broad spectrum of applications in, e.g., gene therapy, drug screening, disease diagnosis, and prognosis. An exemplary nucleic acid-targeting complex comprises a DNA or RNA-targeting effector protein complexed with a co-RNA or guide RNA (gRNA) hybridized to a target polynucleotide sequence within the target locus of interest.

[0120] In some embodiments, modifying a target polynucleotide sequence comprises cleavage (e.g., a single or a double strand break) of the target polynucleotide sequence. In some embodiments, the target polynucleotide sequence is DNA. In some embodiments, one or more mutations comprising substitutions, deletions, and insertions are introduced into the target polynucleotide sequence. In some embodiments, the one or more mutations introduces frameshift mutations. In some embodiments, the cleavage creates a single-stranded break. In some embodiments, the single-stranded break reduces off-target effects. In some embodiments, the single-stranded breaks are used in pairs to create staggered double-stranded breaks. In some embodiments, the one or more mutations introduces a point mutation. In some embodiments, the one or more mutations are introduced without double-stranded breaks. In some embodiments, the one or more mutations are introduced without donor DNA. In some embodiments, the cleavage occurs proximal to the 3′ end of the target polynucleotide sequence. In some embodiments, the cleavage occurs in a specific location relative to the 3′ end of the target polynucleotide sequence. In some embodiments, a Fanzor nuclease modifies a target polynucleotide sequence by cleaving between about −6 to about +3 nucleotides relative to the 3′ end of the target polynucleotide sequence. In some embodiments, a Fanzor nuclease modifies a target polynucleotide sequence by cleaving −6 nucleotides relative to the 3′ end of the target polynucleotide sequence. In some embodiments, a Fanzor nuclease modifies a target polynucleotide sequence by cleaving −5 nucleotides relative to the 3′ end of the target polynucleotide sequence. In some embodiments, a Fanzor nuclease modifies a target polynucleotide sequence by cleaving −4 nucleotides relative to the 3′ end of the target polynucleotide sequence. In some embodiments, a Fanzor nuclease modifies a target polynucleotide sequence by cleaving −3 nucleotides relative to the 3′ end of the target polynucleotide sequence. In some embodiments, a Fanzor nuclease modifies a target polynucleotide sequence by cleaving −2 nucleotides relative to the 3′ end of the target polynucleotide sequence. In some embodiments, a Fanzor nuclease modifies a target polynucleotide sequence by cleaving −1 nucleotides relative to the 3′ end of the target polynucleotide sequence. In some embodiments, a Fanzor nuclease modifies a target polynucleotide sequence by cleaving 0 nucleotides relative to the 3′ end of the target polynucleotide sequence (e.g., cleaving at the 3′ end of the target polynucleotide sequence). In some embodiments, a Fanzor nuclease modifies a target polynucleotide sequence by cleaving +1 nucleotides relative to the 3′ end of the target polynucleotide sequence. In some embodiments, a Fanzor nuclease modifies a target polynucleotide sequence by cleaving +2 nucleotides relative to the 3′ end of the target polynucleotide sequence. In some embodiments, a Fanzor nuclease modifies a target polynucleotide sequence by cleaving +3 nucleotides relative to the 3′ end of the target polynucleotide sequence.

[0121] In some embodiments, the Fanzor nuclease modifies a target polynucleotide sequence by cleaving within the TAM sequence.

[0122] The methods of according to the invention as described herein comprehend modifying a target polynucleotide sequence, comprising contacting a sample that comprises the target polynucleotide sequence with the composition, vectors, polynucleotides comprising Fanzor nucleases and fRNA molecules described herein wherein contacting results in modification of a target polynucleotide sequence or modification of the amount or expression of a gene and/or gene product. In some embodiments, the expression of the targeted gene and/or gene product is increased by the method relative to an unmodified control. In some embodiments, the expression of the targeted gene and/or gene product is increased by at least 10%, at least 15%, at least 20%, at least 25%, at least 30%, at least 35%, at least 40%, at least 45%, at least 50%, at least 55%, at least 60%, at least 65%, at least 70%, at least 75%, at least 80%, at least 85%, p at least 90%, at least 95%, 100% relative to an unmodified control. In some embodiments, the expression of the targeted gene and/or gene product is increased at least 1.5-fold, at least 2-fold, at least 2.5-fold, at least 3-fold, at least 3.5-fold, at least 3.5-fold, at least 4-fold, at least 4.5-fold, at least 5-fold, at least 10-fold, at least 10-fold, at least 15-fold, at least 20-fold, at least 25-fold, at least 50-fold, at least 100-fold relative to an unmodified control. In some embodiments, the expression of the targeted gene and/or gene product is reduced by at least 10%, by at least 15%, by at least 20%, by at least 25%, by at least 30%, by at least 35%, by at least 40%, by at least 45%, by at least 50%, by at least 55%, by at least 60%, by at least 65%, by at least 70%, by at least 75%, by at least 80%, by at least 85%, by at least 90%, by at least 95%, by at least 100% relative to an unmodified control. In some embodiments, the expression of the targeted gene and/or gene product is reduced at least 1.5-fold, at least 2-fold, at least 2.5-fold, at least 3-fold, at least 3.5-fold, at least 3.5-fold, at least 4-fold, at least 4.5-fold, at least 5-fold, at least 10-fold, at least 10-fold, at least 15-fold, at least 20-fold, at least 25-fold, at least 50-fold, at least 100-fold relative to an unmodified control. In some embodiments, the expression of the targeted gene and/or gene product is reduced by the method. In some embodiments, expression of the targeted gene may be completely eliminated, or may be considered eliminated as remnant expression levels of the targeted gene fall below the detection limit of methods known in the art that are used to quantify, detect, or monitor expression levels of genes.

[0123] The compositions and methods according to the invention as described herein comprehend inducing one or more nucleotide modifications in a eukaryotic cell (e.g., in a target polynucleotide sequence within a cell). In some embodiments, one or more modifications in a eukaryotic cell occurs in vitro, i.e. in an isolated eukaryotic cell, including but not limited to, a human cell) as herein discussed comprising delivering to cell a vector as herein discussed. In other embodiments, one or more modifications in a eukaryotic cell occurs in vivo. The mutation(s) can include the introduction, deletion, or substitution of one or more nucleotides at each target sequence of cell(s) via the guide RNA(s) or fRNA(s). The mutations can include the introduction, deletion, or substitution of a range of nucleotides (e.g., at each target sequence of said cell(s) via the guide(s) RNA(s) or fRNA(s). The mutations can include the introduction, deletion, or substitution of 1-100 nucleotides at each target sequence of said cell(s) via the guide RNA(s) or fRNA(s). The mutations can include the introduction, deletion, or substitution of 1, 2, 3, 4, 5, 6, 7, 8, 9, 10, 11, 12, 13, 14, 15, 16, 17, 18, 19, 20, 21, 22, 23, 24, 25, 26, 27, 28, 29, 30, 31, 32, 33, 34, 35, 36, 37, 38, 39, 40, 41, 42, 43, 44, 45, 46, 47, 48, 49, 50, 51, 52, 53, 54, 55, 56, 57, 58, 59, 60, 61, 62, 63, 64, 65, 66, 67, 68, 69, 70, 71, 72, 73, 74, 75, 76, 77, 78, 79, 80, 81, 82, 83, 84, 85, 86, 87, 88, 89, 90, 91, 92, 93, 94, 95, 96, 97, 98, 99, or 100 nucleotides at each target sequence of said cell(s) via the guide RNA(s) or fRNA(s). The mutations can include removing, adding, or rearranging large chromosomal segments at each target sequence of said cell(s) via the guide RNA(s) or fRNA(s). In some embodiments, the fRNA includes a primer binding site. In some embodiments the primer binding site (PBS) binds to exposed DNA. In some embodiments, the primer binding site binds to exposed DNA generated by Fanzor cleavage. In some embodiments, the fRNA further includes a reverse transcriptase (RT) region. In some embodiments, the RT region is complementary to the genome. In some embodiments, the mutation is introduced between the RT and PBS sites.

[0124] The nucleic acid molecule encoding a Fanzor nuclease may be codon optimized for expression in a particular host species. A codon optimized sequence includes a sequence optimized for expression in a different eukaryote relative to the eukaryote of origin for a Fanzor nuclease. As a non-limiting example, the nucleic acid molecule encoding a Fanzor nuclease from Chlamydomonas reinhardtii may be codon-optimized for expression in humans, or for another eukaryote, animal or mammal as herein. In general, codon optimization refers to a process of modifying a nucleic acid sequence for enhanced expression in the host cells of interest by replacing at least one codon (e.g. about or more than about 1, 2, 3, 4, 5, 10, 15, 20, 25, 50, or more codons) of the native sequence with codons that are more frequently or most frequently used in the genes of that host cell while maintaining the native amino acid sequence. Various species exhibit particular bias for certain codons of a particular amino acid. Codon bias (differences in codon usage between organisms) often correlates with the efficiency of translation of messenger RNA (mRNA), which is in turn believed to be dependent on, among other things, the properties of the codons being translated and the availability of particular transfer RNA (tRNA) molecules. The predominance of selected tRNAs in a cell is generally a reflection of the codons used most frequently in peptide synthesis. Accordingly, genes can be tailored for optimal gene expression in a given organism based on codon optimization. Codon usage tables are readily available, for example, at the “Codon Usage Database” available at www.kazusa.orjp/codon and these tables can be adapted in a number of ways. See Nakamura, Y., et al. “Codon usage tabulated from the international DNA sequence databases: status for the year 2000” Nucl. Acids Res. 28:292 (2000). Computer algorithms for codon optimizing a particular sequence for expression in a particular host cell are also available, such as Gene Forge (Aptagen; Jacobus, PA), are also available. In some embodiments, one or more codons (e.g. 1, 2, 3, 4, 5, 10, 15, 20, 25, 50, or more, or all codons) in a sequence encoding a Fanzor nuclease correspond to the most frequently used codon for a particular amino acid. Other methods of codon optimization known in the art are contemplated for use herein.

[0125] The methods of modifying a target polynucleotide sequence in a cell according to the invention as described herein may comprise a Fanzor nuclease and a fRNA to be delivered together (e.g., by the same vector) or delivered separately (e.g. as separate vectors). A Fanzor nuclease of the present disclosure may be unstable without co-delivery of the fRNA molecule (e.g., when a Fanzor nuclease and the fRNA molecule are delivered by separate vectors). In some embodiments, the Fanzor nuclease is stable in the presence of the fRNA molecule. In some embodiments, the Fanzor nuclease is stable in the absence of the fRNA molecule. In some embodiments, the Fanzor polypeptide encoding the Fanzor nuclease (e.g., the Fanzor nuclease encoding sequence) is modified to increase stability. In some embodiments, the modifications include, but are not limited to, one or more mutations relative to the wildtype Fanzor polypeptide wherein the one or more mutations result in a Fanzor polypeptide that has increased stability in the absence of the fRNA relative to an unmodified Fanzor polypeptide. An exemplary modification is the fusion of a stabilizing domain to a Fanzor polypeptide to increase stability. Non-limiting examples of stabilizing domains that can be fused with a Fanzor nuclease of the present disclosure include a small ubiquitin-like modifier (SUMO) tag, glutathione-S-transferase (GST) tag, and/or superfolder green fluorescent protein (sfGFP). Other modifications known in the art for increasing the stabilization of a polypeptide, and/or ofa nuclease, are contemplated herein.

[0126] The compositions described herein may be used in various nucleic acids-targeting applications, altering or modifying synthesis of a gene product, such as a protein, nucleic acids cleavage, nucleic acids editing, nucleic acids splicing; trafficking of target nucleic acids, tracing of target nucleic acids, isolation of target nucleic acids, visualization of target nucleic acids, etc. Aspects of the invention also encompass methods and uses of the compositions and systems described herein in genome engineering, e.g. for altering or manipulating the expression of one or more genes or the one or more gene products, in prokaryotic or eukaryotic cells, in vitro, in vivo or ex vivo. In some examples, the target polynucleotides are target sequences within genomic DNA, including nuclear genomic DNA, mitochondrial DNA, or chloroplast DNA. In some embodiments, the target sequence is a viral polynucleotide. In some embodiments, the viral polynucleotide is integrated within a host genome. Aspects of the invention also encompass methods and uses of the compositions and systems described herein for multiplexed editing. In some embodiments, the multiplexed editing targets 2, 3, 4, 5, 6, 7, 8, 9, 10 or more sites. In some embodiments, the target polynucleotide is a gene related to disease resistance or pest control. In some embodiments, the genome engineering is directed towards modifying crop traits. Non-limiting examples of crop trait modifications include improved yield, improved taste, and improved nutritional value. In some embodiments, the genome engineering is directed towards bioenergy production. In some embodiments, the genome engineering is directed towards modifying organisms to optimize the production of biofuels. Non-limiting examples of organisms that can be modified to optimize the production of biofuels include algae, bacteria, yeast, microalgae, sugarcane, corn, switchgrass, miscanthus, sorghum, soybean, canola, jatropha, Trichoderma, Aspergillus, and macroalgae. In some embodiments, the genome engineering is directed towards bioremediation. In some embodiments, the genome engineering is directed towards modifying microbes to degrade environmental pollutants. Non-limiting examples or microbes that can be modified to degrade environmental pollutants include Brevibacterium epidermis EZ-K02. Microbacterium oleivorans, Irpex lacteus, Bacillus subtilis HUK15, Anaeromyxobacter sp Fw109-5, Bacillus, Corprothermobacter, Rhodobacter, Pseudomonas, Achromobacter, Desfiilitobacter, Desulfosporosinus, T78. Methanobacterium, Methanosaeta, Proteobacteria, Firmicutes, Naegleria, Vorticella, Arabidopsis, Asarum, Populus, Koribacter, Acidomicrobium, Bradyrhizobiu, Burkholderia, Solibacter, Singulisphaera, Desulfomonile, Rhodcococus, Bordatella, Chromobacter, Variovorax, Thiobacillus sp., Pseudoxanthomonas sp., Aleanivorax sp., Acinetobacter venetianus RAG-1, Dehalococcoides mccartyi, Actinobacter, Mycobacterium, Pseudomonas aeruginosa, Penicillium oxalicum, Sphingomonas sp. GY2B, Miscanthus sinesis, Rhizobiales, Burkholderiales, Actinomycetales, Pseudomonas pulida, Pseudomonas putida KT2440, Rhodococcus aetherivorans BCP 1, Rhodococcus opacus R7, and Pseudomonas stutzeri 5190. Aspects of the invention also encompass methods and uses of the compositions and systems described herein in chromosome imaging, e.g. for visualizing specific sequences within live cells. In some examples, chromosome imaging is performed by fluorescently-tagging the compositions described herein.

[0127] The compositions described herein may be used to create genetically modified animal models or to create functional genomic screens. In some embodiments, the genetically modified animal models can be used for disease research. In some embodiments, the functional genomic screens can be used to identify genes involved in specific biological processes. In some embodiments, the functional genomic screens can be used to identify polynucleotide sequences related to disease pathogens. In some embodiments, the polynucleotide sequences are DNA. In some embodiments, the polynucleotide sequences are RNA. Any disease or disorder that may be detected using any of the composition or methods described herein (e.g., Fanzor systems) are contemplated for detection herein.

[0128] In some aspects, the invention provides methods comprising delivering one or more polynucleotides, such as or one or more vectors as described herein, one or more transcripts thereof, and/or one or proteins transcribed therefrom, to a host cell. In some aspects, the invention further provides cells produced by such methods, and organisms (such as animals, plants, seeds, or fungi) comprising or produced from such cells. In some embodiments, a base editor as described herein in combination with (and optionally complexed with) a guide sequence is delivered to a cell.

[0129] Exemplary delivery strategies are known in the art, and described herein, which include vector-based strategies. In some embodiments, the method of delivery provided comprises nucleofection, microinjection, biolistics, virosomes, liposomes, immunoliposomes, polycation or lipid.nucleic acid conjugates, naked DNA, artificial virions, and agent-enhanced uptake of DNA. Exemplary methods of delivery of nucleic acids include lipofection, nucleofection, electoporation, stable genome integration (e.g., piggybac), microinjection, biolistics, virosomes, liposomes, immunoliposomes, polycation or lipid:nucleic acid conjugates, naked DNA, artificial virions, and agent-enhanced uptake of DNA. Lipofection is described in e.g., U.S. Pat. Nos. 5,049,386, 4,946,787; and 4,897,355) and lipofection reagents are sold commercially (e.g., Transfectam™, Lipofectin™ and SF Cell Line 4D-Nucleofector X Kit™ (Lonza)). Cationic and neutral lipids that are suitable for efficient receptor-recognition lipofection of polynucleotides include those of Feigner, WO 91/17424; WO 91/16024. Other methods of delivery known in the art are contemplated for use with Fanzor system described herein.

[0130] Delivery may be to cells (e.g. in vitro or ex vivo administration) or target tissues (e.g. in vivo administration). Delivery methods known in the art are contemplated for use herein. As a non-limiting example, the compositions and methods of the present invention may be delivered via ex vivo administration to non-limiting cell types such as B cells, T cells, tumor infiltrating lymphocytes (TIL), CARTs, and/or stem cells (e.g., bone marrow stem cells) for the treatment of various diseases. Other cell types compatible with ex vivo administration known in the art are also contemplated for use with the compositions and methods disclosed herein. The compositions and methods of the present invention may be delivered via in vivo administration to target tissues and/or cells of target tissues using, as non-limiting examples, AAV or other programmable tissue-specific lipid nanoparticles (LNPs). Other methods of in vivo administration known in the art are also contemplated for use with the compositions and methods disclosed herein.

[0131] Delivery may be achieved through the use of RNP complexes. Examples of target polynucleotides include a sequence associated with a signaling biochemical pathway, e.g., a signaling biochemical pathway-associated gene or polynucleotide. Examples of target polynucleotides include a disease associated gene or polynucleotide. A “disease-associated” gene or polynucleotide refers to any gene or polynucleotide which is yielding transcription or translation products at an abnormal level or in an abnormal form in cells derived from a disease-affected tissues compared with tissues or cells of a non-disease control. It may be a gene that becomes expressed at an abnormally high level, it may be a gene that becomes expressed at an abnormally low level, where the altered expression correlates with the occurrence and/or progression of the disease. A disease-associated gene also refers to a gene possessing mutation(s) or genetic variation that is directly responsible or is in linkage disequilibrium with a gene(s) that is responsible for the etiology of a disease. The transcribed or translated products may be known or unknown, and may be at a normal or abnormal level. Examples of target polynucleotides include a viral associated gene or polynucleotide. A “viral-associated” gene or polynucleotide refers to any gene or polynucleotide of viral origin integrated within a host genome. It may be a gene that is involved in the replication, transcription, translation, or assembly of a virus. It may be a gene that is highly conserved among viruses. For example, in some embodiments, a method is provided that comprises administering to a subject having a viral disease an effective amount of the Fanzor editing system described herein that introduces a deactivating mutation into a viral-associated gene.

[0132] The “disease-associated” gene or polynucleotide can be associated with a monogenetic disorder selected from the group consisting of: Adenosine Deaminase (ADA) Deficiency; Alpha-1 Antitrypsin Deficiency; Cystic Fibrosis; Duchenne Muscular Dystrophy; Galactosemia; Hemochromatosis; Huntington's Disease; Maple Syrup Urine Disease; Marfan Syndrome; Neurofibromatosis Type 1; Pachyonychia Congenita; Phenylkeotnuria; Severe Combined Immunodeficiency; Sickle Cell Disease; Smith-Lemli-Opitz Syndrome; and Tay-Sachs Disease. In other embodiments, the disease-associated gene can be associated with a polygenic disorder selected from the group consisting of: heart disease; high blood pressure; Alzheimer's disease; arthritis; diabetes; cancer; and obesity. The compositions described herein may be administered to a subject in need thereof in a therapeutically effective amount to treat and/or prevent a disease or disorder the subject is suffering from. Any disease or disorder that may be treated and/or prevented using any of the composition or methods described herein (e.g., Fanzor systems) are contemplated for treatment herein. Any disease is conceivably treatable by such methods so long as delivery to the appropriate cells is feasible. The person having ordinary skill in the art will be able to choose and/or select a Fanzor delivery methodology to suit the intended purpose and the intended target cells.

[0133] For example, in some embodiments, a method is provided that comprises administering to a subject having such a disease, e.g., a cancer associated with a point mutation as described above, an effective amount of the Fanzor editing system described herein that corrects the point mutation or introduces a deactivating mutation into a disease-associated gene as mediated by homology-directed repair in the presence of a donor DNA molecule comprising desired genetic change. In some embodiments, a method is provided that comprises administering to a subject having such a disease, e.g., a cancer associated with a point mutation as described above, an effective amount of the Fanzor editing system described herein that corrects the point mutation or introduces a deactivating mutation into a disease-associated gene. In some embodiments, the disease is a proliferative disease. In some embodiments, the disease is a genetic disease. In some embodiments, the disease is a neoplastic disease. In some embodiments, the disease is a metabolic disease. In some embodiments, the disease is a lysosomal storage disease. Other diseases that can be treated by correcting a point mutation or introducing a deactivating mutation into a disease-associated gene will be known to those of skill in the art, and the disclosure is not limited in this respect.

[0134] The instant disclosure provides methods for the treatment of additional diseases or disorders, e.g., diseases or disorders that are associated or caused by a point mutation that can be corrected by Fanzor-mediated gene editing. Some such diseases are described herein, and additional suitable diseases that can be treated with the strategies and fusion proteins provided herein will be apparent to those of skill in the art based on the instant disclosure. Exemplary suitable diseases and disorders are listed below. It will be understood that the numbering of the specific positions or residues in the respective sequences depends on the particular protein and numbering scheme used. Numbering might be different, e.g., in precursors of a mature protein and the mature protein itself, and differences in sequences from species to species may affect numbering. One of skill in the art will be able to identify the respective residue in any homologous protein and in the respective encoding nucleic acid by methods well known in the art, e.g., by sequence alignment and determination of homologous residues. Exemplary suitable diseases and disorders include, without limitation: 2-methyl-3-hydroxybutyric aciduria; 3 beta-Hydroxysteroid dehydrogenase deficiency; 3-Methylglutaconic aciduria; 3-Oxo-5 alpha-steroid delta 4-dehydrogenase deficiency; 46,XY sex reversal, type 1, 3, and 5; 5-Oxoprolinase deficiency; 6-pyruvoyl-tetrahydropterin synthase deficiency; Aarskog syndrome; Aase syndrome; Achondrogenesis type 2; Achromatopsia 2 and 7; Acquired long QT syndrome; Acrocallosal syndrome, Schinzel type; Acrocapitofemoral dysplasia; Acrodysostosis 2, with or without hormone resistance; Acroerythrokeratoderma; Acromicric dysplasia; Acth-independent macronodular adrenal hyperplasia 2; Activated PI3K-delta syndrome; Acute intermittent porphyria; deficiency of Acyl-CoA dehydrogenase family, member 9; Adams-Oliver syndrome 5 and 6, Adenine phosphoribosyltransferase deficiency; Adenylate kinase deficiency; hemolytic anemia due to Adenylosuccinate lyase deficiency; Adolescent nephronophthisis; Renal-hepatic-pancreatic dysplasia; Meckel syndrome type 7; Adrenoleukodystrophy; Adult junctional epidermolysis bullosa; Epidermolysis bullosa, junctional, localisata variant; Adult neuronal ceroid lipofuscinosis; Adult neuronal ceroid lipofuscinosis; Adult onset ataxia with oculomotor apraxia; ADULT syndrome; Afibrinogenemia and congenital Afibrinogenemia; autosomal recessive Agammaglobulinemia 2; Age-related macular degeneration 3, 6, 11, and 12; Aicardi Goutieres syndromes 1, 4, and 5; Chilbain lupus 1; Alagille syndromes 1 and 2; Alexander disease; Alkaptonuria; Allan-Herndon-Dudley syndrome; Alopecia universalis congenital; Alpers encephalopathy; Alpha-1-antitrypsin deficiency; autosomal dominant, autosomal recessive, and X-linked recessive Alport syndromes; Alzheimer disease, familial, 3, with spastic paraparesis and apraxia; Alzheimer disease, types, 1, 3, and 4; hypocalcification type and hypomaturation type, IIA1 Amelogenesis imperfecta; Aminoacylase 1 deficiency; Amish infantile epilepsy syndrome; Amyloidogenic transthyretin amyloidosis; Amyloid Cardiomyopathy, Transthyretin-related; Cardiomyopathy; Amyotrophic lateral sclerosis types 1, 6, 15 (with or without frontotemporal dementia), 22 (with or without frontotemporal dementia), and 10; Frontotemporal dementia with TDP43 inclusions, TARDBP-related; Andermann syndrome; Andersen Tawil syndrome; Congenital long QT syndrome; Anemia, nonspherocytic hemolytic, due to G6PD deficiency; Angelman syndrome; Severe neonatal-onset encephalopathy with microcephaly; susceptibility to Autism, X-linked 3; Angiopathy, hereditary, with nephropathy, aneurysms, and muscle cramps; Angiotensin i-converting enzyme, benign serum increase; Aniridia, cerebellar ataxia, and mental retardation; Anonychia; Antithrombin III deficiency; Antley-Bixler syndrome with genital anomalies and disordered steroidogenesis; Aortic aneurysm, familial thoracic 4, 6, and 9; Thoracic aortic aneurysms and aortic dissections; Multisystemic smooth muscle dysfunction syndrome; Moyamoya disease 5; Aplastic anemia; Apparent mineralocorticoid excess; Arginase deficiency; Argininosuccinate lyase deficiency; Aromatase deficiency; Arrhythmogenic right ventricular cardiomyopathy types 5, 8, and 10; Primary familial hypertrophic cardiomyopathy; Arthrogryposis multiplex congenita, distal, X-linked; Arthrogryposis renal dysfunction cholestasis syndrome; Arthrogryposis, renal dysfunction, and cholestasis 2; Asparagine synthetase deficiency; Abnormality of neuronal migration; Ataxia with vitamin E deficiency; Ataxia, sensory, autosomal dominant: Ataxia-telangiectasia syndrome; Hereditary cancer-predisposing syndrome; Atransferrinemia; Atrial fibrillation, familial, 11, 12, 13, and 16; Atrial septal defects 2, 4, and 7 (with or without atrioventricular conduction defects); Atrial standstill 2; Atrioventricular septal defect 4; Atrophia bulborum hereditaria; ATR-X syndrome; Auriculocondylar syndrome 2; Autoimmune disease, multisystem, infantile-onset; Autoimmune lymphoproliferative syndrome, type 1a; Autosomal dominant hypohidrotic ectodermal dysplasia; Autosomal dominant progressive external ophthalmoplegia with mitochondrial DNA deletions 1 and 3; Autosomal dominant torsion dystonia 4; Autosomal recessive centronuclear myopathy; Autosomal recessive congenital ichthyosis 1, 2, 3, 4A, and 4B; Autosomal recessive cutis laxa type IA and 1B; Autosomal recessive hypohidrotic ectodermal dysplasia syndrome; Ectodermal dysplasia 11b; hypohidrotic/hair/tooth type, autosomal recessive; Autosomal recessive hypophosphatemic bone disease; Axenfeld-Rieger syndrome type 3; Bainbridge-Ropers syndrome; Bannayan-Riley-Ruvalcaba syndrome; PTEN hamartoma tumor syndrome; Baraitser-Winter syndromes 1 and 2; Barakat syndrome; Bardet-Biedl syndromes 1, 11, 16, and 19. Bare lymphocyte syndrome type 2, complementation group E; Bartter syndrome antenatal type 2; Bartter syndrome types 3, 3 with hypocalciuria, and 4; Basal ganglia calcification, idiopathic, 4; Beaded hair; Benign familial hematuria; Benign familial neonatal seizures 1 and 2; Seizures, benign familial neonatal, 1, and/or myokymia; Seizures, Early infantile epileptic encephalopathy 7; Benign familial neonatal-infantile seizures; Benign hereditary chorea; Benign scapuloperoneal muscular dystrophy with cardiomyopathy; Bernard-Soulier syndrome, types A1 and A2 (autosomal dominant); Bestrophinopathy, autosomal recessive; beta Thalassemia; Bethlem myopathy and Bethlem myopathy 2; Bietti crystalline corneoretinal dystrophy; Bile acid synthesis defect, congenital, 2; Biotinidase deficiency; Birk Barel mental retardation dysmorphism syndrome; Blepharophimosis, ptosis, and epicanthus inversus; Bloom syndrome; Borjeson-Forssman-Lehmann syndrome; Boucher Neuhauser syndrome; Brachydactyly types A1 and A2; Brachydactyly with hypertension; Brain small vessel disease with hemorrhage; Branched-chain ketoacid dehydrogenase kinase deficiency; Branchiootic syndromes 2 and 3; Breast cancer, early-onset; Breast-ovarian cancer, familial 1, 2, and 4; Brittle cornea syndrome 2; Brody myopathy; Bronchiectasis with or without elevated sweat chloride 3; Brown-Vialetto-Van laere syndrome and Brown-Vialetto-Van Laere syndrome 2; Brugada syndrome; Brugada syndrome 1; Ventricular fibrillation; Paroxysmal familial ventricular fibrillation; Brugada syndrome and Brugada syndrome 4; Long QT syndrome; Sudden cardiac death; Bull eye macular dystrophy; Stargardt disease 4; Cone-rod dystrophy 12; Bullous ichthyosiform erythroderma; Burn-Mckeown syndrome; Candidiasis, familial, 2, 5, 6, and 8; Carbohydrate-deficient glycoprotein syndrome type I and II; Carbonic anhydrase VA deficiency, hyperammonemia due to; Carcinoma of colon; Cardiac arrhythmia; Long QT syndrome, LQT1 subtype; Cardioencephalomyopathy, fatal infantile, due to cytochrome c oxidase deficiency; Cardiofaciocutaneous syndrome; Cardiomyopathy; Danon disease; Hypertrophic cardiomyopathy; Left ventricular noncompaction cardiomyopathy; Carnevale syndrome; Carney complex, type 1; Carnitine acylcarnitine translocase deficiency; Carnitine palmitoyltransferase I, II, II (late onset), and II (infantile) deficiency; Cataract 1, 4, autosomal dominant, autosomal dominant, multiple types, with microcornea, coppock-like, juvenile, with microcornea and glucosuria, and nuclear diffuse nonprogressive; Catecholaminergic polymorphic ventricular tachycardia; Caudal regression syndrome; Cd8 deficiency, familial; Central core disease; Centromeric instability of chromosomes 1, 9 and 16 and immunodeficiency; Cerebellar ataxia infantile with progressive external ophthalmoplegi and Cerebellar ataxia, mental retardation, and dysequilibrium syndrome 2; Cerebral amyloid angiopathy, APP-related; Cerebral autosomal dominant and recessive arteriopathy with subcortical infarcts and leukoencephalopathy; Cerebral cavernous malformations 2; Cerebrooculofacioskeletal syndrome 2; Cerebro-oculo-facio-skeletal syndrome; Cerebroretinal microangiopathy with calcifications and cysts; Ceroid lipofuscinosis neuronal 2, 6, 7, and 10; Ch\xc3\xa9diak-Higashi syndrome, Chediak-Higashi syndrome, adult type; Charcot-Marie-Tooth disease types 1B, 2B2, 2C, 2F, 2I, 2U (axonal), 1C (demyelinating), dominant intermediate C, recessive intermediate A, 2A2, 4C, 4D, 4H, IF, IVF, and X; Scapuloperoneal spinal muscular atrophy; Distal spinal muscular atrophy, congenital nonprogressive; Spinal muscular atrophy, distal, autosomal recessive, 5: CHARGE association; Childhood hypophosphatasia; Adult hypophosphatasia; Cholecystitis; Progressive familial intrahepatic cholestasis 3; Cholestasis, intrahepatic, of pregnancy 3; Cholestanol storage disease; Cholesterol monooxygenase (side-chain cleaving) deficiency; Chondrodysplasia Blomstrand type; Chondrodysplasia punctata 1, X-linked recessive and 2 X-linked dominant; CHOPS syndrome; Chronic granulomatous disease, autosomal recessive cytochrome b-positive, types 1 and 2; Chudley-McCullough syndrome; Ciliary dyskinesia, primary, 7, 11, 15, 20 and 22; Citrullinemia type I; Citrullinemia type I and II; Cleidocranial dysostosis; C-like syndrome; Cockayne syndrome type A; Coenzyme Q10 deficiency, primary 1, 4, and 7; Coffin Siris/Intellectual Disability; Coffin-Lowry syndrome; Cohen syndrome; Cold-induced sweating syndrome 1; COLE-CARPENTER SYNDROME 2; Combined cellular and humoral immune defects with granulomas; Combined d-2- and 1-2-hydroxyglutaric aciduria; Combined malonic and methylmalonic aciduria; Combined oxidative phosphorylation deficiencies 1, 3, 4, 12, 15, and 25; Combined partial and complete 17-alpha-hydroxylase/17,20-lyase deficiency; Common variable immunodeficiency 9; Complement component 4, partial deficiency of, due to dysfunctional c1 inhibitor; Complement factor B deficiency; Cone monochromatism; Cone-rod dystrophy 2 and 6; Cone-rod dystrophy amelogenesis imperfecta; Congenital adrenal hyperplasia and Congenital adrenal hypoplasia, X-linked; Congenital amegakaryocytic thrombocytopenia; Congenital aniridia; Congenital central hypoventilation; Hirschsprung disease 3; Congenital contractural arachnodactyly; Congenital contractures of the limbs and face, hypotonia, and developmental delay; Congenital disorder of glycosylation types 1B, 1D, 1G, 1H, 1J, 1K, 1N, 1P, 2C, 2J, 2K, IIm; Congenital dyserythropoietic anemia, type I and II; Congenital ectodermal dysplasia of face; Congenital erythropoietic porphyria; Congenital generalized lipodystrophy type 2; Congenital heart disease, multiple types, 2; Congenital heart disease; Interrupted aortic arch; Congenital lipomatous overgrowth, vascular malformations, and epidermal nevi; Non-small cell lung cancer; Neoplasm of ovary; Cardiac conduction defect, nonspecific; Congenital microvillous atrophy; Congenital muscular dystrophy; Congenital muscular dystrophy due to partial LAMA2 deficiency; Congenital muscular dystrophy-dystroglycanopathy with brain and eye anomalies, types A2, A7, A8, All, and A14; Congenital muscular dystrophy-dystroglycanopathy with mental retardation, types B2, B3, B5, and B15; Congenital muscular dystrophy-dystroglycanopathy without mental retardation, type B5; Congenital muscular hypertrophy-cerebral syndrome; Congenital myasthenic syndrome, acetazolamide-responsive; Congenital myopathy with fiber type disproportion; Congenital ocular coloboma; Congenital stationary night blindness, type 1A, 1B, 1C, 1E, IF, and 2A; Coproporphyria; Cornea plana 2; Corneal dystrophy, Fuchs endothelial, 4; Corneal endothelial dystrophy type 2; Corneal fragility keratoglobus, blue sclerae and joint hypermobility; Cornelia de Lange syndromes 1 and 5; Coronary artery disease, autosomal dominant 2; Coronary heart disease; Hyperalphalipoproteinemia 2; Cortical dysplasia, complex, with other brain malformations 5 and 6; Cortical malformations, occipital; Corticosteroid-binding globulin deficiency; Corticosterone methyloxidase type 2 deficiency; Costello syndrome; Cowden syndrome 1; Coxa plana; Craniodiaphyseal dysplasia, autosomal dominant; Craniosynostosis 1 and 4; Craniosynostosis and dental anomalies; Creatine deficiency, X-linked; Crouzon syndrome; Cryptophthalmos syndrome; Cryptorchidism, unilateral or bilateral; Cushing symphalangism; Cutaneous malignant melanoma 1; Cutis laxa with osteodystrophy and with severe pulmonary, gastrointestinal, and urinary abnormalities; Cyanosis, transient neonatal and atypical nephropathic; Cystic fibrosis; Cystinuria; Cytochrome c oxidase i deficiency; Cytochrome-c oxidase deficiency; D-2-hydroxyglutaric aciduria 2; Darier disease, segmental; Deafness with labyrinthine aplasia microtia and microdontia (LAMM); Deafness, autosomal dominant 3a, 4, 12, 13, 15, autosomal dominant nonsyndromic sensorineural 17, 20, and 65; Deafness, autosomal recessive 1A, 2, 3, 6, 8, 9, 12, 15, 16, 18b, 22, 28, 31, 44, 49, 63, 77, 86, and 89; Deafness, cochlear, with myopia and intellectual impairment, without vestibular involvement, autosomal dominant, X-linked 2; Deficiency of 2-methylbutyryl-CoA dehydrogenase; Deficiency of 3-hydroxyacyl-CoA dehydrogenase; Deficiency of alpha-mannosidase; Deficiency of aromatic-L-amino-acid decarboxylase; Deficiency of bisphosphoglycerate mutase; Deficiency of butyryl-CoA dehydrogenase; Deficiency of ferroxidase; Deficiency of galactokinase; Deficiency of guanidinoacetate methyltransferase; Deficiency of hyaluronoglucosaminidase; Deficiency of ribose-5-phosphate isomerase; Deficiency of steroid 11-beta-monooxygenase; Deficiency of UDPglucose-hexose-1-phosphate uridylyltransferase; Deficiency of xanthine oxidase; Dejerine-Sottas disease; Charcot-Marie-Tooth disease, types ID and IVF: Dejerine-Sottas syndrome, autosomal dominant; Dendritic cell, monocyte, B lymphocyte, and natural killer lymphocyte deficiency; Desbuquois dysplasia 2; Desbuquois syndrome; DFNA 2 Nonsyndromic Hearing Loss; Diabetes mellitus and insipidus with optic atrophy and deafness; Diabetes mellitus, type 2, and insulin-dependent, 20; Diamond-Blackfan anemia 1, 5, 8, and 10; Diarrhea 3 (secretory sodium, congenital, syndromic) and 5 (with tufting enteropathy, congenital); Dicarboxylic aminoaciduria; Diffuse palmoplantar keratoderma, Bothnian type; Digitorenocerebral syndrome; Dihydropteridine reductase deficiency; Dilated cardiomyopathy 1A, 1AA, 1C, 1G, lBB, 1DD, 1FF, 1HH, 1I, 1KK, 1N, 1S, 1Y, and 3B; Left ventricular noncompaction 3; Disordered steroidogenesis due to cytochrome p450 oxidoreductase deficiency; Distal arthrogryposis type 2B; Distal hereditary motor neuronopathy type 2B; Distal myopathy Markesbery-Griggs type; Distal spinal muscular atrophy, X-linked 3; Distichiasis-lymphedema syndrome; Dominant dystrophic epidermolysis bullosa with absence of skin; Dominant hereditary optic atrophy; Donnai Barrow syndrome; Dopamine beta hydroxylase deficiency; Dopamine receptor d2, reduced brain density of; Dowling-degos disease 4; Doyne honeycomb retinal dystrophy; Malattia leventinese; Duane syndrome type 2; Dubin-Johnson syndrome; Duchenne muscular dystrophy; Becker muscular dystrophy; Dysfibrinogenemia; Dyskeratosis congenita autosomal dominant and autosomal dominant, 3; Dyskeratosis congenita, autosomal recessive, 1, 3, 4, and 5; Dyskeratosis congenita X-linked; Dyskinesia, familial, with facial myokymia; Dysplasminogenemia; Dystonia 2 (torsion, autosomal recessive), 3 (torsion, X-linked), 5 (Dopa-responsive type), 10, 12, 16, 25, 26 (Myoclonic); Seizures, benign familial infantile, 2, Early infantile epileptic encephalopathy 2, 4, 7, 9, 10, 11, 13, and 14. Atypical Rett syndrome; Early T cell progenitor acute lymphoblastic leukemia; Ectodermal dysplasia skin fragility syndrome; Ectodermal dysplasia-syndactyly syndrome 1; Ectopia lentis, isolated autosomal recessive and dominant; Ectrodactyly, ectodermal dysplasia, and cleft lip/palate syndrome 3; Ehlers-Danlos syndrome type 7 (autosomal recessive), classic type, type 2 (progeroid), hydroxylysine-deficient, type 4, type 4 variant, and due to tenascin-X deficiency; Eichsfeld type congenital muscular dystrophy; Endocrine-cerebroosteodysplasia; Enhanced s-cone syndrome; Enlarged vestibular aqueduct syndrome; Enterokinase deficiency; Epidermodysplasia verruciformis; Epidermolysa bullosa simplex and limb girdle muscular dystrophy, simplex with mottled pigmentation, simplex with pyloric atresia, simplex, autosomal recessive, and with pyloric atresia; Epidermolytic palmoplantar keratoderma; Familial febrile seizures 8; Epilepsy, childhood absence 2, 12 (idiopathic generalized, susceptibility to) 5 (nocturnal frontal lobe), nocturnal frontal lobe type 1, partial, with variable foci, progressive myoclonic 3, and X-linked, with variable learning disabilities and behavior disorders; Epileptic encephalopathy, childhood-onset, early infantile, 1, 19, 23, 25, 30, and 32; Epiphyseal dysplasia, multiple, with myopia and conductive deafness; Episodic ataxia type 2; Episodic pain syndrome, familial, 3; Epstein syndrome; Fechtner syndrome; Erythropoietic protoporphyria; Estrogen resistance; Exudative vitreoretinopathy 6; Fabry disease and Fabry disease, cardiac variant; Factor H, VII, X, v and factor viii, combined deficiency of 2, xiii, a subunit, deficiency; Familial adenomatous polyposis 1 and 3; Familial amyloid nephropathy with urticaria and deafness; Familial cold urticarial; Familial aplasia of the vermis; Familial benign pemphigus; Familial cancer of breast; Breast cancer, susceptibility to; Osteosarcoma; Pancreatic cancer 3; Familial cardiomyopathy; Familial cold autoinflammatory syndrome 2; Familial colorectal cancer; Familial exudative vitreoretinopathy, X-linked; Familial hemiplegic migraine types 1 and 2; Familial hypercholesterolemia; Familial hypertrophic cardiomyopathy 1, 2, 3, 4, 7, 10, 23 and 24; Familial hypokalemia-hypomagnesemia; Familial hypoplastic, glomerulocystic kidney; Familial infantile myasthenia; Familial juvenile gout; Familial Mediterranean fever and Familial mediterranean fever, autosomal dominant; Familial porencephaly; Familial porphyria cutanea tarda; Familial pulmonary capillary hemangiomatosis; Familial renal glucosuria; Familial renal hypouricemia; Familial restrictive cardiomyopathy 1; Familial type 1 and 3 hyperlipoproteinemia; Fanconi anemia, complementation group E, I, N, and O; Fanconi-Bickel syndrome; Favism, susceptibility to; Febrile seizures, familial, 11; Feingold syndrome 1; Fetal hemoglobin quantitative trait locus 1; FG syndrome and FG syndrome 4; Fibrosis of extraocular muscles, congenital, 1, 2, 3a (with or without extraocular involvement), 3b; Fish-eye disease; Fleck corneal dystrophy; Floating-Harbor syndrome; Focal epilepsy with speech disorder with or without mental retardation; Focal segmental glomerulosclerosis 5; Forebrain defects; Frank Ter Haar syndrome; Borrone Di Rocco Crovato syndrome; Frasier syndrome; Wilms tumor 1; Freeman-Sheldon syndrome; Frontometaphyseal dysplasia land 3; Frontotemporal dementia; Frontotemporal dementia and/or amyotrophic lateral sclerosis 3 and 4; Frontotemporal Dementia Chromosome 3-Linked and Frontotemporal dementia ubiquitin-positive; Fructose-biphosphatase deficiency; Fuhrmann syndrome; Gamma-aminobutyric acid transaminase deficiency; Gamstorp-Wohlfart syndrome; Gaucher disease type 1 and Subacute neuronopathic; Gaze palsy, familial horizontal, with progressive scoliosis; Generalized dominant dystrophic epidermolysis bullosa; Generalized epilepsy with febrile seizures plus 3, type 1, type 2; Epileptic encephalopathy Lennox-Gastaut type; Giant axonal neuropathy; Glanzmann thrombasthenia; Glaucoma 1, open angle, e, F, and G; Glaucoma 3, primary congenital, d; Glaucoma, congenital and Glaucoma, congenital, Coloboma; Glaucoma, primary open angle, juvenile-onset; Glioma susceptibility 1; Glucose transporter type 1 deficiency syndrome; Glucose-6-phosphate transport defect; GLUT1 deficiency syndrome 2; Epilepsy, idiopathic generalized, susceptibility to, 12; Glutamate formiminotransferase deficiency; Glutaric acidemia IIA and IIB; Glutaric aciduria, type 1; Gluthathione synthetase deficiency; Glycogen storage disease 0 (muscle), II (adult form), IXa2, IXc, type 1A; type II, type IV, IV (combined hepatic and myopathic), type V, and type VI; Goldmann-Favre syndrome; Gordon syndrome; Gorlin syndrome; Holoprosencephaly sequence; Holoprosencephaly 7; Granulomatous disease, chronic, X-linked, variant; Granulosa cell tumor of the ovary; Gray platelet syndrome; Griscelli syndrome type 3; Groenouw corneal dystrophy type I; Growth and mental retardation, mandibulofacial dysostosis, microcephaly, and cleft palate; Growth hormone deficiency with pituitary anomalies; Growth hormone insensitivity with immunodeficiency; GTP cyclohydrolase I deficiency; Hajdu-Cheney syndrome; Hand foot uterus syndrome; Hearing impairment; Hemangioma, capillary infantile; Hematologic neoplasm; Hemochromatosis type 1, 2B, and 3; Microvascular complications of diabetes 7; Transferrin serum level quantitative trait locus 2; Hemoglobin H disease, nondeletional; Hemolytic anemia, nonspherocytic, due to glucose phosphate isomerase deficiency; Hemophagocytic lymphohistiocytosis, familial, 2; Hemophagocytic lymphohistiocytosis, familial, 3; Heparin cofactor II deficiency; Hereditary acrodermatitis enteropathica; Hereditary breast and ovarian cancer syndrome; Ataxia-telangiectasia-like disorder; Hereditary diffuse gastric cancer; Hereditary diffuse leukoencephalopathy with spheroids; Hereditary factors II, IX, VIII deficiency disease; Hereditary hemorrhagic telangiectasia type 2; Hereditary insensitivity to pain with anhidrosis; Hereditary lymphedema type I; Hereditary motor and sensory neuropathy with optic atrophy; Hereditary myopathy with early respiratory failure; Hereditary neuralgic amyotrophy; Hereditary Nonpolyposis Colorectal Neoplasms; Lynch syndrome I and II; Hereditary pancreatitis; Pancreatitis, chronic, susceptibility to; Hereditary sensory and autonomic neuropathy type IIB amd IIA; Hereditary sideroblastic anemia; Hermansky-Pudlak syndrome 1, 3, 4, and 6; Heterotaxy, visceral, 2, 4, and 6, autosomal; Heterotaxy, visceral, X-linked; Heterotopia; Histiocytic medullary reticulosis; Histiocytosis-lymphadenopathy plus syndrome; Holocarboxylase synthetase deficiency; Holoprosencephaly 2, 3, 7, and 9; Holt-Oram syndrome; Homocysteinemia due to MTHFR deficiency, CBS deficiency, and Homocystinuria, pyridoxine-responsive; Homocystinuria-Megaloblastic anemia due to defect in cobalamin metabolism, cblE complementation type; Howel-Evans syndrome; Hurler syndrome; Hutchinson-Gilford syndrome; Hydrocephalus; Hyperammonemia, type III; Hypercholesterolaemia and Hypercholesterolemia, autosomal recessive; Hyperekplexia 2 and Hyperekplexia hereditary; Hyperferritinemia cataract syndrome; Hyperglycinuria; Hyperimmunoglobulin D with periodic fever; Mevalonic aciduria; Hyperimmunoglobulin E syndrome; Hyperinsulinemic hypoglycemia familial 3, 4, and 5; Hyperinsulinism-hyperammonemia syndrome; Hyperlysinemia; Hypermanganesemia with dystonia, polycythemia and cirrhosis; Hyperornithinemia-hyperammonemia-homocitrullinuria syndrome; Hyperparathyroidism 1 and 2; Hyperparathyroidism, neonatal severe; Hyperphenylalaninemia, bh4-deficient, a, due to partial pts deficiency, BH4-deficient, D, and non-pku; Hyperphosphatasia with mental retardation syndrome 2, 3, and 4; Hypertrichotic osteochondrodysplasia; Hypobetalipoproteinemia, familial, associated with apob32; Hypocalcemia, autosomal dominant 1; Hypocalciuric hypercalcemia, familial, types 1 and 3; Hypochondrogenesis; Hypochromic microcytic anemia with iron overload; Hypoglycemia with deficiency of glycogen synthetase in the liver; Hypogonadotropic hypogonadism 11 with or without anosmia; Hypohidrotic ectodermal dysplasia with immune deficiency; Hypohidrotic X-linked ectodermal dysplasia; Hypokalemic periodic paralysis 1 and 2; Hypomagnesemia 1, intestinal; Hypomagnesemia, seizures, and mental retardation; Hypomyelinating leukodystrophy 7; Hypoplastic left heart syndrome; Atrioventricular septal defect and common atrioventricular junction; Hypospadias 1 and 2, X-linked; Hypothyroidism, congenital, nongoitrous, 1; Hypotrichosis 8 and 12; Hypotrichosis-lymphedema-telangiectasia syndrome; I blood group system; Ichthyosis bullosa of Siemens; Ichthyosis exfoliativa; Ichthyosis prematurity syndrome; Idiopathic basal ganglia calcification 5; Idiopathic fibrosing alveolitis, chronic form; Dyskeratosis congenita, autosomal dominant, 2 and 5; Idiopathic hypercalcemia of infancy; Immune dysfunction with T-cell inactivation due to calcium entry defect 2; Immunodeficiency 15, 16, 19, 30, 31C, 38, 40, 8, due to defect in cd3-zeta, with hyper IgM type I and 2, and X-Linked, with magnesium defect, Epstein-Barr virus infection, and neoplasia; Immunodeficiency-centromeric instability-facial anomalies syndrome 2; Inclusion body myopathy 2 and 3; Nonaka myopathy; Infantile convulsions and paroxysmal choreoathetosis, familial; Infantile cortical hyperostosis; Infantile GM1 gangliosidosis; Infantile hypophosphatasia; Infantile nephronophthisis; Infantile nystagmus, X-linked; Infantile Parkinsonism-dystonia; Infertility associated with multi-tailed spermatozoa and excessive DNA; Insulin resistance; Insulin-resistant diabetes mellitus and acanthosis nigricans; Insulin-dependent diabetes mellitus secretory diarrhea syndrome; Interstitial nephritis, karyomegalic; Intrauterine growth retardation, metaphyseal dysplasia, adrenal hypoplasia congenita, and genital anomalies; Iodotyrosyl coupling defect; IRAK4 deficiency; Iridogoniodysgenesis dominant type and type 1; Iron accumulation in brain; Ischiopatellar dysplasia; Islet cell hyperplasia; Isolated 17,20-lyase deficiency; Isolated lutropin deficiency; Isovaleryl-CoA dehydrogenase deficiency; Jankovic Rivera syndrome; Jervell and Lange-Nielsen syndrome 2; Joubert syndrome 1, 6, 7, 9/15 (digenic), 14, 16, and 17, and Orofaciodigital syndrome xiv; Junctional epidermolysis bullosa gravis of Herlitz; Juvenile GM>1<gangliosidosis; Juvenile polyposis syndrome; Juvenile polyposis/hereditary hemorrhagic telangiectasia syndrome; Juvenile retinoschisis; Kabuki make-up syndrome; Kallmann syndrome 1, 2, and 6; Delayed puberty; Kanzaki disease; Karak syndrome; Kartagener syndrome; Kenny-Caffey syndrome type 2; Keppen-Lubinsky syndrome; Keratoconus 1; Keratosis follicularis; Keratosis palmoplantaris striata 1; Kindler syndrome; L-2-hydroxyglutaric aciduria; Larsen syndrome, dominant type; Lattice corneal dystrophy Type III; Leber amaurosis; Zellweger syndrome; Peroxisome biogenesis disorders; Zellweger syndrome spectrum; Leber congenital amaurosis 11, 12, 13, 16, 4, 7, and 9; Leber optic atrophy; Aminoglycoside-induced deafness; Deafness, nonsyndromic sensorineural, mitochondrial; Left ventricular noncompaction 5; Left-right axis malformations; Leigh disease; Mitochondrial short-chain Enoyl-CoA Hydratase 1 deficiency; Leigh syndrome due to mitochondrial complex I deficiency; Leiner disease; Leri Weill dyschondrosteosis; Lethal congenital contracture syndrome 6; Leukocyte adhesion deficiency type I and III; Leukodystrophy, Hypomyelinating, 11 and 6; Leukoencephalopathy with ataxia, with Brainstem and Spinal Cord Involvement and Lactate Elevation, with vanishing white matter, and progressive, with ovarian failure; Leukonychia totalis; Lewy body dementia; Lichtenstein-Knon Syndrome; Li-Fraumeni syndrome 1; Lig4 syndrome; Limb-girdle muscular dystrophy, type 1B, 2A, 2B, 2D, Cl, C5, C9, C14; Congenital muscular dystrophy-dystroglycanopathy with brain and eye anomalies, type A14 and B14; Lipase deficiency combined; Lipid proteinosis; Lipodystrophy, familial partial, type 2 and 3; Lissencephaly 1, 2 (X-linked), 3, 6 (with microcephaly), X-linked; Subcortical laminar heterotopia, X-linked; Liver failure acute infantile; Loeys-Dietz syndrome 1, 2, 3; Long QT syndrome 1, 2, 2/9, 2/5, (digenic), 3, 5 and 5, acquired, susceptibility to; Lung cancer; Lymphedema, hereditary, id; Lymphedema, primary, with myelodysplasia; Lymphoproliferative syndrome 1, 1 (X-linked), and 2; Lysosomal acid lipase deficiency; Macrocephaly, macrosomia, facial dysmorphism syndrome; Macular dystrophy, vitelliform, adult-onset; Malignant hyperthermia susceptibility type 1; Malignant lymphoma, non-Hodgkin; Malignant melanoma; Malignant tumor of prostate; Mandibuloacral dysostosis; Mandibuloacral dysplasia with type A or B lipodystrophy, atypical; Mandibulofacial dysostosis, Treacher Collins type, autosomal recessive; Mannose-binding protein deficiency; Maple syrup urine disease type 1A and type 3; Marden Walker like syndrome; Marfan syndrome; Marinesco-Sj\xc3∴xb6gren syndrome; Martsolf syndrome; Maturity-onset diabetes of the young, type 1, type 2, type 11, type 3, and type 9; May-Hegglin anomaly; MYH9 related disorders; Sebastian syndrome; McCune-Albright syndrome; Somatotroph adenoma; Sex cord-stromal tumor; Cushing syndrome; McKusick Kaufman syndrome; McLeod neuroacanthocytosis syndrome; Meckel-Gruber syndrome; Medium-chain acyl-coenzyme A dehydrogenase deficiency; Medulloblastoma; Megalencephalic leukoencephalopathy with subcortical cysts 1 and 2a; Megalencephaly Cutis marmorata telangiectatica congenital; PIK3CA Related Overgrowth Spectrum; Megalencephaly-polymicrogyria-polydactyly-hydrocephalus syndrome 2; Megaloblastic anemia, thiamine-responsive, with diabetes mellitus and sensorineural deafness; Meier-Gorlin syndromes land 4; Melnick-Needles syndrome; Meningioma; Mental retardation, X-linked, 3, 21, 30, and 72; Mental retardation and microcephaly with pontine and cerebellar hypoplasia; Mental retardation X-linked syndromic 5; Mental retardation, anterior maxillary protrusion, and strabismus; Mental retardation, autosomal dominant 12, 13, 15, 24, 3, 30, 4, 5, 6, and 9; Mental retardation, autosomal recessive 15, 44, 46, and 5; Mental retardation, stereotypic movements, epilepsy, and/or cerebral malformations; Mental retardation, syndromic, Claes-Jensen type, X-linked; Mental retardation, X-linked, nonspecific, syndromic, Hedera type, and syndromic, wu type; Merosin deficient congenital muscular dystrophy; Metachromatic leukodystrophy juvenile, late infantile, and adult types; Metachromatic leukodystrophy; Metatrophic dysplasia; Methemoglobinemia types I and 2; Methionine adenosyltransferase deficiency, autosomal dominant; Methylmalonic acidemia with homocystinuria; Methylmalonic aciduria cblB type; Methylmalonic aciduria due to methylmalonyl-CoA mutase deficiency; METHYLMALONIC ACIDURIA, mut(0) TYPE; Microcephalic osteodysplastic primordial dwarfism type 2; Microcephaly with or without chorioretinopathy, lymphedema, or mental retardation; Microcephaly, hiatal hernia and nephrotic syndrome; Microcephaly; Hypoplasia of the corpus callosum; Spastic paraplegia 50, autosomal recessive; Global developmental delay; CNS hypomyelination; Brain atrophy; Microcephaly, normal intelligence and immunodeficiency; Microcephaly-capillary malformation syndrome; Microcytic anemia; Microphthalmia syndromic 5, 7, and 9; Microphthalmia, isolated 3, 5, 6, 8, and with coloboma 6; Microspherophakia; Migraine, familial basilar; Miller syndrome; Minicore myopathy with external ophthalmoplegia; Myopathy, congenital with cores; Mitchell-Riley syndrome; mitochondrial 3-hydroxy-3-methylglutaryl-CoA synthase deficiency; Mitochondrial complex I, II, III, III (nuclear type 2, 4, or 8) deficiency; Mitochondrial DNA depletion syndrome 11, 12 (cardiomyopathic type), 2, 4B (MNGIE type), 8B (MNGIE type); Mitochondrial DNA-depletion syndrome 3 and 7, hepatocerebral types, and 13 (encephalomyopathic type); Mitochondrial phosphate carrier and pyruvate carrier deficiency; Mitochondrial trifunctional protein deficiency; Long-chain 3-hydroxyacyl-CoA dehydrogenase deficiency; Miyoshi muscular dystrophy 1; Myopathy, distal, with anterior tibial onset; Mohr-Tranebjaerg syndrome; Molybdenum cofactor deficiency, complementation group A; Mowat-Wilson syndrome; Mucolipidosis III Gamma; Mucopolysaccharidosis type VI, type VI (severe), and type VII; Mucopolysaccharidosis, MPS-I-H/S, MPS-II, MPS-III-A, MPS-III-B, MPS-III-C, MPS-IV-A, MPS-IV-B; Retinitis Pigmentosa 73; Gangliosidosis GM1 type1 (with cardiac involvement) 3; Multicentric osteolysis nephropathy; Multicentric osteolysis, nodulosis and arthropathy; Multiple congenital anomalies; Atrial septal defect 2; Multiple congenital anomalies-hypotonia-seizures syndrome 3; Multiple Cutaneous and Mucosal Venous Malformations; Multiple endocrine neoplasia, types land 4; Multiple epiphyseal dysplasia 5 or Dominant; Multiple gastrointestinal atresias; Multiple pterygium syndrome Escobar type; Multiple sulfatase deficiency; Multiple synostoses syndrome 3; Muscle AMP guanine oxidase deficiency; Muscle eye brain disease; Muscular dystrophy, congenital, megaconial type; Myasthenia, familial infantile, 1; Myasthenic Syndrome, Congenital, 11, associated with acetylcholine receptor deficiency; Myasthenic Syndrome, Congenital, 17, 2A (slow-channel), 4B (fast-channel), and without tubular aggregates; Myeloperoxidase deficiency; MYH-associated polyposis; Endometrial carcinoma; Myocardial infarction 1; Myoclonic dystonia; Myoclonic-Atonic Epilepsy; Myoclonus with epilepsy with ragged red fibers; Myofibrillar myopathy 1 and ZASP-related; Myoglobinuria, acute recurrent, autosomal recessive; Myoneural gastrointestinal encephalopathy syndrome; Cerebellar ataxia infantile with progressive external ophthalmoplegia; Mitochondrial DNA depletion syndrome 4B, MNGIE type; Myopathy, centronuclear, 1, congenital, with excess of muscle spindles, distal, 1, lactic acidosis, and sideroblastic anemia 1, mitochondrial progressive with congenital cataract, hearing loss, and developmental delay, and tubular aggregate, 2; Myopia 6; Myosclerosis, autosomal recessive; Myotonia congenital; Congenital myotonia, autosomal dominant and recessive forms; Nail-patella syndrome; Nance-Horan syndrome; Nanophthalmos 2; Navajo neurohepatopathy; Nemaline myopathy 3 and 9; Neonatal hypotonia; Intellectual disability; Seizures; Delayed speech and language development; Mental retardation, autosomal dominant 31; Neonatal intrahepatic cholestasis caused by citrin deficiency; Nephrogenic diabetes insipidus, Nephrogenic diabetes insipidus, X-linked; Nephrolithiasis/osteoporosis, hypophosphatemic, 2; Nephronophthisis 13, 15 and 4; Infertility; Cerebello-oculo-renal syndrome (nephronophthisis, oculomotor apraxia and cerebellar abnormalities); Nephrotic syndrome, type 3, type 5, with or without ocular abnormalities, type 7, and type 9; Nestor-Guillermo progeria syndrome; Neu-Laxova syndrome 1; Neurodegeneration with brain iron accumulation 4 and 6; Neuroferritinopathy; Neurofibromatosis, type 1 and type 2; Neurofibrosarcoma; Neurohypophyseal diabetes insipidus; Neuropathy, Hereditary Sensory, Type IC; Neutral 1 amino acid transport defect; Neutral lipid storage disease with myopathy; Neutrophil immunodeficiency syndrome; Nicolaides-Baraitser syndrome; Niemann-Pick disease type C1, C2, type A, and type Cl, adult form; Non-ketotic hyperglycinemia; Noonan syndrome 1 and 4, LEOPARD syndrome 1; Noonan syndrome-like disorder with or without juvenile myelomonocytic leukemia; Normokalemic periodic paralysis, potassium-sensitive; Norum disease; Epilepsy, Hearing Loss, And Mental Retardation Syndrome; Mental Retardation, X-Linked 102 and syndromic 13; Obesity; Ocular albinism, type I; Oculocutaneous albinism type 1B, type 3, and type 4; Oculodentodigital dysplasia; Odontohypophosphatasia; Odontotrichomelic syndrome; Oguchi disease; Oligodontia-colorectal cancer syndrome; Opitz G/BBB syndrome; Optic atrophy 9; Oral-facial-digital syndrome; Ornithine aminotransferase deficiency; Orofacial cleft 11 and 7, Cleft lip/palate-ectodermal dysplasia syndrome; Orstavik Lindemann Solberg syndrome; Osteoarthritis with mild chondrodysplasia; Osteochondritis dissecans; Osteogenesis imperfecta type 12, type 5, type 7, type 8, type I, type III, with normal sclerae, dominant form, recessive perinatal lethal; Osteopathia striata with cranial sclerosis, Osteopetrosis autosomal dominant type 1 and 2, recessive 4, recessive 1, recessive 6; Osteoporosis with pseudoglioma; Oto-palato-digital syndrome, types I and H; Ovarian dysgenesis 1; Ovarioleukodystrophy; Pachyonychia congenita 4 and type 2; Paget disease of bone, familial; Pallister-Hall syndrome; Palmoplantar keratoderma, nonepidermolytic, focal or diffuse; Pancreatic agenesis and congenital heart disease; Papillon-Lef\xc3\xa8vre syndrome; Paragangliomas 3; Paramyotonia congenita of von Eulenburg; Parathyroid carcinoma; Parkinson disease 14, 15, 19 (juvenile-onset), 2, 20 (early-onset), 6, (autosomal recessive early-onset, and 9; Partial albinism; Partial hypoxanthine-guanine phosphoribosyltransferase deficiency; Patterned dystrophy of retinal pigment epithelium; PC-K6a; Pelizaeus-Merzbacher disease; Pendred syndrome; Peripheral demyelinating neuropathy, central dysmyelination; Hirschsprung disease; Permanent neonatal diabetes mellitus; Diabetes mellitus, permanent neonatal, with neurologic features; Neonatal insulin-dependent diabetes mellitus; Maturity-onset diabetes of the young, type 2; Peroxisome biogenesis disorder 14B, 2A, 4A, 5B, 6A, 7A, and 7B; Perrault syndrome 4; Perry syndrome; Persistent hyperinsulinemic hypoglycemia of infancy; familial hyperinsulinism; Phenotypes; Phenylketonuria; Pheochromocytoma; Hereditary Paraganglioma-Pheochromocytoma Syndromes; Paragangliomas 1; Carcinoid tumor of intestine; Cowden syndrome 3; Phosphoglycerate dehydrogenase deficiency; Phosphoglycerate kinase 1 deficiency; Photosensitive trichothiodystrophy; Phytanic acid storage disease; Pick disease; Pierson syndrome; Pigmentary retinal dystrophy; Pigmented nodular adrenocortical disease, primary, 1; Pilomatrixoma; Pitt-Hopkins syndrome; Pituitary dependent hypercortisolism; Pituitary hormone deficiency, combined 1, 2, 3, and 4; Plasminogen activator inhibitor type 1 deficiency; Plasminogen deficiency, type I; Platelet-type bleeding disorder 15 and 8; Poikiloderma, hereditary fibrosing, with tendon contractures, myopathy, and pulmonary fibrosis; Polycystic kidney disease 2, adult type, and infantile type; Polycystic lipomembranous osteodysplasia with sclerosing leukoencephalopathy; Polyglucosan body myopathy 1 with or without immunodeficiency; Polymicrogyria, asymmetric, bilateral frontoparietal; Polyneuropathy, hearing loss, ataxia, retinitis pigmentosa, and cataract; Pontocerebellar hypoplasia type 4; Popliteal pterygium syndrome; Porencephaly 2; Porokeratosis 8, disseminated superficial actinic type; Porphobilinogen synthase deficiency; Porphyria cutanea tarda; Posterior column ataxia with retinitis pigmentosa; Posterior polar cataract type 2; Prader-Willi-like syndrome; Premature ovarian failure 4, 5, 7, and 9; Primary autosomal recessive microcephaly 10, 2, 3, and 5; Primary ciliary dyskinesia 24; Primary dilated cardiomyopathy; Left ventricular noncompaction 6; 4, Left ventricular noncompaction 10; Paroxysmal atrial fibrillation; Primary hyperoxaluria, type I, type, and type III; Primary hypertrophic osteoarthropathy, autosomal recessive 2; Primary hypomagnesemia; Primary open angle glaucoma juvenile onset 1; Primary pulmonary hypertension; Primrose syndrome; Progressive familial heart block type 1B; Progressive familial intrahepatic cholestasis 2 and 3; Progressive intrahepatic cholestasis; Progressive myoclonus epilepsy with ataxia; Progressive pseudorheumatoid dysplasia; Progressive sclerosing poliodystrophy; Prolidase deficiency; Proline dehydrogenase deficiency; Schizophrenia 4; Properdin deficiency, X-linked; Propionic academia; Proprotein convertase 1/3 deficiency; Prostate cancer, hereditary, 2; Protan defect; Proteinuria; Finnish congenital nephrotic syndrome; Proteus syndrome; Breast adenocarcinoma; Pseudoachondroplastic spondyloepiphyseal dysplasia syndrome; Pseudohypoaldosteronism type 1 autosomal dominant and recessive and type 2; Pseudohypoparathyroidism type 1A, Pseudopseudohypoparathyroidism; Pseudoneonatal adrenoleukodystrophy; Pseudoprimary hyperaldosteronism; Pseudoxanthoma elasticum; Generalized arterial calcification of infancy 2; Pseudoxanthoma elasticum-like disorder with multiple coagulation factor deficiency; Psoriasis susceptibility 2; PTEN hamartoma tumor syndrome; Pulmonary arterial hypertension related to hereditary hemorrhagic telangiectasia; Pulmonary Fibrosis And/Or Bone Marrow Failure, Telomere-Related, 1 and 3; Pulmonary hypertension, primary, 1, with hereditary hemorrhagic telangiectasia; Purine-nucleoside phosphorylase deficiency; Pyruvate carboxylase deficiency; Pyruvate dehydrogenase E1-alpha deficiency; Pyruvate kinase deficiency of red cells; Raine syndrome; Rasopathy; Recessive dystrophic epidermolysis bullosa; Nail disorder, nonsyndromic congenital, 8; Reifenstein syndrome; Renal adysplasia; Renal carnitine transport defect; Renal coloboma syndrome; Renal dysplasia; Renal dysplasia, retinal pigmentary dystrophy, cerebellar ataxia and skeletal dysplasia; Renal tubular acidosis, distal, autosomal recessive, with late-onset sensorineural hearing loss, or with hemolytic anemia; Renal tubular acidosis, proximal, with ocular abnormalities and mental retardation; Retinal cone dystrophy 3B; Retinitis pigmentosa; Retinitis pigmentosa 10, 11, 12, 14, 15, 17, and 19; Retinitis pigmentosa 2, 20, 25, 35, 36, 38, 39, 4, 40, 43, 45, 48, 66, 7, 70, 72; Retinoblastoma; Rett disorder; Rhabdoid tumor predisposition syndrome 2; Rhegmatogenous retinal detachment, autosomal dominant; Rhizomelic chondrodysplasia punctata type 2 and type 3; Roberts-SC phocomelia syndrome; Robinow Sorauf syndrome; Robinow syndrome, autosomal recessive, autosomal recessive, with brachy-syn-polydactyly; Rothmund-Thomson syndrome; Rapadilino syndrome; RRM2B-related mitochondrial disease; Rubinstein-Taybi syndrome; Salla disease; Sandhoff disease, adult and infantil types; Sarcoidosis, early-onset; Blau syndrome; Schindler disease, type 1; Schizencephaly; Schizophrenia 15; Schneckenbecken dysplasia; Schwannomatosis 2; Schwartz Jampel syndrome type 1; Sclerocornea, autosomal recessive; Sclerosteosis; Secondary hypothyroidism; Segawa syndrome, autosomal recessive; Senior-Loken syndrome 4 and 5; Sensory ataxic neuropathy, dysarthria, and ophthalmoparesis; Sepiapterin reductase deficiency; SeSAME syndrome; Severe combined immunodeficiency due to ADA deficiency, with microcephaly, growth retardation, and sensitivity to ionizing radiation, atypical, autosomal recessive, T cell-negative, B cell-positive, NK cell-negative of NK-positive; Severe congenital neutropenia; Severe congenital neutropenia 3, autosomal recessive or dominant; Severe congenital neutropenia and 6, autosomal recessive; Severe myoclonic epilepsy in infancy; Generalized epilepsy with febrile seizures plus, types 1 and 2; Severe X-linked myotubular myopathy; Short QT syndrome 3; Short stature with nonspecific skeletal abnormalities; Short stature, auditory canal atresia, mandibular hypoplasia, skeletal abnormalities; Short stature, onychodysplasia, facial dysmorphism, and hypotrichosis; Primordial dwarfism; Short-rib thoracic dysplasia 11 or 3 with or without polydactyly; Sialidosis type I and II; Silver spastic paraplegia syndrome; Slowed nerve conduction velocity, autosomal dominant; Smith-Lemli-Opitz syndrome; Snyder Robinson syndrome; Somatotroph adenoma; Prolactinoma; familial, Pituitary adenoma predisposition; Sotos syndrome 1 or 2; Spastic ataxia 5, autosomal recessive, Charlevoix-Saguenay type, 1, 10, or 11, autosomal recessive; Amyotrophic lateral sclerosis type 5; Spastic paraplegia 15, 2, 3, 35, 39, 4, autosomal dominant, 55, autosomal recessive, and 5A; Bile acid synthesis defect, congenital, 3; Spermatogenic failure 11, 3, and 8; Spherocytosis types 4 and 5; Spheroid body myopathy; Spinal muscular atrophy, lower extremity predominant 2, autosomal dominant; Spinal muscular atrophy, type II; Spinocerebellar ataxia 14, 21, 35, 40, and 6; Spinocerebellar ataxia autosomal recessive 1 and 16; Splenic hypoplasia; Spondylocarpotarsal synostosis syndrome; Spondylocheirodysplasia, Ehlers-Danlos syndrome-like, with immune dysregulation, Aggrecan type, with congenital joint dislocations, short limb-hand type, Sedaghatian type, with cone-rod dystrophy, and Kozlowski type; Parastremmatic dwarfism; Stargardt disease 1; Cone-rod dystrophy 3; Stickler syndrome type 1; Kniest dysplasia; Stickler syndrome, types 1 (nonsyndromic ocular) and 4; Sting-associated vasculopathy, infantile-onset; Stormorken syndrome; Sturge-Weber syndrome, Capillary malformations, congenital, 1; Succinyl-CoA acetoacetate transferase deficiency; Sucrase-isomaltase deficiency; Sudden infant death syndrome; Sulfite oxidase deficiency, isolated; Supravalvar aortic stenosis; Surfactant metabolism dysfunction, pulmonary, 2 and 3; Symphalangism, proximal, 1b; Syndactyly Cenani Lenz type; Syndactyly type 3; Syndromic X-linked mental retardation 16; Talipes equinovarus; Tangier disease; TARP syndrome; Tay-Sachs disease, B1 variant, Gm2-gangliosidosis (adult), Gm2-gangliosidosis (adult-onset); Temtamy syndrome; Tenorio Syndrome; Terminal osseous dysplasia; Testosterone 17-beta-dehydrogenase deficiency; Tetraamelia, autosomal recessive; Tetralogy of Fallot; Hypoplastic left heart syndrome 2; Truncus arteriosus; Malformation of the heart and great vessels; Ventricular septal defect 1; Thiel-Behnke corneal dystrophy; Thoracic aortic aneurysms and aortic dissections; Marfanoid habitus; Three M syndrome 2; Thrombocytopenia, platelet dysfunction, hemolysis, and imbalanced globin synthesis; Thrombocytopenia, X-linked; Thrombophilia, hereditary, due to protein C deficiency, autosomal dominant and recessive; Thyroid agenesis; Thyroid cancer, follicular; Thyroid hormone metabolism, abnormal; Thyroid hormone resistance, generalized, autosomal dominant; Thyrotoxic periodic paralysis and Thyrotoxic periodic paralysis 2; Thyrotropin-releasing hormone resistance, generalized; Timothy syndrome; TNF receptor-associated periodic fever syndrome (TRAPS); Tooth agenesis, selective, 3 and 4; Torsades de pointes; Townes-Brocks-branchiootorenal-like syndrome; Transient bullous dermolysis of the newborn; Treacher collins syndrome 1; Trichomegaly with mental retardation, dwarfism and pigmentary degeneration of retina; Trichorhinophalangeal dysplasia type I; Trichorhinophalangeal syndrome type 3; Trimethylaminuria; Tuberous sclerosis syndrome; Lymphangiomyomatosis; Tuberous sclerosis 1 and 2; Tyrosinase-negative oculocutaneous albinism; Tyrosinase-positive oculocutaneous albinism; Tyrosinemia type I; UDPglucose-4-epimerase deficiency; Ullrich congenital muscular dystrophy; Ulna and fibula absence of with severe limb deficiency; Upshaw-Schulman syndrome; Urocanate hydratase deficiency; Usher syndrome, types 1, 1B, 1D, 1G, 2A, 2C, and 2D; Retinitis pigmentosa 39; UV-sensitive syndrome; Van der Woude syndrome; Van Maldergem syndrome 2; Hennekam lymphangiectasia-lymphedema syndrome 2; Variegate porphyria; Ventriculomegaly with cystic kidney disease; Verheij syndrome; Very long chain acyl-CoA dehydrogenase deficiency; Vesicoureteral reflux 8; Visceral heterotaxy 5, autosomal; Visceral myopathy; Vitamin D-dependent rickets, types land 2; Vitelliform dystrophy; von Willebrand disease type 2M and type 3; Waardenburg syndrome type 1, 4C, and 2E (with neurologic involvement); Klein-Waardenberg syndrome; Walker-Warburg congenital muscular dystrophy; Warburg micro syndrome 2 and 4; Warts, hypogammaglobulinemia, infections, and myelokathexis; Weaver syndrome; Weill-Marchesani syndrome 1 and 3; Weill-Marchesani-like syndrome; Weissenbacher-Zweymuller syndrome; Werdnig-Hoffmann disease; Charcot-Marie-Tooth disease; Werner syndrome; WFS1-Related Disorders; Wiedemann-Steiner syndrome; Wilson disease, Wolfram-like syndrome, autosomal dominant; Worth disease; Van Buchem disease type 2; Xeroderma pigmentosum, complementation group b, group D, group E, and group G; X-linked agammaglobulinemia; X-linked hereditary motor and sensory neuropathy; X-linked ichthyosis with steryl-sulfatase deficiency; X-linked periventricular heterotopia; Oto-palato-digital syndrome, type I; X-linked severe combined immunodeficiency; Zimmermann-Laband syndrome and Zimmermann-Laband syndrome 2; and Zonular pulverulent cataract 3. Reference is made to PCT Publication No. WO2020/191249A1, the entirety of which is incorporated by reference herein.

TABLE 1
Non-limiting Fanzor polypeptides associated with the present disclosure

| | | | | SEQ ID |
|---|---|---|---|---|
| ID | family | transposon | species | NO: |
| GL376588.1_253383_6_854 | unclassified | unknown | Globisporangium | 95 |
| | | | ultimum DAOM | |
| GL376604.1_220281_6_710 | unclassified | Mariner/Tc1 | Globisporangium | 96 |
| | | | ultimum DAOM | |
| GL376607.1_109039_1_216 | unclassified | Mariner/Tc1 | Globisporangium | 97 |
| | | | ultimum DAOM | |
| GL376611.1_4936_4_13 | family4 | Mariner/Tc1 | Globisporangium | 98 |
| | | | ultimum DAOM | |
| GL376621.1_345412_1_1044 | unclassified | unknown | Globisporangium | 99 |
| | | | ultimum DAOM | |
| GL376622.1_287789_2_885 | family4 | unknown | Globisporangium | 100 |
| | | | ultimum DAOM | |
| GL376622.1_518608_1_1686 | unclassified | Mariner/Tc1 | Globisporangium | 101 |
| | | | ultimum DAOM | |
| GL376635 1_835862_5_2463 | unclassified | unknown | Globisporangium | 102 |
| | | | ultimum DAOM | |
| GL376636.1_1596570_6_4993 | family4 | unknown | Globisporangium | 103 |
| | | | ultimum DAOM | |
| GL376636.1_1785377_5_5646 | family4 | unknown | Globisporangium | 104 |
| | | | ultimum DAOM | |
| GL501433.1_164307_6_123 | unclassified | unknown | Mayetiola destructor | 105 |
| GL501433.1_1428920_2_1186 | family3 | unknown | Mayetiola destructor | 106 |
| GL501433.1_16233535_1317 | unclassified | unknown | Mayetiola destructor | 105 |
| GL501489.1_36158_2_35 | unclassified | unknown | Mayetiola destructor | 107 |
| GL501520.1_1365336_3_1164 | unclassified | unknown | Mayetiola destructor | 108 |
| GL502296 1_8553_6_7 | unclassified | unknown | Mayetiola destructor | 109 |
| GL502309.1_108564_6_110 | unclassified | unknown | Mayetiola destructor | 110 |
| CH476739.1_186048_6_209 | unclassified | Mariner/Tc1 | Rhizopus delemar RA | 111 |
| | | | 99-880 | |
| CH476739.1_1217181_6_1264 | unclassified | Mariner/Tc1 | Rhizopus delemar RA | 112 |
| | | | 99-880 | |
| CH476733.1_2211223_1_2286 | unclassified | Mariner/Tc1 | Rhizopus delemar RA | 113 |
| | | | 99-880 | |
| CH476733.1_2622420_3_2724 | unclassified | unknown | Rhizopus delemar RA | 114 |
| | | | 99-880 | |
| CH476732.1_4899204_6_5216 | unclassified | unknown | Rhizopus delemar RA | 115 |
| | | | 99-880 | |
| GG745350.1_554973_6_2921 | unclassified | unknown | Allomyces | 116 |
| | | | macrogynus ATCC | |
| | | | 38327 | |
| GG745334.1_844408_1_4615 | unclassified | unknown | Allomyces | 117 |
| | | | macrogynus ATCC | |
| | | | 38327 | |
| GG745330.1_1550736_3_8360 | unclassified | unknown | Allomyces | 118 |
| | | | macrogynus ATCC | |
| | | | 38327 | |
| FN649741.1_4296390_6_16119 | family4 | IS4 | Ectocarpus siliculosus | 119 |
| FN649741.1_5120619_6_19192 | family5 | unknown | Ectocarpus siliculosus | 120 |
| AMZP02002018.1_18846_3_64 | unclassified | unknown | Phytophthora lateralis | 121 |
| | | | MPF4 | |
| AMZP02003679.1_36468_3_74 | family5 | unknown | Phytophthora lateralis | 122 |
| | | | MPF4 | |
| KV740843.1_40129_4_63 | family5 | unknown | Phytophthora cryptogea | 123 |
| AZYI01000033.1_99262_1_144 | unclassified | unknown | Mucor irregularis B50 | 124 |
| AZYI01000270.1_85761_6_123 | unclassified | unknown | Mucor irregularis B50 | 125 |
| KK076501.1_670318_1_815 | unclassified | unknown | Mucor irregularis B50 | 126 |
| AZYI01000095.1_1363_1_5 | unclassified | unknown | Mucor irregularis B50 | 127 |
| AZYI01000017.1_162649_4_20 | unclassified | unknown | Mucor irregularis B50 | 128 |
| AZYI01001059.1_260425_4_333 | unclassified | unknown | Mucor irregularis B50 | 129 |
| KK099970.1_42960_6_102 | unclassified | unknown | Rhizomucor miehei | 130 |
| | | | CAU432 | |
| KK100131_1_484304_5_955 | unclassified | unknown | Rhizomucor miehei | 131 |
| | | | CAU432 | |
| KZ985346.1_61052_5_204 | family5 | unknown | Phytophthora rubi | 132 |
| DF237505.1_2862_3_8 | family5 | unknown | Klebsormidium nitens | 133 |
| KN042418.1_2512348_1_7307 | unclassified | unknown | Podila verticillata | 134 |
| | | | NRRL 6337 | |
| LK058886.1_26331_6_88 | unclassified | unknown | Phytophthora pisi | 135 |
| KN805390.1_609556_4_2415 | family5 | unknown | Schizochytrium sp. | 136 |
| | | | CCTCC M209059 | |
| CDFH01086817.1_8035_1_25 | family5 | unknown | Acanthamoeba | 137 |
| | | | astronyxis | |
| CDFH01086817.1_72538_1_175 | family5 | unknown | Acanthamoeba | 138 |
| | | | astronyxis | |
| CDEZ01022494.1_42723_6_136 | family5 | unknown | Acanthamoeba | 139 |
| | | | royreba | |
| CDEZ01023510.1_110417_5_310 | unclassified | unknown | Acanthamoeba | 140 |
| | | | royreba | |
| CDFI01096527.1_8035_1_25 | family5 | unknown | Acanthamoeba | 137 |
| | | | divionensis | |
| CDFI01096527.1_72538_1_175 | family5 | unknown | Acanthamoeba | 138 |
| | | | divionensis | |
| CDFN01041723.1_68201_5_311 | family5 | IS607 | Acanthamoeba quina | 141 |
| JPID01000119.1_31966_4_92 | family4 | unknown | Picochlorum sp. | 142 |
| | | | SENEW3 | |
| JPID01000141.1_49004_2_128 | family4 | unknown | Picochlorum sp. | 143 |
| | | | SENEW3 | |
| JPID01000068.1_110384_2_199 | unclassified | unknown | Picochlorum sp. | 144 |
| | | | SENEW3 | |
| LN721622.1_174025_4_263 | unclassified | unknown | Parasitella parasitica | 145 |
| LN725636.1_234555_3_380 | unclassified | unknown | Parasitella parasitica | 146 |
| LN726728.1_60832_1_93 | unclassified | unknown | Parasitella parasitica | 147 |
| LAXH01000083.1_2714_2_15 | unclassified | unknown | Tilleta horrida | 148 |
| CP010919.1_503039_2_1939 | family5 | unknown | Sporisorium | 149 |
| | | | scitamineum | |
| L.FUI01000161.1_72790_4_279 | unclassified | unknown | Balamuthia | 150 |
| | | | mandrillaris | |
| LFUI01000100.1_132015_3_462 | unclassified | unknown | Balamuthia | 151 |
| | | | mandrillaris | |
| LFUI01000087.1_127913_2_500 | family5 | unknown | Balamuthia | 152 |
| | | | mandrillaris | |
| LFUI01000012.1_13108_4_27 | family5 | unknown | Balamuthia | 153 |
| | | | mandrillaris | |
| LFUI01000043.1_24983_5_57 | family5 | unknown | Balamuthia | 154 |
| | | | mandrillaris | |
| LFUI01000002.1_36633_3_107 | family5 | unknown | Balamuthia | 155 |
| | | | mandrillaris | |
| LFUI01000036.1_233459_2_875 | family5 | unknown | Balamuthia | 156 |
| | | | mandrillaris | |
| LFUI01000036.1_239843_2_902 | family5 | unknown | Balamuthia | 157 |
| | | | mandrillaris | |
| LFUI01000025.1_20905_4_57 | family5 | unknown | Balamuthia | 158 |
| | | | mandrillaris | |
| LFUI01000060.1_10882_1_2 | unclassified | unknown | Balamuthia | 159 |
| | | | mandrillaris | |
| LFUI01000079.1_160558_1_534 | unclassified | unknown | Balamuthia | 160 |
| | | | mandrillaris | |
| LFUI01000279.1_18296_5_72 | family5 | unknown | Balamuthia | 161 |
| | | | mandrillaris | |
| LFUI01000239.1_7053_3_31 | unclassified | unknown | Balamuthia | 162 |
| | | | mandrillaris | |
| LFUI01000106.1_92141_5_316 | family5 | unknown | Balamuthia | 163 |
| | | | mandrillaris | |
| LFUI01000026.1_8574_3_18 | family5 | unknown | Balamuthia | 164 |
| | | | mandrillaris | |
| LFUI01000247.1_20023_4_49 | unclassified | unknown | Balamuthia | 165 |
| | | | mandrillaris | |
| LFUI01000158.1_7150_4_28 | family5 | unknown | Balamuthia | 166 |
| | | | mandrillaris | |
| LFUI01000188.1_49146_6_169 | family5 | unknown | Balamuthia | 167 |
| | | | mandrillaris | |
| LFUI01000192.1_50888_2_169 | unclassified | unknown | Balamuthia | 168 |
| | | | mandrillaris | |
| LFUI01000280.1_40257_3_138 | family5 | unknown | Balamuthia | 169 |
| | | | mandrillaris | |
| LGSM01000022 1_1_1_4 | family5 | unknown | Phytophthora | 170 |
| | | | multivora | |
| LGSM01000041.1_1_1_3 | family5 | unknown | Phytophthora | 171 |
| | | | multivora | |
| LGSM01000178.1_3_3_1 | family5 | unknown | Phytophthora | 172 |
| | | | multivora | |
| LGSM01000196.1_5219_5_4_153 | family5 | unknown | Phytophthora | 173 |
| | | | multivora | |
| LGSN01000004.1_183857_5_590 | family4 | unknown | Phylophthora taxon | 174 |
| | | | totara | |
| LGTR01000055.1_2346_6_7 | unclassified | unknown | Phytophthora | 175 |
| | | | agathidicida | |
| LGTR01000104.1_5172_3_15 | family5 | unknown | Phytophthora | 176 |
| | | | agathidicida | |
| LGTR01000164.1_2203_1_5 | unclassified | unknown | Phytophthora | 177 |
| | | | agathidicida | |
| KQ758850.1_1359032_5_6080 | family5 | unknown | Aurantiochytrium sp. | 178 |
| | | | T66 | |
| KQ758850.1_4486246_4_20492 | unclassified | unknown | Aurantiochytrium sp. | 179 |
| | | | T66 | |
| KQ758850.1_6798288_3_30831 | unclassified | unknown | Aurantiochytrium sp. | 180 |
| | | | T66 | |
| KQ758866.1_123359_2_567 | family4 | unknown | Aurantiochytrium sp. | 181 |
| | | | T66 | |
| KQ758897.1_931393_1_3944 | unclassified | unknown | Aurantiochytrium sp. | 182 |
| | | | T66 | |
| KQ965733.1_912232_4_3431 | unclassified | unknown | Gonapodya prolifera | 183 |
| | | | JEL478 | |
| KQ965739.1_591662_2_1934 | unclassified | unknown | Gonapodya prolifera | 184 |
| | | | JEL478 | |
| KQ965742.1_596521_4_2201 | family4 | unknown | Gonapodya prolifera | 185 |
| | | | JEL478 | |
| KQ965749.1_311392_1_1072 | unclassified | unknown | Gonapodya prolifera | 186 |
| | | | JEL478 | |
| KQ965767.1_95831_5_311 | family4 | unknown | Gonapodya prolifera | 187 |
| | | | JEL478 | |
| KQ965767.1_96732_3_317 | family5 | unknown | Gonapodya prolifera | 188 |
| | | | JEL478 | |
| KQ965796.1_71281_4_263 | family4 | unknown | Gonapodya prolifera | 189 |
| | | | JEL478 | |
| KQ965832.1_135087_6_407 | unclassified | unknown | Gonapodya prolifera | 190 |
| | | | JEL478 | |
| LONS02000138.1_18278651_5_20334 | unclassified | unknown | Parhyale hawaiensis | 191 |
| LQNS02000227.1_2859973_4_2896 | unclassified | unknown | Parhyale hawaiensis | 192 |
| LQNS02276867.1_8161366_1_9575 | unclassified | unknown | Parhyale hawaiensis | 193 |
| LONS02277275.1_10958287_1_11158 | unclassified | unknown | Parhyale hawaiensis | 194 |
| LQNS02278178.1_2707535_2_3134 | unclassified | unknown | Parhyale hawaiensis | 195 |
| BCIL01000010.1_469414_1_1109 | unclassified | unknown | Cystobasidium | 196 |
| | | | pallidum | |
| BCJU01000003.1_1493726_2_1742 | family5 | unknown | Meira nashicola | 197 |
| BCKE01000001.1_874632_6_1588 | unclassified | unknown | Pilasporangium | 198 |
| | | | apinafurcum | |
| BCKE01000001.1_1001153_2_1780 | unclassified | unknown | Pilasporangium | 199 |
| | | | apinafurcum | |
| BCKE01000002.1_275077_4_470 | unclassified | unknown | Pilasporangium | 200 |
| | | | apinafurcum | |
| BCKE01000002.1_387847_1_675 | family4 | unknown | Pilasporangium | 201 |
| | | | apinafurcum | |
| BCKE01000002.1_402779_5_701 | family4 | unknown | Pilasporangium | 201 |
| | | | apinafurcum | |
| BCKE01000003.1_53869_4_109 | unclassified | unknown | Pilasporangium | 202 |
| | | | apinafurcum | |
| BCKE01000003_1_246894_3_483 | unclassified | unknown | Pilasporangium | 203 |
| | | | apinafurcum | |
| BCKE01000003.1_900474_3_1743 | unclassified | unknown | Pilasporangium | 204 |
| | | | apinafurcum | |
| BCKE01000004.1_688654_1_1247 | unclassified | unknown | Pilasporangium | 205 |
| | | | apinafurcum | |
| BCKE01000004.1_752228_5_1371 | unclassified | unknown | Pilasporangium | 206 |
| | | | apinafurcum | |
| BCKE01000004.1_856190_5_1573 | unclassified | unknown | Pilasporangium | 207 |
| | | | apinafurcum | |
| BCKE01000004.1_860610_3_1579 | family4 | unknown | Pilasporangium | 208 |
| | | | apinafurcum | |
| BCKE01000005.1_37047_6_65 | unclassified | unknown | Pilasporangium | 209 |
| | | | apinafurcum | |
| BCKE01000005.1_50123_2_89 | unclassified | unknown | Pilasporangium | 209 |
| | | | apinafurcum | |
| BCKE01000005 1_350442_6_599 | family4 | unknown | Pilasporangium | 210 |
| | | | apinafurcum | |
| BCKE01000005.1_978460_1_1741 | family4 | unknown | Pilasporangium | 211 |
| | | | apinafurcum | |
| BCKE01000006.1_22025_5_39 | unclassified | unknown | Pilasporangium | 212 |
| | | | apinafurcum | |
| BCKE01000006.1_566394_6_1097 | unclassified | unknown | Pilasporangium | 213 |
| | | | apinafurcum | |
| BCKE01000006.1_745210_4_1407 | unclassified | unknown | Pilasporangium | 214 |
| | | | apinafurcum | |
| BCKE01000006.1_917472_3_1735 | family4 | unknown | Pilasporangium | 215 |
| | | | apinafurcum | |
| BCKE01000007.1_317007_6_570 | family5 | unknown | Pilasporangium | 216 |
| | | | apinafurcum | |
| BCKE01000007.1_688244_5_1225 | family4 | unknown | Pilasporangium | 217 |
| | | | apinafurcum | |
| BCKE01000008 1_8515_2 | family4 | unknown | Pilasporangium | 218 |
| | | | apinafurcum | |
| BCKE01000008.1_455033_2_885 | unclassified | unknown | Pilasporangium | 219 |
| | | | apinafurcum | |
| BCKE01000008.1_654024_6_1204 | unclassified | unknown | Pilasporangium | 220 |
| | | | apinafurcum | |
| BCKE01000009.1_274151_2_485 | unclassified | unknown | Pilasporangium | 221 |
| | | | apinafurcum | |
| BCKE01000010.1_44215_1_86 | family4 | unknown | Pilasporangium | 222 |
| | | | apinafurcum | |
| BCKE01000010.1_492358_4_852 | unclassified | unknown | Pilasporangium | 223 |
| | | | apinafurcum | |
| BCKE01000012.1_389798_5_720 | unclassified | unknown | Pilasporangium | 224 |
| | | | apinafurcum | |
| BCKE01000013.1_120578_5_189 | family4 | unknown | Pilasporangium | 225 |
| | | | apinafurcum | |
| BCKE01000014.1_253111_1_459 | unclassified | unknown | Pilasporangium | 226 |
| | | | apinafurcum | |
| BCKE01000015 1_31663_1_60 | unclassified | unknown | Pilasporangium | 227 |
| | | | apinafurcum | |
| BCKE01000015.1_575945_5_1053 | family4 | unknown | Pilasporangium | 228 |
| | | | apinafurcum | |
| BCKE01000015.1_610594_4_1111 | unclassified | unknown | Pilasporangium | 229 |
| | | | apinafurcum | |
| BCKE01000016.1_327061_1_501 | unclassified | unknown | Pilasporangium | 230 |
| | | | apinafurcum | |
| BCKE01000016.1_441482_2_700 | family4 | unknown | Pilasporangium | 231 |
| | | | apinafurcum | |
| BCKE01000016.1_505172_5_824 | family4 | unknown | Pilasporangium | 232 |
| | | | apinafurcum | |
| BCKE01000017.1_10054_4_25 | unclassified | unknown | Pilasporangium | 233 |
| | | | apinafurcum | |
| BCKE01000017.1_147950_5_283 | unclassified | unknown | Pilasporangium | 234 |
| | | | apinafurcum | |
| BCKE01000017 1_412390_4_739 | family4 | unknown | Pilasporangium | 235 |
| | | | apinafurcum | |
| BCKE01000018.1_212923_4_370 | unclassified | unknown | Pilasporangium | 236 |
| | | | apinafurcum | |
| BCKE01000018.1_455800_1_838 | unclassified | unknown | Pilasporangium | 237 |
| | | | apinafurcum | |
| BCKE01000019.1_136690_1_258 | unclassified | unknown | Pilasporangium | 238 |
| | | | apinafurcum | |
| BCKE01000019.1_370008_6_688 | family4 | unknown | Pilasporangium | 239 |
| | | | apinafurcum | |
| BCKE01000019.1_465821_5_840 | unclassified | unknown | Pilasporangium | 240 |
| | | | apinafurcum | |
| BCKE01000020.1_252018_3_473 | unclassified | unknown | Pilasporangium | 241 |
| | | | apinafurcum | |
| BCKE01000020.1_264586_4_487 | family4 | unknown | Pilasporangium | 242 |
| | | | apinafurcum | |
| BCKE01000021 1_110222_5_214 | family4 | unknown | Pilasporangium | 243 |
| | | | apinafurcum | |
| BCKE01000022.1_148034_2_285 | unclassified | unknown | Pilasporangium | 244 |
| | | | apinafurcum | |
| BOKE01000023.1_190589_2_346 | unclassified | unknown | Pilasporangium | 245 |
| | | | apinafurcum | |
| BCKE01000023.1_225996_6_405 | unclassified | unknown | Pilasporangium | 246 |
| | | | apinafurcum | |
| BCKE01000024.1_13021_4_15 | family5 | unknown | Pilasporangium | 247 |
| | | | apinafurcum | |
| BCKE01000024.1_97595_5_178 | family5 | unknown | Pilasporangium | 248 |
| | | | apinafurcum | |
| BCKE01000026.1_79506_6_150 | unclassified | unknown | Pilasporangium | 249 |
| | | | apinafurcum | |
| BCKE01000027.1_208542_3_344 | unclassified | unknown | Pilasporangium | 250 |
| | | | apinafurcum | |
| BCKE01000028 1_86721_3_145 | unclassified | unknown | Pilasporangium | 251 |
| | | | apinafurcum | |
| BCKE01000028.1_98328_6_166 | unclassified | unknown | Pilasporangium | 251 |
| | | | apinafurcum | |
| BCKE01000029.1_328198_1_584 | unclassified | unknown | Pilasporangium | 252 |
| | | | apinafurcum | |
| BCKE01000034.1_71313_18 | family4 | unknown | Pilasporangium | 253 |
| | | | apinafurcum | |
| BCKE01000034.1_91085_2_161 | unclassified | unknown | Pilasporangium | 254 |
| | | | apinafurcum | |
| BCKE01000036.1_339809_2_617 | unclassified | unknown | Pilasporangium | 255 |
| | | | apinafurcum | |
| BCKE01000037.1_306885_6_534 | family4 | unknown | Pilasporangium | 256 |
| | | | apinafurcum | |
| BCKE01000038.1_75462_3_123 | unclassified | unknown | Pilasporangium | 257 |
| | | | apinafurcum | |
| BCKE01000039.1_181783_1_293 | unclassified | unknown | Pilasporangium | 258 |
| | | | apinafurcum | |
| BBCKE01000041_1_76973_5_142 | unclassified | unknown | Pilasporangium | 259 |
| | | | apinafurcum | |
| BCKE01000041.1_283115_2_421 | unclassified | unknown | Pilasporangium | 260 |
| | | | apinafurcum | |
| BOKE01000043.1_105906_6_193 | unclassified | unknown | Pilasporangium | 261 |
| | | | apinafurcum | |
| BCKE01000043.1_247614_6_447 | unclassified | unknown | Pilasporangium | 262 |
| | | | apinafurcum | |
| BCKE01000047.1_172527_3_327 | unclassified | unknown | Pilasporangium | 263 |
| | | | apinafurcum | |
| BCKE01000047.1_259154_2_518 | unclassified | unknown | Pilasporangium | 264 |
| | | | apinafurcum | |
| BCKE01000049.1_206927_2_402 | family4 | unknown | Pilasporangium | 265 |
| | | | apinafurcum | |
| BCKE01000050.1_33685_1_55 | unclassified | unknown | Pilasporangium | 266 |
| | | | apinafurcum | |
| BCKE01000052 1_40497_6_71 | unclassified | unknown | Pilasporangium | 267 |
| | | | apinafurcum | |
| BCKE01000053.1_32784_6_54 | unclassified | unknown | Pilasporangium | 268 |
| | | | apinafurcum | |
| BCKE01000053.1_116547_3_198 | unclassified | unknown | Pilasporangium | 269 |
| | | | apinafurcum | |
| BCKE01000053.1_172068_3_278 | unclassified | unknown | Pilasporangium | 270 |
| | | | apinafurcum | |
| BCKE01000054.1_11620_1_10 | unclassified | unknown | Pilasporangium | 271 |
| | | | apinafurcum | |
| BCKE01000054.1_122116_4_209 | unclassified | unknown | Pilasporangium | 272 |
| | | | apinafurcum | |
| BCKE01000055.1_63221_13 | unclassified | unknown | Pilasporangium | 273 |
| | | | apinafurcum | |
| BCKE01000055.1_75068_2_161 | unclassified | unknown | Pilasporangium | 274 |
| | | | apinafurcum | |
| BCKE01000056 1_83457_6_135 | family5 | unknown | Pilasporangium | 275 |
| | | | apinafurcum | |
| BCKE01000058.1_50757_6_81 | family4 | unknown | Pilasporangium | 276 |
| | | | apinafurcum | |
| BCKE01000058.1_180847_1_325 | unclassified | unknown | Pilasporangium | 277 |
| | | | apinafurcum | |
| BCKE01000059.1_18372_6_33 | unclassified | unknown | Pilasporangium | 278 |
| | | | apinafurcum | |
| BCKE01000059.1_249172_4_448 | family4 | unknown | Pilasporangium | 279 |
| | | | apinafurcum | |
| BCKE01000062.1_85836_16 | unclassified | unknown | Pilasporangium | 280 |
| | | | apinafurcum | |
| BCKE01000062.1_20453_5_31 | family5 | unknown | Pilasporangium | 281 |
| | | | apinafurcum | |
| BCKE01000062.1_69326_5_122 | unclassified | unknown | Pilasporangium | 282 |
| | | | apinafurcum | |
| BCKE01000066 1_119301_3_203 | unclassified | unknown | Pilasporangium | 283 |
| | | | apinafurcum | |
| BCKE01000070.1_64931_5_122 | unclassified | unknown | Pilasporangium | 284 |
| | | | apinafurcum | |
| BCKE01000070.1_93313_1_182 | family4 | unknown | Pilasporangium | 285 |
| | | | apinafurcum | |
| BCKE01000078.1_8808_3_20 | family4 | unknown | Pilasporangium | 286 |
| | | | apinafurcum | |
| BCKE01000078.1_144520_1_269 | family4 | unknown | Pilasporangium | 222 |
| | | | apinafurcum | |
| BCKE01000079.1_7662_3_12 | family4 | unknown | Pilasporangium | 287 |
| | | | apinafurcum | |
| BCKE01000080.1_19379_2_37 | unclassified | unknown | Pilasporangium | 288 |
| | | | apinafurcum | |
| BCKE01000080.1_115695_3_194 | unclassified | unknown | Pilasporangium | 289 |
| | | | apinafurcum | |
| BCKE01000081.1_35621_5_61 | unclassified | unknown | Pilasporangium | 290 |
| | | | apinafurcum | |
| BCKE01000084 1_82268_5_170 | unclassified | unknown | Pilasporangium | 291 |
| | | | apinafurcum | |
| BCKE01000087.1_58535_5_105 | unclassified | unknown | Pilasporangium | 292 |
| | | | apinafurcum | |
| BOKE01000094.1_12695_2_21 | unclassified | unknown | Pilasporangium | 293 |
| | | | apinafurcum | |
| BCKE01000094.1_58612_1_104 | unclassified | unknown | Pilasporangium | 294 |
| | | | apinafurcum | |
| BCKE01000098.1_16511_2_28 | unclassified | unknown | Pilasporangium | 295 |
| | | | apinafurcum | |
| BCKE01000100.1_49807_4_82 | unclassified | unknown | Pilasporangium | 296 |
| | | | apinafurcum | |
| BDDA01000005.1_103773_6_438 | family4 | unknown | Chlamydomonas | 297 |
| | | | asymmetrica | |
| BDDA01000005.1_194315_2_810 | family4 | unknown | Chlamydomonas | 298 |
| | | | asymmetrica | |
| BDDA01000624.1_7626_6_14 | family4 | unknown | Chlamydomonas | 299 |
| | | | asymmetrica | |
| BDDA01000624.1_35592_6_48 | family4 | unknown | Chlamydomonas | 300 |
| | | | asymmetrica | |
| BDDC01000037.1_91997_2_577 | unclassified | unknown | Chlamydomonas | 301 |
| | | | sphaeroides | |
| BDDC01000396.1_298_4_3 | unclassified | unknown | Chlamydomonas | 302 |
| | | | sphaeroides | |
| MAPW01000100.1_93460_4_311 | unclassified | unknown | Tilletia indica | 303 |
| MAPW01000003.1_634461_6_2407 | unclassified | unknown | Tilletia indica | 304 |
| MAPW01000041.1_9997_4_44 | family5 | unknown | Tilletia indica | 305 |
| MAPW01000006 1_38825_2_148 | family5 | unknown | Tilletia indica | 306 |
| MAPW01000073.1_90219_2_33 | unclassified | unknown | Tilletia indica | 307 |
| MAPW01000007.1_127764_3_459 | unclassified | unknown | Tilletia indica | 308 |
| MBAC02000288.1_42072_3_164 | family4 | | Nothophytophthora | 309 |
| | | | sp. Chile5 | |
| MBAC02000848.1_40233_3_170 | unclassified | unknown | Nothophytophthora | 310 |
| | | | sp. Chile5 | |
| MBAC02008101.1_61660_4_270 | family4 | unknown | Nothophytophthora | 311 |
| | | | sp. Chile5 | |
| MBAC02009604.1_41526_3_187 | unclassified | unknown | Nothophytophthora | 312 |
| | | | sp. Chile5 | |
| MBAC02010929.1_30000_3_126 | unclassified | unknown | Nothophytophthora | 313 |
| | | | sp. Chile5 | |
| MBAC02011452.1_58931_2_140 | unclassified | unknown | Nothophytophthora | 314 |
| | | | sp. Chile5 | |
| DF977847.1_292679_2886 | family5 | unknown | Cladosiphon | 315 |
| | | | okamuranus | |
| DF977907.1_95961_3_278 | unclassified | unknown | Cladosiphon | 316 |
| | | | okamuranus | |
| DF977907.1_120869_5354 | family5 | unknown | Cladosiphon | 317 |
| | | | okamuranus | |
| DF977914.1_97356_6306 | family4 | unknown | Cladosiphon | 318 |
| | | | okamuranus | |
| DF977970.1_149513_2562 | family5 | IS607 | Cladosiphon | 319 |
| | | | okamuranus | |
| MSJH02000462.1_57033_3_74 | unclassified | unknown | Byssochlamys sp. IMV | 320 |
| | | | 00236 | |
| MSJH02000498.1_829_4_1 | family4 | unknown | Byssochlamys sp. IMV | 321 |
| | | | 00236 | |
| BCII101000002.1_2451295_4_6348 | family2 | unknown | Erythrobasidium | 322 |
| | | | hasegawianum | |
| KV918765_1_417231_3_2061 | unclassified | unknown | Porphyra umbilicalis | 323 |
| KV918765.1_523382_2_2600 | unclassified | unknown | Porphyra umbilicalis | 324 |
| KV918768.1_308249_2_1582 | unclassified | unknown | Porphyra umbilicalis | 325 |
| KV918781.1_106238_2_490 | unclassified | unknown | Porphyra umbilicalis | 326 |
| KV918782.1_451109_5_2332 | unclassified | unknown | Porphyra umbilicalis | 327 |
| KV918785.1_336032_5_1793 | unclassified | unknown | Porphyra umbilicalis | 328 |
| KV918791.1_123856_1_635 | unclassified | unknown | Porphyra umbilicalis | 329 |
| KV918793.1_300629_2_1611 | unclassified | unknown | Porphyra umbilicalis | 330 |
| KV918799 1_327228_6_1772 | unclassified | unknown | Porphyra umbilicalis | 331 |
| KV918815.1_24335_5_159 | unclassified | unknown | Porphyra umbilicalis | 332 |
| KV918820.1_105476_2_554 | unclassified | unknown | Porphyra umbilicalis | 333 |
| KV918827.1_95315_5_488 | unclassified | unknown | Porphyra umbilicalis | 334 |
| KV918828.1_190318_1_1017 | unclassified | unknown | Porphyra umbilicalis | 335 |
| KV918842.1_59353_1_363 | unclassified | unknown | Porphyra umbilicalis | 336 |
| KV918848.1_45704_5_277 | unclassified | unknown | Porphyra umbilicalis | 337 |
| KV918848.1_255597_3_1359 | unclassified | unknown | Porphyra umbilicalis | 338 |
| KV918853 1_5908_1_46 | unclassified | unknown | Porphyra umbilicalis | 339 |
| KV918854.1_2665_1_22 | unclassified | unknown | Porphyra umbilicalis | 340 |
| KV918901.1_129548_2_728 | unclassified | unknown | Porphyra umbilicalis | 341 |
| KV918954.1_144080_5_629 | unclassified | unknown | Porphyra umbilicalis | 342 |
| KV918992.1_87043_4_490 | unclassified | unknown | Porphyra umbilicalis | 343 |
| KV918992.1_107781_6_624 | unclassified | unknown | Porphyra umbilicalis | 344 |
| KV919006.1_96798_3_492 | unclassified | unknown | Porphyra umbilicalis | 345 |
| KV919034.1_53510_2_289 | unclassified | unknown | Porphyra umbilicalis | 346 |
| KV919034 1_81297_3_449 | unclassified | unknown | Porphyra umbilicalis | 347 |
| KV919057.1_4026_3_31 | unclassified | unknown | Porphyra umbilicalis | 348 |
| KV919094.1_11431_1_83 | unclassified | unknown | Porphyra umbilicalis | 349 |
| KV919108.1_67599_6_374 | unclassified | unknown | Porphyra umbilicalis | 350 |
| KV919198.1_3478_1_32 | unclassified | unknown | Porphyra umbilicalis | 351 |
| BDIU01000049 1_188567_5_414 | unclassified | unknown | Trebouxia sp. | 352 |
| | | | TZW2008 | |
| BDIU01000090.1_147857_5_303 | unclassified | unknown | Trebouxia sp. | 353 |
| | | | TZW2008 | |
| BDIU01000231.1_76_4_4 | unclassified | unknown | Trebouxia sp. | 354 |
| | | | TZW2008 | |
| BDIU01000359.1_116_2_1 | unclassified | unknown | Trebouxia sp. | 355 |
| | | | TZW2008 | |
| NJGN01001118.1_36491_5_111 | unclassified | unknown | Rhizophlyctis rosea | 356 |
| NMPK01000166.1_54246_6_153 | unclassified | unknown | Phytophthora plurivora | 357 |
| NMPK01000004.1_152444_5_448 | unclassified | unknown | Phytophthora plurivora | 358 |
| MVB001000001.1_247130_5_497 | unclassified | unknown | Bifiguratus adelaidae | 359 |
| MVB001000032.1_41066_2_75 | unclassified | unknown | Bifiguratus adelaidae | 360 |
| MU069946.1_223564_4_626 | unclassified | unknown | Dunaliella salina | 361 |
| MU069962.1_215827_4_564 | unclassified | unknown | Dunaliella salina | 362 |
| MU070117.1_55084_1_92 | unclassified | unknown | Dunaliella salina | 363 |
| NMRB01001104.1_62070_3_53 | family5 | unknown | Notospermus | 364 |
| | | | geniculatus | |
| NMRB01001171.1_161191_4_158 | family5 | unknown | Notospermus | 365 |
| | | | geniculatus | |
| KZ303488.1_700519_4_1293 | unclassified | unknown | Coemansia reversa | 366 |
| | | | NRRL 1564 | |
| KZ303539.1_103964_2_142 | unclassified | unknown | Coemansia reversa | 367 |
| | | | NRRL 1564 | |
| MZZL01000106.1_48498_6_67 | unclassified | Helitron | Apophysomyces | 368 |
| | | | variabilis | |
| MZZL_01000037.1_56340_3_83 | unclassified | unknown | Apophysomyces | 369 |
| | | | variabilis | |
| MZZL01000386.1_385730_5_582 | unclassified | Helitron | Apophysomyces | 370 |
| | | | variabilis | |
| BCJY01000002.1_858569_2_5045 | unclassified | unknown | Prototheca stagnorum | 371 |
| BCJY01000007 1_820194_3_4923 | unclassified | unknown | Prototheca stagnorum | 372 |
| BCJY01000007.1_848895_6_5098 | unclassified | unknown | Prototheca stagnorum | 373 |
| PGGS01000203.1_99113_5_298 | unclassified | unknown | Tetrabaena socialis | 374 |
| BCIH01000001.1_106477_1_564 | unclassified | unknown | Prototheca cutis | 375 |
| BCIH01000001 1_1858832_5_9911 | unclassified | unknown | Prototheca cutis | 376 |
| BCIH01000002.1_2002842_3_10780 | unclassified | unknown | Prototheca cutis | 377 |
| BCIH01000007.1_926133_3_4953 | unclassified | unknown | Prototheca cutis | 378 |
| BGKB01000021.1_242500_4_1023 | family5 | unknown | Aurantiochytrium sp. | 379 |
| | | | KH105 | |
| BGKB01000035.1_602501_5_2509 | family5 | unknown | Aurantiochytrium sp. | 380 |
| | | | KH105 | |
| BGKB01000132.1_94861_1_346 | family5 | unknown | Aurantiochytrium sp. | 381 |
| | | | KH105 | |
| BGKB01000165.1_100867_4_456 | family5 | unknown | Aurantiochytrium sp. | 382 |
| | | | KH105 | |
| BGKB01000168.1_117873_6_241 | family5 | unknown | Aurantiochytrium sp. | 383 |
| | | | KH105 | |
| BGKB01000200.1_91527_3_352 | family5 | unknown | Aurantiochytrium sp. | 384 |
| | | | KH105 | |
| BGKB01000201.1_84255_6_345 | family5 | unknown | Aurantiochytrium sp. | 385 |
| | | | KH105 | |
| BGKB01000242.1_283710_3_1160 | family5 | unknown | Aurantiochytrium sp. | 386 |
| | | | KH105 | |
| BDSI01000003.1_599182_1_2829 | unclassified | unknown | Eudorina sp. 2006- | 387 |
| | | | 703-Eu-15 | |
| BDRX01000002.1_874718_5_5895 | family1 | unknown | Raphidocelis | 388 |
| | | | subcapitala | |
| BDRX01000004.1_390479_2_2617 | family4 | unknown | Raphidocelis | 389 |
| | | | subcapitala | |
| BDRX01000012.1_443859_6_2998 | family1 | unknown | Raphidocelis | 390 |
| | | | subcapitala | |
| BDRX01000036.1_241333_4_1625 | unclassified | unknown | Raphidocelis | 391 |
| | | | subcapitala | |
| BDRX01000100.1_4387_4_36 | unclassified | unknown | Raphidocelis | 392 |
| | | | subcapitala | |
| NIODO1000166.1_87575_2_208 | unclassified | unknown | Phytophthora | 393 |
| | | | nicotianae | |
| NIOD01000207.1_81669_6_171 | unclassified | unknown | Phytophthora | 394 |
| | | | nicotianae | |
| NIOD01000221.1_9484_1_19 | unclassified | unknown | Phytophthora | 395 |
| | | | nicotianae | |
| NIOD01000235.1_63685_4_134 | unclassified | unknown | Phytophthora | 396 |
| | | | nicotianae | |
| NIOD01000073.1_54943_1_121 | unclassified | unknown | Phytophthora | 397 |
| | | | nicotianae | |
| PQFF01000174.1_130372_4_86 | unclassified | unknown | Diversispora epigaea | 398 |
| QKWP01000903.1_161191_1_128 | family5 | unknown | Gigaspora rosea | 399 |
| ML014119.1_191924_2_964 | unclassified | unknown | Caulochytrium | 400 |
| | | | protostelioides | |
| ML014132.1_56764_1_275 | unclassified | unknown | Caulochytrium | 401 |
| | | | protostelioides | |
| ML014132.1_118956_3_598 | unclassified | unknown | Caulochytrium | 402 |
| | | | protostelioides | |
| ML014134.1_39_3_6 | unclassified | unknown | Caulochytrium | 403 |
| | | | protostelioides | |
| ML014147.1_27126_3_145 | family4 | unknown | Caulochytrium | 404 |
| | | | protostelioides | |
| ML014153.1_926_5_7 | unclassified | unknown | Caulochytrium | 405 |
| | | | protostelioides | |
| ML014154.1_15195_6_78 | unclassified | unknown | Caulochytrium | 406 |
| | | | protostelioides | |
| ML014154.1_96433_1_452 | unclassified | unknown | Caulochytrium | 407 |
| | | | protostelioides | |
| ML014164.1_391_1_4 | unclassified | unknown | Caulochytrium | 408 |
| | | | protostelioides | |
| ML014175.1_86519_2_450 | unclassified | unknown | Caulochytrium | 409 |
| | | | protostelioides | |
| ML014183.1_2_2_2 | unclassified | unknown | Caulochytrium | 410 |
| | | | protostelioides | |
| ML014217.1_26408_5_141 | unclassified | unknown | Caulochytrium | 411 |
| | | | protostelioides | |
| ML014237.1_51574_4_247 | unclassified | unknown | Caulochytrium | 412 |
| | | | protostelioides | |
| ML014238.1_12589_4_58 | unclassified | unknown | Caulochytrium | 413 |
| | | | protostelioides | |
| ML014247.1_49840_4_246 | unclassified | unknown | Caulochytrium | 414 |
| | | | protostelioides | |
| PPJY02000003.1_313315_4_366 | unclassified | unknown | Zygotorulaspora | 415 |
| | | | florentina | |
| PPHX02000018.1_24192_6_46 | unclassified | unknown | Torulaspora | 416 |
| | | | franciscae | |
| PPHX02000005.1_110928_3_170 | family5 | unknown | Torulaspora | 417 |
| | | | franciscae | |
| PPHX02000005.1_428210_5_607 | family5 | unknown | Torulaspora | 417 |
| | | | franciscae | |
| PPJS02000028.1_115611_6_212 | family5 | unknown | Lipomyces | 418 |
| | | | mesembrius | |
| PPJS02000003.1_151187_2_285 | family5 | unknown | Lipomyces | 419 |
| | | | mesembrius | |
| PPPJS02000003.1_377762_5_706 | unclassified | unknown | Lipomyces | 420 |
| | | | mesembrius | |
| PPJS02000042.1_135900_6_285 | unclassified | unknown | Lipomyces | 421 |
| | | | mesembrius | |
| PPJS02000059.1_18220_1_58 | unclassified | unknown | Lipomyces | 422 |
| | | | mesembrius | |
| PPJS02000062.1_65878_4_103 | unclassified | unknown | Lipomyces | 423 |
| | | | mesembrius | |
| PPJW01000017.1_113447_5_226 | unclassified | unknown | Lipomyces sp. NRRL | 424 |
| | | | Y-11553 | |
| PPJW01000018.1_203711_5_362 | unclassified | unknown | Lipomyces sp NRRL | 425 |
| | | | Y-11553 | |
| PPJW01000008.1_23147_5_33 | unclassified | unknown | Lipomyces sp. NRRL | 426 |
| | | | Y-11553 | |
| PPJW01000008.1_329200_4_597 | family5 | unknown | Lipomyces sp. NRRL | 427 |
| | | | Y-11553 | |
| PPJT02000105.1_4653_3 | family5 | unknown | Lipomyces arxii | 428 |
| PPJT02000026.1_742_1_6 | unclassified | unknown | Lipomyces arxii | 429 |
| PPJT02000037 1_132729_6_237 | unclassified | unknown | Lipomyces arxii | 430 |
| QZCP01000067.1_208695_6_221 | family3 | unknown | Brevipaipus yothers | 431 |
| NQFO01000479.1_22935_3_49 | family4 | unknown | Pseudoperonospora | 432 |
| | | | humuli | |
| QZWU01000047.1_54359_2_101 | family4 | unknown | Acaulopage tetraceros | 433 |
| QAXA01000079.1_661838_5_1701 | family4 | unknown | Nannochloris sp RS | 434 |
| QAXD01000197.1_1559_5_8 | unclassified | unknown | Haematococcus sp. | 435 |
| | | | NG2 | |
| QAXI01000429.1_464775_6_1559 | unclassified | unknown | Chloroidium sp. JM | 436 |
| QAXI01000449.1_1691725_1_5213 | family4 | unknown | Chloroidium sp. JM | 437 |
| QAXJ01000001.1_878967_3_2868 | family4 | unknown | Chloroidium sp. CF | 437 |
| QAXJ01000002.1_471988_4_1540 | unclassified | unknown | Chloroidium sp. CF | 436 |
| QAXH01005222.1_67420_4_185 | unclassified | unknown | Chloromonas sp. | 438 |
| | | | AAM2 | |
| QAXH01005270.1_5799_6_21 | unclassified | Bunknown | Chloromonas sp | 439 |
| | | | AAM2 | |
| QAXH01005278.1_28804_4_84 | unclassified | unknown | Chloromonas sp. | 440 |
| | | | AAM2 | |
| QAXL01000066.1_50371_4_169 | family4 | unknown | Chlamydomonas sp. | 441 |
| | | | WS7 | |
| QAXM01000066.1_50371_4_169 | family4 | unknown | Chlamydomonas sp. | 441 |
| | | | WS3 | |
| RJWQ010012407.1_3823_1_6 | unclassified | unknown | Phocoena phocoena | 442 |
| CP038130.1_1090021_4_3707 | family4 | unknown | Nannochloropsis | 443 |
| | | | oceanica | |
| BCP038134.1_526633_1_1931 | unclassified | unknown | Nannochloropsis | 444 |
| | | | oceanica | |
| CP038135.1_547538_5_2010 | unclassified | unknown | Nannochloropsis | 445 |
| | | | oceanica | |
| CP038120.1_77635_1_322 | unclassified | unknown | Nannochloropsis | 446 |
| | | | oceanica | |
| CP038125.1_183660_6_695 | unclassified | unknown | Nannochloropsis | 447 |
| | | | oceanica | |
| CM015678.1_4632582_3_17222 | family4 | IS4 | Ectocarpus sp. Ec32 | 119 |
| CM015678.1_5498788_4_20663 | family5 | unknown | Ectocarpus sp. Ec32 | 120 |
| SMSO01000005.1_211236_6_272 | family5 | IS607 | Schizochytrium sp. | 448 |
| | | | TIO01 | |
| SMSO01000005.1_727141_4_1005 | family5 | IS607 | Schizochytrium sp. | 449 |
| | | | TIO01 | |
| SMSO01000005.1_1001778_6_1412 | family5 | IS607 | Schizochytrium sp. | 450 |
| | | | TIO01 | |
| SMSO01000006.1_1372873_4_2118 | family5 | IS607 | Schizochytrium sp. | 451 |
| | | | TIO01 | |
| SMSO01000008.1_513671_5_775 | unclassified | IS607 | Schizochytrium sp. | 452 |
| | | | TIO01 | |
| SMSO01000014.1_2774886_3_4183 | family5 | IS607 | Schizochytrium sp. | 453 |
| | | | TIO01 | |
| SMSO01000014.1_3963307_1_5886 | family5 | IS607 | Schizochytrium sp. | 454 |
| | | | TIO01 | |
| SMSO01000014.1_3978651_6_5914 | family5 | IS607 | Schizochytrium sp. | 455 |
| | | | TIO01 | |
| SMSO01000014.1_5818837_4_8824 | family5 | IS607 | Schizochytrium sp. | 456 |
| | | | TIO01 | |
| SMSO01000014.1_7075793_5_10971 | family5 | IS607 | Schizochytrium sp. | 457 |
| | | | TIO01 | |
| SMSO01000032.1_5077131_3_8023 | family5 | IS607 | Schizochytrium sp. | 458 |
| | | | TIO01 | |
| SMSO01000033.1_1870544_2_2762 | family5 | IS607 | Schizochytrium sp. | 459 |
| | | | TIO01 | |
| SMSO01000033.1_2840861_2_4406 | family5 | IS607 | Schizochytrium sp. | 460 |
| | | | TIO01 | |
| SMSO01000034.1_2521487_2_3911 | family5 | IS607 | Schizochytrium sp. | 461 |
| | | | TIO01 | |
| SMSO01000034.1_4615016_2_7316 | family5 | IS607 | Schizochytrium sp. | 462 |
| | | | TIO01 | |
| SMSO01000035.1_2130005_5_3257 | family5 | IS607 | Schizochytrium sp. | 463 |
| | | | TIO01 | |
| SMSO01000036.1_87348_6_110 | family5 | IS607 | Schizochytrium sp. | 464 |
| | | | TIO01 | |
| SMSO01000036.1_2605862_2_4053 | unclassified | IS607 | Schizochytrium sp. | 465 |
| | | | TIO01 | |
| SMSO01000037.1_677177_5_1024 | family5 | IS607 | Schizochytrium sp. | 466 |
| | | | TIO01 | |
| SMSO01000037.1_1883384_2_2932 | family5 | IS607 | Schizochytrium sp. | 467 |
| | | | TIO01 | |
| SMSO01000037.1_2313994_4_3683 | family5 | IS607 | Schizochytrium sp. | 468 |
| | | | TIO01 | |
| VFIW01000109.1_77584_1_293 | unclassified | unknown | Globisporangium | 469 |
| | | | splendens | |
| VEIW01000160.1_26564_2_96 | unclassified | unknown | Globisporangium | 470 |
| | | | splendens | |
| RSEH01000076.1_1_1_4 | family4 | unknown | Stentor roeselii | 471 |
| RRYN01000008.1_243304_4_1253 | unclassified | unknown | Pseudokeronopsis | 472 |
| | | | carnea | |
| RRYN01000049 1_43865_5_235 | unclassified | unknown | Pseudokeronopsis | 473 |
| | | | carnea | |
| QEAN01000051.1_18924_6_51 | unclassified | unknown | Synchytrium | 474 |
| | | | endobioticum | |
| QEAN01000069.1_1190_2_6 | family2 | unknown | Synchytrium | 475 |
| | | | endobioticum | |
| QEAP01000008.1_161154_3_514 | unclassified | unknown | Chytnomyces | 476 |
| | | | confervae | |
| QEAQ01000011.1_317204_5_912 | family5 | unknown | Powellomyces hirtus | 477 |
| QEAQ01000051.1_28967_5_116 | family5 | unknown | Powellomyces hirtus | 478 |
| QEAQ01000054 1_6454_1_16 | unclassified | unknown | Powellomyces hirtus | 479 |
| VMBQ01001009.1_149217_3_91 | unclassified | unknown | Dreissena rostriformis | 480 |
| VMBQ01007035.1_2938_4_4 | family5 | unknown | Dreissena rostriformis | 481 |
| SDUX01000003.1_974342_5_5772 | unclassified | Crypton | Neoporphyra | 482 |
| | | | haitanensis | |
| SDUX01000004.1_2153678_5_12669 | unclassified | Crypton | Neoporphyra | 483 |
| | | | haitanensis | |
| SDUX01000004.1_6958444_4_39800 | unclassified | unknown | Neoporphyra | 484 |
| | | | haitanensis | |
| SDUX01000004.1_7217025_6_41212 | unclassified | Crypton | Neoporphyra | 485 |
| | | | haitanensis | |
| SDUX01000010.1_2980767_3_17142 | family4 | unknown | Neoporphyra | 486 |
| | | | haitanensis | |
| SDUX01000005.1_3416250_6_17328 | unclassified | Crypton | Neoporphyra | 487 |
| | | | haitanensis | |
| SDUX01000005.1_3773838_3_19225 | unclassified | Crypton | Neoporphyra | 488 |
| | | | haitanensis | |
| SDUX01000006.1_1916322_3_11112 | family4 | unknown | Neoporphyra | 489 |
| | | | haitanensis | |
| SDUX01000006.1_2763667_1_15862 | family4 | unknown | Neoporphyra | 490 |
| | | | haitanensis | |
| SDUX01000001.1_4608631_4_23479 | unclassified | unknown | Neoporphyra | 491 |
| | | | haitanensis | |
| SDUX01000001.1_4617323_5_23516 | unclassified | unknown | Neoporphyra | 492 |
| | | | haitanensis | |
| SDUX01000001.1_4631184_6_23574 | unclassified | unknown | Neoporphyra | 493 |
| | | | haitanensis | |
| SDUX01000007.1_4363097_2_17631 | unclassified | Crypton | Neoporphyra | 494 |
| | | | haitanensis | |
| SDUX01000007.1_5196761_5_22175 | unclassified | unknown | Neoporphyra | 495 |
| | | | haitanensis | |
| SDUX01000007.1_5876063_5_25815 | unclassified | Crypton | Neoporphyra | 496 |
| | | | haitanensis | |
| SDUX01000008.1_1490934_3_8609 | unclassified | unknown | Neoporphyra | 497 |
| | | | haitanensis | |
| SDUX01000002.1_375154_4_2147 | unclassified | Crypton | Neoporphyra | 498 |
| | | | haitanensis | |
| SDUX01000002.1_3080536_1_15460 | family4 | unknown | Neoporphyra | 499 |
| | | | haitanensis | |
| SDUX01000002.1_3141877_4_15778 | unclassified | unknown | Neoporphyra | 500 |
| | | | haitanensis | |
| SDUX01000002.1_5070581_2_26579 | unclassified | unknown | Neoporphyra | 501 |
| | | | haitanensis | |
| SDUX01000002.1_7200436_1_38451 | family4 | unknown | Neoporphyra | 502 |
| | | | haitanensis | |
| SDUX01000090.1_9225_6_64 | unclassified | Cryptor | Neoporphyra | 503 |
| | | | haitanensis | |
| SDUX01000156.1_97965_6_539 | unclassified | unknown | Neoporphyra | 504 |
| | | | haitanensis | |
| MEHQ01003574.1_508011_6_1288 | family4 | unknown | Saccharina japonica | 505 |
| MEHQ01003574.1_511902_3_1298 | family5 | unknown | Saccharina japonica | 506 |
| MEHQ01002346.1_565929_3_1311 | unclassified | unknown | Saccharina japonica | 507 |
| WTXV01073334.1_9495849_3_17341 | unclassified | unknown | Nymphicus | 508 |
| | | | hollandicus | |
| WTXV01073334.1_12118364_5_22447 | unclassified | unknown | Nymphicus | 509 |
| | | | hollandicus | |
| WTXV01073334.1_13427548_4_25086 | unclassified | unknown | Nymphicus | 510 |
| | | | hollandicus | |
| CM020618.1_1461126_3_6541 | unclassified | unknown | Neopyropia yezoensis | 511 |
| CM020618.1_2188978_1_9920 | unclassified | unknown | Neopyropia yezoensis | 512 |
| CM020618.1_2610480_6_11927 | unclassified | unknown | Neopyropia yezoensis | 513 |
| CM020618.1_3405604_1_15727 | family4 | unknown | Neopyropia yezoensis | 514 |
| CM020618.1_5659660_4_26373 | unclassified | unknown | Neopyropia yezoensis | 515 |
| CM020618.1_8078414_5_38237 | unclassified | unknown | Neopyropia yezoensis | 516 |
| CM020618.1_9126429_3_43334 | unclassified | unknown | Neopyropia yezoensis | 517 |
| CM020618.1_11682836_2_55780 | unclassified | unknown | Neopyropia yezoensis | 518 |
| CM020618.1_11695599_3_55828 | unclassified | unknown | Neopyropia yezoensis | 519 |
| CM020618.1_13459615_4_64868 | family4 | unknown | Neopyropia yezoensis | 520 |
| CM020618.1_13862415_3_66848 | unclassified | unknown | Neopyropia yezoensis | 521 |
| CM020618.1_16210691_5_78078 | unclassified | unknown | Neopyropia yezoensis | 522 |
| CM020618.1_16659359_2_80202 | unclassified | unknown | Neopyropia yezoensis | 523 |
| CM020618.1_19287114_6_93162 | family4 | unknown | Neopyropia yezoensis | 524 |
| CM020618.1_20614933_1_99670 | family4 | unknown | Neopyropia yezoensis | 525 |
| CM020618.1_23638198_4_114537 | unclassified | unknown | Neopyropia yezoensis | 526 |
| CM020618.1_26160342_3_126646 | family4 | unknown | Neopyropia yezoensis | 527 |
| CM020618.1_30291121_1_147005 | unclassified | unknown | Neopyropia yezoensis | 528 |
| CM020618.1_31371505_1_152146 | unclassified | unknown | Neopyropia yezoensis | 529 |
| CM020618.1_34923690_3_169803 | unclassified | unknown | Neopyropia yezoensis | 530 |
| CM020618.1_35452242_3_172240 | unclassified | unknown | Neopyropia yezoensis | 531 |
| CM020618.1_37383237_3_181698 | unclassified | unknown | Neopyropia yezoensis | 532 |
| CM020618.1_38096747_5_185342 | unclassified | unknown | Neopyropia yezoensis | 533 |
| CM020618.1_38845609_4_189107 | unclassified | unknown | Neopyropia yezoensis | 534 |
| CM020618.1_43316409_6_210595 | family4 | unknown | Neopyropia yezoensis | 535 |
| CM020619.1_5278144_4_26193 | unclassified | unknown | Neopyropia yezoensis | 536 |
| CM020619.1_7468943_5_36547 | family4 | unknown | Neopyropia yezoensis | 537 |
| CM020619.1_7630070_2_37368 | unclassified | unknown | Neopyropia yezoensis | 538 |
| CM020619.1_9900023_2_48300 | unclassified | unknown | Neopyropia yezoensis | 539 |
| CM020619.1_10994652_3_53813 | unclassified | unknown | Neopyropia yezoensis | 540 |
| CM020619.1_13209898_1_64713 | family4 | unknown | Neopyropia yezoensis | 541 |
| CM020619.1_15532675_1_76262 | unclassified | unknown | Neopyropia yezoensis | 542 |
| CM020619.1_16009870_4_78680 | family4 | unknown | Neopyropia yezoensis | 543 |
| CM020619.1_16842346_1_82706 | unclassified | unknown | Neopyropia yezoensis | 544 |
| CM020619.1_18287011_4_89893 | unclassified | unknown | Neopyropia yezoensis | 545 |
| CM020619.1_19580275_1_96328 | family4 | unknown | Neopyropia yezoensis | 546 |
| CM020619.1_21371968_1_104671 | family4 | unknown | Neopyropia yezoensis | 547 |
| CM020619.1_25448250_6_123852 | unclassified | unknown | Neopyropia yezoensis | 548 |
| CM020619.1_26813253_3_130648 | family4 | unknown | Neopyropia yezoensis | 549 |
| CM020619.1_27057227_5_131917 | family4 | unknown | Neopyropia yezoensis | 550 |
| CM020619.1_28985615_2_140758 | unclassified | unknown | Neopyropia yezoensis | 551 |
| CM020620.1_8586917_2_41254 | unclassified | unknown | Neopyropia yezoensis | 552 |
| CM020620.1_11872612_4_57023 | unclassified | unknown | Neopyropia yezoensis | 553 |
| CM020620.1_13038714_3_62614 | unclassified | unknown | Neopyropia yezoensis | 554 |
| CM020620.1_16129015_1_77690 | unclassified | unknown | Neopyropia yezoensis | 555 |
| CM020620.1_16864650_6_81180 | family4 | unknown | Neopyropia yezoensis | 556 |
| CM020620.1_18010612_1_86290 | unclassified | unknown | Neopyropia yezoensis | 557 |
| CM020620.1_20118725_2_96708 | unclassified | unknown | Neopyropia yezoensis | 558 |
| CM020620.1_25731151_4_123782 | family4 | unknown | Neopyropia yezoensis | 559 |
| CM020620.1_27365361_3_131425 | unclassified | unknown | Neopyropia yezoensis | 560 |
| CM020620.1_28130305_4_135064 | family4 | unknown | Neopyropia yezoensis | 561 |
| VRVR01000002.1_281166_3_972 | unclassified | unknown | Andalucia godoyi | 562 |
| VRVR01000008.1_360994_1_1190 | unclassified | unknown | Andalucia godoyi | 563 |
| VRVR01000040.1_136772_2_488 | unclassified | unknown | Andalucia godoyi | 564 |
| VRVR01000043.1_152650_1_532 | unclassified | unknown | Andalucia godoyi | 565 |
| WURW01073334.1_72646874_5_77748 | unclassified | unknown | Taenaris catops | 566 |
| WUCQ01077778.1_101370353_5_73274 | unclassified | unknown | Actias luna | 567 |
| WUCQ01077778.1_103535388_6_75672 | unclassified | unknown | Actias luna | 568 |
| WUCQ01077778 1_110194912_4_86961 | unclassified | unknown | Actias luna | 569 |
| JAAAKH010000071.1_4722014_5_5812 | unclassified | unknown | Psitteuteles goldiei | 570 |
| JAAAKH010000701.1_64312506_6_65260 | unclassified | unknown | Psitteuteles goldiei | 571 |
| JAAAKH010069999.1_33952519_4_62255 | unclassified | unknown | Psitteuteles goldiei | 572 |
| JAAAKH010069999.1_34256374_4_63139 | unclassified | unknown | Psitteuteles goldiei | 573 |
| JAAAKH010069999.1_40157973_6_81811 | unclassified | unknown | Psitteuteles goldiei | 574 |
| JAAAKL0100000061.1_12740_5_32 | unclassified | unknown | Carybdea marsupialis | 575 |
| | | | auct. non (Linnaeus, 1758) | |
| JAACMV010000001.1_1044394_1_2500 | unclassified | unknown | Picochlorum sp. | 576 |
| | | | ‘celeri’ | |
| JAACMV010000002.1_1221536_2_2751 | family4 | unknown | Picochlorum sp. | 577 |
| | | | ‘celeri’ | |
| JAACMV010000004.1_27981_6_75 | family4 | unknown | Picochlorum sp. | 578 |
| | | | ‘celeri’ | |
| JAACMV010000005 1_45780_3_106 | family4 | unknown | Picochlorum sp. | 579 |
| | | | ‘celeri’ | |
| JAACMV010000008.1_984906_6_2012 | family4 | unknown | Picochlorum sp. | 580 |
| | | | ‘celeri’ | |
| JAACMV010000008.1 1022016_6_2108 | family4 | unknown | Picochlorum sp. | 581 |
| | | | ‘celeri’ | |
| JAACMV010000011.1_4834_4_16 | family4 | unknown | Picochlorum sp | 582 |
| | | | ‘celeri’ | |
| JAACMV010000014.1_383704_1_926 | family4 | unknown | Picochlorum sp. | 583 |
| | | | ‘celeri’ | |
| JAACMV010000015.1_61567_4_163 | family4 | unknown | Picochlorum sp. | 584 |
| | | | ‘celeri’ | |
| JAACMV010000015.1_915245_2_2108 | family4 | unknown | Picochlorum sp. | 585 |
| | | | ‘celeri’ | |
| JAACMV010000017.1_997355_5_2060 | family4 | unknown | Picochlorum sp. | 580 |
| | | | ‘celeri’ | |
| JAACMV010000017_1_1039664_5_2169 | family4 | unknown | Picochlorum sp. | 581 |
| | | | ‘celeri’ | |
| JAACMV010000019.1_1186558_1_2721 | family4 | unknown | Picochlorum sp. | 586 |
| | | | ‘celeri’ | |
| JAACMV010000020.1_34628_5_65 | family4 | unknown | Picochlorum sp. | 587 |
| | | | ‘celeri’ | |
| JAACMV010000020.1_45147_3_89 | family4 | unknown | Picochlorum sp | 588 |
| | | | ‘celeri’ | |
| JAACMV010000021.1_96735_6_310 | unclassified | unknown | Picochlorum sp. | 576 |
| | | | ‘celeri’ | |
| JAACMV010000022.1_1203148_1_2720 | family4 | unknown | Picochlorum sp. | 589 |
| | | | ‘celeri’ | |
| JAACMV010000027.1_10505_2_20 | family4 | unknown | Picochlorum sp. | 586 |
| | | | ‘celeri’ | |
| JAACMV010000027.1_67578_6_180 | family4 | unknown | Picochlorum sp. | 590 |
| | | | ‘celeri’ | |
| JAACMV010000027 1_934914_3_2121 | family4 | unknown | Picochlorumsp. | 585 |
| | | | ‘celeri’ | |
| JAACMV010000030.1_30735_6_78 | family4 | unknown | Picochlorumsp. | 591 |
| | | | ‘celeri’ | |
| WKLD01000023.1_2_2_3 | family4 | unknown | Picochlorum | 592 |
| | | | costavermella | |
| WKLD01000069.1_1066308_3_2448 | unclassified | unknown | Picochlorum | 593 |
| | | | costavermella | |
| WKLD01000126.1_394829_5_891 | family4 | unknown | Picochlorum | 594 |
| | | | costavermella | |
| WUQG01007200.1_112535404_1_55266 | unclassified | unknown | Androctonus | 595 |
| | | | mauritanicus | |
| WUQG01007200.1_130790592_6_64647 | unclassified | unknown | Androctonus | 596 |
| | | | mauritanicus | |
| WUQG01072000.1_116774013_3_102087 | unclassified | unknown | Androctonus | 597 |
| | | | mauritanicus | |
| WUQG01072000.1_178850711_5_164814 | unclassified | unknown | Androctonus | 598 |
| | | | mauritanicus | |
| WUQG01072000.1_202100142_6_190674 | unclassified | unknown | Androctonus | 599 |
| | | | mauritanicus | |
| WUGG01072000.1_21117456_1_200607 | unclassified | unknown | Androctonus | 600 |
| | | | mauritanicus | |
| WUQG01072000.1_212082288_3_201529 | unclassified | unknown | Androctonus | 601 |
| | | | mauritanicus | |
| WUQG01072000.1_317295844_4_329622 | unclassified | unknown | Androctonus | 602 |
| | | | mauritanicus | |
| WUQG01172000.1_4425931_4_7860 | unclassified | unknown | Androctonus | 603 |
| | | | mauritanicus | |
| WUQG01172000.1_20491122_3_36889 | unclassified | unknown | Androctonus | 604 |
| | | | mauritanicus | |
| WUQG01720000.1_3048409_1_9720 | unclassified | unknown | Androctonus | 605 |
| | | | mauritanicus | |
| JAAQRG010180840.1_34702_1_52 | family5 | unknown | Babylonia areolata | 606 |
| JAABKK010000767.1_13305933_3_3869 | family3 | unknown | Catotricha | 607 |
| | | | subobsoleta | |
| JAABKK010000767.1_30831581_5_9208 | unclassified | unknown | Catotricha | 608 |
| | | | subobsoleta | |
| JAABKK010007667.1_23344794_6_8051 | unclassified | unknown | Catotricha | 609 |
| | | | subobsoleta | |
| WSXT01007279.1_165987925_4_119094 | family3 | unknown | Callirhytis sp. | 610 |
| | | | RG_2019_326 | |
| JAADYU010071112.1_21445918_4_20715 | unclassified | unknown | Heteractis magnifica | 611 |
| JAANSK010000623 1_15564171_3_20154 | unclassified | unknown | Isoetes engelmannii | 612 |
| WMKK01000013.1_96109_4_363 | unclassified | unknown | Ostreococcus | 613 |
| | | | mediterraneus | |
| JAAVTW010000004.1_1130048_2_1466 | unclassified | unknown | Brettanomyces | 614 |
| | | | custersianus | |
| JAABLK010000105.1_57815_5_219 | family4 | unknown | Phytophthora | 615 |
| | | | chlamydospora | |
| JAABLK010000046 1_22452_6_89 | family5 | unknown | Phytophthora | 616 |
| | | | chlamydospora | |
| JAABLK010000090.1_10070_2_50 | unclassified | unknown | Phytophthora | 617 |
| | | | chlamydospora | |
| BLQM01000067.1_5093_2_24 | family5 | unknown | Triparma laevis f. | 618 |
| | | | inornata | |
| JAAKBD010000174.1_96711_6_325 | unclassified | unknown | Phytophthora syringae | 619 |
| JAAKBD010000191 1_373766_5_1127 | unclassified | unknown | Phytophthora syringae | 620 |
| JAAKBD010000229.1_164702_5_490 | unclassified | unknown | Phytophthora syringae | 621 |
| JAAKBD010000358.1_65197_4_189 | unclassified | unknown | Phytophthora syringae | 622 |
| JAAKBD010000358.1_117539_5_352 | family4 | unknown | Phytophthora syringae | 623 |
| JAAKBD010000039.1_158253_3_562 | family4 | unknown | Phytophthora syringae | 624 |
| JAAKBD010000092 1_287905_4_935 | unclassified | unknown | Phytophthora syringae | 625 |
| JABAKDO10000108.1_821996_5_2131 | family5 | IS607 | Undaria pinnatifida | 626 |
| JABAKD010000011.1_3499295_5_8873 | family5 | IS607 | Undaria pinnatifida | 627 |
| JABAKD010000016 1_17797256_2_46619 | family5 | IS607 | Undaria pinnatifida | 628 |
| JABAKDO10000023.1_19279171_4_48772 | family5 | IS607 | Undaria pinnatifida | 629 |
| JABAKDO10000023.1_22534053_6_57946 | family5 | IS607 | Undaria pinnatifida | 630 |
| JABAKDO10000023.1_25384868_2_65571 | unclassified | IS607 | Undaria pinnatifida | 631 |
| JABAKDO10000029.1_14712747_6_37148 | family5 | IS607 | Undaria pinnatifida | 626 |
| JABAKDO10000008.1_7704496_1_19622 | family5 | unknown | Undaria pinnatifida | 632 |
| BLSG01000172.1_32688_3_172 | family4 | unknown | Thraustochytrium | 633 |
| | | | aureum | |
| BLSF01000040.1_45425_5_119 | family5 | unknown | Parietichytrium sp. | 634 |
| | | | I65-124A | |
| BLSF01000061.1_224896_4_413 | family5 | unknown | Parietichytrium sp. | 635 |
| | | | I65-124A | |
| BLSF01000116.1_49576_4_136 | family5 | unknown | Parietichytrium sp. | 636 |
| | | | I65-124A | |
| WJBH01000312 1_2666_2_5 | unclassified | unknown | Daphnia sinensis | 637 |
| WJBH01000312.1_145118_2_152 | unclassified | unknown | Daphnia sinensis | 637 |
| JABMIG010000386.1_28638_6_62 | unclassified | unknown | Cyclotella cryptica | 638 |
| JABMIG010000325 1_48934_1_84 | unclassified | unknown | Cyclotella cryptica | 639 |
| CM023265.1_26319720_3_40204 | family4 | unknown | Paralithodes platypus | 640 |
| CM023269.1_38296143_3_58416 | unclassified | unknown | Paralithodes platypus | 641 |
| CM023271.1_60092633_2_88453 | unclassified | unknown | Paralithodes platypus | 642 |
| CM023295.1_4146031_1_5963 | unclassified | unknown | Paralithodes platypus | 643 |
| CM023324.1_7105669_4_11925 | family4 | unknown | Paralithodes platypus | 644 |
| CM023324.1_7120976_5_11948 | unclassified | unknown | Paralithodes platypus | 645 |
| CM023324.1_7218832_1_12077 | unclassified | unknown | Paralithodes platypus | 646 |
| CM023324.1_7226136_6_12087 | unclassified | unknown | Paralithodes platypus | 647 |
| CM023324.1_7712791_4_12891 | family4 | unknown | Paralithodes platypus | 648 |
| CM023334.1_859702_4_1337 | unclassified | unknown | Paralithodes platypus | 649 |
| CM023334.1_904429_4_1439 | unclassified | unknown | Paralithodes platypus | 650 |
| CM023334.1_1090259_2_1597 | family4 | unknown | Paralithodes platypus | 651 |
| CM023348.1_37091781_6_56672 | unclassified | unknown | Paralithodes platypus | 652 |
| CM023316.1_17821007_5_25447 | unclassified | unknown | Paralithodes platypus | 653 |
| JABLUY010000040.1_63281_5_356 | family5 | unknown | Thraustochytrium sp. | 654 |
| | | | TN22 | |
| JABLUY010000063.1_16370_5_82 | family5 | unknown | Thraustochytrium sp. | 655 |
| | | | TN22 | |
| JABLUY010000073.1_50533_1_275 | family5 | unknown | Thraustochytrium sp | 656 |
| | | | TN22 | |
| JABRWK010000006.1_787789_4_420 | unclassified | unknown | Hypothenemus | 657 |
| | | | hampei | |
| JABRWK010000084.1_85351_1_16 | unclassified | unknown | Hypothenemus | 658 |
| | | | hampei | |
| JACBWV010000699 1_31722_6_93 | unclassified | Mariner/Tc1 | Chlamydomonas sp. | 659 |
| | | | ICE-L | |
| JACBWV010000699.1_58673_5_158 | family4 | Mariner/Tc1 | Chlamydomonas sp. | 660 |
| | | | ICE-L | |
| JACBWV010000417.1_6032_5_14 | family4 | Mariner/Tc1 | Chlamydomonas sp. | 661 |
| | | | ICE-L | |
| JACBWV010000417.1_15561_3_29 | family4 | Mariner/Tc1 | Chlamydomonas sp. | 662 |
| | | | ICE-L | |
| JACBWV010000417.1_58837_1_145 | family4 | Mariner/Tc1 | Chlamydomonas sp. | 663 |
| | | | ICE-L | |
| JACBWV010000364.1_187511_2_468 | family4 | Mariner/Tc1 | Chlamydomonas sp. | 664 |
| | | | ICE-L | |
| JACBWV010000364.1_218631_3_536 | family4 | Mariner/Tc1 | Chlamydomonas sp. | 665 |
| | | | ICE-L | |
| JACBWV010000364.1_267650_2_670 | unclassified | Mariner/Tc1 | Chlamydomonas sp. | 666 |
| | | | ICE-L | |
| JACBWV010000364.1_281838_6_711 | unclassified | Mariner/Tc1 | Chlamydomonas sp. | 667 |
| | | | ICE-L | |
| JACBWV010000364 1_296867_5_746 | unclassified | Mariner/Tc1 | Chlamydomonas sp. | 668 |
| | | | ICE-L | |
| JACBWV010000364.1_322371_6_821 | family4 | Mariner/Tc1 | Chlamydomonas sp. | 669 |
| | | | ICE-L | |
| JACBWV010000364.1_2733771_3_6037 | family4 | Mariner/Tc1 | Chlamydomonas sp. | 670 |
| | | | ICE-L | |
| JACBWV010000364.1_2762493_6_6107 | family4 | Mariner/Tc1 | Chlamydomonas sp. | 671 |
| | | | ICE-L | |
| JACBWV010000364.1_2796256_1_6187 | unclassified | Mariner/Tc1 | Chlamydomonas sp. | 672 |
| | | | ICE-L | |
| JACBWV010000364.1_2800296_3_6200 | family4 | Mariner/Tc1 | Chlamydomonas sp. | 673 |
| | | | ICE-L | |
| JACBWV010000364.1_3412511_5_7761 | family4 | Mariner/Tc1 | Chlamydomonas sp. | 674 |
| | | | ICE-L | |
| JACBWV010000364.1_10245448_4_23450 | unclassified | Mariner/Tc1 | Chlamydomonas sp. | 675 |
| | | | ICE-L | |
| JACBWV010000278 1_41723_2_100 | family5 | IS607 | Chlamydomonas sp. | 676 |
| | | | ICE-L | |
| JACBWV010000358.1_45125_5_68 | family4 | Mariner/Tc1 | Chlamydomonas sp. | 677 |
| | | | ICE-L | |
| JACBWV010000358.1_88627_1_173 | family4 | Mariner/Tc1 | Chlamydomonas sp. | 678 |
| | | | ICE-L | |
| JACBWV010000018.1_7967_2_16 | unclassified | Mariner/Tc1 | Chlamydomonas sp. | 679 |
| | | | ICE-L | |
| JACBWV010000018.1_33722_5_83 | family4 | Mariner/Tc1 | Chlamydomonas sp. | 680 |
| | | | ICE-L | |
| JACBWV010000018.1_64991_2_160 | family4 | Mariner/Tc1 | Chlamydomonas sp. | 681 |
| | | | ICE-L | |
| JACBWV010000018.1_123283_4_322 | family4 | Mariner/Tc1 | Chlamydomonas sp. | 682 |
| | | | ICE-L | |
| JACBWV010000018.1_160251_3_416 | family5 | IS607 | Chlamydomonas sp. | 683 |
| | | | ICE-L | |
| JACBWV010000045 1_1158838_4_2993 | family4 | Mariner/Tc1 | Chlamydomonas sp. | 684 |
| | | | ICE-L | |
| JACBWV010000045.1_4206084_6_10062 | unclassified | Mariner/Tc1 | Chlamydomonas sp. | 685 |
| | | | ICE-L | |
| JACBWV010000045.1_4212344_5_10086 | family4 | Mariner/Tc1 | Chlamydomonas sp. | 686 |
| | | | ICE-L | |
| JACBWV010000045.1_4227879_3_10133 | unclassified | Mariner/Tc1 | Chlamydomonas sp. | 687 |
| | | | ICE-L | |
| JACBWV010000045.1_4232900_5_10142 | unclassified | Mariner/Tc1 | Chlamydomonas sp. | 688 |
| | | | ICE-L | |
| JACBWV010000045.1_4266906_3_10212 | family4 | Mariner/Tc1 | Chlamydomonas sp. | 689 |
| | | | ICE-L | |
| JACBWV010000045.1_4273899_6_10226 | family4 | Mariner/Tc1 | Chlamydomonas sp. | 690 |
| | | | ICE-L | |
| JACBWV010000045.1_6550540_4_15662 | family4 | Mariner/Tc1 | Chlamydomonas sp. | 691 |
| | | | ICE-L | |
| JACBWV010000045 1_6562256_5_15699 | family4 | Mariner/Tc1 | Chlamydomonas sp. | 692 |
| | | | ICE-L | |
| JACBWV010000045.1_6932781_3_16575 | unclassified | IS607 | Chlamydomonas sp. | 693 |
| | | | ICE-L | |
| JACBWV010000045.1_7013336_5_16752 | unclassified | Mariner/Tc1 | Chlamydomonas sp. | 694 |
| | | | ICE-L | |
| JACBWV010000045.1_7045259_2_16853 | unclassified | Mariner/Tc1 | Chlamydomonas sp. | 695 |
| | | | ICE-L | |
| JACBWV010000045.1_7089939_3_16966 | family4 | Mariner/Tc1 | Chlamydomonas sp. | 696 |
| | | | ICE-L | |
| JACBWV010000045.1_7094857_4_16975 | family4 | Mariner/Tc1 | Chlamydomonas sp. | 697 |
| | | | ICE-L | |
| JACBWV010000045.1_7153045_1_17121 | family4 | Mariner/Tc1 | Chlamydomonas sp. | 698 |
| | | | ICE-L | |
| JACBWV010000045.1_7169479_1_17163 | unclassified | Mariner/Tc1 | Chlamydomonas sp. | 699 |
| | | | ICE-L | |
| JACBWV010000045.1_7198329_6_17242 | family4 | unknown | Chlamydomonas sp. | 700 |
| | | | ICE-L | |
| JACBWV010000045 1_7207921_4_17273 | unclassified | Mariner/Tc1 | Chlamydomonas sp. | 701 |
| | | | ICE-L | |
| JACBWV010000045.1_7247114_5_17355 | unclassified | Mariner/Tc1 | Chlamydomonas sp. | 702 |
| | | | ICE-L | |
| JACBWV010000045.1_7335322_1_17608 | unclassified | Mariner/Tc1 | Chlamydomonas sp. | 703 |
| | | | ICE-L | |
| JACBWV010000045.1_7400543_5_17778 | family4 | Mariner/Tc1 | Chlamydomonas sp. | 704 |
| | | | ICE-L | |
| JACBWV010000673.1_550573_1_1146 | family4 | Mariner/Tc1 | Chlamydomonas sp. | 705 |
| | | | ICE-L | |
| JACBWV010000673.1_600927_3_1272 | family4 | Mariner/Tc1 | Chlamydomonas sp. | 706 |
| | | | ICE-L | |
| JACBWV010000673.1_1180357_4_2566 | family5 | IS607 | Chlamydomonas sp. | 707 |
| | | | ICE-L | |
| JACBWV010000673.1_1221093_6_2658 | family4 | Mariner/Tc1 | Chlamydomonas sp. | 708 |
| | | | ICE-L | |
| JACBWV010000673 1_1259378_2_2745 | family4 | Mariner/Tc1 | Chlamydomonas sp. | 709 |
| | | | ICE-L | |
| JACBWV010000877.1_6533_5_17 | family4 | Mariner/Tc1 | Chlamydomonas sp. | 710 |
| | | | ICE-L | |
| JACBWV010000176.1_28893_3_57 | family4 | Mariner/Tc1 | Chlamydomonas sp. | 711 |
| | | | ICE-L | |
| JACBWV010000176.1_33672_3_71 | unclassified | Mariner/Tc1 | Chlamydomonas sp. | 712 |
| | | | ICE-L | |
| JACBWV010000176.1_73970_5_185 | family4 | Mariner/Tc1 | Chlamydomonas sp. | 713 |
| | | | ICE-L | |
| JACBWV010000340.1_5159_2_16 | family4 | Mariner/Tc1 | Chlamydomonas sp. | 714 |
| | | | ICE-L | |
| JACBWV010000340.1_268659_6_619 | family4 | Mariner/Tc1 | Chlamydomonas sp. | 715 |
| | | | ICE-L | |
| JACBWV010000338.1_282448_4_690 | family4 | Mariner/Tc1 | Chlamydomonas sp. | 716 |
| | | | ICE-L | |
| JACBWV010000338 1_301893_3_729 | family4 | Mariner/Tc1 | Chlamydomonas sp. | 717 |
| | | | ICE-L | |
| JACBWV010000338.1_402769_1_949 | unclassified | Mariner/Tc1 | Chlamydomonas sp. | 718 |
| | | | ICE-L | |
| JACBWV010000338.1_789637_4_1886 | family4 | Mariner/Tc1 | Chlamydomonas sp. | 719 |
| | | | ICE-L | |
| JACBWV010000338.1_4625647_1_11479 | family4 | Mariner/Tc1 | Chlamydomonas sp. | 720 |
| | | | ICE-L | |
| JACBWV010000338.1_4728820_4_11769 | unclassified | IS607 | Chlamydomonas sp. | 721 |
| | | | ICE-L | |
| JACBWV010000338.1_4750477_1_11818 | unclassified | Mariner/Tc1 | Chlamydomonas sp. | 722 |
| | | | ICE-L | |
| JACBWV010000338.1_5844254_2_14494 | family5 | IS607 | Chlamydomonas sp. | 723 |
| | | | ICE-L | |
| JACBWV010000338.1_5897742_3_14622 | family4 | Mariner/Tc1 | Chlamydomonas sp. | 724 |
| | | | ICE-L | |
| JACBWV010000338 1_7705220_2_18732 | family4 | Mariner/Tc1 | Chlamydomonas sp. | 725 |
| | | | ICE-L | |
| JACBWV010000338.1_7861114_4_19072 | family5 | IS607 | Chlamydomonas sp. | 726 |
| | | | ICE-L | |
| JACBWV010000698.1_56000_2_156 | family4 | Mariner/Tc1 | Chlamydomonas sp. | 727 |
| | | | ICE-L | |
| JACBWV010000603.1_43377_3_87 | family4 | Mariner/Tc1 | Chlamydomonas sp. | 728 |
| | | | ICE-L | |
| JACBWV010000603.1_60078_3_140 | unclassified | Mariner/Tc1 | Chlamydomonas sp. | 729 |
| | | | ICE-L | |
| JACBWV010000603.1_91349_2_229 | family4 | Mariner/Tc1 | Chlamydomonas sp. | 730 |
| | | | ICE-L | |
| JACBWV010000558.1_16879_4_61 | family4 | Mariner/Tc1 | Chlamydomonas sp. | 731 |
| | | | ICE-L | |
| JACBWV010000592.1_355319_2_893 | family4 | Mariner/Tc1 | Chlamydomonas sp. | 732 |
| | | | ICE-L | |
| JACBWV010000592.1_372637_1_935 | unclassified | Mariner/Tc1 | Chlamydomonas sp. | 733 |
| | | | ICE-L | |
| JACBWV010000418 1_522693_3_1040 | family4 | Mariner/Tc1 | Chlamydomonas sp. | 734 |
| | | | ICE-L | |
| JACBWV010000418.1_537267_6_1080 | unclassified | Mariner/Tc1 | Chlamydomonas sp. | 735 |
| | | | ICE-L | |
| JACBWV010000418.1_543536_5_1099 | family4 | Mariner/Tc1 | Chlamydomonas sp. | 736 |
| | | | ICE-L | |
| JACBWV010000418.1_545542_1_1102 | unclassified | Mariner/Tc1 | Chlamydomonas sp. | 737 |
| | | | ICE-L | |
| JACBWV010000418.1_549696_3_1116 | family4 | Mariner/Tc1 | Chlamydomonas sp. | 738 |
| | | | ICE-L | |
| JACBWV010000418.1_554371_1_1126 | family4 | Mariner/Tc1 | Chlamydomonas sp. | 739 |
| | | | ICE-L | |
| JACBWV010000418.1_1560033_3_3719 | family4 | Mariner/Tc1 | Chlamydomonas sp. | 740 |
| | | | ICE-L | |
| JACBWV010000418.1_1588335_6_3793 | unclassified | Mariner/Tc1 | Chlamydomonas sp. | 741 |
| | | | ICE-L | |
| JACBWV010000418 1_1737283_4_4122 | family4 | Mariner/Tc1 | Chlamydomonas sp. | 742 |
| | | | ICE-L | |
| JACBWV010000073.1_14916_3_45 | family4 | Mariner/Tc1 | Chlamydomonas sp. | 743 |
| | | | ICE-L | |
| JACBWV010000073.1_50265_6_129 | unclassified | Mariner/Tc1 | Chlamydomonas sp. | 744 |
| | | | ICE-L | |
| JACBWV010000074.1_27594_6_67 | unclassified | Mariner/Tc1 | Chlamydomonas sp. | 745 |
| | | | ICE-L | |
| JACBWV010000075.1_24096_6_69 | family4 | Mariner/Tc1 | Chlamydomonas sp. | 746 |
| | | | ICE-L | |
| JACBWV010000075.1_105026_2_276 | family4 | Mariner/Tc1 | Chlamydomonas sp. | 747 |
| | | | ICE-L | |
| JACBWV010000075.1_136280_5_360 | family4 | Mariner/Tc1 | Chlamydomonas sp. | 748 |
| | | | ICE-L | |
| JACBWV010000075.1_155131_4_402 | family4 | Mariner/Tc1 | Chlamydomonas sp. | 749 |
| | | | ICE-L | |
| JACBWV010000075 1_162840_6_421 | family5 | IS607 | Chlamydomonas sp. | 750 |
| | | | ICE-L | |
| JACBWV010000075.1_178510_4_468 | family4 | Mariner/Tc1 | Chlamydomonas sp. | 751 |
| | | | ICE-L | |
| JACBWV010000075.1_181426_4_478 | unclassified | Mariner/Tc1 | Chlamydomonas sp. | 752 |
| | | | ICE-L | |
| JACBWV010000075.1_227500_1_586 | family4 | Mariner/Tc1 | Chlamydomonas sp. | 753 |
| | | | ICE-L | |
| JACBWV010000075.1_271559_2_711 | unclassified | Mariner/Tc1 | Chlamydomonas sp. | 754 |
| | | | ICE-L | |
| JACBWV010000075.1_284344_4_749 | family4 | Mariner/Tc1 | Chlamydomonas sp. | 755 |
| | | | ICE-L | |
| JACBWV010000075.1_302799_6_801 | family5 | IS607 | Chlamydomonas sp. | 756 |
| | | | ICE-L | |
| JACBWV010000084.1_538428_3_1279 | unclassified | Mariner/Tc1 | Chlamydomonas sp. | 757 |
| | | | ICE-L | |
| JACBWV010000084 1_813174_6_1992 | family4 | Mariner/Tc1 | Chlamydomonas sp. | 758 |
| | | | ICE-L | |
| JACBWV010000084.1_874682_2_2126 | family4 | Mariner/Tc1 | Chlamydomonas sp. | 759 |
| | | | ICE-L | |
| JACBWV010000084.1_1032805_1_2530 | family4 | Mariner/Tc1 | Chlamydomonas sp. | 760 |
| | | | ICE-L | |
| JACBWV010000084.1_1047549_6_2564 | family4 | Mariner/Tc1 | Chlamydomonas sp. | 761 |
| | | | ICE-L | |
| JACBWV010000084.1_1057553_5_2594 | family4 | Mariner/Tc1 | Chlamydomonas sp. | 762 |
| | | | ICE-L | |
| JACBWV010000084.1_1077787_1_2634 | family4 | Mariner/Tc1 | Chlamydomonas sp. | 763 |
| | | | ICE-L | |
| JACBWV010000084.1_1089844_4_2659 | family4 | Mariner/Tc1 | Chlamydomonas sp. | 764 |
| | | | ICE-L | |
| JACBWV010000084.1_1096308_6_2669 | family5 | IS607 | Chlamydomonas sp. | 765 |
| | | | ICE-L | |
| JACBWV010000084.1_1104766_4_2691 | family5 | IS607 | Chlamydomonas sp. | 766 |
| | | | ICE-L | |
| JACBWV010000084 1_1236019_1_3038 | unclassified | Mariner/Tc1 | Chlamydomonas sp. | 767 |
| | | | ICE-L | |
| JACBWV010000024.1_29198_2_79 | unclassified | Mariner/Tc1 | Chlamydomonas sp. | 768 |
| | | | ICE-L | |
| JACBWV010000024.1_76880_5_197 | unclassified | IS607 | Chlamydomonas sp. | 769 |
| | | | ICE-L | |
| JACBWV010000024.1_90858_6_235 | family5 | IS607 | Chlamydomonas sp. | 770 |
| | | | ICE-L | |
| JACBWV010000028.1_12430_1_38 | unclassified | Mariner/Tc1 | Chlamydomonas sp. | 771 |
| | | | ICE-L | |
| JACBWV010000028.1_56917_4_148 | family4 | Mariner/Tc1 | Chlamydomonas sp. | 772 |
| | | | ICE-L | |
| JACBWV010000028.1_114602_2_310 | family4 | Mariner/Tc1 | Chlamydomonas sp. | 773 |
| | | | ICE-L | |
| JACBWV010000028.1_156373_1_407 | unclassified | Mariner/Tc1 | Chlamydomonas sp. | 774 |
| | | | ICE-L | |
| JACBWV010000028 1_181266_6_469 | family4 | Mariner/Tc1 | Chlamydomonas sp. | 775 |
| | | | ICE-L | |
| JACBWV010000028.1_373594_4_851 | unclassified | Mariner/Tc1 | Chlamydomonas sp. | 776 |
| | | | ICE-L | |
| JACBWV010000028.1_618389_2_1431 | family4 | Mariner/Tc1 | Chlamydomonas sp. | 777 |
| | | | ICE-L | |
| JACBWV010000028.1_742562_2_1735 | family4 | Mariner/Tc1 | Chlamydomonas sp. | 778 |
| | | | ICE-L | |
| JACBWV010000028.1_747943_4_1746 | family4 | Mariner/Tc1 | Chlamydomonas sp. | 779 |
| | | | ICE-L | |
| JACBWV010000028.1_765901_1_1802 | family5 | IS607 | Chlamydomonas sp. | 780 |
| | | | ICE-L | |
| JACBWV010000422.1_50650_1_146 | family4 | Mariner/Tc1 | Chlamydomonas sp. | 781 |
| | | | ICE-L | |
| JACBWV010000422.1_57616_4_165 | family4 | Mariner/Tc1 | Chlamydomonas sp. | 782 |
| | | | ICE-L | |
| JACBWV010000422 1_64812_3_190 | family4 | Mariner/Tc1 | Chlamydomonas sp. | 783 |
| | | | ICE-L | |
| JACBWV010000422.1_76557_6_217 | family4 | Mariner/Tc1 | Chlamydomonas sp. | 784 |
| | | | ICE-L | |
| JACBWV010000630.1_6362_5_22 | family4 | Mariner/Tc1 | Chlamydomonas sp. | 785 |
| | | | ICE-L | |
| JACBWV010000630.1_18676_4_56 | family4 | Mariner/Tc1 | Chlamydomonas sp. | 786 |
| | | | ICE-L | |
| JACBWV010000720.1_36173_2_92 | family5 | IS607 | Chlamydomonas sp. | 787 |
| | | | ICE-L | |
| JACBWV010000720.1_45008_2_118 | unclassified | Mariner/Tc1 | Chlamydomonas sp. | 788 |
| | | | ICE-L | |
| JACBWV010000097.1_55533_3_116 | family4 | Mariner/Tc1 | Chlamydomonas sp. | 789 |
| | | | ICE-L | |
| JACBWV010000097.1_63620_2_140 | unclassified | Mariner/Tc1 | Chlamydomonas sp. | 790 |
| | | | ICE-L | |
| JACBWV010000097 1_67879_1_152 | family4 | Mariner/Tc1 | Chlamydomonas sp. | 791 |
| | | | ICE-L | |
| JACBWV010000097.1_74876_5_163 | unclassified | Mariner/Tc1 | Chlamydomonas sp. | 792 |
| | | | ICE-L | |
| JACBWV010000273.1_131230_1_341 | family5 | IS607 | Chlamydomonas sp. | 793 |
| | | | ICE-L | |
| JACBWV010000273.1_147378_3_379 | family4 | Mariner/Tc1 | Chlamydomonas sp. | 794 |
| | | | ICE-L | |
| JACBWV010000273.1_159328_1_397 | unclassified | Mariner/Tc1 | Chlamydomonas sp. | 795 |
| | | | ICE-L | |
| JACBWV010000273.1_184458_6_460 | family4 | Mariner/Tc1 | Chlamydomonas sp. | 796 |
| | | | ICE-L | |
| JACBWV010000652.1_111703_1_278 | family4 | Mariner/Tc1 | Chlamydomonas sp. | 797 |
| | | | ICE-L | |
| JACBWV010000651.1_41111_2_100 | family4 | Mariner/Tc1 | Chlamydomonas sp. | 798 |
| | | | ICE-L | |
| JACBWV010000651.1_155049_6_422 | unclassified | Mariner/Tc1 | Chlamydomonas sp. | 799 |
| | | | ICE-L | |
| JACBWV010000660 1_80759_5_202 | family5 | IS607 | Chlamydomonas sp. | 800 |
| | | | ICE-L | |
| JACBWV010000660.1_341623_4_838 | family4 | Mariner/Tc1 | Chlamydomonas sp. | 801 |
| | | | ICE-L | |
| JACBWV010000660.1_353365_1_875 | family4 | Mariner/Tc1 | Chlamydomonas sp. | 802 |
| | | | ICE-L | |
| JACBWV010000660.1_380844_6_953 | unclassified | Mariner/Tc1 | Chlamydomonas sp. | 803 |
| | | | ICE-L | |
| JACBWV010000660.1_387159_3_970 | family4 | Mariner/Tc1 | Chlamydomonas sp. | 804 |
| | | | ICE-L | |
| JACBWV010000660.1_401820_6_1014 | family4 | Mariner/Tc1 | Chlamydomonas sp. | 805 |
| | | | ICE-L | |
| JACBWV010000660.1_419414_5_1059 | family4 | Mariner/Tc1 | Chlamydomonas sp. | 806 |
| | | | ICE-L | |
| JACBWV010000660.1_440252_2_1104 | unclassified | unknown | Chlamydomonas sp. | 807 |
| | | | ICE-L | |
| JACBWV010000660 1_469662_3_1180 | family4 | Mariner/Tc1 | Chlamydomonas sp. | 808 |
| | | | ICE-L | |
| JACBWV010000660.1_488320_1_1209 | family4 | Mariner/Tc1 | Chlamydomonas sp. | 809 |
| | | | ICE-L | |
| JACBWV010000660.1_1134698_2_2700 | family5 | IS607 | Chlamydomonas sp. | 810 |
| | | | ICE-L | |
| JACBWV010000660.1_1148394_3_2736 | unclassified | Mariner/Tc1 | Chlamydomonas sp. | 811 |
| | | | ICE-L | |
| JACBWV010000660.1_1153217_5_2748 | unclassified | Mariner/Tc1 | Chlamydomonas sp. | 812 |
| | | | ICE-L | |
| JACBWV010000660.1_1226013_6_2934 | unclassified | Mariner/Tc1 | Chlamydomonas sp. | 813 |
| | | | ICE-L | |
| JACBWV010000678.1_51352_4_126 | family4 | Mariner/Tc1 | Chlamydomonas sp. | 814 |
| | | | ICE-L | |
| JACBWV010000678.1_363682_1_798 | family5 | IS607 | Chlamydomonas sp. | 815 |
| | | | ICE-L | |
| JACBWV010000678 1_953425_4_2112 | family4 | Mariner/Tc1 | Chlamydomonas sp. | 816 |
| | | | ICE-L | |
| JACBWV010000678.1_996089_2_2225 | unclassified | Mariner/Tc1 | Chlamydomonas sp. | 817 |
| | | | ICE-L | |
| JACBWV010000678.1_1001427_6_2234 | family4 | Mariner/Tc1 | Chlamydomonas sp. | 818 |
| | | | ICE-L | |
| JACBWV010000678.1_1007720_2_2246 | family4 | Mariner/Tc1 | Chlamydomonas sp. | 819 |
| | | | ICE-L | |
| JACBWV010000678.1_1055863_4_2376 | family4 | Mariner/Tc1 | Chlamydomonas sp. | 820 |
| | | | ICE-L | |
| JACBWV010000384.1_503253_6_1170 | family4 | Mariner/Tc1 | Chlamydomonas sp. | 821 |
| | | | ICE-L | |
| JACBWV010000382.1_1131_3_7 | family4 | unknown | Chlamydomonas sp. | 822 |
| | | | ICE-L | |
| JACBWV010000382.1_31777_1_93 | family4 | Mariner/Tc1 | Chlamydomonas sp. | 823 |
| | | | ICE-L | |
| JACBWV010000382.1_43842_3_116 | family4 | Mariner/Tc1 | Chlamydomonas sp. | 824 |
| | | | ICE-L | |
| JACBWV010000382.1_100800_3_250 | family4 | Mariner/Tc1 | Chlamydomonas sp. | 825 |
| | | | ICE-L | |
| JACBWV010000382.1_114477_6_291 | family5 | IS607 | Chlamydomonas sp. | 826 |
| | | | ICE-L | |
| JACBWV010000382.1_180259_4_467 | family4 | Mariner/Tc1 | Chlamydomonas sp. | 827 |
| | | | ICE-L | |
| JACBWV010000382.1_188004_6_481 | unclassified | Mariner/Tc1 | Chlamydomonas sp. | 828 |
| | | | ICE-L | |
| JACBWV010000382.1_377393_5_962 | family4 | Mariner/Tc1 | Chlamydomonas sp. | 829 |
| | | | ICE-L | |
| JACBWV010000210 1_11919_3_33 | family4 | Mariner/Tc1 | Chlamydomonas sp. | 830 |
| | | | ICE-L | |
| JACBWV010000210 1_52115_2_134 | family5 | IS607 | Chlamydomonas sp. | 831 |
| | | | ICE-L | |
| JACBWV010000210.1_67814_2_172 | family4 | Mariner/Tc1 | Chlamydomonas sp. | 832 |
| | | | ICE-L | |
| JACBWV010000212.1_29848_1_92 | family5 | IS607 | Chlamydomonas sp. | 780 |
| | | | ICE-L | |
| JACBWV010000212.1_46305_6_142 | family4 | Mariner/Tc1 | Chlamydomonas sp. | 833 |
| | | | ICE-L | |
| JACBWV010000212.1_65915_2_192 | family4 | Mariner/Tc1 | Chlamydomonas sp. | 834 |
| | | | ICE-L | |
| JACBWV010000212.1_68628_6_197 | family4 | Mariner/Tc1 | Chlamydomonas sp. | 835 |
| | | | ICE-L | |
| JACBWV010000212.1_79681_4_222 | family4 | Mariner/Tc1 | Chlamydomonas sp. | 836 |
| | | | ICE-L | |
| JACBWV010000212.1_155374_1_420 | family5 | IS607 | Chlamydomonas sp. | 837 |
| | | | ICE-L | |
| JACBWV010000779.1_29349_6_68 | family4 | Mariner/Tc1 | Chlamydomonas sp. | 838 |
| | | | ICE-L | |
| JACBWV010000779.1_35107_4_77 | family4 | Mariner/Tc1 | Chlamydomonas sp. | 839 |
| | | | ICE-L | |
| JACBWV010000779.1_57449_2_126 | family4 | Mariner/Tc1 | Chlamydomonas sp. | 840 |
| | | | ICE-L | |
| JACBWV010000779.1_63877_4_142 | family4 | Mariner/Tc1 | Chlamydomonas sp. | 841 |
| | | | ICE-L | |
| JACBWV010000779.1_110562_3_254 | family4 | Mariner/Tc1 | Chlamydomonas sp. | 842 |
| | | | ICE-L | |
| JACBWV010000779.1_124806_3_290 | family4 | Mariner/Tc1 | Chlamydomonas sp. | 843 |
| | | | ICE-L | |
| JACBWV010000789.1_25487_5_84 | family4 | Mariner/Tc1 | Chlamydomonas sp. | 844 |
| | | | ICE-L | |
| JACBWV010000789 1_171795_6_378 | unclassified | Mariner/Tc1 | Chlamydomonas sp. | 845 |
| | | | ICE-L | |
| JACBWV010000789.1_191013_6_431 | family4 | Mariner/Tc1 | Chlamydomonas sp. | 846 |
| | | | ICE-L | |
| JACBWV010000587.1_32517_3_71 | family4 | Mariner/Tc1 | Chlamydomonas sp. | 847 |
| | | | ICE-L | |
| JACBWV010000587.1_35673_3_82 | unclassified | IS607 | Chlamydomonas sp. | 848 |
| | | | ICE-L | |
| JACBWV010000579.1_11649_3_37 | family4 | Mariner/Tc1 | Chlamydomonas sp. | 849 |
| | | | ICE-L | |
| JACBWV010000579.1_23738_5_78 | unclassified | Mariner/Tc1 | Chlamydomonas sp. | 850 |
| | | | ICE-L | |
| JACBWV010000859.1_162115_1_384 | family4 | Mariner/Tc1 | Chlamydomonas sp. | 851 |
| | | | ICE-L | |
| JACBWV010000152.1_37324_1_107 | family5 | IS607 | Chlamydomonas sp. | 852 |
| | | | ICE-L | |
| JACBWV010000010.1_82677_6_188 | unclassified | Mariner/Tc1 | Chlamydomonas sp. | 853 |
| | | | ICE-L | |
| JACBWV010000252 1_1191608_2_2955 | family4 | Mariner/Tc1 | Chlamydomonas sp. | 854 |
| | | | ICE-L | |
| JACBWV010000252.1_1239900_3_3087 | family4 | Mariner/Tc1 | Chlamydomonas sp. | 855 |
| | | | ICE-L | |
| JACBWV010000252.1_1263734_5_3146 | unclassified | Mariner/Tc1 | Chlamydomonas sp. | 856 |
| | | | ICE-L | |
| JACBWV010000252.1_1311859_1_3264 | family4 | Mariner/Tc1 | Chlamydomonas sp. | 857 |
| | | | ICE-L | |
| JACBWV010000252.1_1334067_3_3332 | unclassified | Mariner/Tc1 | Chlamydomonas sp. | 858 |
| | | | ICE-L | |
| JACBWV010000252.1_1523283_6_3757 | family4 | Mariner/Tc1 | Chlamydomonas sp. | 859 |
| | | | ICE-L | |
| JACBWV010000252.1_1574144_2_3901 | family4 | Mariner/Tc1 | Chlamydomonas sp. | 860 |
| | | | ICE-L | |
| JACBWV010000252.1_1602828_3_3965 | family4 | Mariner/Tc1 | Chlamydomonas sp. | 861 |
| | | | ICE-L | |
| JACBWV010000252 1_1609015_4_3983 | family4 | Mariner/Tc1 | Chlamydomonas sp. | 862 |
| | | | ICE-L | |
| JACBWV010000252.1_1653459_3_4121 | unclassified | Mariner/Tc1 | Chlamydomonas sp. | 863 |
| | | | ICE-L | |
| JACBWV010000252.1_1695877_4_4238 | family4 | Mariner/Tc1 | Chlamydomonas sp. | 864 |
| | | | ICE-L | |
| JACBWV010000252.1_1713388_4_4275 | family4 | Mariner/Tc1 | Chlamydomonas sp. | 865 |
| | | | ICE-L | |
| JACBWV010000252.1_1751232_6_4377 | family5 | IS607 | Chlamydomonas sp. | 866 |
| | | | ICE-L | |
| JACBWV010000055.1_39466_1_69 | family4 | Mariner/Tc1 | Chlamydomonas sp. | 867 |
| | | | ICE-L | |
| JACBWV010000055.1_43900_1_73 | unclassified | Mariner/Tc1 | Chlamydomonas sp. | 868 |
| | | | ICE-L | |
| JACBWV010000055.1_52536_6_95 | unclassified | Mariner/Tc1 | Chlamydomonas sp. | 869 |
| | | | ICE-L | |
| JACBWV010000055 1_72521_2_149 | family4 | Mariner/Tc1 | Chlamydomonas sp. | 870 |
| | | | ICE-L | |
| JACBWV010000060.1_34656_3_106 | family4 | Mariner/Tc1 | Chlamydomonas sp. | 871 |
| | | | ICE-L | |
| JACBWV010000058.1_4817_5_18 | family4 | Mariner/Tc1 | Chlamydomonas sp. | 872 |
| | | | ICE-L | |
| JACBWV010000058.1_17386_4_49 | family4 | Mariner/Tc1 | Chlamydomonas sp. | 873 |
| | | | ICE-L | |
| JACBWV010000058.1_60279_3_136 | unclassified | Mariner/Tc1 | Chlamydomonas sp. | 874 |
| | | | ICE-L | |
| JACBWV010000057.1_74881_4_200 | family4 | Mariner/Tc1 | Chlamydomonas sp. | 875 |
| | | | ICE-L | |
| JACBWV010000765.1_140114_5_361 | family4 | Mariner/Tc1 | Chlamydomonas sp. | 876 |
| | | | ICE-L | |
| JACBWV010000765.1_210993_6_534 | family4 | Mariner/Tc1 | Chlamydomonas sp. | 877 |
| | | | ICE-L | |
| JACBWV010000765 1_299563_1_721 | unclassified | Mariner/Tc1 | Chlamydomonas sp. | 878 |
| | | | ICE-L | |
| JACBWV010000790.1_44519_2_96 | unclassified | Mariner/Tc1 | Chlamydomonas sp. | 879 |
| | | | ICE-L | |
| JACBWV010000790.1_71701_4_169 | family4 | Mariner/Tc1 | Chlamydomonas sp. | 880 |
| | | | ICE-L | |
| JACBWV010000790.1_76754_2_182 | unclassified | Mariner/Tc1 | Chlamydomonas sp. | 881 |
| | | | ICE-L | |
| JACBWV010000573.1_10876_4_32 | family5 | IS607 | Chlamydomonas sp. | 882 |
| | | | ICE-L | |
| JACBWV010000840.1_44223_6_107 | family4 | Mariner/Tc1 | Chlamydomonas sp. | 883 |
| | | | ICE-L | |
| JACBWV010000839.1_1697968_4_4539 | family4 | Mariner/Tc1 | Chlamydomonas sp. | 884 |
| | | | ICE-L | |
| JACBWV010000839.1_9482460_6_23081 | unclassified | Mariner/Tc1 | Chlamydomonas sp. | 885 |
| | | | ICE-L | |
| JACBWV010000838.1_19682_2_56 | family4 | Mariner/Tc1 | Chlamydomonas sp. | 886 |
| | | | ICE-L | |
| JACBWV010000838 1_78315_3_195 | family5 | IS607 | Chlamydomonas sp. | 887 |
| | | | ICE-L | |
| JACBWV010000838.1_256583_2_665 | family4 | Mariner/Tc1 | Chlamydomonas sp. | 888 |
| | | | ICE-L | |
| JACBWV010000838.1_260046_6_676 | family4 | Mariner/Tc1 | Chlamydomonas sp. | 889 |
| | | | ICE-L | |
| JACBWV010000838.1_343109_2_896 | family5 | IS607 | Chlamydomonas sp. | 890 |
| | | | ICE-L | |
| JACBWV010000838.1_355612_4_924 | family4 | Mariner/Tc1 | Chlamydomonas sp. | 891 |
| | | | ICE-L | |
| JACBWV010000845.1_40373_5_92 | family4 | Mariner/Tc1 | Chlamydomonas sp. | 892 |
| | | | ICE-L | |
| JACBWV010000845.1_45512_2_109 | family4 | Mariner/Tc1 | Chlamydomonas sp. | 893 |
| | | | ICE-L | |
| JACBWV010000696.1_22325_5_55 | family4 | Mariner/Tc1 | Chlamydomonas sp. | 894 |
| | | | ICE-L | |
| JACBWV010000696 1_51458_5_127 | family4 | Mariner/Tc1 | Chlamydomonas sp. | 895 |
| | | | ICE-L | |
| JACBWV010000696.1_90085_4_219 | unclassified | Mariner/Tc1 | Chlamydomonas sp. | 896 |
| | | | ICE-L | |
| JACBWV010000696.1_131267_2_327 | family4 | Mariner/Tc1 | Chlamydomonas sp. | 897 |
| | | | ICE-L | |
| JACBWV010000368.1_22598_2_53 | family4 | Mariner/Tc1 | Chlamydomonas sp. | 898 |
| | | | ICE-L | |
| JACBWV010000368.1_29651_2_73 | unclassified | Mariner/Tc1 | Chlamydomonas sp. | 899 |
| | | | ICE-L | |
| JACBWV010000368.1_80414_2_204 | unclassified | Mariner/Tc1 | Chlamydomonas sp. | 900 |
| | | | ICE-L | |
| JACBWV010000368.1_84105_6_213 | unclassified | Mariner/Tc1 | Chlamydomonas sp. | 901 |
| | | | ICE-L | |
| JACBWV010000704.1_42287_5_117 | family4 | Mariner/Tc1 | Chlamydomonas sp. | 902 |
| | | | ICE-L | |
| JACBWV010000704 1_126064_1_362 | family5 | IS607 | Chlamydomonas sp. | 903 |
| | | | ICE-L | |
| JACBWV010000704.1_136859_2_384 | family4 | Mariner/Tc1 | Chlamydomonas sp. | 904 |
| | | | ICE-L | |
| JACBWV010000704.1_143273_5_394 | family4 | Mariner/Tc1 | Chlamydomonas sp. | 905 |
| | | | ICE-L | |
| JACBWV010000688.1_35796_6_97 | family4 | Mariner/Tc1 | Chlamydomonas sp. | 906 |
| | | | ICE-L | |
| JACBWV010000804.1_26176_1_85 | family5 | IS607 | Chlamydomonas sp. | 907 |
| | | | ICE-L | |
| JACBWV010000474.1_28840_4_79 | unclassified | Mariner/Tc1 | Chlamydomonas sp. | 908 |
| | | | ICE-L | |
| JACBWV010000474.1_71137_1_172 | family4 | Mariner/Tc1 | Chlamydomonas sp. | 909 |
| | | | ICE-L | |
| JACBWV010000474.1_104709_6_262 | unclassified | Mariner/Tc1 | Chlamydomonas sp. | 910 |
| | | | ICE-L | |
| JACBWV010000474 1_171671_2_411 | family5 | IS607 | Chlamydomonas sp. | 911 |
| | | | ICE-L | |
| JACBWV010000469.1_198920_5_491 | unclassified | Mariner/Tc1 | Chlamydomonas sp. | 912 |
| | | | ICE-L | |
| JACBWV010000472.1_2318888_5_5100 | family4 | Mariner/Tc1 | Chlamydomonas sp. | 913 |
| | | | ICE-L | |
| JACBWV010000472.1_2351900_2_5187 | family4 | Mariner/Tc1 | Chlamydomonas sp. | 914 |
| | | | ICE-L | |
| JACBWV010000472.1_2364748_4_5213 | family4 | Mariner/Tc1 | Chlamydomonas sp. | 915 |
| | | | ICE-L | |
| JACBWV010000472.1_2371965_6_5226 | unclassified | Mariner/Tc1 | Chlamydomonas sp. | 916 |
| | | | ICE-L | |
| JACBWV010000472.1_2879000_5_6493 | family4 | Mariner/Tc1 | Chlamydomonas sp. | 917 |
| | | | ICE-L | |
| JACBWV010000472.1_2893142_5_6528 | unclassified | Mariner/Tc1 | Chlamydomonas sp. | 918 |
| | | | ICE-L | |
| JACBWV010000472.1_2913302_2_6589 | family4 | Mariner/Tc1 | Chlamydomonas sp. | 919 |
| | | | ICE-L | |
| JACBWV010000472 1_930385_3_6632 | family4 | Mariner/Tc1 | Chlamydomonas sp. | 920 |
| | | | ICE-L | |
| JACBWV010000472.1_3100706_2_7119 | family4 | Mariner/Tc1 | Chlamydomonas sp. | 921 |
| | | | ICE-L | |
| JACBWV010000472.1_3111238_4_7144 | family4 | Mariner/Tc1 | Chlamydomonas sp. | 922 |
| | | | ICE-L | |
| JACBWV010000472.1_3161783_2_7258 | family4 | Mariner/Tc1 | Chlamydomonas sp. | 921 |
| | | | ICE-L | |
| JACBWV010000471.1_617970_3_1370 | unclassified | Mariner/Tc1 | Chlamydomonas sp. | 923 |
| | | | ICE-L | |
| JACBWV010000739.1_77533_4_156 | unclassified | Mariner/Tc1 | Chlamydomonas sp. | 924 |
| | | | ICE-L | |
| JACBWV010000748.1_133828_1_207 | family4 | Mariner/Tc1 | Chlamydomonas sp. | 925 |
| | | | ICE-L | |
| JACBWV010000748.1_159765_3_269 | family4 | Mariner/Tc1 | Chlamydomonas sp. | 926 |
| | | | ICE-L | |
| JACBWV010000749 1_89919_3_216 | family4 | Mariner/Tc1 | Chlamydomonas sp. | 927 |
| | | | ICE-L | |
| JACBWV010000749.1_119787_3_294 | unclassified | Mariner/Tc1 | Chlamydomonas sp. | 928 |
| | | | ICE-L | |
| JACBWV010000749.1_182475_6_447 | family4 | Mariner/Tc1 | Chlamydomonas sp. | 929 |
| | | | ICE-L | |
| JACBWV010000440.1_26224_1_58 | family4 | Mariner/Tc1 | Chlamydomonas sp. | 930 |
| | | | ICE-L | |
| JACBWV010000369.1_31027_1_100 | family4 | Mariner/Tc1 | Chlamydomonas sp. | 931 |
| | | | ICE-L | |
| JACBWV010000369.1_38410_1_117 | family4 | Mariner/Tc1 | Chlamydomonas sp. | 932 |
| | | | ICE-L | |
| JACBWV010000369.1_44652_3_133 | family4 | Mariner/Tc1 | Chlamydomonas sp. | 933 |
| | | | ICE-L | |
| JACBWV010000672.1_476815_4_1226 | unclassified | Mariner/Tc1 | Chlamydomonas sp. | 934 |
| | | | ICE-L | |
| JACBWV010000626 1_2498283_6_6253 | family4 | Mariner/Tc1 | Chlamydomonas sp. | 935 |
| | | | ICE-L | |
| JACBWV010000626.1_4956302_2_11729 | family4 | Mariner/Tc1 | Chlamydomonas sp. | 936 |
| | | | ICE-L | |
| JACBWV010000626.1_5025217_1_11911 | family4 | Mariner/Tc1 | Chlamydomonas sp. | 937 |
| | | | ICE-L | |
| JACBWV010000626.1_5056392_3_11994 | unclassified | Mariner/Tc1 | Chlamydomonas sp. | 938 |
| | | | ICE-L | |
| JACBWV010000626.1_5068572_6_12021 | family4 | Mariner/Tc1 | Chlamydomonas sp. | 939 |
| | | | ICE-L | |
| JACBWV010000626.1_5075827_1_12036 | unclassified | Mariner/Tc1 | Chlamydomonas sp. | 940 |
| | | | ICE-L | |
| JACBWV010000626.1_5088952_4_12059 | unclassified | Mariner/Tc1 | Chlamydomonas sp. | 941 |
| | | | ICE-L | |
| JACBWV010000626.1_5104206_3_12097 | unclassified | Mariner/Tc1 | Chlamydomonas sp. | 942 |
| | | | ICE-L | |
| JACBWV010000626 1_5110416_3_12117 | family5 | IS607 | Chlamydomonas sp. | 943 |
| | | | ICE-L | |
| JACBWV010000626.1_8584989_3_19913 | unclassified | Mariner/Tc1 | Chlamydomonas sp. | 944 |
| | | | ICE-L | |
| JACBWV010000626.1_14044016_2_30979 | family5 | IS607 | Chlamydomonas sp. | 945 |
| | | | ICE-L | |
| JACBWV010000626.1_14123021_2_31163 | family4 | Mariner/Tc1 | Chlamydomonas sp. | 946 |
| | | | ICE-L | |
| JACBWV010000626.1_14144199_3_31208 | family4 | Mariner/Tc1 | Chlamydomonas sp. | 947 |
| | | | ICE-L | |
| JACBWV010000626.1_15603213_3_34759 | unclassified | Mariner/Tc1 | Chlamydomonas sp. | 948 |
| | | | ICE-L | |
| JACBWV010000626.1_15661715_2_34908 | family4 | Mariner/Tc1 | Chlamydomonas sp. | 949 |
| | | | ICE-L | |
| JACBWV010000626.1_22818860_2_52145 | family5 | IS607 | Chlamydomonas sp. | 950 |
| | | | ICE-L | |
| JACBWV010000626.1_22849582_4_52232 | family4 | Mariner/Tc1 | Chlamydomonas sp. | 951 |
| | | | ICE-L | |
| JACBWV010000626 1_22892525_2_52319 | family4 | Mariner/Tc1 | Chlamydomonas sp. | 952 |
| | | | ICE-L | |
| JACBWV010000626.1_22908544_4_52358 | unclassified | Mariner/Tc1 | Chlamydomonas sp. | 953 |
| | | | ICE-L | |
| JACBWV010000626.1_24209360_5_55339 | family4 | Mariner/Tc1 | Chlamydomonas sp. | 954 |
| | | | ICE-L | |
| JACBWV010000626.1_25080713_5_57544 | family4 | Mariner/Tc1 | Chlamydomonas sp. | 955 |
| | | | ICE-L | |
| JACBWV010000626.1_25086864_3_57560 | unclassified | Mariner/Tc1 | Chlamydomonas sp. | 956 |
| | | | ICE-L | |
| JACBWV010000626.1_25802987_5_59222 | unclassified | Mariner/Tc1 | Chlamydomonas sp. | 957 |
| | | | ICE-L | |
| JACBWV010000626.1_25827300_3_59285 | unclassified | Mariner/Tc1 | Chlamydomonas sp. | 958 |
| | | | ICE-L | |
| JACBWV010000626.1_25842918_3_59339 | unclassified | Mariner/Tc1 | Chlamydomonas sp. | 959 |
| | | | ICE-L | |
| JACBWV010000626 1_31643924_2_73416 | family5 | IS607 | Chlamydomonas sp. | 960 |
| | | | ICE-L | |
| JACBWV010000626.1_31700629_4_73586 | unclassified | Mariner/Tc1 | Chlamydomonas sp. | 961 |
| | | | ICE-L | |
| JACBWV010000626.1_31793353_1_73839 | unclassified | Mariner/Tc1 | Chlamydomonas sp. | 962 |
| | | | ICE-L | |
| JACBWV010000626.1_40346639_5_93056 | family4 | Mariner/Tc1 | Chlamydomonas sp. | 963 |
| | | | ICE-L | |
| JACBWV010000712.1_321906_3_823 | family4 | Mariner/Tc1 | Chlamydomonas sp. | 964 |
| | | | ICE-L | |
| JACBWV010000712.1_453358_4_1117 | unclassified | Mariner/Tc1 | Chlamydomonas sp. | 965 |
| | | | ICE-L | |
| JACBWV010000712.1_464741_2_1145 | family4 | Mariner/Tc1 | Chlamydomonas sp. | 966 |
| | | | ICE-L | |
| JACBWV010000712.1_471490_1_1161 | family4 | Mariner/Tc1 | Chlamydomonas sp. | 967 |
| | | | ICE-L | |
| JACBWV010000719 1_14261_2_39 | family4 | Mariner/Tc1 | Chlamydomonas sp. | 968 |
| | | | ICE-L | |
| JACBWV010000719.1_25607_2_74 | unclassified | Mariner/Tc1 | Chlamydomonas sp. | 969 |
| | | | ICE-L | |
| JACBWV010000719.1_56816_5_160 | family4 | Mariner/Tc1 | Chlamydomonas sp. | 970 |
| | | | ICE-L | |
| JACBWV010000719.1_83370_3_225 | family4 | Mariner/Tc1 | Chlamydomonas sp. | 971 |
| | | | ICE-L | |
| JACBWV010000464.1_80829_3_138 | family5 | IS607 | Chlamydomonas sp. | 972 |
| | | | ICE-L | |
| JACBWV010000464.1_116662_4_228 | family4 | Mariner/Tc1 | Chlamydomonas sp. | 973 |
| | | | ICE-L | |
| JACBWV010000676.1_68433_3_192 | unclassified | Mariner/Tc1 | Chlamydomonas sp. | 974 |
| | | | ICE-L | |
| JACBWV010000676.1_80695_4_234 | family | Mariner/Tc1 | Chlamydomonas sp. | 975 |
| | | | ICE-L | |
| JACBWV010000676 1_100516_1_284 | family5 | IS607 | Chlamydomonas sp. | 976 |
| | | | ICE-L | |
| JACBWV010000676.1_108109_1_303 | family4 | Mariner/Tc1 | Chlamydomonas sp. | 977 |
| | | | ICE-L | |
| JACBWV010000747.1_177611_5_463 | family4 | Mariner/Tc1 | Chlamydomonas sp. | 978 |
| | | | ICE-L | |
| JACBWV010000194.1_57899_2_145 | family4 | Mariner/Tc1 | Chlamydomonas sp. | 979 |
| | | | ICE-L | |
| JACBWV010000086.1_38042_2_105 | family4 | Mariner/Tc1 | Chlamydomonas sp. | 980 |
| | | | ICE-L | |
| JACBWV010000086.1_50778_6_139 | unclassified | Mariner/Tc1 | Chlamydomonas sp. | 981 |
| | | | ICE-L | |
| JACBWV010000187.1_61569_6_120 | unclassified | Mariner/Tc1 | Chlamydomonas sp. | 982 |
| | | | ICE-L | |
| JACBWV010000223.1_1553592_3_3734 | family4 | Mariner/Tc1 | Chlamydomonas sp. | 983 |
| | | | ICE-L | |
| JACBWV010000223.1_2439992_5_5815 | family4 | Mariner/Tc1 | Chlamydomonas sp. | 984 |
| | | | ICE-L | |
| JACBWV010000223 1_3572447_5_8223 | family4 | Mariner/Tc1 | Chlamydomonas sp. | 985 |
| | | | ICE-L | |
| JACBWV010000223.1_3608913_3_8300 | family4 | Mariner/Tc1 | Chlamydomonas sp. | 986 |
| | | | ICE-L | |
| JACBWV010000223.1_4055808_3_9317 | family4 | Mariner/Tc1 | Chlamydomonas sp. | 987 |
| | | | ICE-L | |
| JACBWV010000223.1_5866041_3_13435 | family4 | Mariner/Tc1 | Chlamydomonas sp. | 988 |
| | | | ICE-L | |
| JACBWV010000223.1_5878536_6_13459 | family4 | Mariner/Tc1 | Chlamydomonas sp. | 989 |
| | | | ICE-L | |
| JACBWV010000223.1_6503156_2_14744 | family4 | unknown | Chlamydomonas sp. | 990 |
| | | | ICE-L | |
| JACBWV010000223.1_9498943_4_21840 | unclassified | Mariner/Tc1 | Chlamydomonas sp. | 991 |
| | | | ICE-L | |
| JACBWV010000223.1_10772183_2_24965 | family4 | Mariner/Tc1 | Chlamydomonas sp. | 992 |
| | | | ICE-L | |
| JACBWV010000223 1_11213083_4_25945 | unclassified | Mariner/Tc1 | Chlamydomonas sp. | 993 |
| | | | ICE-L | |
| JACBWV010000223.1_11267101_4_26088 | unclassified | Mariner/Tc1 | Chlamydomonas sp. | 994 |
| | | | ICE-L | |
| JACBWV010000223.1_11799604_4_27374 | family4 | Mariner/Tc1 | Chlamydomonas sp. | 995 |
| | | | ICE-L | |
| JACBWV010000223.1_11835161_5_27465 | family4 | Mariner/Tc1 | Chlamydomonas sp. | 996 |
| | | | ICE-L | |
| JACBWV010000223.1_11853540_3_27513 | family4 | Mariner/Tc1 | Chlamydomonas sp. | 997 |
| | | | ICE-L | |
| JACBWV010000223.1_12395401_1_28912 | family5 | IS607 | Chlamydomonas sp. | 998 |
| | | | ICE-L | |
| JACBWV010000223.1_12405954_6_28940 | family5 | IS607 | Chlamydomonas sp. | 998 |
| | | | ICE-L | |
| JACBWV010000223.1_12437780_5_29023 | family4 | Mariner/Tc1 | Chlamydomonas sp. | 999 |
| | | | ICE-L | |
| JACBWV010000223 1_12460461_3_29077 | family4 | Mariner/Tc1 | Chlamydomonas sp. | 661 |
| | | | ICE-L | |
| JACBWV010000223.1_18864184_1_44117 | family4 | Mariner/Tc1 | Chlamydomonas sp. | 1000 |
| | | | ICE-L | |
| JACBWV010000223.1_19008249_3_44461 | family5 | IS607 | Chlamydomonas sp. | 1001 |
| | | | ICE-L | |
| JACBWV010000223.1_21702177_3_50623 | family4 | Mariner/Tc1 | Chlamydomonas sp. | 1002 |
| | | | ICE-L | |
| JACBWV010000223.1_25621049_2_60321 | unclassified | Mariner/Tc1 | Chlamydomonas sp. | 1003 |
| | | | ICE-L | |
| JACBWV010000227.1_312762_3_665 | unclassified | Mariner/Tc1 | Chlamydomonas sp. | 1004 |
| | | | ICE-L | |
| JACBWV010000552.1_1428853_4_3376 | family5 | unknown | Chlamydomonas sp. | 1005 |
| | | | ICE-L | |
| JACBWV010000552.1_1779974_2_4152 | family4 | Mariner/Tc1 | Chlamydomonas sp. | 1006 |
| | | | ICE-L | |
| JACBWV010000562 1_1867625_5_4376 | family4 | Mariner/Tc1 | Chlamydomonas sp. | 1007 |
| | | | ICE-L | |
| JACBWV010000552.1_1906983_6_4452 | family5 | IS607 | Chlamydomonas sp. | 1008 |
| | | | ICE-L | |
| JACBWV010000552.1_1913243_5_4469 | family4 | Mariner/Tc1 | Chlamydomonas sp. | 1009 |
| | | | ICE-L | |
| JACBWV010000552.1_1918098_3_4478 | family4 | Mariner/Tc1 | Chlamydomonas sp. | 1010 |
| | | | ICE-L | |
| JACBWV010000552.1_3037514_5_7079 | family5 | unknown | Chlamydomonas sp. | 1011 |
| | | | ICE-L | |
| JACBWV010000552.1_3881543_2_8945 | unclassified | Mariner/Tc1 | Chlamydomonas sp. | 1012 |
| | | | ICE-L | |
| JACBWV010000552.1_3903074_5_8998 | family4 | Mariner/Tc1 | Chlamydomonas sp. | 1013 |
| | | | ICE-L | |
| JACBWV010000552.1_3924622_4_9065 | family5 | IS607 | Chlamydomonas sp. | 1014 |
| | | | ICE-L | |
| JACBWV010000552.1_3986397_6_9214 | family4 | Mariner/Tc1 | Chlamydomonas sp. | 1015 |
| | | | ICE-L | |
| JACBWV010000552 1_5663662_4_13115 | family5 | IS607 | Chlamydomonas sp. | 1016 |
| | | | ICE-L | |
| JACBWV010000552.1_5667661_4_13129 | family5 | IS607 | Chlamydomonas sp. | 1017 |
| | | | ICE-L | |
| JACBWV010000552.1_3979695_1_32827 | family4 | Mariner/Tc1 | Chlamydomonas sp. | 1018 |
| | | | ICE-L | |
| JACBWV010000423.1_487705_4_1087 | family4 | Mariner/Tc1 | Chlamydomonas sp. | 1019 |
| | | | ICE-L | |
| JACBWV010000423.1_503811_3_1127 | unclassified | Mariner/Tc1 | Chlamydomonas sp. | 1020 |
| | | | ICE-L | |
| JACBWV010000423.1_534417_6_1203 | family4 | Mariner/Tc1 | Chlamydomonas sp. | 1021 |
| | | | ICE-L | |
| JACBWV010000423.1_614646_3_1372 | family4 | Mariner/Tc1 | Chlamydomonas sp. | 1022 |
| | | | ICE-L | |
| JACBWV010000423.1_624749_2_1396 | family4 | Mariner/Tc1 | Chlamydomonas sp. | 1023 |
| | | | ICE-L | |
| JACBWV010000423 1_638238_3_1426 | family4 | Mariner/Tc1 | Chlamydomonas sp. | 1024 |
| | | | ICE-L | |
| JACBWV010000423.1_693610_1_1569 | unclassified | Mariner/Tc1 | Chlamydomonas sp. | 1025 |
| | | | ICE-L | |
| JACBWV010000423.1_705048_3_1601 | unclassified | Mariner/Tc1 | Chlamydomonas sp. | 1026 |
| | | | ICE-L | |
| JACBWV010000423.1_4704603_6_10660 | family4 | Mariner/Tc1 | Chlamydomonas sp. | 1027 |
| | | | ICE-L | |
| JACBWV010000423.1_4901127_3_11149 | family4 | Mariner/Tc1 | Chlamydomonas sp. | 1028 |
| | | | ICE-L | |
| JACBWV010000423.1_5126101_4_11680 | family4 | Mariner/Tc1 | Chlamydomonas sp. | 1029 |
| | | | ICE-L | |
| JACBWV010000423.1_5171116_4_11747 | family5 | IS607 | Chlamydomonas sp. | 1030 |
| | | | ICE-L | |
| JACBWV010000423.1_5201541_6_11820 | family4 | Mariner/Tc1 | Chlamydomonas sp. | 1031 |
| | | | ICE-L | |
| JACBWV01000042 3_5205303_6_11828 | family5 | IS607 | Chlamydomonas sp. | 1032 |
| | | | ICE-L | |
| JACBWV010000423.1_5271071_5_11997 | unclassified | Mariner/Tc1 | Chlamydomonas sp. | 1033 |
| | | | ICE-L | |
| JACBWV010000423.1_5574486_6_12784 | family5 | IS607 | Chlamydomonas sp. | 1034 |
| | | | ICE-L | |
| JACBWV010000423.1_5599971_6_12831 | family4 | Mariner/Tc1 | Chlamydomonas sp. | 1035 |
| | | | ICE-L | |
| JACBWV010000423.1_5763548_5_13165 | unclassified | Mariner/Tc1 | Chlamydomonas sp. | 1036 |
| | | | ICE-L | |
| JACBWV010000423.1_5846776_4_13386 | family4 | Mariner/Tc1 | Chlamydomonas sp. | 1037 |
| | | | ICE-L | |
| JACBWV010000423.1_5861482_1_13426 | family4 | Mariner/Tc1 | Chlamydomonas sp. | 1038 |
| | | | ICE-L | |
| JACBWV010000423.1_5912580_6_13557 | family4 | Mariner/Tc1 | Chlamydomonas sp. | 1039 |
| | | | ICE-L | |
| JACBWV010000423 1_5995480_1_13776 | family4 | Mariner/Tc1 | Chlamydomonas sp. | 1040 |
| | | | ICE-L | |
| JACBWV010000423.1_5996792_2_13780 | unclassified | Mariner/Tc1 | Chlamydomonas sp. | 1041 |
| | | | ICE-L | |
| JACBWV010000423.1_6080062_1_14012 | family4 | Mariner/Tc1 | Chlamydomonas sp. | 1042 |
| | | | ICE-L | |
| JACBWV010000856.1_706947_3_1518 | family4 | Mariner/Tc1 | Chlamydomonas sp. | 1043 |
| | | | ICE-L | |
| JACBWV010000856.1_723516_3_1567 | family4 | Mariner/Tc1 | Chlamydomonas sp. | 1044 |
| | | | ICE-L | |
| JACBWV010000858.1_59118_6_142 | family4 | Mariner/Tc1 | Chlamydomonas sp. | 1045 |
| | | | ICE-L | |
| JACBWV010000858.1_274659_3_660 | family4 | Mariner/Tc1 | Chlamydomonas sp. | 1046 |
| | | | ICE-L | |
| JACBWV010000858.1_296584_4_708 | unclassified | Mariner/Tc1 | Chlamydomonas sp. | 1047 |
| | | | ICE-L | |
| JACBWV010000497.1_56474_2_149 | family4 | Mariner/Tc1 | Chlamydomonas sp. | 1048 |
| | | | ICE-L | |
| JACBWV010000497 1_100056_3_250 | unclassified | Mariner/Tc1 | Chlamydomonas sp. | 1049 |
| | | | ICE-L | |
| JACBWV010000497.1_733592_2_1776 | family4 | Mariner/Tc1 | Chlamydomonas sp. | 1050 |
| | | | ICE-L | |
| JACBWV010000497.1_781124_2_1933 | family4 | Mariner/Tc1 | Chlamydomonas sp. | 1051 |
| | | | ICE-L | |
| JACBWV010000497.1_842053_1_2122 | family5 | IS607 | Chlamydomonas sp. | 1052 |
| | | | ICE-L | |
| JACBWV010000497.1_903813_3_2359 | unclassified | Mariner/Tc1 | Chlamydomonas sp. | 1053 |
| | | | ICE-L | |
| JACBWV010000497.1_913684_1_2404 | family4 | Mariner/Tc1 | Chlamydomonas sp. | 1054 |
| | | | ICE-L | |
| JACBWV010000497.1_986141_5_2730 | family4 | Mariner/Tc1 | Chlamydomonas sp. | 1055 |
| | | | ICE-L | |
| JACBWV010000497.1_1125794_2_3146 | family4 | Mariner/Tc1 | Chlamydomonas sp. | 1056 |
| | | | ICE-L | |
| JACBWV010000215 1_20009_5_51 | family5 | IS607 | Chlamydomonas sp. | 1057 |
| | | | ICE-L | |
| JACBWV010000216.1_150_3_4 | family5 | unknown | Chlamydomonas sp. | 1058 |
| | | | ICE-L | |
| JACBWV010000216.1_16810_4_52 | family4 | Mariner/Tc1 | Chlamydomonas sp. | 1059 |
| | | | ICE-L | |
| JACBWV010000216.1_78144_3_189 | family5 | IS607 | Chlamydomonas sp. | 1060 |
| | | | ICE-L | |
| JACBWV010000522.1_15808_4_52 | family4 | Mariner/Tc1 | Chlamydomonas sp. | 1061 |
| | | | ICE-L | |
| JACBWV010000184.1_72328_1_170 | family4 | Mariner/Tc1 | Chlamydomonas sp. | 1062 |
| | | | ICE-L | |
| JACBWV010000184.1_83493_3_197 | family4 | Mariner/Tc1 | Chlamydomonas sp. | 1063 |
| | | | ICE-L | |
| JACBWV010000184.1_100297_4_238 | family4 | Mariner/Tc1 | Chlamydomonas sp. | 1064 |
| | | | ICE-L | |
| JACBWV010000184 1_106809_3_252 | family4 | Mariner/Tc1 | Chlamydomonas sp. | 1065 |
| | | | ICE-L | |
| JACBWV010000931.1_37144_1_91 | family4 | Mariner/Tc1 | Chlamydomonas sp. | 725 |
| | | | ICE-L | |
| JACBWV010000931.1_70874_2_178 | family4 | Mariner/Tc1 | Chlamydomonas sp. | 1066 |
| | | | ICE-L | |
| JACBWV010000132.1_46161_6_123 | unclassified | unknown | Chlamydomonas sp. | 1067 |
| | | | ICE-L | |
| JACBWV010000132.1_65531_2_177 | family4 | unknown | Chlamydomonas sp. | 1068 |
| | | | ICE-L | |
| JACBWV010000901.1_49440_6_133 | family5 | IS607 | Chlamydomonas sp. | 1069 |
| | | | ICE-L | |
| JACBWV010000901.1_52989_6_144 | family4 | Mariner/Tc1 | Chlamydomonas sp. | 1070 |
| | | | ICE-L | |
| JACBWV010000901.1_65191_4_164 | family4 | Mariner/Tc1 | Chlamydomonas sp. | 905 |
| | | | ICE-L | |
| JACBWV010000901 1_94122_6_221 | family4 | Mariner/Tc1 | Chlamydomonas sp. | 1071 |
| | | | ICE-L | |
| JACBWV010000901.1_97487_5_229 | family4 | Mariner/Tc1 | Chlamydomonas sp. | 1072 |
| | | | ICE-L | |
| JACBWV010000620.1_190542_6_637 | unclassified | IS607 | Chlamydomonas sp. | 1073 |
| | | | ICE-L | |
| JACBWV010000629.1_775715_2_1591 | family4 | Mariner/Tc1 | Chlamydomonas sp. | 1074 |
| | | | ICE-L | |
| JACBWV010000629.1_792520_1_1632 | family4 | Mariner/Tc1 | Chlamydomonas sp. | 1075 |
| | | | ICE-L | |
| JACBWV010000629.1_984363_3_2100 | family4 | Mariner/Tc1 | Chlamydomonas sp. | 1076 |
| | | | ICE-L | |
| JACBWV010000629.1_1059145_4_2281 | unclassified | Mariner/Tc1 | Chlamydomonas sp. | 1077 |
| | | | ICE-L | |
| JACBWV010000629.1_1077551_5_2318 | family5 | IS607 | Chlamydomonas sp. | 1078 |
| | | | ICE-L | |
| JACBWV010000629.1_1086746_2_2342 | unclassified | Mariner/Tc1 | Chlamydomonas sp. | 1079 |
| | | | ICE-L | |
| JACBWV010000629 1_1151202_6_2495 | family5 | IS607 | Chlamydomonas sp. | 1080 |
| | | | ICE-L | |
| JACBWV010000629.1_1907061_3_4081 | family4 | Mariner/Tc1 | Chlamydomonas sp. | 1081 |
| | | | ICE-L | |
| JACBWV010000629.1_3927545_5_9144 | unclassified | Mariner/Tc1 | Chlamydomonas sp. | 1082 |
| | | | ICE-L | |
| JACBWV010000629.1_3945656_2_9191 | family4 | Mariner/Tc1 | Chlamydomonas sp. | 1083 |
| | | | ICE-L | |
| JACBWV010000629.1_3983126_5_9262 | unclassified | Mariner/Tc1 | Chlamydomonas sp. | 1084 |
| | | | ICE-L | |
| JACBWV010000629.1_4026626_5_9397 | family5 | IS607 | Chlamydomonas sp. | 1085 |
| | | | ICE-L | |
| JACBWV010000629.1_4100147_2_9591 | unclassified | Mariner/Tc1 | Chlamydomonas sp. | 1086 |
| | | | ICE-L | |
| JACBWV010000629.1_4202094_6_9850 | family4 | Mariner/Tc1 | Chlamydomonas sp. | 1087 |
| | | | ICE-L | |
| JACBWV010000629 1_4207816_1_9864 | family4 | Mariner/Tc1 | Chlamydomonas sp. | 1088 |
| | | | ICE-L | |
| JACBWV010000921.1_286224_3_475 | family4 | Mariner/Tc1 | Chlamydomonas sp. | 1089 |
| | | | ICE-L | |
| JACBWV010000921.1_418359_3_796 | family5 | IS607 | Chlamydomonas sp. | 1090 |
| | | | ICE-L | |
| JACBWV010000921.1_481735_1_957 | unclassified | IS607 | Chlamydomonas sp. | 1091 |
| | | | ICE-L | |
| JACBWV010000921.1_518543_2_1051 | family4 | Mariner/Tc1 | Chlamydomonas sp. | 1092 |
| | | | ICE-L | |
| JACBWV010000921.1_773292_3_1626 | unclassified | Mariner/Tc1 | Chlamydomonas sp. | 1093 |
| | | | ICE-L | |
| JACBWV010000921.1_828264_3_1779 | unclassified | Mariner/Tc1 | Chlamydomonas sp. | 1094 |
| | | | ICE-L | |
| JACBWV010000921.1_841992_3_1814 | family4 | Mariner/Tc1 | Chlamydomonas sp. | 1095 |
| | | | ICE-L | |
| JACBWV010000925 1_55553_5_155 | family4 | Mariner/Tc1 | Chlamydomonas sp. | 1096 |
| | | | ICE-L | |
| JACBWV010000925.1_87873_3_251 | family5 | IS607 | Chlamydomonas sp. | 1097 |
| | | | ICE-L | |
| JACBWV010000925.1_95909_5_278 | family4 | Mariner/Tc1 | Chlamydomonas sp. | 1098 |
| | | | ICE-L | |
| JACBWV010000925.1_97773_3_281 | unclassified | Mariner/Tc1 | Chlamydomonas sp. | 1099 |
| | | | ICE-L | |
| JACBWV010000925.1_101849_2_291 | family4 | Mariner/Tc1 | Chlamydomonas sp. | 1100 |
| | | | ICE-L | |
| JACBWV010000926.1_27647_5_51 | unclassified | Mariner/Tc1 | Chlamydomonas sp. | 1101 |
| | | | ICE-L | |
| JACBWV010000926.1_35186_2_69 | family4 | Mariner/Tc1 | Chlamydomonas sp. | 1102 |
| | | | ICE-L | |
| JACBWV010000484.1_171860_2_253 | unclassified | Mariner/Tc1 | Chlamydomonas sp. | 1103 |
| | | | ICE-L | |
| JACBWV010000484 1_174507_6_262 | family4 | Mariner/Tc1 | Chlamydomonas sp. | 1104 |
| | | | ICE-L | |
| JACBWV010000484.1_293025_6_536 | family5 | IS607 | Chlamydomonas sp. | 1105 |
| | | | ICE-L | |
| JACBWV010000777.1_161_5_4 | family4 | unknown | Chlamydomonas sp. | 1106 |
| | | | ICE-L | |
| JACBWV010000777.1_12545_2_37 | family5 | IS607 | Chlamydomonas sp. | 1107 |
| | | | ICE-L | |
| JACBWV010000809.1_26071_4_84 | family4 | Mariner/Tc1 | Chlamydomonas sp. | 1108 |
| | | | ICE-L | |
| JACBWV010000809.1_38340_6_111 | family4 | Mariner/Tc1 | Chlamydomonas sp. | 1109 |
| | | | ICE-L | |
| JACBWV010000810.1_9397_1_23 | unclassified | Mariner/Tc1 | Chlamydomonas sp. | 1110 |
| | | | ICE-L | |
| JACBWV010000810.1_21796_1_57 | family4 | Mariner/Tc1 | Chlamydomonas sp. | 1111 |
| | | | ICE-L | |
| JACBWV010000810.1_453238_4_1104 | family4 | Mariner/Tc1 | Chlamydomonas sp. | 1112 |
| | | | ICE-L | |
| JACBWV010000810 1_460156_1_1117 | family5 | IS607 | Chlamydomonas sp. | 1113 |
| | | | ICE-L | |
| JACBWV010000810.1_470431_1_1149 | unclassified | Mariner/Tc1 | Chlamydomonas sp. | 1114 |
| | | | ICE-L | |
| JACBWV010000810.1_494106_3_1220 | family4 | Mariner/Tc1 | Chlamydomonas sp. | 1115 |
| | | | ICE-L | |
| JACBWV010000810.1_550642_1_1347 | unclassified | Mariner/Tc1 | Chlamydomonas sp. | 1116 |
| | | | ICE-L | |
| JACBWV010000810.1_630186_3_1571 | family4 | Mariner/Tc1 | Chlamydomonas sp. | 1117 |
| | | | ICE-L | |
| JACBWV010000810.1_641557_4_1597 | family4 | Mariner/Tc1 | Chlamydomonas sp. | 1118 |
| | | | ICE-L | |
| JACBWV010000810.1_747575_5_1871 | family4 | Mariner/Tc1 | Chlamydomonas sp. | 1119 |
| | | | ICE-L | |
| JACBWV010000810.1_811484_2_2059 | family4 | Mariner/Tc1 | Chlamydomonas sp. | 1120 |
| | | | ICE-L | |
| JACBWV010000810 1_821722_4_2081 | unclassified | Mariner/Tc1 | Chlamydomonas sp. | 1121 |
| | | | ICE-L | |
| JACBWV010000810.1_830746_1_2105 | family4 | Mariner/Tc1 | Chlamydomonas sp. | 1122 |
| | | | ICE-L | |
| JACBWV010000810.1_892322_5_2261 | unclassified | Mariner/Tc1 | Chlamydomonas sp. | 1123 |
| | | | ICE-L | |
| JACBWV010000810.1_1016473_4_2563 | family4 | Mariner/Tc1 | Chlamydomonas sp. | 1124 |
| | | | ICE-L | |
| JACBWV010000810.1_1030042_4_2595 | family4 | Mariner/Tc1 | Chlamydomonas sp. | 1125 |
| | | | ICE-L | |
| JACBWV010000810.1_1145701_1_2892 | family4 | Mariner/Tc1 | Chlamydomonas sp. | 1126 |
| | | | ICE-L | |
| JACBWV010000810.1_1157781_6_2918 | family4 | Mariner/Tc1 | Chlamydomonas sp. | 1127 |
| | | | ICE-L | |
| JACBWV010000810.1_1163816_2_2933 | unclassified | Mariner/Tc1 | Chlamydomonas sp. | 1128 |
| | | | ICE-L | |
| JACBWV010000810 1_1177228_4_2967 | family4 | Mariner/Tc1 | Chlamydomonas sp. | 1129 |
| | | | ICE-L | |
| JACBWV010000810.1_1180234_1_2974 | family5 | IS607 | Chlamydomonas sp. | 998 |
| | | | ICE-L | |
| JACBWV010000810.1_1617455_2_4050 | unclassified | Mariner/Tc1 | Chlamydomonas sp. | 1130 |
| | | | ICE-L | |
| JACBWV010000810.1_1700941_1_4283 | family5 | IS607 | Chlamydomonas sp. | 1131 |
| | | | ICE-L | |
| JACBWV010000109.1_348260_5_932 | family5 | IS607 | Chlamydomonas sp. | 1132 |
| | | | ICE-L | |
| JACBWV010000109.1_381960_3_1002 | family4 | Mariner/Tc1 | Chlamydomonas sp. | 1133 |
| | | | ICE-L | |
| JACBWV010000109.1_492623_5_1289 | family4 | Mariner/Tc1 | Chlamydomonas sp. | 1134 |
| | | | ICE-L | |
| JACBWV010000109.1_551041_1_1437 | unclassified | Mariner/Tc1 | Chlamydomonas sp. | 1135 |
| | | | ICE-L | |
| JACBWV010000106 1_43182_3_116 | family4 | Mariner/Tc1 | Chlamydomonas sp. | 1136 |
| | | | ICE-L | |
| JACBWV010000375.1_73106_4_175 | unclassified | Mariner/Tc1 | Chlamydomonas sp. | 1137 |
| | | | ICE-L | |
| JACBWV010000371.1_24799_1_92 | family5 | IS607 | Chlamydomonas sp. | 1138 |
| | | | ICE-L | |
| JACBWV010000636.1_89156_5_135 | unclassified | Mariner/Tc1 | Chlamydomonas sp. | 1139 |
| | | | ICE-L | |
| JACBWV010000636.1_106404_3_168 | family5 | IS607 | Chlamydomonas sp. | 1140 |
| | | | ICE-L | |
| JACBWV010000682.1_81750_6_207 | unclassified | Mariner/Tc1 | Chlamydomonas sp. | 1141 |
| | | | ICE-L | |
| JACBWV010000682.1_160162_4_398 | family5 | IS607 | Chlamydomonas sp. | 1142 |
| | | | ICE-L | |
| JACBWV010000682.1_168845_2_425 | family4 | Mariner/Tc1 | Chlamydomonas sp. | 1143 |
| | | | ICE-L | |
| JACBWV010000563.1_119884_1_264 | unclassified | Mariner/Tc1 | Chlamydomonas sp. | 1144 |
| | | | ICE-L | |
| JACBWV010000563 1_250785_6_640 | family4 | Mariner/Tc1 | Chlamydomonas sp. | 1145 |
| | | | ICE-L | |
| JACBWV010000563.1_260348_2_664 | family5 | IS607 | Chlamydomonas sp. | 1998 |
| | | | ICE-L | |
| JACBWV010000563.1_265946_2_679 | family5 | IS607 | Chlamydomonas sp. | 1146 |
| | | | ICE-L | |
| JACBWV010000563.1_286664_2_735 | family4 | Mariner/Tc1 | Chlamydomonas sp. | 1760 |
| | | | ICE-L | |
| JACBWV010000563.1_291047_5_751 | family5 | IS607 | Chlamydomonas sp. | 1147 |
| | | | ICE-L | |
| JACBWV010000681.1_11686_1_32 | unclassified | Mariner/Tc1 | Chlamydomonas sp. | 1148 |
| | | | ICE-L | |
| JACBWV010000681.1_17543_5_49 | family4 | Mariner/Tc1 | Chlamydomonas sp. | 1149 |
| | | | ICE-L | |
| JACBWV010000508.1_248670_6_547 | unclassified | Mariner/Tc1 | Chlamydomonas sp. | 1150 |
| | | | ICE-L | |
| JACBWV010000506 1_2915613_3_7335 | unclassified | Mariner/Tc1 | Chlamydomonas sp. | 1151 |
| | | | ICE-L | |
| JACBWV010000506.1_2918319_6_7340 | family4 | Mariner/Tc1 | Chlamydomonas sp. | 1152 |
| | | | ICE-L | |
| JACBWV010000506.1_2927817_6_7355 | family5 | IS607 | Chlamydomonas sp. | 1153 |
| | | | ICE-L | |
| JACBWV010000506.1_2950826_2_7416 | family4 | Mariner/Tc1 | Chlamydomonas sp. | 1154 |
| | | | ICE-L | |
| JACBWV010000506.1_5737083_6_13918 | unclassified | Mariner/Tc1 | Chlamydomonas sp. | 1155 |
| | | | ICE-L | |
| JACBWV010000506.1_5751688_4_13971 | unclassified | Mariner/Tc1 | Chlamydomonas sp. | 1156 |
| | | | ICE-L | |
| JACBWV010000506.1_5771269_4_14024 | family5 | IS607 | Chlamydomonas sp. | 1157 |
| | | | ICE-L | |
| JACBWV010000506.1_5779486_1_14036 | family4 | Mariner/Tc1 | Chlamydomonas sp. | 1010 |
| | | | ICE-L | |
| JACBWV010000506 1_5787371_2_14053 | family5 | IS607 | Chlamydomonas sp. | 1158 |
| | | | ICE-L | |
| JACBWV010000610.1_1642292_2_3755 | family5 | IS607 | Chlamydomonas sp. | 1159 |
| | | | ICE-L | |
| JACBWV010000610.1_1861268_5_4359 | unclassified | Mariner/Tc1 | Chlamydomonas sp. | 1160 |
| | | | ICE-L | |
| JACBWV010000610.1_1918783_4_4490 | family4 | Mariner/Tc1 | Chlamydomonas sp. | 1161 |
| | | | ICE-L | |
| JACBWV010000610.1_1952515_4_4569 | unclassified | Mariner/Tc1 | Chlamydomonas sp. | 1162 |
| | | | ICE-L | |
| JACBWV010000610.1_1953290_2_4572 | family4 | Mariner/Tc1 | Chlamydomonas sp. | 1163 |
| | | | ICE-L | |
| JACBWV010000610.1_1978527_3_4618 | family4 | Mariner/Tc1 | Chlamydomonas sp. | 1164 |
| | | | ICE-L | |
| JACBWV010000610.1_1985168_2_4629 | family4 | Mariner/Tc1 | Chlamydomonas sp. | 1165 |
| | | | ICE-L | |
| JACBWV010000610 1_6322694_5_14242 | family4 | Mariner/Tc1 | Chlamydomonas sp. | 951 |
| | | | ICE-L | |
| JACBWV010000610.1_6347264_2_14296 | family4 | Mariner/Tc1 | Chlamydomonas sp. | 1166 |
| | | | ICE-L | |
| JACBWV010000610.1_14488811_5_32972 | unclassified | unknown | Chlamydomonas sp. | 1167 |
| | | | ICE-L | |
| JACBWV010000610.1_14498878_1_32998 | unclassified | Mariner/Tc1 | Chlamydomonas sp. | 1168 |
| | | | ICE-L | |
| JACBWV010000610.1_14518881_3_33042 | family4 | Mariner/Tc1 | Chlamydomonas sp. | 1169 |
| | | | ICE-L | |
| JACBWV010000610.1_5030313_1_34303 | unclassified | Mariner/Tc1 | Chlamydomonas sp. | 1170 |
| | | | ICE-L | |
| JACBWV010000610.1_15042892_1_34338 | family5 | IS607 | Chlamydomonas sp. | 1171 |
| | | | ICE-L | |
| JACBWV010000610.1_15568628_5_35552 | family4 | Mariner/Tc1 | Chlamydomonas sp. | 1172 |
| | | | ICE-L | |
| JACBWV010000610.1_15579626_2_35582 | family4 | Mariner/Tc1 | Chlamydomonas sp. | 1173 |
| | | | ICE-L | |
| JACBWV010000610 1_15589245_3_35604 | family4 | Mariner/Tc1 | Chlamydomonas sp. | 1174 |
| | | | ICE-L | |
| JACBWV010000610.1_19173655_1_44259 | unclassified | Mariner/Tc1 | Chlamydomonas sp. | 1175 |
| | | | ICE-L | |
| JACBWV010000610.1_19186228_4_44296 | unclassified | Mariner/Tc1 | Chlamydomonas sp. | 1176 |
| | | | ICE-L | |
| JACBWV010000610.1_22590225_3_52122 | family4 | Mariner/Tc1 | Chlamydomonas sp. | 1177 |
| | | | ICE-L | |
| JACBWV010000610.1_22626070_1_52227 | family4 | Mariner/Tc1 | Chlamydomonas sp. | 1178 |
| | | | ICE-L | |
| JACBWV010000610.1_22688865_3_52378 | family4 | Mariner/Tc1 | Chlamydomonas sp. | 1179 |
| | | | ICE-L | |
| JACBWV010000610.1_22716870_3_52458 | family4 | Mariner/Tc1 | Chlamydomonas sp. | 1180 |
| | | | ICE-L | |
| JACBWV010000610.1_22816990_1_52724 | family4 | Mariner/Tc1 | Chlamydomonas sp. | 1181 |
| | | | ICE-L | |
| JACBWV010000610 1_22823067_3_52742 | family4 | Mariner/Tc1 | Chlamydomonas sp. | 1182 |
| | | | ICE-L | |
| JACBWV010000610.1_22850009_2_52809 | family5 | IS607 | Chlamydomonas sp. | 1183 |
| | | | ICE-L | |
| JACBWV010000610.1_26629947_3_60886 | unclassified | IS607 | Chlamydomonas sp. | 1184 |
| | | | ICE-L | |
| JACBWV010000610.1_26633825_2_60896 | family4 | Mariner/Tc1 | Chlamydomonas sp. | 1185 |
| | | | ICE-L | |
| JACBWV010000610.1_26665327_4_60971 | family5 | IS607 | Chlamydomonas sp. | 1186 |
| | | | ICE-L | |
| JACBWV010000610.1_26670049_4_60986 | family5 | IS607 | Chlamydomonas sp. | 1187 |
| | | | ICE-L | |
| JACBWV010000610.1_26691179_2_61044 | family | Mariner/Tc1 | Chlamydomonas sp. | 1188 |
| | | | ICE-L | |
| JACBWV010000610.1_26718231_3_61114 | family5 | IS607 | Chlamydomonas sp. | 1189 |
| | | | ICE-L | |
| JACBWV010000610 1_28047428_2_64259 | family5 | IS607 | Chlamydomonas sp. | 1190 |
| | | | ICE-L | |
| JACBWV010000610.1_29592305_2_67891 | family4 | Mariner/Tc1 | Chlamydomonas sp. | 1191 |
| | | | ICE-L | |
| JACBWV010000610.1_29599031_5_67907 | family4 | Mariner/Tc1 | Chlamydomonas sp. | 1192 |
| | | | ICE-L | |
| JACBWV010000610.1_29633595_6_67987 | family5 | IS607 | Chlamydomonas sp. | 1193 |
| | | | ICE-L | |
| JACBWV010000610.1_29716022_2_68217 | unclassified | Mariner/Tc1 | Chlamydomonas sp. | 1194 |
| | | | ICE-L | |
| JACBWV010000610.1_9725975_1_68236 | family4 | Mariner/Tc1 | Chlamydomonas sp. | 1195 |
| | | | ICE-L | |
| JACBWV010000610.1_29755813_1_68312 | family4 | Mariner/Tc1 | Chlamydomonas sp. | 1196 |
| | | | ICE-L | |
| JACBWV010000610.1_29760730_1_68327 | family5 | IS607 | Chlamydomonas sp. | 1197 |
| | | | ICE-L | |
| JACBWV010000610 1_34456969_4_78827 | family4 | Mariner/Tc1 | Chlamydomonas sp. | 1198 |
| | | | ICE-L | |
| JACBWV010000610.1_34463498_2_78843 | family4 | Mariner/Tc1 | Chlamydomonas sp. | 1199 |
| | | | ICE-L | |
| JACBWV010000610.1_34521788_5_78997 | family4 | Mariner/Tc1 | Chlamydomonas sp. | 1200 |
| | | | ICE-L | |
| JACBWV010000610.1_38796967_1_88983 | unclassified | Mariner/Tc1 | Chlamydomonas sp. | 1201 |
| | | | ICE-L | |
| JACBWV010000610.1_43941243_6_100771 | family4 | Mariner/Tc1 | Chlamydomonas sp. | 1202 |
| | | | ICE-L | |
| JACBWV010000610.1_54236552_2_123987 | family4 | Mariner/Tc1 | Chlamydomonas sp. | 1203 |
| | | | ICE-L | |
| JACBWV010000610.1_58002080_2_133127 | family4 | Mariner/Tc1 | Chlamydomonas sp. | 1204 |
| | | | ICE-L | |
| JACBWV010000610.1_58097146_4_133337 | family4 | Mariner/Tc1 | Chlamydomonas sp. | 1205 |
| | | | ICE-L | |
| JACBWV010000610.1_58781410_4_134765 | family4 | Mariner/Tc1 | Chlamydomonas sp. | 1206 |
| | | | ICE-L | |
| JACBWV010000610 1_58796975_2_134813 | family5 | IS607 | Chlamydomonas sp. | 1207 |
| | | | ICE-L | |
| JACBWV010000610.1_59836663_1_137235 | family4 | Mariner/Tc1 | Chlamydomonas sp. | 1208 |
| | | | ICE-L | |
| JACBWV010000610.1_59899210_4_137392 | family4 | Mariner/Tc1 | Chlamydomonas sp. | 1209 |
| | | | ICE-L | |
| JACBWV010000610.1_64435645_1_148588 | family4 | Mariner/Tc1 | Chlamydomonas sp. | 1210 |
| | | | ICE-L | |
| JACBWV010000610.1_64455250_4_148639 | family4 | Mariner/Tc1 | Chlamydomonas sp. | 1211 |
| | | | ICE-L | |
| JACBWV010000610.1_64542334_1_148901 | unclassified | unknown | Chlamydomonas sp. | 1212 |
| | | | ICE-L | |
| JACBWV010000610.1_64663486_4_149314 | family4 | Mariner/Tc1 | Chlamydomonas sp. | 1213 |
| | | | ICE-L | |
| JACBWV010000610.1_64972331_2_149783 | family4 | Mariner/Tc1 | Chlamydomonas sp. | 1214 |
| | | | ICE-L | |
| JACBWV010000610 1_65047456_4_150017 | unclassified | Mariner/Tc1 | Chlamydomonas sp. | 1215 |
| | | | ICE-L | |
| JACBWV010000610.1_65242449_6_150463 | family4 | Mariner/Tc1 | Chlamydomonas sp. | 1216 |
| | | | ICE-L | |
| JACBWV010000610.1_65294615_5_150575 | family4 | Mariner/Tc1 | Chlamydomonas sp. | 1217 |
| | | | ICE-L | |
| JACBWV010000610.1_66707159_5_153659 | family4 | Mariner/Tc1 | Chlamydomonas sp. | 1218 |
| | | | ICE-L | |
| JACBWV010000610.1_66756981_3_153767 | family4 | Mariner/Tcf | Chlamydomonas sp. | 872 |
| | | | ICE-L | |
| JACBWV010000610.1_66766585_1_153793 | family4 | Mariner/Tc1 | Chlamydomonas sp. | 1219 |
| | | | ICE-L | |
| JACBWV010000610.1_67851224_2_156119 | unclassified | Mariner/Tc1 | Chlamydomonas sp. | 1220 |
| | | | ICE-L | |
| JACBWV010000610.1_70989831_3_163198 | family4 | unknown | Chlamydomonas sp. | 1221 |
| | | | ICE-L | |
| JACBWV010000610 1_70999989_3_163238 | unclassified | unknown | Chlamydomonas sp. | 1222 |
| | | | ICE-L | |
| JACBWV010000610.1_71003037_6_163252 | unclassified | unknown | Chlamydomonas sp. | 1223 |
| | | | ICE-L | |
| JACBWV010000610.1_71007093_6_163275 | family4 | unknown | Chlamydomonas sp. | 1224 |
| | | | ICE-L | |
| JACBWV010000610.1_71023093_4_163338 | unclassified | unknown | Chlamydomonas sp. | 1225 |
| | | | ICE-L | |
| JACBWV010000610.1_71028925_4_163357 | unclassified | unknown | Chlamydomonas sp. | 1226 |
| | | | ICE-L | |
| JACBWV010000610.1_71649403_4_164632 | family4 | Mariner/Tc1 | Chlamydomonas sp. | 1227 |
| | | | ICE-L | |
| JACBWV010000610.1_71673804_3_164685 | family4 | Mariner/Tc1 | Chlamydomonas sp. | 1228 |
| | | | ICE-L | |
| JACBWV010000610.1_71761631_5_164937 | unclassified | Mariner/Tc1 | Chlamydomonas sp. | 1229 |
| | | | ICE-L | |
| JACBWV010000610 1_77904840_6_179931 | family5 | IS607 | Chlamydomonas sp. | 1230 |
| | | | ICE-L | |
| JACBWV010000610.1_77923991_5_179962 | family5 | IS607 | Chlamydomonas sp. | 1231 |
| | | | ICE-L | |
| JACBWV010000610.1_88245427_4_203300 | unclassified | Mariner/Tc1 | Chlamydomonas sp. | 1232 |
| | | | ICE-L | |
| JACBWV010000610.1_93654525_6_215697 | family5 | unknown | Chlamydomonas sp. | 1233 |
| | | | ICE-L | |
| JACBWV010000610.1_101521584_3_234921 | family5 | IS607 | Chlamydomonas sp. | 1234 |
| | | | ICE-L | |
| JACBWV010000610.1_101573927_5_235065 | family4 | Mariner/Tc1 | Chlamydomonas sp. | 1235 |
| | | | ICE-L | |
| JACBWV010000610.1_101747702_5_235441 | family5 | IS607 | Chlamydomonas sp. | 1236 |
| | | | ICE-L | |
| JACBWV010000610.1_101786719_1_235538 | unclassified | Mariner/Tc1 | Chlamydomonas sp. | 1237 |
| | | | ICE-L | |
| JACBWV010000610.1_113779335_3_263255 | unclassified | Mariner/Tc1 | Chlamydomonas sp. | 1238 |
| | | | ICE-L | |
| JACBWV010000610 1_113785334_2_263274 | unclassified | Mariner/Tc1 | Chlamydomonas sp. | 1239 |
| | | | ICE-L | |
| JACBWV010000610.1_115230259_4_266627 | unclassified | IS607 | Chlamydomonas sp. | 1240 |
| | | | ICE-L | |
| JACBWV010000610.1_115237057_4_266651 | family4 | Mariner/Tc1 | Chlamydomonas sp. | 1241 |
| | | | ICE-L | |
| JACBWV010000610.1_115248954_3_266683 | family4 | Mariner/Tc1 | Chlamydomonas sp. | 1242 |
| | | | ICE-L | |
| JACBWV010000610.1_115283723_5_266750 | family4 | Mariner/Tc1 | Chlamydomonas sp. | 1243 |
| | | | ICE-L | |
| JACBWV010000610.1_115292944_1_266774 | unclassified | Mariner/Tc1 | Chlamydomonas sp. | 1244 |
| | | | ICE-L | |
| JACBWV010000610.1_115314643_4_266824 | unclassified | Mariner/Tc1 | Chlamydomonas sp. | 1245 |
| | | | ICE-L | |
| JACBWV010000610.1_115338435_3_266878 | family4 | Mariner/Tc1 | Chlamydomonas sp. | 1246 |
| | | | ICE-L | |
| JACBWV010000610 1_115346795_5_266895 | family4 | Mariner/Tc1 | Chlamydomonas sp. | 1247 |
| | | | ICE-L | |
| JACBWV010000610.1_115363505_2_266935 | unclassified | Mariner/Tc1 | Chlamydomonas sp. | 1248 |
| | | | ICE-L | |
| JACBWV010000610.1_120044628_3_277723 | unclassified | Mariner/Tc1 | Chlamydomonas sp. | 1249 |
| | | | ICE-L | |
| JACBWV010000610.1_120099291_6_277898 | family4 | Mariner/Tc1 | Chlamydomonas sp. | 1250 |
| | | | ICE-L | |
| JACBWV010000610.1_120105172_4_277908 | family5 | IS607 | Chlamydomonas sp. | 1251 |
| | | | ICE-L | |
| JACBWV010000610.1_120128091_6_277953 | family4 | Mariner/Tc1 | Chlamydomonas sp. | 1252 |
| | | | ICE-L | |
| JACBWV010000610.1_120137030_5_277972 | unclassified | Mariner/Tc1 | Chlamydomonas sp. | 1253 |
| | | | ICE-L | |
| JACBWV010000610 1_120184869_3_278063 | family4 | Mariner/Tc1 | Chlamydomonas sp. | 1254 |
| | | | ICE-L | |
| JACBWV010000610.1_120190991_5_278076 | family4 | Mariner/Tc1 | Chlamydomonas sp. | 1255 |
| | | | ICE-L | |
| JACBWV010000610.1_132055705_1_305673 | family4 | Mariner/Tc1 | Chlamydomonas sp. | 1256 |
| | | | ICE-L | |
| JACBWV010000610.1_135258547_4_312707 | family5 | IS607 | Chlamydomonas sp. | 1257 |
| | | | ICE-L | |
| JACBWV010000610.1_135271115_5_312744 | unclassified | Mariner/Tc1 | Chlamydomonas sp. | 1258 |
| | | | ICE-L | |
| JACBWV010000610.1_135284126_5_312772 | family4 | Mariner/Tc1 | Chlamydomonas sp. | 1259 |
| | | | ICE-L | |
| JACBWV010000610.1_135296759_2_312800 | family5 | JIS607 | Chlamydomonas sp. | 1197 |
| | | | ICE-L | |
| JACBWV010000610.1_135302733_3_312813 | family4 | Mariner/Tc1 | Chlamydomonas sp. | 1260 |
| | | | ICE-L | |
| JACBWV010000610 1_135314312_5_312842 | family4 | Mariner/Tc1 | Chlamydomonas sp. | 1261 |
| | | | ICE-L | |
| JACBWV010000610.1_135330069_6_312874 | family4 | Mariner/Tc1 | Chlamydomonas sp. | 1262 |
| | | | ICE-L | |
| JACBWV010000610.1_135356116_4_312920 | family4 | Mariner/Tc1 | Chlamydomonas sp. | 1263 |
| | | | ICE-L | |
| JACBWV010000610.1_135366165_3_312945 | family4 | Mariner/Tc1 | Chlamydomonas sp. | 1264 |
| | | | ICE-L | |
| JACBWV010000610.1_141945783_6_328196 | family4 | Mariner/Tc1 | Chlamydomonas sp. | 1265 |
| | | | ICE-L | |
| IACBWV010000610.1_142404999_3_329228 | family4 | Mariner/Tc1 | Chlamydomonas sp. | 1266 |
| | | | ICE-L | |
| JACBWV010000610.1_144187465_1_333471 | unclassified | Mariner/Tc1 | Chlamydomonas sp. | 1267 |
| | | | ICE-L | |
| JACBWV010000610.1_159513106_4_368404 | family5 | unknown | Chlamydomonas sp. | 1268 |
| | | | ICE-L | |
| JACBWV010000613.1_16214_5_45 | unclassified | Mariner/Tc1 | Chlamydomonas sp. | 1269 |
| | | | ICE-L | |
| JACBWV010000613 1_32950_4_104 | family4 | Mariner/Tc1 | Chlamydomonas sp. | 1270 |
| | | | ICE-L | |
| JACBWV010000613.1_76791_6_235 | unclassified | Mariner/Tc1 | Chlamydomonas sp. | 1271 |
| | | | ICE-L | |
| JACBWV010000613.1_190050_3_507 | family5 | IS607 | Chlamydomonas sp. | 1272 |
| | | | ICE-L | |
| JACBWV010000350.1_12428_5_42 | family4 | Mariner/Tc1 | Chlamydomonas sp. | 1273 |
| | | | ICE-L | |
| JACBWV010000350.1_17793_6_51 | family4 | Mariner/Tc1 | Chlamydomonas sp. | 1274 |
| | | | ICE-L | |
| JACBWV010000351.1_104628_3_161 | unclassified | unknown | Chlamydomonas sp. | 1275 |
| | | | ICE-L | |
| JACBWV010000347.1_1572746_2_3482 | unclassified | Mariner/Tc1 | Chlamydomonas sp. | 1276 |
| | | | ICE-L | |
| JACBWV010000347.1_1574010_6_3488 | family4 | Mariner/Tc1 | Chlamydomonas sp. | 1277 |
| | | | ICE-L | |
| JACBWV010000347 1_2348809_4_5284 | unclassified | Mariner/Tc1 | Chlamydomonas sp. | 1278 |
| | | | ICE-L | |
| JACBWV010000365.1_77757_3_188 | family4 | Mariner/Tc1 | Chlamydomonas sp. | 864 |
| | | | ICE-L | |
| JACBWV010000365.1_165876_6_428 | unclassified | IS607 | Chlamydomonas sp. | 1279 |
| | | | ICE-L | |
| JACBWV010000365.1_184654_1_478 | family4 | Mariner/Tc1 | Chlamydomonas sp. | 1280 |
| | | | ICE-L | |
| JACBWV010000886.1_227896_4_508 | family4 | Mariner/Tc1 | Chlamydomonas sp. | 1281 |
| | | | ICE-L | |
| JACBWV010000886.1_230704_1_517 | family4 | Mariner/Tc1 | Chlamydomonas sp. | 1282 |
| | | | ICE-L | |
| JACBWV010000886.1_246956_2_550 | family4 | Mariner/Tc1 | Chlamydomonas sp. | 1283 |
| | | | ICE-L | |
| JACBWV010000886.1_292746_3_668 | family4 | Mariner/Tc1 | Chlamydomonas sp. | 1284 |
| | | | ICE-L | |
| JACBWV010000886 1_309631_4_694 | family4 | Mariner/Tc1 | Chlamydomonas sp. | 1285 |
| | | | ICE-L | |
| JACBWV010000886.1_338896_1_778 | unclassified | unknown | Chlamydomonas sp. | 1286 |
| | | | ICE-L | |
| JACBWV010000730.1_2683003_1_6398 | family4 | Mariner/Tc1 | Chlamydomonas sp. | 1287 |
| | | | ICE-L | |
| JACBWV010000730.1_2715942_3_6487 | family5 | IS607 | Chlamydomonas sp. | 1288 |
| | | | ICE-L | |
| JACBWV010000730.1_9616564_1_23376 | unclassified | Mariner/Tc1 | Chlamydomonas sp. | 1289 |
| | | | ICE-L | |
| JACBWV010000730.1_9669399_6_23482 | family4 | Mariner/Tc1 | Chlamydomonas sp. | 1290 |
| | | | ICE-L | |
| JACBWV010000730.1_9703993_4_23536 | family4 | Mariner/Tc1 | Chlamydomonas sp. | 1291 |
| | | | ICE-L | |
| JACBWV010000730.1_9766020_3_23676 | family4 | Mariner/Tc1 | Chlamydomonas sp. | 1292 |
| | | | ICE-L | |
| JACBWV010000730 1_10918838_2_26671 | family4 | Mariner/Tc1 | Chlamydomonas sp. | 1293 |
| | | | ICE-L | |
| JACBWV010000730.1_10951768_4_26739 | family4 | Mariner/Tc1 | Chlamydomonas sp. | 1294 |
| | | | ICE-L | |
| JACBWV010000730.1_10984151_2_26810 | family4 | Mariner/Tc1 | Chlamydomonas sp. | 1295 |
| | | | ICE-L | |
| JACBWV010000730.1_11674545_3_28706 | family4 | Mariner/Tc1 | Chlamydomonas sp. | 1296 |
| | | | ICE-L | |
| JACBWV010000730.1_11725694_2_28808 | family4 | Mariner/Tc1 | Chlamydomonas sp. | 1297 |
| | | | ICE-L | |
| JACBWV010000730.1_11777382_6_28951 | family4 | Mariner/Tc1 | Chlamydomonas sp. | 1298 |
| | | | ICE-L | |
| JACBWV010000730.1_11793141_6_28991 | family4 | Mariner/Tc1 | Chlamydomonas sp. | 1299 |
| | | | ICE-L | |
| JACBWV010000730.1_13694536_1_33213 | family4 | Mariner/Tc1 | Chlamydomonas sp. | 1300 |
| | | | ICE-L | |
| JACBWV010000730.1_15518022_6_37186 | unclassified | Mariner/Tc1 | Chlamydomonas sp. | 1301 |
| | | | ICE-L | |
| JACBWV010000730 1_16630024_1_39895 | unclassified | Mariner/Tc1 | Chlamydomonas sp. | 1302 |
| | | | ICE-L | |
| JACBWV010000725.1_152836_1_377 | family4 | Mariner/Tc1 | Chlamydomonas sp. | 1303 |
| | | | ICE-L | |
| JACBWV010000725.1_165002_5_412 | family4 | Mariner/Tc1 | Chlamydomonas sp. | 1304 |
| | | | ICE-L | |
| JACBWV010000446.1_109479_3_238 | family4 | Mariner/Tc1 | Chlamydomonas sp. | 1305 |
| | | | ICE-L | |
| JACBWV010000448.1_87283_4_157 | unclassified | Mariner/Tc1 | Chlamydomonas sp. | 1306 |
| | | | ICE-L | |
| JACBWV010000448.1_94486_4_177 | family4 | Mariner/Tc1 | Chlamydomonas sp. | 1307 |
| | | | ICE-L | |
| JACBWV010000865.1_30567_3_85 | family5 | IS607 | Chlamydomonas sp. | 1308 |
| | | | ICE-L | |
| JACBWV010000296.1_146115_6_353 | family4 | Mariner/Tc1 | Chlamydomonas sp. | 1309 |
| | | | ICE-L | |
| JACBWV010000099 1_184646_5_426 | family5 | IS607 | Chlamydomonas sp. | 1310 |
| | | | ICE-L | |
| JACBWV010000099.1_210425_2_501 | unclassified | Mariner/Tc1 | Chlamydomonas sp. | 1311 |
| | | | ICE-L | |
| JACBWV010000099.1_216420_6_519 | family4 | Mariner/Tc1 | Chlamydomonas sp. | 1312 |
| | | | ICE-L | |
| JACBWV010000099.1_220566_6_527 | family4 | Mariner/Tc1 | Chlamydomonas sp. | 1313 |
| | | | ICE-L | |
| JACBWV010000099.1_241093_4_565 | unclassified | Mariner/Tc1 | Chlamydomonas sp. | 1314 |
| | | | ICE-L | |
| JACBWV010000099.1_366053_2_832 | unclassified | Mariner/Tc1 | Chlamydomonas sp. | 1315 |
| | | | ICE-L | |
| JACBWV010000099.1_1630847_2_3789 | family4 | Mariner/Tc1 | Chlamydomonas sp. | 1316 |
| | | | ICE-L | |
| JACBWV010000099.1_1656167_5_3843 | family4 | Mariner/Tc1 | Chlamydomonas sp. | 1317 |
| | | | ICE-L | |
| JACBWV010000099 1_1675680_6_3902 | family5 | IS607 | Chlamydomonas sp. | 1318 |
| | | | ICE-L | |
| JACBWV010000099.1_5491426_1_12463 | family4 | Mariner/Tc1 | Chlamydomonas sp. | 1319 |
| | | | ICE-L | |
| JACBWV010000099.1_5496352_1_12476 | family4 | Mariner/Tc1 | Chlamydomonas sp. | 1320 |
| | | | ICE-L | |
| JACBWV010000099.1_5500355_2_12486 | family4 | Mariner/Tc1 | Chlamydomonas sp. | 1321 |
| | | | ICE-L | |
| JACBWV010000099.1_5533961_2_12566 | family4 | Mariner/Tc1 | Chlamydomonas sp. | 1322 |
| | | | ICE-L | |
| JACBWV010000099.1_5902129_4_13428 | unclassified | Mariner/Tc1 | Chlamydomonas sp. | 1323 |
| | | | ICE-L | |
| JACBWV010000099.1_5911844_2_13460 | family4 | Mariner/Tc1 | Chlamydomonas sp. | 1324 |
| | | | ICE-L | |
| JACBWV010000099.1_11831415_3_27339 | family5 | IS607 | Chlamydomonas sp. | 1325 |
| | | | ICE-L | |
| JACBWV010000099 1_11845611_6_27371 | family4 | Mariner/Tc1 | Chlamydomonas sp. | 763 |
| | | | ICE-L | |
| JACBWV010000099.1_11850037_4_27383 | unclassified | Mariner/Tc1 | Chlamydomonas sp. | 1326 |
| | | | ICE-L | |
| JACBWV010000099.1_11859340_4_27411 | family4 | Mariner/Tc1 | Chlamydomonas sp. | 1327 |
| | | | ICE-L | |
| JACBWV010000318.1_268058_2_541 | family4 | Mariner/Tc1 | Chlamydomonas sp. | 1328 |
| | | | ICE-L | |
| JACBWV010000318.1_285789_3_584 | unclassified | Mariner/Tc1 | Chlamydomonas sp. | 1329 |
| | | | ICE-L | |
| JACBWV010000946.1_4317_3_15 | family4 | Mariner/Tc1 | Chlamydomonas sp. | 1330 |
| | | | ICE-L | |
| JACBWV010000946.1_11530_4_30 | unclassified | Mariner/Tc1 | Chlamydomonas sp. | 1331 |
| | | | ICE-L | |
| JACBWV010000946.1_83308_1_234 | unclassified | Mariner/Tc1 | Chlamydomonas sp. | 1332 |
| | | | ICE-L | |
| JACBWV010000946.1_122160_6_348 | unclassified | Mariner/Tc1 | Chlamydomonas sp. | 1333 |
| | | | ICE-L | |
| JACBWV010000946.1_593766_3_1691 | family4 | Mariner/Tc1 | Chlamydomonas sp. | 1334 |
| | | | ICE-L | |
| JACBWV010000946.1_606106_1_1730 | family5 | IS607 | Chlamydomonas sp. | 1335 |
| | | | ICE-L | |
| JACBWV010000946.1_707429_2_1987 | unclassified | Mariner/Tc1 | Chlamydomonas sp. | 1336 |
| | | | ICE-L | |
| JACBWV010000946.1_717527_2_2021 | unclassified | Mariner/Tc1 | Chlamydomonas sp. | 1337 |
| | | | ICE-L | |
| JACBWV010000946.1_874990_4_2396 | unclassified | Mariner/Tc1 | Chlamydomonas sp. | 1338 |
| | | | ICE-L | |
| JACBWV010000942.1_16026_6_45 | unclassified | Mariner/Tc1 | Chlamydomonas sp. | 1339 |
| | | | ICE-L | |
| JACBWV010000942.1_30920_2_94 | family4 | Mariner/Tc1 | Chlamydomonas sp. | 1340 |
| | | | ICE-L | |
| JACBWV010000228.1_25938_6_79 | family5 | IS607 | Chlamydomonas sp. | 1341 |
| | | | ICE-L | |
| JACBWV010000228 1_44337_3_111 | family4 | Mariner/Tc1 | Chlamydomonas sp. | 1342 |
| | | | ICE-L | |
| JACBWV010000222.1_59349_3_126 | family4 | Mariner/Tc1 | Chlamydomonas sp. | 1343 |
| | | | ICE-L | |
| JACBWV010000222.1_111879_6_244 | family4 | Mariner/Tc1 | Chlamydomonas sp. | 1344 |
| | | | ICE-L | |
| JACBWV010000222.1_122993_2_273 | family4 | Mariner/Tc1 | Chlamydomonas sp. | 1345 |
| | | | ICE-L | |
| JACBWV010000222.1_126882_3_282 | family4 | Mariner/Tc1 | Chlamydomonas sp. | 1346 |
| | | | ICE-L | |
| JACBWV010000222.1_129424_1_289 | unclassified | Mariner/Tc1 | Chlamydomonas sp. | 1347 |
| | | | ICE-L | |
| JACBWV010000222.1_193683_3_485 | family5 | IS607 | Chlamydomonas sp. | 1348 |
| | | | ICE-L | |
| JACBWV010000222.1_202678_1_512 | unclassified | Mariner/Tc1 | Chlamydomonas sp. | 1349 |
| | | | ICE-L | |
| JACBWV010000222.1_203947_4_522 | family4 | Mariner/Tc1 | Chlamydomonas sp. | 1350 |
| | | | ICE-L | |
| JACBWV010000221.1_14758_4_51 | family5 | IS607 | Chlamydomonas sp. | 1351 |
| | | | ICE-L | |
| JACBWV010000221.1_18370_4_59 | family5 | IS607 | Chlamydomonas sp. | 1352 |
| | | | ICE-L | |
| JACBWV010000221.1_27334_4_88 | family5 | IS607 | Chlamydomonas sp. | 1998 |
| | | | ICE-L | |
| JACBWV010000221.1_33162_3_104 | family4 | Mariner/Tc1 | Chlamydomonas sp. | 1353 |
| | | | ICE-L | |
| JACBWV010000221 1_41687_2_114 | family4 | Mariner/Tc1 | Chlamydomonas sp. | 1354 |
| | | | ICE-L | |
| JACBWV010000221.1_50579_2_128 | unclassified | unknown | Chlamydomonas sp. | 679 |
| | | | ICE-L | |
| JACBWV010000392.1_12520_1_45 | family4 | Mariner/Tc1 | Chlamydomonas sp. | 1355 |
| | | | ICE-L | |
| JACBWV010000392.1_32945_2_92 | family4 | Mariner/Tc1 | Chlamydomonas sp. | 1356 |
| | | | ICE-L | |
| JACBWV010000392.1_42825_6_107 | unclassified | Mariner/Tc1 | Chlamydomonas sp. | 1357 |
| | | | ICE-L | |
| JACBWV010000524.1_1084410_3_2683 | unclassified | Mariner/Tc1 | Chlamydomonas sp. | 1358 |
| | | | ICE-L | |
| JACBWV010000524.1_1085933_5_2691 | unclassified | Mariner/Tc1 | Chlamydomonas sp. | 1359 |
| | | | ICE-L | |
| JACBWV010000524 1_1086852_3_2695 | unclassified | Mariner/Tc1 | Chlamydomonas sp. | 1360 |
| | | | ICE-L | |
| JACBWV010000524 1_1730177_2_4362 | family4 | Mariner/Tc1 | Chlamydomonas sp. | 1361 |
| | | | ICE-L | |
| JACBWV010000524.1_1741933_4_4395 | unclassified | Mariner/Tc1 | Chlamydomonas sp. | 1362 |
| | | | ICE-L | |
| JACBWV010000524.1_1766384_5_4460 | family4 | Mariner/Tc1 | Chlamydomonas sp. | 1363 |
| | | | ICE-L | |
| JACBWV010000524.1_1770280_1_4465 | unclassified | Mariner/Tc1 | Chlamydomonas sp. | 1364 |
| | | | ICE-L | |
| JACBWV010000234 1_205193_2_502 | family4 | Mariner/Tc1 | Chlamydomonas sp. | 1365 |
| | | | ICE-L | |
| JACBWV010000234.1_1272927_6_3014 | unclassified | Mariner/Tc1 | Chlamydomonas sp. | 1366 |
| | | | ICE-L | |
| JACBWV010000234.1_1277467_1_3029 | unclassified | Mariner/Tc1 | Chlamydomonas sp. | 1367 |
| | | | ICE-L | |
| JACBWV010000234.1_1685755_1_3796 | family4 | Mariner/Tc1 | Chlamydomonas sp. | 1368 |
| | | | ICE-L | |
| JACBWV010000234.1_1753920_3_3973 | unclassified | Mariner/Tc1 | Chlamydomonas sp. | 1369 |
| | | | ICE-L | |
| JACBWV010000234.1_1758078_3_3986 | family4 | Mariner/Tc1 | Chlamydomonas sp. | 1370 |
| | | | ICE-L | |
| JACBWV010000825.1_1704111_3_4278 | family4 | Mariner/Tc1 | Chlamydomonas sp. | 1371 |
| | | | ICE-L | |
| JACBWV010000825.1_1775448_6_4415 | family4 | Mariner/Tc1 | Chlamydomonas sp. | 1372 |
| | | | ICE-L | |
| JACBWV010000825 1_1803308_5_4475 | family4 | Mariner/Tc1 | Chlamydomonas sp. | 1373 |
| | | | ICE-L | |
| JACBWV010000825 1_1824874_1_4529 | family4 | Mariner/Tc1 | Chlamydomonas sp. | 1374 |
| | | | ICE-L | |
| JACBWV010000825.1_7525601_5_17388 | family5 | IS607 | Chlamydomonas sp. | 1375 |
| | | | ICE-L | |
| JACBWV010000825.1_7878502_4_18237 | family5 | IS607 | Chlamydomonas sp. | 1376 |
| | | | ICE-L | |
| JACBWV010000825.1_11036645_2_25589 | family4 | Mariner/Tc1 | Chlamydomonas sp. | 1377 |
| | | | ICE-L | |
| JACBWV010000825.1_11042242_1_25606 | family4 | Mariner/Tc1 | Chlamydomonas sp. | 1378 |
| | | | ICE-L | |
| JACBWV010000825.1_11094556_1_25718 | family4 | Mariner/Tc1 | Chlamydomonas sp. | 1379 |
| | | | ICE-L | |
| JACBWV010000825.1_11139356_5_25845 | family5 | IS607 | Chlamydomonas sp. | 1380 |
| | | | ICE-L | |
| JACBWV010000825.1_13654759_1_31397 | family4 | Mariner/Tc1 | Chlamydomonas sp. | 1381 |
| | | | ICE-L | |
| CP060300.1_1042332_3_3669 | unclassified | unknown | Anthracocystis panici- | 1382 |
| | | | leucophaei | |
| CP060304.1_367822_4_1311 | unclassified | unknown | Anthracocystis panici- | 1383 |
| | | | leucophaei | |
| JABAYA010000060.1_75320_5_94 | unclassified | unknown | Apophysomyces | 1384 |
| | | | ossiformis | |
| JACAZD010011494 1_36886_1_139 | family4 | unknown | Fucus vesiculosus | 1385 |
| CM026547.1_3121574_2_19124 | unclassified | unknown | Scenedesmus sp. | 1386 |
| | | | PABB004 | |
| JABVCE010000008.1_856296_6_5302 | unclassified | unknown | Scenedesmus sp. | 1387 |
| | | | PABB004 | |
| CP062046.1_33982845_3_38058 | unclassified | unknown | Macrobrachium | 1388 |
| | | | nipponense | |
| JAAAUN010000044.1_12630_6_40 | unclassified | unknown | Mortierella sp. GBA35 | 1389 |
| JAAAUR010000005.1_4177_4_6 | unclassified | unknown | Mortierella sp. AD010 | 1390 |
| JAAAUR010000069.1_48859_4_86 | unclassified | unknown | Mortierella sp. AD010 | 1391 |
| JAAAUI010000138.1_16364_5_52 | unclassified | unknown | Haplosporangium sp. | 1392 |
| | | | Z 11 | |
| JAAAUI010000211.1_33026_5_78 | unclassified | unknown | Haplosporangium sp. | 1393 |
| | | | Z 11 | |
| JAAAUJ010000172 1_33705_3_74 | unclassified | unknown | Haplosporangium sp. | 1392 |
| | | | Z 767 | |
| JAAAVA010000097.1_37776_6_107 | unclassified | unknown | Mortierella sp. NVP85 | 1394 |
| JAAAVD010000023.1_44170_1_91 | unclassified | unknown | Mortierella sp. AD011 | 1391 |
| JAAAXW010000110.1_124_1_3 | unclassified | unknown | Mortierella hygrophila | 1395 |
| MKYW01000016.1_2057647_1_1374 | unclassified | unknown | Aphidius ervi | 1396 |
| MKYW01000167.1_125499_6_122 | family3 | unknown | Aphidius ervi | 1397 |
| MKYW01000210.1_34842_3_29 | family3 | unknown | Aphidius ervi | 1398 |
| MKYW01000216.1_158119_4_164 | family3 | unknown | Aphidius ervi | 1399 |
| MKYW01000025.1_1140578_5_831 | family3 | unknown | Aphidius ervi | 1400 |
| MKYW01000030.1_679447_1_451 | family3 | unknown | Aphidius ervi | 1401 |
| MKYW01000051.1_239395_1_176 | unclassified | unknown | Aphidius ervi | 1402 |
| MKYW01000051.1_376574_5_268 | family3 | unknown | Aphidius ervi | 1403 |
| MKYW01000064.1_143965_1_58 | family3 | unknown | Aphidius ervi | 1404 |
| MKYW01000067.1_158684_5_104 | unclassified | unknown | Aphidius ervi | 1405 |
| MKYW01000085.1_203499_6_150 | unclassified | unknown | Aphidius ervi | 1406 |
| MKYW01000009.1_2250429_3_1217 | family3 | unknown | Aphidius ervi | 1407 |
| MKYW01000009.1_2697583_4_1569 | unclassified | unknown | Aphidius ervi | 1408 |
| JAAAHU010000034.1_201949_4_490 | unclassified | unknown | Linnemannia zychae | 1409 |
| JAAAIB010000003.1_23259_3_76 | unclassified | unknown | Mortierella antarctica | 1410 |
| JAAAIG010000010.1_5461_1_15 | family2 | unknown | Gryganskiella | 1411 |
| | | | cystojenkinii | |
| JAAAIG010000141.1_3_3_2 | unclassified | unknown | Gryganskiella | 1412 |
| | | | cystojenkinii | |
| JAAZWU010000175.1_41459_5_92 | unclassified | unknown | Apophysomyces sp. | 1413 |
| | | | BC1015 | |
| JAAAIP010000010 1_31977_6_106 | unclassified | unknown | Dissophora globulifera | 1414 |
| JAAAIP010000173.1_47126_5_150 | unclassified | unknown | Dissophora globulifera | 1415 |
| JAAAIW010000136.1_13246_1_32 | unclassified | unknown | Mortierella sp. GBA43 | 1416 |
| JAAAIW010000066.1_37598_2_97 | unclassified | unknown | Mortierella sp. GBA43 | 1417 |
| JAAAWW010000072.1_70342_4_208 | unclassified | unknown | Mortierella sp GBA43 | 1418 |
| JAAAIX010000066.1_23687_2_79 | unclassified | unknown | Mortierella sp NVP41 | 1419 |
| JAAAJB010000112.1_68097_3_249 | unclassified | unknown | Actinomortierella | 1420 |
| | | | ambigua | |
| JJAAAJB010000229.1_22447_4_81 | unclassified | unknown | Actinomortierella | 1421 |
| | | | ambigua | |
| JAAAJA010000079.1_62011_4_160 | unclassified | unknown | Mortierella | 1422 |
| | | | polycephala | |
| JAACYE010000015 1_551114_5_1691 | unclassified | unknown | Daphnia obtusa | 1423 |
| JAACYE010000018.1_243554_2_766 | unclassified | unknown | Daphnia obtusa | 1424 |
| JAACYE010000022.1_233605_1_739 | unclassified | unknown | Daphnia obtusa | 1425 |
| JACEEZ010007602.1_493108_4_817 | unclassified | unknown | Chioncecetes opilio | 1426 |
| JACEEZ010017375.1_125417_2_281 | unclassified | unknown | Chionoecetes opilio | 1427 |
| JABLTG010000102.1_65137_1_78 | family5 | unknown | Neovahikampfia | 1428 |
| | | | damariscottae | |
| JABLTG010000107.1_67085_5_88 | unclassified | unknown | Neovahikampfia | 1429 |
| | | | damariscottae | |
| JABLTG010000035.1_131565_6_184 | unclassified | unknown | Neovahikampfia | 1430 |
| | | | damariscottae | |
| JABLTG010000051.1_106302_6_134 | unclassified | unknown | Neovahikampfia | 1431 |
| | | | damariscottae | |
| JABLTG010000057 1_3_3_1 | family5 | unknown | Neovahikampfia | 1432 |
| | | | damariscottae | |
| JABLTG010000065.1_95994_6_125 | family5 | unknown | Neovahikampfia | 1433 |
| | | | damariscottae | |
| JAEPRE010000156.1_10144_4_13 | unclassified | unknown | Thamnidium elegans | 1434 |
| JAEPRE010000021.1_164226_3_183 | unclassified | unknown | Thamnidium elegans | 1435 |
| JAEPRE010000050.1_77800_4_73 | unclassified | unknown | Thamnidium elegans | 1436 |
| JAEPRE010000097.1_54837_3_55 | unclassified | unknown | Thamnidium elegans | 1437 |
| JAEPRD010000003.1_497448_6_547 | family1 | unknown | Mucor saturninus | 1438 |
| JAEPRD010000008.1_448149_3_521 | unclassified | unknown | Mucor saturninus | 1439 |
| JAEPRD010000029.1_186761_2_214 | unclassified | unknown | Mucor saturninus | 1440 |
| JAEPRD010000055.1_8351_2_12 | unclassified | unknown | Mucor saturninus | 1441 |
| JAFDOW010000598.1_2787010_1_1508 | unclassified | unknown | Bradysia odoriphaga | 1442 |
| JAFDOW010000598.1_10037835_3_5286 | unclassified | unknown | Bradysia odoriphaga | 1443 |
| JAFDOW010001337.1_2164966_1_1000 | unclassified | unknown | Bradysia odoriphaga | 1444 |
| JAFDOW010000468 1_188139_3_105 | unclassified | unknown | Bradysia odoriphaga | 1445 |
| JAFDOW010000238.1_2240769_3_1221 | unclassified | unknown | Bradysia odoriphaga | 1446 |
| JAFDOW010000439.1_873300_6_479 | unclassified | unknown | Bradysia odoriphaga | 1447 |
| JAFDOW010000343.1_249505_4_188 | family3 | unknown | Bradysia odoriphaga | 1448 |
| CM030931.1_435066_3_1753 | family4 | unknown | Isochrysis galbana | 1449 |
| CM030931.1_5322912_3_20407 | unclassified | unknown | Isochrysis galbana | 1450 |
| CM030932.1_5244848_2_20633 | unclassified | unknown | Isochrysis galbana | 1451 |
| CM030932.1_9270344_5_35660 | unclassified | unknown | Isochrysis galbana | 1452 |
| CM030933.1_4203869_2_16574 | unclassified | unknown | Isochrysis galbana | 1453 |
| CM030933.1_6124943_5_24008 | unclassified | unknown | Isochrysis galbana | 1454 |
| CM030934.1_7462608_6_29302 | unclassified | unknown | Isochrysis galbana | 1455 |
| CM030936.1_4483845_3_17758 | family4 | unknown | Isochrysis galbana | 1456 |
| CM030936.1_5378433_3_21272 | unclassified | unknown | Isochrysis galbana | 1457 |
| CM030937.1_3254833_1_12716 | unclassified | unknown | Isochrysis galbana | 1458 |
| CM030938.1_5210637_3_20467 | unclassified | unknown | Isochrysis galbana | 1459 |
| CM030942.1_250392_6_966 | unclassified | unknown | Isochrysis galbana | 1460 |
| CM030942.1_306694_4_1197 | unclassified | unknown | Isochrysis galbana | 1461 |
| CM030942.1_587571_6_2355 | unclassified | unknown | Isochrysis galbana | 1462 |
| CM030944.1_2439817_4_9623 | unclassified | unknown | Isochrysis galbana | 1463 |
| CM030945.1_1709328_3_6797 | unclassified | unknown | Isochrysis galbana | 1464 |
| JAEUYN010001421.1_349503_3_356 | unclassified | unknown | Euura lappo | 1465 |
| JAEUYN010000618.1_69548_5_92 | unclassified | unknown | Euura lappo | 1466 |
| JAFLQL010000252.1_1012766_5_2308 | unclassified | unknown | Phytophthora capsici | 1467 |
| JAFLQL010000136.1_46776_3_135 | family5 | unknown | Phytophthora capsici | 1468 |
| JAFLQL010000349.1_441206_2_961 | unclassified | unknown | Phytophthora capsici | 1469 |
| JAFLQL010000003.1_681994_4_1559 | unclassified | unknown | Phytophthora capsici | 1470 |
| JAFLQL010000416.1_663925_1_1415 | unclassified | unknown | Phytophthora capsici | 1471 |
| JAFLQL010000214.1_275249_2_689 | family4 | unknown | Phytophthora capsici | 1472 |
| JAFLQL010000282.1_164269_4_392 | family5 | unknown | Phytophthora capsici | 1473 |
| JAFLQL010000282.1_186177_3_444 | family5 | unknown | Phytophthora capsici | 1474 |
| JAFLQL010000072.1_65159_5_140 | unclassified | unknown | Phytophthora capsici | 1475 |
| JAGKTK010004089.1_16406_2_30 | unclassified | unknown | Paralithodes | 1476 |
| | | | camtschaticus | |
| CM031468.1_14198630_5_9362 | unclassified | unknown | Propsilocerus akamusi | 1477 |
| CM031469.1_3945564_6_2414 | unclassified | unknown | Propsilocerus akamusi | 1478 |
| CM031469.1_15770121_3_10174 | family3 | unknown | Propsilocerus akamusi | 1479 |
| CM031471.1_11395088_2_7886 | family3 | unknown | Propsilocerus akamusi | 1480 |
| JAGDFM010000218.1_50422_1_178 | unclassified | unknown | Phytophthora | 1481 |
| | | | pseudosyringae | |
| JAGDFM010000070.1_76184_5_263 | unclassified | unknown | Phytophthora | 1482 |
| | | | pseudosyringae | |
| JAEMOTO10003431.1_83283_6_485 | unclassified | unknown | Apostasia ramifera | 1483 |
| JAHBON010000544.1_78037_4_136 | unclassified | unknown | Listronotus | 1484 |
| | | | oregonensis | |
| JAHBCN010004057.1_61639_4_73 | family3 | unknown | Lisironotus | 1485 |
| | | | oregonensis | |
| JADEYJ010000107.1_223589_2_95 | family3 | Mariner/Tc1 | Leptopilina boulardi | 1486 |
| JADEYJ010000248.1_2787135_6_1518 | family3 | Mariner/Tc1 | Leptopilina boulardi | 1487 |
| JADEYJ010000248.1_2824536_6_1525 | family3 | Mariner/Tc1 | Leptopilina boulardi | 1488 |
| JADEYJ010000248.1_2877102_6_1555 | family3 | Mariner/Tc1 | Leptopilina boulardi | 1489 |
| JADEYJ010000248.1_2884548_3_1565 | family3 | Mariner/Tc1 | Leptopilina boulardi | 1490 |
| JADEYJ010000248.1_3131857_1_1695 | family3 | Mariner/Tc1 | Leptopilina boulardi | 1491 |
| JADEYJ010000248.1_3181263_6_1737 | family3 | Mariner/Tc1 | Leptopilina boulardi | 1492 |
| JADEYJ010000248 1_3214712_2_1745 | family3 | Mariner/Tc1 | Leptopilina boulardi | 1493 |
| JADEYJ010000305.1_1490747_5_841 | family3 | EnSpm/CAC | Leptopilina boulardi | 1494 |
| | | TA | | |
| JADEYJ010000031.1_1208932_4_624 | family3 | unknown | Leptopilina boulardi | 1495 |
| JADEYJ010000325.1_5986484_2_2716 | family3 | Mariner/Tc1 | Leptopilina boulardi | 1496 |
| JADEYJ010000325.1_6163025_2_2822 | family3 | Mariner/Tc1 | Leptopilina boulardi | 1497 |
| JADEYJ010000038.1_2993278_1_1310 | family3 | TA | Leptopilina boulardi | 1498 |
| | | EnSpm/CAC | | |
| JACWFZ010000013.1_827752_4_1814 | unclassified | unknown | Cystobasidium | 1499 |
| | | | slooffiae | |
| JAHDYR010000001.1_269223_6_774 | unclassified | unknown | Carpediemonas | 1500 |
| | | | membranifera | |
| JAHDYR010000003.1_82948_1_221 | unclassified | unknown | Carpediemonas | 1501 |
| | | | membranifera | |
| JAHDYR010000003.1_414121_1_1287 | unclassified | unknown | Carpediemonas | 1502 |
| | | | membranifera | |
| JAHDYR010000005.1_630659_2_1904 | unclassified | unknown | Carpediemonas | 1503 |
| | | | membranifera | |
| JAHDYR010000007.1_156082_4_467 | unclassified | unknown | Carpediemonas | 1504 |
| | | | membranifera | |
| JAHDYR010000007.1_734605_1_2388 | unclassified | unknown | Carpediemonas | 1505 |
| | | | membranifera | |
| JAHDYR010000008.1_226608_3_679 | unclassified | unknown | Carpediemonas | 1506 |
| | | | membranifera | |
| JAHDYR010000008.1_288848_5_853 | unclassified | unknown | Carpediemonas | 1507 |
| | | | membranifera | |
| JAHDYR010000011.1_169290_3_539 | unclassified | unknown | Carpediemonas | 1508 |
| | | | membranifera | |
| JAHDYR010000011.1_576853_4_1790 | unclassified | unknown | Carpediemonas | 1509 |
| | | | membranifera | |
| JAHDYR010000025.1_130172_5_411 | unclassified | unknown | Carpediemonas | 1510 |
| | | | membranifera | |
| JAHDYR010000025.1_195887_2_678 | unclassified | unknown | Carpediemonas | 1511 |
| | | | membranifera | |
| JAHDYR010000025.1_346009_1_1238 | family2 | unknown | Carpediemonas | 1512 |
| | | | membranifera | |
| JAHDYR010000013.1_40584_3_138 | family2 | unknown | Carpediemonas | 1513 |
| | | | membranifera | |
| JAHDYR010000015.1_126296_5_354 | unclassified | unknown | Carpediemonas | 1514 |
| | | | membranifera | |
| JAHDYR010000016.1_245783_2_865 | unclassified | unknown | Carpediemonas | 1515 |
| | | | membranifera | |
| JAHDYR010000017.1_232137_6_684 | unclassified | unknown | Carpediemonas | 1516 |
| | | | membranifera | |
| JAHDYR010000019.1_263899_1_792 | unclassified | unknown | Carpediemonas | 1517 |
| | | | membranifera | |
| JAHDYR010000020.1_124886_5_424 | unclassified | unknown | Carpediemonas | 1518 |
| | | | membranifera | |
| JAHDYR010000022.1_88989_3_210 | unclassified | unknown | Carpediemonas | 1519 |
| | | | membranifera | |
| JAHDYR010000038.1_132089_2_413 | unclassified | unknown | Carpediemonas | 1520 |
| | | | membranifera | |
| JAHDYR010000038.1_322667_1_1011 | unclassified | unknown | Carpediemonas | 1521 |
| | | | membranifera | |
| JAHDYR010000028.1_135883_1_436 | family2 | unknown | Carpediemonas | 1522 |
| | | | membranifera | |
| JAHDYR010000033.1_72725_2_232 | unclassified | unknown | Carpediemonas | 1523 |
| | | | membranifera | |
| JAHDYR010000034.1_82890_3_341 | unclassified | unknown | Carpediemonas | 1524 |
| | | | membranifera | |
| JAHDYR010000053.1_935620_4_2855 | unclassified | unknown | Carpediemonas | 1525 |
| | | | membranifera | |
| JAHDYR010000047.1_9068_5_33 | unclassified | unknown | Carpediemonas | 1526 |
| | | | membranifera | |
| JAHDYR010000062.1_672564_6_2058 | unclassified | unknown | Carpediemonas | 1527 |
| | | | membranifera | |
| JAHDYR010000062.1_1254673_1_4117 | unclassified | unknown | Carpediemonas | 1528 |
| | | | membranifera | |
| JAHDYR010000062.1_1317112_1_4352 | unclassified | unknown | Carpediemonas | 1529 |
| | | | membranifera | |
| JAHDYR010000064.1_410228_5_1224 | unclassified | unknown | Carpediemonas | 1530 |
| | | | membranifera | |
| JAHDYR010000064.1_453783_6_1404 | family2 | unknown | Carpediemonas | 1531 |
| | | | membranifera | |
| JAHDYR010000064.1_781818_3_2508 | unclassified | unknown | Carpediemonas | 1532 |
| | | | membranifera | |
| JAHDYR010000066.1_88308_3_349 | family2 | unknown | Carpediemonas | 1533 |
| | | | membranifera | |
| JAHDYR010000066.1_284734_1_1087 | unclassified | unknown | Carpediemonas | 1534 |
| | | | membranifera | |
| JAHDYR010000067.1_286089_3_873 | unclassified | unknown | Carpediemonas | 1535 |
| | | | membranifera | |
| JAHDYR010000067.1_596128_4_1820 | unclassified | unknown | Carpediemonas | 1536 |
| | | | membranifera | |
| JAHDYR010000069.1_395976_3_1233 | unclassified | unknown | Carpediemonas | 1537 |
| | | | membranifera | |
| CM035807.1_14332651_1_11168 | family3 | unknown | Chlorops oryzae | 1538 |
| CM035807.1_16003812_3_12629 | family3 | unknown | Chlorops oryzae | 1539 |
| CM035807.1_21975659_5_17402 | family3 | unknown | Chlorops oryzae | 1540 |
| CM035807.1_72298639_1_67448 | family3 | unknown | Chlorops oryzae | 1541 |
| CM035807.1_72471171_3_67589 | unclassified | unknown | Chlorops oryzae | 1542 |
| CM035808.1_17004017_5_13158 | family3 | unknown | Chlorops oryzae | 1543 |
| CM035915.1_15679536_5_2_92537 | family5 | unknown | Dreissens polymorpha | 1544 |
| CM035915.1_15683528_3_2_92574 | family5 | unknown | Dreissens polymorpha | 1545 |
| CM035916.1_4535253_3_2823 | family5 | unknown | Dreissens polymorpha | 1546 |
| CM035916.1_11769608_2_6853 | unclassified | unknown | Dreissens polymorpha | 1547 |
| CM035917.1_52655030_2_29814 | family5 | unknown | Dreissens polymorpha | 1548 |
| CM035917.1_64486888_4_36859 | family5 | unknown | Dreissens polymorpha | 1549 |
| CM035917.1_84196524_3_48611 | family5 | unknown | Dreissens polymorpha | 1550 |
| CM035917.1_125427272_2_72835 | family5 | unknown | Dreissens polymorpha | 1551 |
| CM035918.1_73244772_3_42228 | family5 | unknown | Dreissens polymorpha | 1549 |
| CM035919.1_65678598_3_38515 | family5 | unknown | Dreissens polymorpha | 1552 |
| CM035919.1_72510277_4_42713 | family5 | unknown | Dreissens polymorpha | 1546 |
| CM035921.1_62409517_1_38157 | family5 | unknown | Dreissens polymorpha | 1553 |
| CM035922.1_61979429_2_37744 | family5 | unknown | Dreissens polymorpha | 1554 |
| CM035923.1_51013967_2_29491 | family5 | unknown | Dreissens polymorpha | 1555 |
| CM035924.1_14364637_1_8889 | family5 | unknown | Dreissens polymorpha | 1546 |
| CM035926.1_46004443_4_26838 | family5 | unknown | Dreissens polymorpha | 1556 |
| JAGUQM010000004.1_323544_6_572 | family4 | unknown | Vermamoeba | 1557 |
| | | | vermiformis | |
| JAGUQM010000004.1_556931_5_923 | unclassified | unknown | Vermamoeba | 1558 |
| | | | vermiformis | |
| JAGUQM010000007.1_891582_6_1483 | unclassified | unknown | Vermamoeba | 1559 |
| | | | vermiformis | |
| JAGUQM010000011.1_27390_3_44 | family4 | unknown | Vermamoeba | 1560 |
| | | | vermiformis | |
| JAGUQM010000013.1_601177_1_1015 | family4 | unknown | Vermamoeba | 1561 |
| | | | vermiformis | |
| JAGUQM010000017.1_17442_6_24 | family4 | unknown | Vermamoeba | 1562 |
| | | | vermiformis | |
| JAGUQM010000020.1_369963_3_613 | unclassified | unknown | Vermamoeba | 1563 |
| | | | vermiformis | |
| JAGUQM010000021.1_76225_4_121 | family4 | unknown | Vermamoeba | 1564 |
| | | | vermiformis | |
| JAGUQM010000021.1_187239_3_280 | family4 | unknown | Vermamoeba | 1565 |
| | | | vermiformis | |
| JAGUQM010000030.1_10772_5_16 | family4 | unknown | Vermamoeba | 1566 |
| | | | vermiformis | |
| JAGUQM010000114.1_69480_3_94 | family4 | unknown | Vermamoeba | 1567 |
| | | | vermiformis | |
| JAGUQM010000039.1_539115_6_887 | family4 | unknown | Vermamoeba | 1568 |
| | | | vermiformis | |
| JAGUQM010000040.1_95177_2_176 | family4 | unknown | Vermamoeba | 1569 |
| | | | vermiformis | |
| JAGUOMO10000062.1_326989_1_598 | family4 | unknown | Vermamoeba | 1570 |
| | | | vermiformis | |
| JAGUQM010000043.1_337287_6_476 | family4 | unknown | Vermamoeba | 1571 |
| | | | vermiformis | |
| JAGUQM010000072.1_39247_1_49 | family4 | unknown | Vermamoeba | 1572 |
| | | | vermiformis | |
| JAGUQM010000078.1_47879_2_75 | family4 | unknown | Vermamoeba | 1573 |
| | | | vermiformis | |
| JAGUQM010000082.1_75368_5_134 | unclassified | unknown | Vermamoeba | 1574 |
| | | | vermiformis | |
| JAGUQM010000084.1_109408_4_215 | unclassified | unknown | Vermamoeba | 1575 |
| | | | vermiformis | |
| JAGUQM010000084.1_740738_2_1265 | unclassified | unknown | Vermamoeba | 1576 |
| | | | vermiformis | |
| JAGUQM010000092.1_413293_1_627 | family4 | unknown | Vermamoeba | 1577 |
| | | | vermiformis | |
| JAGUQM010000094.1_536228_5_882 | unclassified | unknown | Vermamoeba | 1578 |
| | | | vermiformis | |
| JAGUQM010000097.1_11663_2_27 | family4 | unknown | Vermamoeba | 1579 |
| | | | vermiformis | |
| JAICDV010000001.1_3875822_5_12260 | unclassified | unknown | Phytophthora | 1580 |
| | | | ramorum | |
| CM037038.1_11413191_6_18754 | unclassified | unknown | Mythimna separata | 1581 |
| CM037556.1_40952869_1_42420 | unclassified | unknown | Sitodiplosis mosellana | 1582 |
| CM037556.1_52501777_1_54152 | unclassified | unknown | Sitodiplosis mosellana | 1583 |
| CM037558.1_9419225_5_10744 | unclassified | EnSpm | Sitodiplosis mosellana | 1584 |
| CM037558.1_13189775_2_14783 | unclassified | EnSpm | Sitodiplosis mosellana | 1585 |
| CM037558.1_14009789_5_15556 | unclassified | EnSpm/CAC | Sitodiplosis mosellana | 1586 |
| CM037558.1_15897571_1_17223 | unclassified | EnSpm | Sitodiplosis mosellana | 1587 |
| CM037558.1_19521805_1_19900 | unclassified | unknown | Sitodiplosis mosellana | 1588 |
| CM037559.1_5129351_2_5334 | unclassified | EnSpm/CAC | Sitodiplosis mosellana | 1589 |
| | | TA | | |
| CM037559.1_35463521_2_37296 | unclassified | unknown | Sitodiplosis mosellana | 1590 |
| CM037559.1_35502256_1_37358 | unclassified | unknown | Sitodiplosis mosellana | 1591 |
| CM037858.1_65650973_5_27516 | family5 | unknown | Anadara | 1592 |
| | | | kagoshimensis | |
| JACFYK010000023.1_2_2_1 | unclassified | unknown | Anadara | 1593 |
| | | | kagoshimensis | |
| CM038206.1_8138553_3_6414 | unclassified | unknown | Sphagnum fallax | 1594 |
| CM038208.1_4678665_6_3755 | unclassified | unknown | Sphagnum fallax | 1595 |
| JAKEZK010000052.1_799_4_8 | unclassified | unknown | Rhodotorula sp. CC01 | 1596 |
| CM039462.1_277780_1_579 | family4 | Mariner/Tc1 | Microglena sp. YARC | 1597 |
| CM039462.1_364899_3_798 | family4 | Mariner/Tc1 | Microglena sp. YARC | 1270 |
| CM039462.1_382073_2_856 | unclassified | Mariner/Tc1 | Microglena sp. YARC | 1598 |
| CM039462.1_554296_4_1302 | unclassified | Mariner/Tc1 | Microglena sp. YARC | 1232 |
| CM039462.1_722976_3_1809 | unclassified | Mariner/Tc1 | Microglena sp. YARC | 1599 |
| CM039462.1_733992_6_1841 | unclassified | Mariner/Tc1 | Microglena sp. YARC | 1600 |
| CM039462.1_889202_2_2245 | family5 | IS607 | Microglena sp. YARC | 882 |
| CM039462.1_1399461_3_3434 | family4 | Mariner/Tc1 | Microglena sp. YARC | 1601 |
| CM039462.1_1402377_6_3441 | unclassified | Mariner/Tc1 | Microglena sp. YARC | 1103 |
| CM039462.1_1422977_5_3502 | unclassified | Mariner/Tc1 | Microglena sp. YARC | 1602 |
| CM039462.1_1468928_2_3633 | unclassified | Mariner/Tc1 | Microglena sp. YARC | 1603 |
| CM039462.1_1601126_5_3960 | family4 | Mariner/Tc1 | Microglena sp. YARC | 1604 |
| CM039462.1_1625345_2_4022 | family5 | IS607 | Microglena sp. YARC | 1153 |
| CM039462.1_1635902_2_4045 | family4 | Mariner/Tc1 | Microglena sp. YARC | 1152 |
| CM039462.1_1639382_5_4051 | unclassified | Mariner/Tc1 | Microglena sp. YARC | 1605 |
| CM039462.1_1709910_3_4244 | family4 | Mariner/Tc1 | Microglena sp. YARC | 1606 |
| CM039462.1_1728433_4_4288 | family4 | Mariner/Tc1 | Microglena sp. YARC | 1607 |
| CM039462.1_1733568_6_4308 | family4 | Mariner/Tc1 | Microglena sp. YARC | 1608 |
| CM039462.1_1737773_5_4316 | family4 | Mariner/Tc1 | Microglena sp. YARC | 1609 |
| CM039462.1_1756630_4_4368 | unclassified | Mariner/Tc1 | Microglena sp. YARC | 1610 |
| CM039462.1_1758362_5_4374 | unclassified | Mariner/Tc1 | Microglena sp. YARC | 1360 |
| CM039462.1_1759287_3_4378 | unclassified | Mariner/Tc1 | Microglena sp. YARC | 1359 |
| CM039462.1_1761032_5_4385 | unclassified | Mariner/Tc1 | Microglena sp. YARC | 1358 |
| CM039462.1_1850591_5_4642 | family4 | Mariner/Tc1 | Microglena sp. YARC | 1909 |
| CM039462.1_6441125_5_14684 | unclassified | Mariner/Tc1 | Microglena sp. YARC | 1611 |
| CM039462.1_6589134_6_15027 | unclassified | Mariner/Tc1 | Microglena sp. YARC | 1612 |
| CM039462.1_6610058_5_15085 | unclassified | Mariner/Tc1 | Microglena sp. YARC | 1613 |
| CM039462.1_6646114_1_15170 | family5 | IS607 | Microglena sp. YARC | 1614 |
| CM039462.1_6668182_4_15237 | family5 | IS607 | Microglena sp. YARC | 1615 |
| CM039462.1_6685419_3_15292 | unclassified | Mariner/Tc1 | Microglena sp. YARC | 1616 |
| CM039462.1_6817878_6_15641 | family4 | Mariner/Tc1 | Microglena sp. YARC | 1617 |
| CM039462.1_7032468_3_16116 | family4 | Mariner/Tc1 | Microglena sp. YARC | 1618 |
| CM039462.1_7778280_6_17853 | family5 | IS607 | Microglena sp. YARC | 1619 |
| CM039462.1_7783881_6_17872 | family5 | IS607 | Microglena sp. YARC | 998 |
| CM039462.1_7792895_2_17895 | family4 | Mariner/Tc1 | Microglena sp. YARC | 1145 |
| CM039462.1_7803329_2_17925 | unclassified | Mariner/Tc1 | Microglena sp. YARC | 1620 |
| CM039462.1_7915197_3_18181 | family4 | Mariner/Tc1 | Microglena sp. YARC | 1621 |
| CM039462.1_7920199_4_18191 | family4 | Mariner/Tc1 | Microglena sp. YARC | 1622 |
| CM039462.1_7931554_4_18215 | family5 | IS607 | Microglena sp. YARC | 903 |
| CM039462.1_8306424_6_19133 | unclassified | Mariner/Tc1 | Microglena sp. YARC | 1623 |
| CM039462.1_8318206_4_19167 | family4 | Mariner/Tc1 | Microglena sp. YARC | 786 |
| CM039462.1_11619875_2_26403 | unclassified | Mariner/Tc1 | Microglena sp. YARC | 1624 |
| CM039462.1_11647185_3_26474 | family5 | IS607 | Microglena sp. YARC | 1625 |
| CM039462.1_12693805_1_28780 | family4 | Mariner/Tc1 | Microglena sp. YARC | 1626 |
| CM039462.1_16453797_3_37492 | unclassified | Mariner/Tc1 | Microglena sp. YARC | 666 |
| CM039462.1_16467986_5_37534 | unclassified | Mariner/Tc1 | Microglena sp. YARC | 667 |
| CM039462.1_16483013_5_37572 | unclassified | Mariner/Tc1 | Microglena sp. YARC | 668 |
| CM039462.1_16508581_4_37640 | family4 | Mariner/Tc1 | Microglena sp. YARC | 1627 |
| CM039462.1_16666931_5_38073 | unclassified | Mariner/Tc1 | Microglena sp. YARC | 1628 |
| CM039462.1_22932072_3_51994 | unclassified | Mariner/Tc1 | Microglena sp. YARC | 1629 |
| CM039462.1_22963424_2_52078 | family5 | IS607 | Microglena sp. YARC | 998 |
| CM039462.1_22973975_5_52106 | family5 | IS607 | Microglena sp. YARC | 998 |
| CM039462.1_25028897_5_56353 | unclassified | Mariner/Tc1 | Microglena sp. YARC | 1630 |
| CM039462.1_25037894_5_56374 | unclassified | Mariner/Tc1 | Microglena sp. YARC | 1253 |
| CM039462.1_25143768_3_56656 | family5 | IS607 | Microglena sp. YARC | 1375 |
| CM039462.1_32891261_2_74121 | unclassified | Mariner/Tc1 | Microglena sp. YARC | 1631 |
| CM039462.1_32897371_1_74143 | unclassified | Mariner/Tc1 | Microglena sp. YARC | 1632 |
| CM039462.1_33014266_4_74458 | family4 | Mariner/Tc1 | Microglena sp. YARC | 1633 |
| CM039462.1_33118832_2_74704 | unclassified | Mariner/Tc1 | Microglena sp. YARC | 1634 |
| CM039462.1_33144565_1_74765 | unclassified | Mariner/Tc1 | Microglena sp. YARC | 1635 |
| CM039462.1_33189230_2_74886 | unclassified | Mariner/Tc1 | Microglena sp. YARC | 1636 |
| CM039462.1_33277026_6_75066 | family4 | Mariner/Tc1 | Microglena sp. YARC | 1637 |
| CM039462.1_33283902_6_75083 | family5 | IS607 | Microglena sp. YARC | 1638 |
| CM039462.1_33294186_3_75110 | unclassified | IS607 | Microglena sp. YARC | 1639 |
| CM039462.1_33303596_5_75128 | unclassified | Mariner/Tc1 | Microglena sp. YARC | 1640 |
| CM039462.1_33317998_4_75167 | unclassified | Mariner/Tc1 | Microglena sp. YARC | 1641 |
| CM039462.1_33327970_1_75196 | family4 | Mariner/Tc1 | Microglena sp. YARC | 1642 |
| CM039462.1_33830036_2_76285 | family4 | Mariner/Tc1 | Microglena sp. YARC | 1643 |
| CM039462.1_33892325_2_76401 | family4 | Mariner/Tc1 | Microglena sp. YARC | 1644 |
| CM039462.1_33902724_6_76441 | family4 | Mariner/Tc1 | Microglena sp. YARC | 1252 |
| CM039462.1_33941112_3_76524 | family4 | Mariner/Tc1 | Microglena sp. YARC | 1645 |
| CM039462.1_36594800_2_82253 | family5 | IS607 | Microglena sp. YARC | 1646 |
| CM039462.1_36618502_4_82313 | unclassified | Mariner/Tc1 | Microglena sp. YARC | 1647 |
| CM039462.1_36747690_3_82699 | unclassified | Mariner/Tc1 | Microglena sp. YARC | 1648 |
| CM039462.1_36796595_2_82853 | family4 | Mariner/Tc1 | Microglena sp. YARC | 921 |
| CM039462.1_36805408_1_82867 | family4 | Mariner/Tc1 | Microglena sp. YARC | 1649 |
| CM039462.1_37231065_3_83894 | unclassified | Mariner/Tc1 | Microglena sp. YARC | 1650 |
| CM039462.1_37244615_2_83921 | family4 | Mariner/Tc1 | Microglena sp. YARC | 1651 |
| CM039462.1_37424241_6_84407 | family4 | Mariner/Tc1 | Microglena sp. YARC | 1010 |
| CM039462.1_37429840_1_84417 | unclassified | Mariner/Tc1 | Microglena sp. YARC | 1652 |
| CM039462.1_37435874_2_84434 | family5 | IS607 | Microglena sp. YARC | 1008 |
| CM039462.1_37501593_3_84578 | unclassified | Mariner/Tc1 | Microglena sp. YARC | 1653 |
| CM039462.1_37508400_3_84597 | unclassified | Mariner/Tc1 | Microglena sp. YARC | 1654 |
| CM039462.1_37564938_6_84764 | unclassified | Mariner/Tc1 | Microglena sp. YARC | 1655 |
| CM039462.1_37584760_1_84819 | family5 | IS607 | Microglena sp. YARC | 976 |
| CM039462.1_37592356_1_84839 | family4 | Mariner/Tc1 | Microglena sp. YARC | 1977 |
| CM039462.1_37644495_3_84969 | family4 | Mariner/Tc1 | Microglena sp. YARC | 1656 |
| CM039462.1_37889574_3_85529 | family4 | Mariner/Tc1 | Microglena sp. YARC | 1657 |
| CM039462.1_37924344_3_85631 | unclassified | Mariner/Tc1 | Microglena sp. YARC | 1658 |
| CM039462.1_37928284_4_85643 | unclassified | Mariner/Tc1 | Microglena sp. YARC | 1659 |
| CM039462.1_37951855_1_85707 | unclassified | Mariner/Tc1 | Microglena sp. YARC | 1660 |
| CM039462.1_37985030_2_85793 | unclassified | Mariner/Tc1 | Microglena sp. YARC | 1661 |
| CM039462.1_38044238_2_85941 | family4 | Mariner/Tc1 | Microglena sp. YARC | 1662 |
| CM039462.1_38055133_4_85966 | unclassified | Mariner/Tc1 | Microglena sp. YARC | 1663 |
| CM039462.1_38129989_4_86186 | family4 | Mariner/Tc1 | Microglena sp. YARC | 1664 |
| CM039462.1_38134264_4_86199 | unclassified | Mariner/Tc1 | Microglena sp. YARC | 1665 |
| CM039462.1_38224412_5_86406 | family4 | Mariner/Tc1 | Microglena sp. YARC | 1666 |
| CM039462.1_38246603_2_86471 | unclassified | IS607 | Microglena sp. YARC | 1667 |
| CM039462.1_38261744_5_86519 | unclassified | Mariner/Tc1 | Microglena sp. YARC | 1668 |
| CM039462.1_38283787_4_86576 | unclassified | Mariner/Tc1 | Microglena sp. YARC | 1669 |
| CM039462.1_38554795_1_87348 | unclassified | Mariner/Tc1 | Microglena sp. YARC | 1670 |
| CM039462.1_38562288_6_87370 | unclassified | Mariner/Tc1 | Microglena sp. YARC | 1671 |
| CM039462.1_38605496_2_87496 | family4 | Mariner/Tc1 | Microglena sp. YARC | 1672 |
| CM039462.1_38618741_5_87527 | unclassified | Mariner/Tc1 | Microglena sp. YARC | 1673 |
| CM039462.1_38628476_5_87564 | family4 | Mariner/Tc1 | Microglena sp. YARC | 1674 |
| CM039462.1_38650198_1_87605 | unclassified | Mariner/Tc1 | Microglena sp. YARC | 1675 |
| CM039462.1_38663752_4_87642 | unclassified | Mariner/Tc1 | Microglena sp. YARC | 1676 |
| CM039462.1_38673463_4_87661 | unclassified | Mariner/Tc1 | Microglena sp. YARC | 1677 |
| CM039462.1_38758714_4_87922 | family4 | Mariner/Tc1 | Microglena sp. YARC | 1678 |
| CM039462.1_39032520_6_88693 | unclassified | Mariner/Tc1 | Microglena sp. YARC | 1679 |
| CM039462.1_39154138_1_89032 | family4 | Mariner/Tc1 | Microglena sp. YARC | 1112 |
| CM039462.1_39314076_3_89404 | unclassified | Mariner/Tc1 | Microglena sp. YARC | 1680 |
| CM039462.1_39316719_3_89412 | unclassified | Mariner/Tc1 | Microglena sp. YARC | 1681 |
| CM039462.1_39338690_2_89476 | family4 | Mariner/Tc1 | Microglena sp. YARC | 1682 |
| CM039462.1_40649701_1_92353 | family4 | Mariner/Tc1 | Microglena sp. YARC | 728 |
| CM039462.1_40666393_1_92404 | unclassified | Mariner/Tc1 | Microglena sp. YARC | 729 |
| CM039462.1_44753743_1_101657 | family4 | Mariner/Tc1 | Microglena sp. YARC | 1120 |
| CM039462.1_44763813_6_101680 | unclassified | Mariner/Tc1 | Microglena sp. YARC | 1683 |
| CM039462.1_44805918_6_101775 | family4 | Mariner/Tc1 | Microglena sp. YARC | 1684 |
| CM039462.1_44980057_4_102209 | unclassified | Mariner/Tc1 | Microglena sp. YARC | 1685 |
| CM039462.1_45082956_6_102514 | unclassified | Mariner/Tc1 | Microglena sp. YARC | 1686 |
| CM039462.1_45178189_4_102804 | family4 | Mariner/Tc1 | Microglena sp. YARC | 1088 |
| CM039462.1_45183947_2_102818 | family4 | Mariner/Tc1 | Microglena sp. YARC | 1087 |
| CM039462.1_45299194_1_103132 | family5 | IS607 | Microglena sp. YARC | 1687 |
| CM039462.1_45305936_2_103152 | unclassified | Mariner/Tc1 | Microglena sp. YARC | 788 |
| CM039462.1_45399742_1_103414 | unclassified | Mariner/Tc1 | Microglena sp. YARC | 1688 |
| CM039462.1_45414478_1_103466 | family5 | IS607 | Microglena sp. YARC | 750 |
| CM039462.1_45422311_1_103480 | unclassified | Mariner/Tc1 | Microglena sp. YARC | 1689 |
| CM039462.1_45476500_1_103626 | unclassified | Mariner/Tc1 | Microglena sp. YARC | 1690 |
| CM039462.1_45671592_3_104150 | unclassified | IS607 | Microglena sp. YARC | 1691 |
| CM039462.1_45684124_4_104179 | unclassified | IS607 | Microglena sp. YARC | 1692 |
| CM039462.1_46155259_4_105188 | family5 | IS607 | Microglena sp. YARC | 1207 |
| CM039462.1_46236565_1_105358 | unclassified | Mariner/Tc1 | Microglena sp. YARC | 1693 |
| CM039462.1_46251201_3_105407 | family4 | Mariner/Tc1 | Microglena sp. YARC | 1694 |
| CM039462.1_46342703_5_105631 | unclassified | Mariner/Tc1 | Microglena sp. YARC | 1695 |
| CM039462.1_46361669_2_105689 | unclassified | Mariner/Tc1 | Microglena sp. YARC | 1696 |
| CM039462.1_46395418_4_105765 | family5 | IS607 | Microglena sp. YARC | 1697 |
| CM039462.1_46402450_4_105784 | family5 | IS607 | Microglena sp. YARC | 1698 |
| CM039462.1_46410868_4_105806 | unclassified | Mariner/Tc1 | Microglena sp. YARC | 1699 |
| CM039462.1_48934803_6_111444 | family5 | IS607 | Microglena sp. YARC | 1700 |
| CM039462.1_48940270_4_111455 | family5 | IS607 | Microglena sp. YARC | 1701 |
| CM039462.1_48957328_1_111496 | unclassified | Mariner/Tc1 | Microglena sp. YARC | 1702 |
| CM039462.1_48963200_2_111514 | unclassified | Mariner/Tc1 | Microglena sp. YARC | 1703 |
| CM039462.1_48969700_4_111531 | family4 | Mariner/Tc1 | Microglena sp. YARC | 1704 |
| CM039462.1_48973847_5_111536 | family4 | Mariner/Tc1 | Microglena sp. YARC | 1705 |
| CM039462.1_48994670_5_111573 | unclassified | Mariner/Tc1 | Microglena sp. YARC | 1706 |
| CM039462.1_49223569_4_112136 | family5 | IS607 | Microglena sp. YARC | 1351 |
| CM039462.1_49227178_4_112145 | family5 | IS607 | Microglena sp. YARC | 1352 |
| CM039462.1_49236142_4_112174 | family5 | IS607 | Microglena sp. YARC | 998 |
| CM039462.1_49242912_3_112192 | family4 | Mariner/Tc1 | Microglena sp. YARC | 1707 |
| CM039462.1_49259546_2_112223 | unclassified | Mariner/Tc1 | Microglena sp. YARC | 1708 |
| CM039462.1_49285552_4_112290 | unclassified | Mariner/Tc1 | Microglena sp. YARC | 1709 |
| CM039462.1_49362840_3_112458 | family5 | IS607 | Microglena sp. YARC | 1710 |
| CM039462.1_49365750_6_112469 | family4 | Mariner/Tc1 | Microglena sp. YARC | 1711 |
| CM039462.1_49392680_2_112541 | family4 | Mariner/Tc1 | Microglena sp. YARC | 1712 |
| CM039462.1_49855182_3_113552 | family4 | Mariner/Tc1 | Microglena sp. YARC | 1035 |
| CM039462.1_49911245_2_113610 | family5 | IS607 | Microglena sp. YARC | 1034 |
| CM039462.1_50047260_6_113963 | unclassified | Mariner/Tc1 | Microglena sp. YARC | 1036 |
| CM039462.1_50620672_4_115251 | family4 | Mariner/Tc1 | Microglena sp. YARC | 1027 |
| CM039462.1_52768771_4_120143 | family5 | IS607 | Microglena sp. YARC | 1197 |
| CM039462.1_52782300_3_120169 | unclassified | Mariner/Tc1 | Microglena sp. YARC | 1713 |
| CM039462.1_52794096_3_120194 | family4 | Mariner/Tc1 | Microglena sp. YARC | 1714 |
| CM039462.1_52808299_1_120232 | family5 | IS607 | Microglena sp. YARC | 1257 |
| CM039462.1_52820883_6_120262 | unclassified | Mariner/Tc1 | Microglena sp. YARC | 1715 |
| CM039462.1_54961376_5_125605 | family4 | Mariner/Tc1 | Microglena sp. YARC | 1716 |
| CM039462.1_55190596_4_126128 | unclassified | Mariner/Tc1 | Microglena sp. YARC | 1717 |
| CM039462.1_55198480_4_126149 | unclassified | Mariner/Tc1 | Microglena sp. YARC | 1718 |
| CM039462.1_55605871_1_127132 | family5 | IS607 | Microglena sp. YARC | 1719 |
| CM039462.1_55619108_2_127167 | family4 | Mariner/Tc1 | Microglena sp. YARC | 1720 |
| CM039462.1_55624331_5_127179 | unclassified | Mariner/Tc1 | Microglena sp. YARC | 812 |
| CM039462.1_56669601_3_129811 | family4 | Mariner/Tc1 | Microglena sp. YARC | 849 |
| CM039462.1_56684046_3_129851 | unclassified | Mariner/Tc1 | Microglena sp. YARC | 1721 |
| CM039462.1_56693387_5_129871 | family4 | Mariner/Tc1 | Microglena sp. YARC | 1722 |
| CM039462.1_56711593_1_129917 | family4 | Mariner/Tc1 | Microglena sp. YARC | 716 |
| CM039462.1_58604549_2_134452 | unclassified | Mariner/Tc1 | Microglena sp. YARC | 912 |
| CM039462.1_58642183_1_134555 | family5 | IS607 | Microglena sp. YARC | 1723 |
| CM039462.1_58805081_2_134976 | unclassified | Mariner/Tc1 | Microglena sp. YARC | 1724 |
| CM039462.1_58871034_3_135159 | unclassified | Mariner/Tc1 | Microglena sp. YARC | 1725 |
| CM039462.1_58904035_1_135256 | family4 | Mariner/Tc1 | Microglena sp. YARC | 1726 |
| CM039462.1_59057317_4_135597 | family4 | Mariner/Tc1 | Microglena sp. YARC | 1727 |
| CM039462.1_59145916_4_135801 | family4 | Mariner/Tc1 | Microglena sp. YARC | 710 |
| CM039462.1_59259164_2_136073 | family5 | IS607 | Microglena sp. YARC | 1728 |
| CM039462.1_61826017_4_142219 | unclassified | Mariner/Tc1 | Microglena sp. YARC | 1137 |
| CM039462.1_61962022_1_142591 | family4 | Mariner/Tc1 | Microglena sp. YARC | 1729 |
| CM039462.1_62015975_5_142750 | family4 | unknown | Microglena sp. YARC | 1700 |
| CM039462.1_62050200_6_142835 | unclassified | unknown | Microglena sp. YARC | 1730 |
| CM039462.1_68385140_2_156561 | unclassified | Mariner/Tc1 | Microglena sp. YARC | 1731 |
| CM039462.1_68395415_2_156589 | unclassified | Mariner/Tc1 | Microglena sp. YARC | 1732 |
| CM039462.1_69259156_1_158555 | unclassified | Mariner/Tc1 | Microglena sp. YARC | 885 |
| CM039462.1_71442784_4_163140 | family4 | Mariner/Tc1 | Microglena sp. YARC | 906 |
| CM039462.1_71508828_3_163320 | family4 | Mariner/Tc1 | Microglena sp. YARC | 1733 |
| CM039462.1_71524805_2_163352 | family4 | Mariner/Tc1 | Microglena sp. YARC | 1734 |
| CM039462.1_72426312_3_165464 | unclassified | Mariner/Tc1 | Microglena sp. YARC | 1229 |
| CM039462.1_72520415_5_165745 | family4 | Mariner/Tc1 | Microglena sp. YARC | 1228 |
| CM039462.1_72529896_3_165755 | unclassified | Mariner/Tc1 | Microglena sp. YARC | 1735 |
| CM039462.1_72546121_1_165801 | family4 | Mariner/Tc1 | Microglena sp. YARC | 1227 |
| CM039462.1_72927723_3_166532 | family5 | IS607 | Microglena sp. YARC | 1230 |
| CM039462.1_73250341_1_167344 | family4 | Mariner/Tc1 | Microglena sp. YARC | 1736 |
| CM039462.1_73263015_6_167369 | unclassified | Mariner/Tc1 | Microglena sp. YARC | 790 |
| CM039462.1_73270336_4_167390 | family4 | Mariner/Tc1 | Microglena sp. YARC | 1737 |
| CM039462.1_73525609_1_168102 | family5 | IS607 | Microglena sp. YARC | 1738 |
| CM039462.1_73763118_3_168758 | family4 | Mariner/Tc1 | Microglena sp. YARC | 1739 |
| CM039462.1_73960867_4_169257 | unclassified | Mariner/Tc1 | Microglena sp. YARC | 1740 |
| CM039462.1_76568320_1_174941 | family4 | Mariner/Tc1 | Microglena sp. YARC | 1741 |
| CM039462.1_78257487_3_178761 | family4 | Mariner/Tc1 | Microglena sp. YARC | 1742 |
| CM039462.1_78260853_3_178767 | unclassified | Mariner/Tc1 | Microglena sp. YARC | 1743 |
| CM039462.1_78870377_2_180316 | unclassified | Mariner/Tc1 | Microglena sp. YARC | 776 |
| CM039462.1_81418306_1_186391 | unclassified | Mariner/Tc1 | Microglena sp. YARC | 1267 |
| CM039462.1_81525230_2_186657 | unclassified | Mariner/Tc1 | Microglena sp. YARC | 1012 |
| CM039462.1_81746204_5_187186 | unclassified | Mariner/Tc1 | Microglena sp. YARC | 1744 |
| CM039462.1_81870085_4_187483 | family4 | Mariner/Tc1 | Microglena sp. YARC | 1745 |
| CM039462.1_81932275_1_187653 | family4 | Mariner/Tc1 | Microglena sp. YARC | 1746 |
| CM039462.1_82079138_5_188039 | family4 | Mariner/Tc1 | Microglena sp. YARC | 1747 |
| CM039462.1_82104766_4_188107 | unclassified | Mariner/Tc1 | Microglena sp. YARC | 1748 |
| CM039462.1_82245255_3_188445 | family4 | Mariner/Tc1 | Microglena sp. YARC | 873 |
| CM039462.1_82257442_1_188475 | family4 | Mariner/Tc1 | Microglena sp. YARC | 872 |
| CM039462.1_82267630_1_188502 | family4 | Mariner/Tc1 | Microglena sp. YARC | 1749 |
| CM039462.1_82434299_2_188867 | unclassified | Mariner/Tc1 | Microglena sp. YARC | 934 |
| CM039462.1_82476123_6_188938 | family4 | Mariner/Tc1 | Microglena sp. YARC | 1051 |
| CM039462.1_82523259_6_189098 | family4 | Mariner/Tc1 | Microglena sp. YARC | 1050 |
| CM039462.1_83649210_6_191730 | family4 | Mariner/Tc1 | Microglena sp. YARC | 1750 |
| CM039462.1_83655361_1_191749 | unclassified | Mariner/Tc1 | Microglena sp. YARC | 956 |
| CM039462.1_83725474_1_91905 | unclassified | Mariner/Tc1 | Microglena sp. YARC | 1751 |
| CM039462.1_89075699_2_203774 | unclassified | Mariner/Tc1 | Microglena sp. YARC | 1752 |
| CM039462.1_94121437_4_215168 | unclassified | Mariner/Tc1 | Microglena sp. YARC | 1753 |
| CM039462.1_94180373_2_215312 | unclassified | Mariner/Tc1 | Microglena sp. YARC | 1754 |
| CM039462.1_94286208_6_21560 | family4 | Mariner/Tc1 | Microglena sp. YARC | 1755 |
| CM039462.1_94324955_2_215675 | family4 | Mariner/Tc1 | Microglena sp. YARC | 1756 |
| CM039462.1_94328155_4_215686 | unclassified | Mariner/Tc1 | Microglena sp. YARC | 1757 |
| CM039462.1_94386711_6_215825 | unclassified | Mariner/Tc1 | Microglena sp. YARC | 1758 |
| CM039462.1_94550827_4_216296 | unclassified | Mariner/Tc1 | Microglena sp. YARC | 1759 |
| CM039462.1_98577465_3_225509 | unclassified | Mariner/Tc1 | Microglena sp. YARC | 1301 |
| CM039462.1_100502008_4_229582 | family4 | Mariner/Tc1 | Microglena sp. YARC | 1760 |
| CM039462.1_100533461_2_229668 | unclassified | Mariner/Tc1 | Microglena sp. YARC | 1761 |
| CM039462.1_100676059_1_230041 | family4 | Mariner/Tc1 | Microglena sp. YARC | 1762 |
| CM039462.1_103464345_6_236197 | family4 | Mariner/Tc1 | Microglena sp. YARC | 954 |
| CM039462.1_103661868_6_236710 | family4 | Mariner/Tc1 | Microglena sp. YARC | 1763 |
| CM039462.1_103665216_6_236721 | unclassified | Mariner/Tc1 | Microglena sp. YARC | 1764 |
| CM039462.1_103953420_3_237446 | unclassified | Mariner/Tc1 | Microglena sp. YARC | 1765 |
| CM039462.1_103964118_3_237475 | unclassified | Mariner/Tc1 | Microglena sp. YARC | 1766 |
| CM039462.1_103973179_1_237504 | family4 | Mariner/Tc1 | Microglena sp. YARC | 1767 |
| CM039462.1_104023891_4_237649 | family4 | Mariner/Tc1 | Microglena sp. YARC | 1768 |
| CM039462.1_104060480_5_237744 | unclassified | Mariner/Tc1 | Microglena sp. YARC | 1769 |
| CM039462.1_104079727_1_237804 | unclassified | Mariner/Tc1 | Microglena sp. YARC | 1770 |
| CM039462.1_104092305_3_237839 | unclassified | Mariner/Tc1 | Microglena sp. YARC | 1771 |
| CM039462.1_104133398_5_237933 | family5 | IS607 | Microglena sp. YARC | 766 |
| CM039462.1_105662406_6_241382 | family4 | Mariner/Tc1 | Microglena sp. YARC | 1772 |
| CM039462.1_105731092_1_241588 | family4 | Mariner/Tc1 | Microglena sp. YARC | 1773 |
| CM039462.1_106701003_6_243875 | family4 | Mariner/Tc1 | Microglena sp. YARC | 1774 |
| CM039462.1_106789486_1_244106 | unclassified | Mariner/Tc1 | Microglena sp. YARC | 1775 |
| CM039462.1_106975101_6_244525 | family4 | Mariner/Tc1 | Microglena sp. YARC | 827 |
| CM039462.1_106982845_4_244538 | unclassified | Mariner/Tc1 | Microglena sp. YARC | 828 |
| CM039462.1_107185077_3_245040 | family4 | Mariner/Tc1 | Microglena sp. YARC | 1776 |
| CM039462.1_107254204_4_245237 | family4 | Mariner/Tc1 | Microglena sp. YARC | 1777 |
| CM039462.1_107257265_2_245250 | family4 | Mariner/Tc1 | Microglena sp. YARC | 1778 |
| CM039462.1_107370804_6_245525 | family5 | IS607 | Microglena sp. YARC | 1779 |
| CM039462.1_107426007_3_245672 | unclassified | IS607 | Microglena sp. YARC | 1091 |
| CM039462.1_107462811_3_245767 | family4 | Mariner/Tc1 | Microglena sp. YARC | 1092 |
| CM039462.1_107601605_5_246108 | family4 | Mariner/Tc1 | Microglena sp. YARC | 1780 |
| CM039462.1_107635032_3_246206 | unclassified | Mariner/Tc1 | Microglena sp. YARC | 754 |
| CM039462.1_107647534_4_246241 | family4 | Mariner/Tc1 | Microglena sp. YARC | 1781 |
| CM039462.1_108410498_5_248170 | family4 | Mariner/Tc1 | Microglena sp. YARC | 1287 |
| CM039462.1_108446099_5_248255 | family4 | Mariner/Tc1 | Microglena sp. YARC | 1782 |
| CM039462.1_109752035_5_251441 | family4 | Mariner/Tc1 | Microglena sp. YARC | 772 |
| CM039462.1_109877247_6_251634 | unclassified | Mariner/Tc1 | Microglena sp. YARC | 1783 |
| CM039462.1_109882018_4_251645 | family4 | Mariner/Tc1 | Microglena sp. YARC | 1295 |
| CM039462.1_109914126_2_251721 | family4 | Mariner/Tc1 | Microglena sp. YARC | 1294 |
| CM039462.1_110039090_5_251969 | family4 | Mariner/Tc1 | Microglena sp. YARC | 1172 |
| CM039462.1_110050087_1_251999 | family4 | Mariner/Tc1 | Microglena sp. YARC | 1173 |
| CM039462.1_110061416_2_252026 | unclassified | Mariner/Tc1 | Microglena sp. YARC | 1784 |
| CM039462.1_110454830_2_252962 | unclassified | HIS607 | Microglena sp. YARC | 1184 |
| CM039462.1_110490257_5_253053 | family5 | IS607 | Microglena sp. YARC | 1187 |
| CM039462.1_110548646_5_253214 | unclassified | Mariner/Tc1 | Microglena sp. YARC | 1785 |
| CM039462.1_110613667_1_253315 | unclassified | Mariner/Tc1 | Microglena sp. YARC | 1786 |
| CM039462.1_110657103_6_253431 | unclassified | Mariner/Tc1 | Microglena sp. YARC | 1787 |
| CM039462.1_110721377_2_253613 | family4 | Mariner/Tc1 | Microglena sp. YARC | 1021 |
| CM039462.1_110809287_3_253823 | unclassified | Mariner/Tc1 | Microglena sp. YARC | 1788 |
| CM039462.1_110828866_4_253873 | family5 | IS607 | Microglena sp. YARC | 1308 |
| CM039462.1_114923771_2_263692 | unclassified | Mariner/Tc1 | Microglena sp. YARC | 1789 |
| CM039462.1_116394461_5_267056 | family4 | Mariner/Tc1 | Microglena sp. YARC | 1790 |
| CM039462.1_116766879_3_267890 | family5 | IS607 | Microglena sp. YARC | 1272 |
| CM039462.1_119804780_2_274488 | unclassified | unknown | Microglena sp. YARC | 1226 |
| CM039462.1_119810000_2_274507 | unclassified | unknown | Microglena sp. YARC | 1225 |
| CM039462.1_119825104_1_274576 | family4 | unknown | Microglena sp. YARC | 1224 |
| CM039462.1_119830870_1_274592 | unclassified | unknown | Microglena sp. YARC | 1223 |
| CM039462.1_119833999_4_274605 | unclassified | unknown | Microglena sp. YARC | 1222 |
| CM039462.1_119843101_4_274651 | family4 | unknown | Microglena sp. YARC | 1221 |
| CM039462.1_120621731_2_276588 | unclassified | Mariner/Tc1 | Microglena sp. YARC | 1791 |
| CM039462.1_120756734_4_276958 | unclassified | Mariner/Tc1 | Microglena sp. YARC | 1792 |
| CM039462.1_120766378_4_276984 | family4 | Mariner/Tc1 | Microglena sp. YARC | 1793 |
| CM039462.1_120792114_3_277050 | family4 | Mariner/Tc1 | Microglena sp. YARC | 1042 |
| CM039462.1_120939728_5_277391 | unclassified | Mariner/Tc1 | Microglena sp. YARC | 1794 |
| CM039462.1_121281401_2_278106 | unclassified | Mariner/Tc1 | Microglena sp. YARC | 1795 |
| CM039462.1_121522850_5_278680 | family4 | Mariner/Tc1 | Microglena sp. YARC | 1796 |
| CM039462.1_121599808_1_278868 | unclassified | Mariner/Tc1 | Microglena sp. YARC | 1797 |
| CM039462.1_122419245_6_280650 | family4 | Mariner/Tc1 | Microglena sp. YARC | 1798 |
| CM039462.1_122829836_2_281692 | unclassified | Mariner/Tc1 | Microglena sp. YARC | 1799 |
| CM039462.1_122863975_4_281777 | unclassified | Mariner/Tc1 | Microglena sp. YARC | 1800 |
| CM039462.1_122922368_2_281945 | family4 | Mariner/Tc1 | Microglena sp. YARC | 1801 |
| CM039462.1_122969479_1_282090 | family4 | Mariner/Tc1 | Microglena sp. YARC | 1802 |
| CM039462.1_122973218_2_282097 | family4 | Mariner/Tc1 | Microglena sp. YARC | 1803 |
| CM039462.1_123028617_3_282237 | unclassified | Mariner/Tc1 | Microglena sp. YARC | 1804 |
| CM039462.1_123848994_6_283874 | unclassified | Mariner/Tc1 | Microglena sp. YARC | 1805 |
| CM039462.1_123883647_3_283982 | unclassified | Mariner/Tc1 | Microglena sp. YARC | 1806 |
| CM039462.1_123895870_4_284007 | family4 | Mariner/Tc1 | Microglena sp. YARC | 1807 |
| CM039462.1_123945746_5_284131 | family4 | Mariner/Tc1 | Microglena sp. YARC | 1808 |
| CM039462.1_124207729_4_284803 | family4 | Mariner/Tc1 | Microglena sp. YARC | 670 |
| CM039462.1_124311275_2_285073 | unclassified | Mariner/Tc1 | Microglena sp. YARC | 1809 |
| CM039462.1_124338992_5_285150 | family5 | IS607 | Microglena sp. YARC | 1810 |
| CM039462.1_124365484_4_285221 | unclassified | Mariner/Tc1 | Microglena sp. YARC | 1811 |
| CM039462.1_124464109_4_285461 | unclassified | Mariner/Tc1 | Microglena sp. YARC | 1812 |
| CM039462.1_124500835_4_285558 | unclassified | Mariner/Tc1 | Microglena sp. YARC | 1813 |
| CM039462.1_124717738_1_286039 | unclassified | Mariner/Tc1 | Microglena sp. YARC | 1814 |
| CM039462.1_125558243_2_287964 | unclassified | Mariner/Tc1 | Microglena sp. YARC | 1815 |
| CM039462.1_125584131_3_288040 | family4 | Mariner/Tc1 | Microglena sp. YARC | 730 |
| CM039462.1_125879031_6_288720 | unclassified | Mariner/Tc1 | Microglena sp. YARC | 685 |
| CM039462.1_125885291_5_288740 | family4 | Mariner/Tc1 | Microglena sp. YARC | 1816 |
| CM039462.1_125905846_4_288804 | unclassified | Mariner/Tc1 | Microglena sp. YARC | 688 |
| CM039462.1_125939859_3_288877 | family4 | Mariner/Tc1 | Microglena sp. YARC | 689 |
| CM039462.1_125946852_6_288891 | family4 | Mariner/Tc1 | Microglena sp. YARC | 690 |
| CM039462.1_126023797_4_289104 | unclassified | Mariner/Tc1 | Microglena sp. YARC | 1817 |
| CM039462.1_126151896_3_289479 | family5 | IS607 | Microglena sp. YARC | 1818 |
| CM039462.1_126221874_3_289645 | unclassified | Mariner/Tc1 | Microglena sp. YARC | 1819 |
| CM039462.1_126355142_2_290010 | family4 | Mariner/Tc1 | Microglena sp. YARC | 932 |
| CM039462.1_126361710_3_290028 | unclassified | Mariner/Tc1 | Microglena sp. YARC | 1820 |
| CM039462.1_126431999_2_290233 | unclassified | Mariner/Tc1 | Microglena sp. YARC | 1821 |
| CM039462.1_126451090_1_290289 | family4 | Mariner/Tc1 | Microglena sp. YARC | 782 |
| CM039462.1_126456899_5_290307 | family4 | Mariner/Tc1 | Microglena sp. YARC | 781 |
| CM039462.1_130021354_1_299053 | unclassified | Mariner/Tc1 | Microglena sp. YARC | 1822 |
| CM039462.1_133694155_1_306878 | family4 | Mariner/Tc1 | Microglena sp. YARC | 1823 |
| CM039462.1_135596678_2_311159 | family4 | Mariner/Tc1 | Microglena sp. YARC | 1824 |
| CM039462.1_135621348_6_311221 | family4 | Mariner/Tc1 | Microglena sp. YARC | 1825 |
| CM039462.1_135658529_2_311333 | family5 | IS607 | Microglena sp. YARC | 1826 |
| CM039462.1_135664895_5_311347 | family4 | Mariner/Tc1 | Microglena sp. YARC | 1827 |
| CM039462.1_135733153_1_311546 | family4 | Mariner/Tc1 | Microglena sp. YARC | 1828 |
| CM039462.1_135850880_5_311878 | family5 | IS607 | Microglena sp. YARC | 1829 |
| CM039462.1_135857714_2_311894 | family4 | Mariner/Tc1 | Microglena sp. YARC | 1830 |
| CM039462.1_135867785_5_311916 | unclassified | Mariner/Tc1 | Microglena sp. YARC | 1831 |
| CM039462.1_136034452_4_312385 | unclassified | Mariner/Tc1 | Microglena sp. YARC | 1832 |
| CM039462.1_136846767_6_314277 | family4 | Mariner/Tc1 | Microglena sp. YARC | 1833 |
| CM039462.1_136915386_6_314404 | family4 | Mariner/Tc1 | Microglena sp. YARC | 1834 |
| CM039462.1_137052411_3_314700 | family4 | Mariner/Tc1 | Microglena sp. YARC | 1835 |
| CM039462.1_137128704_6_314895 | family4 | Mariner/Tc1 | Microglena sp. YARC | 819 |
| CM039462.1_137140928_5_314923 | unclassified | Mariner/Tc1 | Microglena sp. YARC | 1836 |
| CM039462.1_137172815_5_314995 | family4 | Mariner/Tc1 | Microglena sp. YARC | 1837 |
| CM039462.1_137202491_2_315079 | family4 | Mariner/Tc1 | Microglena sp. YARC | 1838 |
| CM039462.1_137444825_5_315731 | family5 | IS607 | Microglena sp. YARC | 1839 |
| CM039462.1_137513648_2_315901 | family4 | Mariner/Tc1 | Microglena sp. YARC | 1840 |
| CM039462.1_137537390_2_315960 | family4 | Mariner/Tc1 | Microglena sp. YARC | 1841 |
| CM039462.1_137576902_4_316062 | unclassified | Mariner/Tc1 | Microglena sp. YARC | 1842 |
| CM039462.1_137579820_6_316073 | unclassified | Mariner/Tc1 | Microglena sp. YARC | 1843 |
| CM039462.1_137583157_4_316088 | family4 | Mariner/Tc1 | Microglena sp. YARC | 1844 |
| CM039462.1_137614952_2_316178 | family4 | Mariner/Tc1 | Microglena sp. YARC | 1845 |
| CM039462.1_137631858_3_316216 | unclassified | Mariner/Tc1 | Microglena sp. YARC | 1249 |
| CM039462.1_137674651_4_316351 | family4 | Mariner/Tc1 | Microglena sp. YARC | 1846 |
| CM039462.1_137721268_1_316450 | family4 | Mariner/Tc1 | Microglena sp. YARC | 1847 |
| CM039462.1_137727126_6_316468 | family4 | Mariner/Tc1 | Microglena sp. YARC | 1149 |
| CM039462.1_141136279_4_324017 | unclassified | Mariner/Tc1 | Microglena sp. YARC | 1848 |
| CM039462.1_142137619_1_326505 | family4 | Mariner/Tc1 | Microglena sp. YARC | 1355 |
| CM039462.1_142158054_3_326554 | family4 | Mariner/Tc1 | Microglena sp. YARC | 1356 |
| CM039462.1_142168287_6_326570 | unclassified | Mariner/Tc1 | Microglena sp. YARC | 1357 |
| CM039462.1_142191739_4_326629 | unclassified | Mariner/Tc1 | Microglena sp. YARC | 1849 |
| CM039462.1_142282014_3_326900 | family5 | IS607 | Microglena sp. YARC | 1850 |
| CM039462.1_142297586_5_326952 | family4 | Mariner/Tc1 | Microglena sp. YARC | 1851 |
| CM039462.1_142330645_4_327030 | family5 | IS607 | Microglena sp. YARC | 1852 |
| CM039462.1_143353178_5_329372 | unclassified | Mariner/Tc1 | Microglena sp. YARC | 1853 |
| CM039462.1_143380384_1_329446 | family4 | Mariner/Tc1 | Microglena sp. YARC | 1181 |
| CM039462.1_145878421_4_335432 | family4 | Mariner/Tc1 | Microglena sp. YARC | 1854 |
| CM039462.1_145885818_3_335453 | family5 | IS607 | Microglena sp. YARC | 1855 |
| CM039462.1_145966955_5_335654 | family5 | IS607 | Microglena sp. YARC | 1140 |
| CM039462.1_146010020_5_335760 | family4 | Mariner/Tc1 | Microglena sp. YARC | 1856 |
| CM039462.1_146048210_5_335853 | family5 | IS607 | Microglena sp. YARC | 1857 |
| CM039462.1_146133627_3_336113 | family4 | Mariner/Tc1 | Microglena sp. YARC | 1350 |
| CM039462.1_146136297_6_336119 | unclassified | Mariner/Tc1 | Microglena sp. YARC | 1349 |
| CM039462.1_146144034_6_336151 | family5 | IS607 | Microglena sp. YARC | 1348 |
| CM039462.1_146225188_4_336361 | family4 | Mariner/Tc1 | Microglena sp. YARC | 1858 |
| CM039462.1_146298039_6_336559 | family4 | Mariner/Tc1 | Microglena sp. YARC | 1859 |
| CM039462.1_146307122_5_336581 | family4 | Mariner/Tc1 | Microglena sp. YARC | 1860 |
| CM039462.1_146408830_4_336834 | family4 | Mariner/Tc1 | Microglena sp. YARC | 1861 |
| CM039462.1_146452546_1_336945 | family4 | Mariner/Tc1 | Microglena sp. YARC | 678 |
| CM039462.1_146522238_6_337116 | family5 | IS607 | Microglena sp. YARC | 1862 |
| CM039462.1_146526201_6_337125 | unclassified | Mariner/Tc1 | Microglena sp. YARC | 1863 |
| CM039462.1_147663036_3_339613 | family5 | IS607 | Microglena sp. YARC | 1864 |
| CM039462.1_149172174_3_342762 | unclassified | Mariner/Tc1 | Microglena sp. YARC | 1865 |
| CM039462.1_163848271_4_375762 | family4 | Mariner/Tc1 | Microglena sp. YARC | 1165 |
| CM039462.1_163854120_6_375778 | family4 | Mariner/Tc1 | Microglena sp. YARC | 1164 |
| CM039462.1_163914405_3_375913 | family4 | Mariner/Tc1 | Microglena sp. YARC | 1866 |
| CM039462.1_163931391_6_375957 | family4 | Mariner/Tc1 | Microglena sp. YARC | 1867 |
| CM039462.1_163994027_2_376096 | family4 | Mariner/Tc1 | Microglena sp. YARC | 1868 |
| CM039462.1_164043836_2_376219 | unclassified | Mariner/Tc1 | Microglena sp. YARC | 1869 |
| CM039462.1_168953926_4_387054 | family4 | Mariner/Tc1 | Microglena sp. YARC | 724 |
| CM039462.1_169810634_5_388906 | unclassified | Mariner/Tc1 | Microglena sp. YARC | 1870 |
| CM039462.1_172124906_2_393791 | unclassified | IS607 | Microglena sp. YARC | 1871 |
| CM039462.1_172186310_5_393953 | unclassified | Mariner/Tc1 | Microglena sp. YARC | 1872 |
| CM039462.1_172352067_3_394394 | family4 | Mariner/Tc1 | Microglena sp. YARC | 1873 |
| CM039462.1_175893273_3_401927 | family4 | Mariner/Tc1 | Microglena sp. YARC | 1055 |
| CM039462.1_175965441_6_402256 | family4 | Mariner/Tc1 | Microglena sp. YARC | 1054 |
| CM039462.1_175976830_4_402299 | unclassified | Mariner/Tc1 | Microglena sp. YARC | 1053 |
| CM039462.1_176037924_6_402537 | family5 | IS607 | Microglena sp. YARC | 1052 |
| CM039462.1_183948865_4_421225 | family4 | Mariner/Tc1 | Microglena sp. YARC | 1874 |
| CM039462.1_184018495_4_421415 | unclassified | Mariner/Tc1 | Microglena sp. YARC | 1875 |
| CM039462.1_184052050_1_421511 | family4 | Mariner/Tc1 | Microglena sp. YARC | 1876 |
| CM039462.1_184063565_5_421539 | family4 | Mariner/Tc1 | Microglena sp. YARC | 1877 |
| CM039462.1_184356346_4_422324 | family4 | Mariner/Tc1 | Microglena sp. YARC | 1878 |
| CM039462.1_185424810_6_424836 | unclassified | Mariner/Tc1 | Microglena sp. YARC | 1879 |
| CM039462.1_185559789_6_425220 | family4 | Mariner/Tc1 | Microglena sp. YARC | 1880 |
| CM039462.1_185682306_6_425528 | unclassified | Mariner/Tc1 | Microglena sp. YARC | 1881 |
| CM039462.1_185793540_3_425827 | family5 | IS607 | Microglena sp. YARC | 890 |
| CM039462.1_185806074_6_425853 | family4 | Mariner/Tc1 | Microglena sp. YARC | 891 |
| CM039462.1_186832507_1_428111 | family4 | Mariner/Tc1 | Microglena sp. YARC | 988 |
| CM039462.1_186844989_6_428133 | family4 | Mariner/Tc1 | Microglena sp. YARC | 1882 |
| CM039462.1_187108179_6_428712 | family4 | Mariner/Tc1 | Microglena sp. YARC | 876 |
| CM039462.1_187178816_5_428879 | family4 | Mariner/Tc1 | Microglena sp. YARC | 877 |
| CM039462.1_187359095_2_429217 | unclassified | Mariner/Tc1 | Microglena sp. YARC | 878 |
| CM039462.1_191075463_6_436970 | family4 | Mariner/Tc1 | Microglena sp. YARC | 1374 |
| CM039462.1_191101400_5_437028 | family5 | IS607 | Microglena sp. YARC | 1883 |
| CM039462.1_191229966_6_437353 | unclassified | Mariner/Tc1 | Microglena sp. YARC | 1884 |
| CM039462.1_191242242_3_437386 | family5 | IS607 | Microglena sp. YARC | 1885 |
| CM039462.1_191389064_5_437699 | family5 | unknown | Microglena sp. YARC | 1886 |
| CM039463.1_1588832_2_3840 | family4 | Mariner/Tc1 | Microglena sp. YARC | 1887 |
| CM039463.1_1598251_4_3862 | family4 | Mariner/Tc1 | Microglena sp. YARC | 1888 |
| CM039463.1_1772702_2_4308 | unclassified | Mariner/Tc1 | Microglena sp. YARC | 1889 |
| CM039463.1_1973983_1_4698 | family5 | IS607 | Microglena sp. YARC | 831 |
| CM039463.1_1990304_2_4738 | family4 | Mariner/Tc1 | Microglena sp. YARC | 1890 |
| CM039463.1_9348924_3_21704 | family4 | Mariner/Tc1 | Microglena sp. YARC | 1891 |
| CM039463.1_14616349_1_33398 | family4 | Mariner/Tc1 | Microglena sp. YARC | 1892 |
| CM039463.1_14622533_2_33415 | family4 | Mariner/Tc1 | Microglena sp. YARC | 1378 |
| CM039463.1_28199543_2_63988 | family5 | IS607 | Microglena sp. YARC | 1893 |
| CM039463.1_28230652_1_64085 | family4 | Mariner/Tc1 | Microglena sp. YARC | 1894 |
| CM039463.1_32780382_3_73906 | family4 | Mariner/Tc1 | Microglena sp. YARC | 1075 |
| CM039463.1_32836617_3_74061 | family5 | IS607 | Microglena sp. YARC | 1895 |
| CM039463.1_32838553_4_74066 | family4 | Mariner/Tc1 | Microglena sp. YARC | 1896 |
| CM039463.1_32857391_5_74102 | unclassified | IS607 | Microglena sp. YARC | 1897 |
| CM039463.1_32866590_3_74128 | unclassified | Mariner/Tc1 | Microglena sp. YARC | 1079 |
| CM039463.1_32931061_4_74287 | family5 | IS607 | Microglena sp. YARC | 1080 |
| CM039463.1_36607849_1_82415 | unclassified | Mariner/Tc1 | Microglena sp. YARC | 1898 |
| CM039463.1_36654189_3_82519 | family4 | Mariner/Tc1 | Microglena sp. YARC | 734 |
| CM039463.1_36668561_5_82561 | unclassified | Mariner/Tc1 | Microglena sp. YARC | 1899 |
| CM039463.1_36674827_4_82577 | family4 | Mariner/Tc1 | Microglena sp. YARC | 736 |
| CM039463.1_36676833_3_82580 | unclassified | Mariner/Tc1 | Microglena sp. YARC | 737 |
| CM039463.1_36680987_2_82594 | family4 | Mariner/Tc1 | Microglena sp. YARC | 738 |
| CM039463.1_36685662_3_82604 | family4 | Mariner/Tc1 | Microglena sp. YARC | 739 |
| CM039463.1_36722889_6_82676 | family4 | Mariner/Tc1 | Microglena sp. YARC | 1900 |
| CM039463.1_36735031_1_82715 | family4 | Mariner/Tc1 | Microglena sp. YARC | 1901 |
| CM039463.1_36789529_1_82837 | family4 | Mariner/Tc1 | Microglena sp. YARC | 1902 |
| CM039463.1_37132602_6_83614 | unclassified | Mariner/Tc1 | Microglena sp. YARC | 969 |
| CM039463.1_37142490_6_83654 | family4 | Mariner/Tc1 | Microglena sp. YARC | 968 |
| CM039463.1_37264162_1_83962 | unclassified | Mariner/Tc1 | Microglena sp. YARC | 1903 |
| CM039463.1_37356830_5_84213 | unclassified | Mariner/Tc1 | Microglena sp. YARC | 1904 |
| CM039463.1_37387451_5_84295 | unclassified | Mariner/Tc1 | Microglena sp. YARC | 1245 |
| CM039463.1_37434882_3_84430 | unclassified | unknown | Microglena sp. YARC | 1905 |
| CM039463.1_37826343_6_85351 | family4 | Mariner/Tc1 | Microglena sp. YARC | 1906 |
| CM039463.1_37833514_1_85371 | family4 | Mariner/Tc1 | Microglena sp. YARC | 1064 |
| CM039463.1_37850819_5_85409 | unclassified | Mariner/Tc1 | Microglena sp. YARC | 1907 |
| CM039463.1_37868346_3_85453 | family4 | Mariner/Tc1 | Microglena sp. YARC | 935 |
| CM039463.1_39115744_4_88228 | unclassified | Mariner/Tc1 | Microglena sp. YARC | 1908 |
| CM039463.1_56529578_5_127172 | unclassified | Mariner/Tc1 | Microglena sp. YARC | 1909 |
| CM039463.1_56566336_1_127282 | unclassified | Mariner/Tc1 | Microglena sp. YARC | 1910 |
| CM039463.1_56592773_5_127365 | unclassified | Mariner/Tc1 | Microglena sp. YARC | 803 |
| CM039463.1_56599088_2_127382 | family4 | Mariner/Tc1 | Microglena sp. YARC | 804 |
| CM039463.1_56613749_5_127426 | family4 | Mariner/Tc1 | Microglena sp. YARC | 805 |
| CM039463.1_56631621_6_127472 | unclassified | Mariner/Tc1 | Microglena sp. YARC | 1911 |
| CM039463.1_56652180_3_127518 | unclassified | unknown | Microglena sp. YARC | 807 |
| CM039463.1_56682830_2_127596 | unclassified | Mariner/Tc1 | Microglena sp. YARC | 1912 |
| CM039463.1_56700280_1_127627 | unclassified | Mariner/Tc1 | Microglena sp. YARC | 1913 |
| CM039463.1_56822898_3_127903 | unclassified | Mariner/Tc1 | Microglena sp. YARC | 1914 |
| CM039463.1_57869929_4_130379 | unclassified | Mariner/Tct | Microglena sp. YARC | 1915 |
| CM039463.1_57948169_4_130597 | family5 | IS607 | Microglena sp. YARC | 1916 |
| CM039463.1_63924876_3_144094 | family4 | Mariner/Tc1 | Microglena sp. YARC | 1917 |
| CM039463.1_63929828_2_144104 | family4 | Mariner/Tc1 | Microglena sp. YARC | 1918 |
| CM039463.1_63981595_4_144239 | family4 | Mariner/Tc1 | Microglena sp. YARC | 1919 |
| CM039463.1_68752492_1_155326 | family4 | Mariner/Tc1 | Microglena sp. YARC | 1920 |
| CM039463.1_68858164_1_155608 | unclassified | Mariner/Tc1 | Microglena sp. YARC | 900 |
| CM039463.1_68861854_4_155618 | unclassified | Mariner/Tc1 | Microglena sp. YARC | 901 |
| CM039463.1_69110791_4_156213 | family4 | Mariner/Tc1 | Microglena sp. YARC | 708 |
| CM039463.1_69148708_1_156304 | family4 | Mariner/Tc1 | Microglena sp. YARC | 709 |
| CM039463.1_70260497_2_158556 | unclassified | Mariner/Tc1 | Microglena sp. YARC | 1921 |
| CM039463.1_70263152_2_158561 | family4 | Mariner/Tc1 | Microglena sp. YARC | 1922 |
| CM039463.1_70291501_1_158622 | family4 | Mariner/Tc1 | Microglena sp. YARC | 1923 |
| CM039463.1_70326549_6_158715 | family4 | Mariner/Tc1 | Microglena sp. YARC | 1924 |
| CM039463.1_70336386_3_158735 | family4 | Mariner/Tc1 | Microglena sp. YARC | 1925 |
| CM039463.1_70675561_4_159437 | family4 | Mariner/Tc1 | Microglena sp. YARC | 1926 |
| CM039463.1_71891984_2_161996 | family5 | IS607 | Microglena sp. YARC | 1927 |
| CM039463.1_73098696_6_165011 | family5 | IS607 | Microglena sp. YARC | 1341 |
| CM039463.1_73116353_2_165043 | family4 | Mariner/Tc1 | Microglena sp. YARC | 1342 |
| CM039463.1_73128144_6_165066 | family5 | IS607 | Microglena sp. YARC | 1928 |
| CM039463.1_76914760_1_173591 | unclassified | Mariner/Tc1 | Microglena sp. YARC | 1929 |
| CM039463.1_76917724_1_173604 | family4 | Mariner/Tc1 | Microglena sp. YARC | 913 |
| CM039463.1_77142861_3_174064 | family4 | Mariner/Tc1 | Microglena sp. YARC | 1930 |
| CM039463.1_77216293_4_174242 | unclassified | Mariner/Tc1 | Microglena sp. YARC | 1931 |
| CM039463.1_77233215_3_174288 | family4 | Mariner/Tc1 | Microglena sp. YARC | 1932 |
| CM039463.1_77375455_1_174600 | family4 | Mariner/Tc1 | Microglena sp. YARC | 697 |
| CM039463.1_77381126_5_174607 | unclassified | Mariner/Tc1 | Microglena sp. YARC | 1933 |
| CM039463.1_78402025_4_177094 | unclassified | Mariner/Tc1 | Microglena sp. YARC | 1248 |
| CM039463.1_78417360_3_177136 | family4 | Mariner/Tc1 | Microglena sp. YARC | 1247 |
| CM039463.1_78425375_5_177149 | family4 | Mariner/Tc1 | Microglena sp. YARC | 1934 |
| CM039463.1_88492068_3_199603 | family4 | Mariner/Tc1 | Microglena sp. YARC | 1935 |
| CM039463.1_88623240_6_199945 | family4 | Mariner/Tc1 | Microglena sp. YARC | 1936 |
| CM039463.1_88689373_4_200111 | unclassified | Mariner/Tc1 | Microglena sp. YARC | 1937 |
| CM039463.1_88923134_5_200626 | unclassified | Mariner/Tc1 | Microglena sp. YARC | 944 |
| CM039463.1_91408370_2_206169 | unclassified | Mariner/Tc1 | Microglena sp. YARC | 938 |
| CM039463.1_91420549_4_206196 | unclassified | Mariner/Tc1 | Microglena sp. YARC | 1938 |
| CM039463.1_91440935_5_206237 | unclassified | Mariner/Tc1 | Microglena sp. YARC | 941 |
| CM039463.1_91456183_1_206273 | unclassified | Mariner/Tc1 | Microglena sp. YARC | 942 |
| CM039463.1_91462393_1_206293 | family5 | IS607 | Microglena sp. YARC | 943 |
| CM039463.1_93984378_6_211988 | family4 | Mariner/Tc1 | Microglena sp. YARC | 684 |
| CM039463.1_94322306_5_212747 | family5 | IS607 | Microglena sp. YARC | 950 |
| CM039464.1_449195_5_911 | unclassified | Mariner/Tc1 | Microglena sp. YARC | 1939 |
| CM039464.1_573760_4_1210 | unclassified | unknown | Microglena sp. YARC | 1940 |
| CM039464.1_691367_5_1529 | family5 | IS607 | Microglena sp. YARC | 1941 |
| CM039464.1_3061229_5_7154 | unclassified | Mariner/Tc1 | Microglena sp. YARC | 1049 |
| CM039464.1_3106535_2_7262 | family4 | Mariner/Tc1 | Microglena sp. YARC | 1942 |
| CM039464.1_4261009_4_10029 | family4 | Mariner/Tc1 | Microglena sp. YARC | 1265 |
| CM039464.1_5729745_6_13361 | family5 | unknown | Microglena sp. YARC | 1943 |
| CM039464.1_10265989_4_24318 | family4 | Mariner/Tc1 | Microglena sp. YARC | 1944 |
| CM039464.1_10365120_3_24625 | family5 | IS607 | Microglena sp. YARC | 1945 |
| CM039464.1_10366407_6_24632 | unclassified | Mariner/Tc1 | Microglena sp. YARC | 1946 |
| CM039464.1_10372156_4_24647 | family5 | IS607 | Microglena sp. YARC | 1947 |
| CM039464.1_10403242_4_24707 | unclassified | Mariner/Tc1 | Microglena sp. YARC | 1948 |
| CM039464.1_10433154_6_24770 | family4 | Mariner/Tc1 | Microglena sp. YARC | 1949 |
| CM039464.1_10454557_1_24827 | unclassified | Mariner/Tc1 | Microglena sp. YARC | 1950 |
| CM039464.1_11043782_2_26217 | family4 | Mariner/Tc1 | Microglena sp. YARC | 1136 |
| CM039464.1_11136667_4_26453 | unclassified | Mariner/Tc1 | Microglena sp. YARC | 1239 |
| CM039464.1_11142852_6_26471 | unclassified | Mariner/Tc1 | Microglena sp. YARC | 1951 |
| CM039464.1_12393097_4_29375 | family4 | Mariner/Tc1 | Microglena sp. YARC | 1952 |
| CM039464.1_12407178_3_29425 | family4 | Mariner/Tc1 | Microglena sp. YARC | 1953 |
| CM039464.1_12411615_6_29436 | unclassified | Mariner/Tc1 | Microglena sp. YARC | 1954 |
| CM039464.1_12597484_4_29958 | unclassified | Mariner/Tc1 | Microglena sp. YARC | 1955 |
| CM039464.1_12605074_1_29982 | unclassified | Mariner/Tc1 | Microglena sp. YARC | 1101 |
| CM039464.1_14511460_4_34219 | unclassified | Mariner/Tc1 | Microglena sp. YARC | 957 |
| CM039464.1_14535778_1_34283 | family4 | Mariner/Tc1 | Microglena sp. YARC | 1956 |
| CM039464.1_14551431_3_34335 | family4 | Mariner/Tc1 | Microglena sp. YARC | 1957 |
| CM039464.1_17322250_4_40832 | family4 | Mariner/Tc1 | Microglena sp. YARC | 1280 |
| CM039464.1_17342371_1_40879 | unclassified | IS607 | Microglena sp. YARC | 1279 |
| CM039464.1_17379351_3_40971 | unclassified | Mariner/Tc1 | Microglena sp. YARC | 1958 |
| CM039464.1_17394468_3_41016 | unclassified | Mariner/Tc1 | Microglena sp. YARC | 1959 |
| CM039464.1_17407464_6_41053 | unclassified | Mariner/Tc1 | Microglena sp. YARC | 1175 |
| CM039464.1_17606318_2_41553 | family4 | Mariner/Tc1 | Microglena sp. YARC | 1960 |
| CM039464.1_17713756_1_41828 | family4 | Mariner/Tc1 | Microglena sp. YARC | 664 |
| CM039464.1_17844828_3_42154 | unclassified | IS607 | Microglena sp. YARC | 769 |
| CM039464.1_17892731_5_42275 | unclassified | Mariner/Tc1 | Microglena sp. YARC | 768 |
| CM039464.1_23779201_1_55230 | family4 | Mariner/Tc1 | Microglena sp. YARC | 1371 |
| CM039464.1_23857414_4_55419 | family4 | Mariner/Tc1 | Microglena sp. YARC | 1961 |
| CM039464.1_23885619_6_55491 | unclassified | unknown | Microglena sp. YARC | 1962 |
| CM039464.1_24007835_2_55810 | family4 | Mariner/Tc1 | Microglena sp. YARC | 1963 |
| CM039464.1_24107105_5_56071 | family4 | Mariner/Tc1 | Microglena sp. YARC | 897 |
| CM039464.1_24145038_6_56165 | unclassified | Mariner/Tc1 | Microglena sp. YARC | 1964 |
| CM039464.1_34550204_5_79959 | family5 | IS607 | Microglena sp. YARC | 1171 |
| CM039464.1_34564963_4_80000 | unclassified | Mariner/Tc1 | Microglena sp. YARC | 1965 |
| CM039464.1_35019026_5_80962 | family5 | IS607 | Microglena sp. YARC | 852 |
| CM039464.1_35086661_2_81155 | family5 | IS607 | Microglena sp. YARC | 1159 |
| CM039464.1_35253349_1_81565 | family5 | IS607 | Microglena sp. YARC | 1966 |
| CM039464.1_35629686_6_82458 | family4 | Mariner/Tc1 | Microglena sp. YARC | 838 |
| CM039464.1_35635444_4_82466 | family4 | Mariner/Tc1 | Microglena sp. YARC | 839 |
| CM039464.1_35657785_1_82519 | family4 | Mariner/Tc1 | Microglena sp. YARC | 840 |
| CM039464.1_35664213_6_82532 | unclassified | Mariner/Tc1 | Microglena sp. YARC | 1967 |
| CM039464.1_35710894_1_82645 | family4 | Mariner/Tc1 | Microglena sp. YARC | 842 |
| CM039464.1_35784101_5_82844 | family4 | Mariner/Tc1 | Microglena sp. YARC | 1968 |
| CM039464.1_35850816_6_83004 | family4 | Mariner/Tc1 | Microglena sp. YARC | 1969 |
| CM039464.1_35936407_1_83229 | family4 | Mariner/Tc1 | Microglena sp. YARC | 713 |
| CM039464.1_36216278_2_83914 | family4 | Mariner/Tc1 | Microglena sp. YARC | 1970 |
| CM039464.1_36237883_1_83970 | family4 | Mariner/Tc1 | Microglena sp. YARC | 1345 |
| CM039464.1_36241772_2_83977 | unclassified | Mariner/Tc1 | Microglena sp. YARC | 1971 |
| CM039464.1_36244315_1_83986 | unclassified | Mariner/Tc1 | Microglena sp. YARC | 1972 |
| CM039464.1_36303234_3_84155 | unclassified | Mariner/Tc1 | Microglena sp. YARC | 1332 |
| CM039464.1_39671318_5_91754 | family5 | IS607 | Microglena sp. YARC | 1973 |
| CM039464.1_39707167_4_91872 | family5 | IS607 | Microglena sp. YARC | 1974 |
| CM039464.1_39782805_3_92074 | family4 | Mariner/Tc1 | Microglena sp. YARC | 1975 |
| CM039464.1_39797363_5_92108 | unclassified | Mariner/Tc1 | Microglena sp. YARC | 695 |
| CM039464.1_39880780_4_92339 | unclassified | Mariner/Tc1 | Microglena sp. YARC | 1976 |
| CM039464.1_39900061_4_92400 | family5 | IS607 | Microglena sp. YARC | 1318 |
| CM039464.1_41804927_5_96750 | family5 | unknown | Microglena sp. YARC | 1977 |
| CM039464.1_42073281_3_97153 | family5 | unknown | Microglena sp. YARC | 1978 |
| CM039464.1_42692696_5_98198 | family4 | Mariner/Tc1 | Microglena sp. YARC | 1208 |
| CM039464.1_42918013_4_98677 | family4 | Mariner/Tc1 | Microglena sp. YARC | 1095 |
| CM039464.1_42931916_5_98714 | unclassified | Mariner/Tc1 | Microglena sp. YARC | 1979 |
| CM039464.1_42988036_4_98862 | unclassified | Mariner/Tc1 | Microglena sp. YARC | 1093 |
| CM039464.1_42992884_4_98878 | family4 | Mariner/Tc1 | Microglena sp. YARC | 1980 |
| CM039464.1_45722913_6_105123 | unclassified | Mariner/Tc1 | Microglena sp. YARC | 1981 |
| CM039464.1_45755487_6_105206 | family4 | Mariner/Tc1 | Microglena sp. YARC | 1982 |
| CM039464.1_45759482_5_105218 | family4 | Mariner/Tc1 | Microglena sp. YARC | 1983 |
| CM039464.1_45765250_4_105233 | family4 | Mariner/Tc1 | Microglena sp. YARC | 1984 |
| CM039464.1_48679391_2_111658 | unclassified | Mariner/Tc1 | Microglena sp. YARC | 994 |
| CM039464.1_48733025_2_111792 | unclassified | Mariner/Tc1 | Microglena sp. YARC | 993 |
| CM039464.1_48831833_2_112022 | family5 | IS607 | Microglena sp. YARC | 1032 |
| CM039464.1_48834116_2_112028 | family4 | Mariner/Tc1 | Microglena sp. YARC | 1031 |
| CM039464.1_48865462_1_112101 | family5 | IS607 | Microglena sp. YARC | 1030 |
| CM039464.1_52066047_3_119022 | family5 | IS607 | Microglena sp. YARC | 1985 |
| CM039464.1_52139632_4_119191 | unclassified | Mariner/Tc1 | Microglena sp. YARC | 1986 |
| CM039464.1_52145525_2_119212 | family4 | Mariner/Tc1 | Microglena sp. YARC | 1987 |
| CM039464.1_52187773_1_119329 | family5 | IS607 | Microglena sp. YARC | 1988 |
| CM039464.1_52195540_4_119349 | family4 | Mariner/Tc1 | Microglena sp. YARC | 1098 |
| CM039464.1_52197404_2_119352 | unclassified | Mariner/Tc1 | Microglena sp. YARC | 1099 |
| CM039464.1_52201480_1_119362 | family4 | Mariner/Tc1 | Microglena sp. YARC | 1100 |
| CM039464.1_53162408_2_121712 | family4 | Mariner/Tc1 | Microglena sp. YARC | 1989 |
| CM039464.1_53169043_1_121727 | family4 | Mariner/Tc1 | Microglena sp. YARC | 1990 |
| CM039464.1_53179034_2_121752 | unclassified | Mariner/Tc1 | Microglena sp. YARC | 1991 |
| CM039464.1_53818943_2_123220 | family4 | Mariner/Tc1 | Microglena sp. YARC | 1328 |
| CM039464.1_53889056_5_123398 | unclassified | Mariner/Tc1 | Microglena sp. YARC | 1992 |
| CM039464.1_53918631_6_123502 | family4 | Mariner/Tc1 | Microglena sp. YARC | 1993 |
| CM039464.1_54027360_6_123787 | unclassified | Mariner/Tc1 | Microglena sp. YARC | 1994 |
| CM039464.1_54084045_3_123931 | unclassified | Mariner/Tc1 | Microglena sp. YARC | 1995 |
| CM039464.1_54099092_5_123971 | family4 | Mariner/Tc1 | Microglena sp. YARC | 1996 |
| CM039464.1_54138189_6_124076 | unclassified | Mariner/Tc1 | Microglena sp. YARC | 1997 |
| CM039464.1_54174905_5_124196 | unclassified | Mariner/Tc1 | Microglena sp. YARC | 1998 |
| CM039464.1_54304847_2_124539 | unclassified | Mariner/Tc1 | Microglena sp. YARC | 1999 |
| CM039464.1_54608427_6_125233 | family4 | Mariner/Tc1 | Microglena sp. YARC | 2000 |
| CM039464.1_54665680_1_125365 | family4 | Mariner/Tc1 | Microglena sp. YARC | 2001 |
| CM039464.1_57433535_5_131736 | unclassified | Mariner/Tc1 | Microglena sp. YARC | 845 |
| CM039464.1_57452930_5_131786 | unclassified | Mariner/Tc1 | Microglena sp. YARC | 2002 |
| CM039464.1_57664813_4_132271 | unclassified | Mariner/Tc1 | Microglena sp. YARC | 2003 |
| CM039464.1_57741543_6_132475 | family5 | IS607 | Microglena sp. YARC | 2004 |
| CM039464.1_57750225_3_132503 | family4 | Mariner/Tc1 | Microglena sp. YARC | 1143 |
| CM039464.1_58106207_5_133391 | family5 | IS607 | Microglena sp. YARC | 2005 |
| CM039464.1_58112613_6_133407 | family4 | Mariner/Tc1 | Microglena sp. YARC | 2006 |
| CM039464.1_59480561_5_136631 | unclassified | Mariner/Tc1 | Microglena sp. YARC | 1020 |
| CM039464.1_59526985_1_136743 | family4 | Mariner/Tc1 | Microglena sp. YARC | 2007 |
| CM039464.1_59529662_5_136749 | family4 | Mariner/Tc1 | Microglena sp. YARC | 1277 |
| CM039464.1_59549447_2_136791 | family4 | Mariner/Tc1 | Microglena sp. YARC | 2008 |
| CM039464.1_61051663_1_140566 | family4 | Mariner/Tc1 | Microglena sp. YARC | 1334 |
| CM039464.1_61184376_6_140923 | family4 | Mariner/Tc1 | Microglena sp. YARC | 2009 |
| CM039464.1_61211987_5_141008 | unclassified | Mariner/Tc1 | Microglena sp. YARC | 2010 |
| CM039464.1_61221718_4_141043 | family4 | Mariner/Tc1 | Microglena sp. YARC | 2011 |
| CM039464.1_62984483_5_145329 | unclassified | Mariner/Tc1 | Microglena sp. YARC | 2012 |
| CM039465.1_4439274_3_9938 | family4 | Mariner/Tc1 | Microglena sp. YARC | 875 |
| CM039465.1_4839838_1_10956 | family5 | IS607 | Microglena sp. YARC | 1234 |
| CM039465.1_4906063_4_11131 | family4 | Mariner/Tc1 | Microglena sp. YARC | 2013 |
| CM039465.1_10348923_6_23854 | family4 | Mariner/Tc1 | Microglena sp. YARC | 2014 |
| CM039465.1_10940437_4_25175 | unclassified | Mariner/Tc1 | Microglena sp. YARC | 982 |
| CM039465.1_10952261_2_25212 | family5 | IS607 | Microglena sp. YARC | 2015 |
| CM039465.1_11155058_5_25701 | unclassified | Mariner/Tc1 | Microglena sp. YARC | 2016 |
| CM039465.1_11167877_5_25733 | unclassified | Mariner/Tc1 | Microglena sp. YARC | 2017 |
| CM039465.1_11178366_6_25765 | family5 | IS607 | Microglena sp. YARC | 2018 |
| CM039465.1_11295713_5_26086 | family4 | Mariner/Tc1 | Microglena sp. YARC | 963 |
| CM039465.1_11369500_1_26283 | family4 | Mariner/Tc1 | Microglena sp. YARC | 2019 |
| CM039465.1_11419102_4_26403 | unclassified | Mariner/Tc1 | Microglena sp. YARC | 733 |
| CM039465.1_11435923_4_26442 | unclassified | Mariner/Tc1 | Microglena sp. YARC | 2020 |
| CM039465.1_11502092_2_26558 | family4 | Mariner/Tc1 | Microglena sp. YARC | 1045 |
| CM039465.1_11896068_3_27572 | unclassified | IS607 | Microglena sp. YARC | 2021 |
| CM039465.1_11907779_2_27601 | family4 | Mariner/Tc1 | Microglena sp. YARC | 1046 |
| CM039465.1_11929702_4_27648 | unclassified | Mariner/Tc1 | Microglena sp. YARC | 1047 |
| CM039465.1_25306341_3_56517 | family5 | IS607 | Microglena sp. YARC | 1325 |
| CM039465.1_26931948_6_60253 | family4 | Mariner/Tc1 | Microglena sp. YARC | 1115 |
| CM039465.1_26970049_1_60359 | family4 | Mariner/Tc1 | Microglena sp. YARC | 1303 |
| CM039465.1_26982568_4_60394 | unclassified | Mariner/Tc1 | Microglena sp. YARC | 2022 |
| CM039465.1_27406194_3_61423 | family5 | IS607 | Microglena sp. YARC | 793 |
| CM039465.1_27422352_3_61463 | unclassified | Mariner/Tc1 | Microglena sp. YARC | 2023 |
| CM039465.1_27580979_5_61910 | family5 | IS607 | Microglena sp. YARC | 1058 |
| CM039465.1_27601028_5_61961 | family4 | Mariner/Tc1 | Microglena sp. YARC | 825 |
| CM039465.1_28476337_4_64011 | unclassified | Mariner/Tc1 | Microglena sp. YARC | 2024 |
| CM039465.1_28497174_3_64069 | family5 | IS607 | Microglena sp. YARC | 1016 |
| CM039465.1_28963410_6_65284 | family5 | IS607 | Microglena sp. YARC | 2025 |
| CM039465.1_29067687_6_65597 | unclassified | Mariner/Tc1 | Microglena sp. YARC | 2026 |
| CM039465.1_29080032_6_65619 | family4 | Mariner/Tc1 | Microglena sp. YARC | 2027 |
| CM039465.1_29098606_4_65652 | family5 | IS607 | Microglena sp. YARC | 2028 |
| CM039465.1_33580177_4_76004 | unclassified | Mariner/Tc1 | Microglena sp. YARC | 2029 |
| CM039465.1_33596359_4_76048 | family4 | Mariner/Tc1 | Microglena sp. YARC | 2030 |
| CM039465.1_33637045_4_76149 | family4 | Mariner/Tc1 | Microglena sp. YARC | 2031 |
| CM039465.1_33664420_1_76223 | family4 | Mariner/Tc1 | Microglena sp. YARC | 2032 |
| CM039465.1_33691381_4_76295 | family4 | unknown | Microglena sp. YARC | 2033 |
| CM039465.1_48380507_5_110054 | unclassified | IS607 | Microglena sp. YARC | 2034 |
| CM039465.1_48480507_6_110316 | family4 | Mariner/Tc1 | Microglena sp. YARC | 2035 |
| CM039465.1_48653295_6_110738 | family4 | Mariner/Tc1 | Microglena sp. YARC | 936 |
| CM039465.1_48810186_6_111128 | family4 | Mariner/Tc1 | Microglena sp. YARC | 2036 |
| CM039465.1_48866791_1_111286 | unclassified | Mariner/Tc1 | Microglena sp. YARC | 2037 |
| CM039465.1_48975698_2_111598 | unclassified | Mariner/Tc1 | Microglena sp. YARC | 2038 |
| CM039465.1_48984572_5_111620 | family4 | Mariner/Tc1 | Microglena sp. YARC | 2039 |
| CM039465.1_48987998_5_111633 | family4 | Mariner/Tc1 | Microglena sp. YARC | 2040 |
| CM039465.1_49022605_1_111725 | family4 | Mariner/Tc1 | Microglena sp. YARC | 2041 |
| CM039465.1_49137077_2_112004 | unclassified | Mariner/Tc1 | Microglena sp. YARC | 2042 |
| CM039465.1_51223600_4_116961 | family4 | Mariner/Tc1 | Microglena sp. YARC | 2043 |
| CM039465.1_52903439_2_120984 | family4 | Mariner/Tc1 | Microglena sp. YARC | 720 |
| CM039465.1_53007362_5_121271 | unclassified | IS607 | Microglena sp. YARC | 721 |
| CM039465.1_53028523_1_121317 | unclassified | Mariner/Tc1 | Microglena sp. YARC | 2044 |
| CM039465.1_56256353_5_128460 | family5 | IS607 | Microglena sp. YARC | 707 |
| CM039465.1_56291352_3_128538 | unclassified | Mariner/Tc1 | Microglena sp. YARC | 1302 |
| CM039466.1_12958_4_39 | unclassified | Mariner/Tc1 | Microglena sp. YARC | 2045 |
| CM039466.1_16037_5_47 | unclassified | Mariner/Tc1 | Microglena sp. YARC | 1041 |
| CM039466.1_17040_6_50 | family4 | Mariner/Tc1 | Microglena sp. YARC | 1040 |
| CM039466.1_84985_4_235 | family4 | Mariner/Tc1 | Microglena sp. YARC | 2046 |
| CM039466.1_145981_4_399 | family5 | IS607 | Microglena sp. YARC | 1236 |
| CM039466.1_202377_6_563 | family4 | Mariner/Tc1 | Microglena sp. YARC | 2047 |
| CM039466.1_1061720_5_2627 | family4 | Mariner/Tc1 | Microglena sp. YARC | 2048 |
| CM039466.1_1074002_5_2656 | family4 | Mariner/Tc1 | Microglena sp. YARC | 1109 |
| CM039466.1_3848501_2_8969 | family4 | Mariner/Tc1 | Microglena sp. YARC | 1368 |
| CM039466.1_3870711_3_9039 | unclassified | Mariner/Tc1 | Microglena sp. YARC | 813 |
| CM039466.1_3890438_5_9091 | unclassified | Mariner/Tc1 | Microglena sp. YARC | 2049 |
| CM039466.1_3986232_3_9366 | family4 | Mariner/Tc1 | Microglena sp. YARC | 715 |
| CM039466.1_4745383_1_10954 | family4 | Mariner/Tc1 | Microglena sp. YARC | 2050 |
| CM039466.1_4756636_1_10982 | unclassified | Mariner/Tc1 | Microglena sp. YARC | 2051 |
| CM039466.1_4786577_5_11058 | family4 | Mariner/Tc1 | Microglena sp. YARC | 922 |
| CM039466.1_4803886_1_11104 | family4 | Mariner/Tc1 | Microglena sp. YARC | 2052 |
| CM039466.1_4834693_1_11166 | unclassified | Mariner/Tc1 | Microglena sp. YARC | 2053 |
| CM039466.1_7450300_4_17184 | family4 | Mariner/Tc1 | Microglena sp. YARC | 2054 |
| CM039466.1_14707331_2_33484 | unclassified | Mariner/Tc1 | Microglena sp. YARC | 874 |
| CM039466.1_15156346_4_34546 | unclassified | Mariner/Tc1 | Microglena sp. YARC | 718 |
| CM039466.1_15217696_4_34699 | unclassified | Mariner/Tc1 | Microglena sp. YARC | 2055 |
| CM039466.1_15225193_1_34725 | family5 | IS607 | Microglena sp. YARC | 756 |
| CM039466.1_15241373_2_34764 | family4 | Mariner/Tc1 | Microglena sp. YARC | 2056 |
| CM039466.1_15247788_6_34777 | unclassified | Mariner/Tc1 | Microglena sp. YARC | 2057 |
| CM039466.1_15275052_3_34882 | unclassified | Mariner/Tc1 | Microglena sp. YARC | 2058 |
| CM039466.1_17015178_6_38907 | unclassified | IS607 | Microglena sp. YARC | 2059 |
| CM039466.1_17031537_3_38952 | family4 | Mariner/Tc1 | Microglena sp. YARC | 855 |
| CM039466.1_17107400_2_39132 | unclassified | Mariner/Tc1 | Microglena sp. YARC | 2060 |
| CM039466.1_17119316_5_39168 | unclassified | Mariner/Tc1 | Microglena sp. YARC | 961 |
| CM039466.1_17232700_1_39504 | family4 | Mariner/Tc1 | Microglena sp. YARC | 2061 |
| CM039466.1_18802313_5_43152 | unclassified | Mariner/Tc1 | Microglena sp. YARC | 2062 |
| CM039466.1_20891439_6_47990 | unclassified | Mariner/Tc1 | Microglena sp. YARC | 2063 |
| CM039466.1_21013398_3_48256 | family4 | Mariner/Tc1 | Microglena sp. YARC | 1299 |
| CM039466.1_21028427_2_48300 | family4 | Mariner/Tc1 | Microglena sp. YARC | 2064 |
| CM039466.1_21190072_4_48711 | family4 | Mariner/Tc1 | Microglena sp. YARC | 2065 |
| CM039466.1_21193969_1_48720 | unclassified | Mariner/Tc1 | Microglena sp. YARC | 1364 |
| CM039466.1_27841342_1_65046 | family4 | Mariner/Tc1 | Microglena sp. YARC | 867 |
| CM039466.1_27845776_1_65050 | unclassified | Mariner/Tc1 | Microglena sp. YARC | 868 |
| CM039466.1_27866417_2_65096 | unclassified | Mariner/Tc1 | Microglena sp. YARC | 2066 |
| CM039466.1_27881805_3_65131 | unclassified | Mariner/Tc1 | Microglena sp. YARC | 2067 |
| CM039466.1_27925100_5_65241 | family4 | Mariner/Tc1 | Microglena sp. YARC | 971 |
| CM039466.1_27953247_3_65312 | unclassified | Mariner/Tc1 | Microglena sp. YARC | 2068 |
| CM039466.1_27979958_5_65384 | family4 | Mariner/Tc1 | Microglena sp. YARC | 2069 |
| CM039466.1_28589543_5_66931 | family4 | Mariner/Tc1 | Microglena sp. YARC | 1292 |
| CM039466.1_28650842_2_67072 | family4 | Mariner/Tc1 | Microglena sp. YARC | 1291 |
| CM039466.1_28722372_6_67203 | unclassified | Mariner/Tc1 | Microglena sp. YARC | 1289 |
| CM039466.1_32084178_6_74583 | unclassified | Mariner/Tc1 | Microglena sp. YARC | 2070 |
| CM039466.1_32119215_3_74673 | family4 | Mariner/Tc1 | Microglena sp. YARC | 2071 |
| CM039466.1_32131567_1_74696 | unclassified | Mariner/Tc1 | Microglena sp. YARC | 2072 |
| CM039466.1_32186532_6_74863 | unclassified | Mariner/Tc1 | Microglena sp. YARC | 703 |
| CM039466.1_32358964_4_75271 | family4 | Mariner/Tc1 | Microglena sp. YARC | 2073 |
| CM039466.1_32815020_6_76406 | family5 | IS607 | Microglena sp. YARC | 1132 |
| CM039466.1_33001448_5_76832 | family4 | Mariner/Tc1 | Microglena sp. YARC | 2074 |
| CM039466.1_33010429_4_76848 | unclassified | Mariner/Tc1 | Microglena sp. YARC | 2075 |
| CM039466.1_33024811_4_76884 | family4 | Mariner/Tc1 | Microglena sp. YARC | 2076 |
| CM039466.1_33038585_5_76913 | unclassified | Mariner/Tc1 | Microglena sp. YARC | 2077 |
| CM039466.1_33048315_6_76938 | family4 | Mariner/Tc1 | Microglena sp. YARC | 1062 |
| CM039466.1_34400167_1_79908 | family4 | Mariner/Tc1 | Microglena sp. YARC | 1300 |
| CM039466.1_34917209_5_81026 | family4 | Mariner/Tc1 | Microglena sp. YARC | 2078 |
| CM039466.1_35025868_1_81258 | family5 | IS607 | Microglena sp. YARC | 911 |
| CM039466.1_35959679_5_83412 | unclassified | Mariner/Tc1 | Microglena sp. YARC | 1033 |
| CM039466.1_36029224_4_83584 | family5 | IS607 | Microglena sp. YARC | 2079 |
| CM039466.1_36040839_6_83613 | family4 | Mariner/Tc1 | Microglena sp. YARC | 2080 |
| CM039466.1_36296036_2_84243 | family4 | Mariner/Tc1 | Microglena sp. YARC | 2081 |
| CM039466.1_36350363_5_84395 | family4 | Mariner/Tc1 | Microglena sp. YARC | 2082 |
| CM039466.1_36371999_5_84450 | unclassified | Mariner/Tc1 | Microglena sp. YARC | 2083 |
| CM039466.1_36503771_2_84834 | family4 | Mariner/Tc1 | Microglena sp. YARC | 2084 |
| CM039466.1_37070274_6_86196 | family4 | Mariner/Tc1 | Microglena sp. YARC | 895 |
| CM039466.1_37108816_4_86292 | unclassified | Mariner/Tc1 | Microglena sp. YARC | 2085 |
| CM039466.1_40093895_2_93160 | family4 | Mariner/Tc1 | Microglena sp. YARC | 821 |
| CM039466.1_40169843_5_93351 | unclassified | Mariner/Tc1 | Microglena sp. YARC | 1278 |
| CM039466.1_42352090_4_98266 | family4 | Mariner/Tc1 | Microglena sp. YARC | 775 |
| CM039466.1_43654536_3_101362 | family4 | Mariner/Tc1 | Microglena sp. YARC | 2086 |
| CM039466.1_44094820_4_102490 | family4 | Mariner/Tc1 | Microglena sp. YARC | 2087 |
| CM039466.1_44107973_5_102516 | family4 | Mariner/Tc1 | Microglena sp. YARC | 2088 |
| CM039466.1_45622909_4_105948 | unclassified | Mariner/Tc1 | Microglena sp. YARC | 2089 |
| CM039466.1_45633706_1_105978 | family5 | IS607 | Microglena sp. YARC | 2090 |
| CM039467.1_12518741_2_28084 | unclassified | Mariner/Tc1 | Microglena sp. YARC | 1215 |
| CM039467.1_12593160_6_28322 | family4 | Mariner/Tc1 | Microglena sp. YARC | 1214 |
| CM039467.1_12690978_3_28592 | family4 | Mariner/Tc1 | Microglena sp. YARC | 1213 |
| CM039467.1_12813068_5_28995 | unclassified | unknown | Microglena sp. YARC | 1212 |
| CM039467.1_12898923_3_29261 | family4 | Mariner/Tc1 | Microglena sp. YARC | 1211 |
| CM039467.1_12918310_4_29313 | family4 | Mariner/Tc1 | Microglena sp. YARC | 1210 |
| CM039467.1_14781650_5_33730 | family5 | IS607 | Microglena sp. YARC | 1376 |
| CM039467.1_17422057_1_39399 | unclassified | Mariner/Tc1 | Microglena sp. YARC | 2091 |
| CM039467.1_17491532_5_39571 | family4 | Mariner/Tc1 | Microglena sp. YARC | 2092 |
| CM039467.1_18432288_3_41656 | unclassified | Mariner/Tc1 | Microglena sp. YARC | 2093 |
| JAJSRW010002068.1_18336_3_63 | family4 | Mariner/Tc1 | Microglena sp. YARC | 2094 |
| JAJSRW010002068.1_22699_1_74 | unclassified | Mariner/Tc1 | Microglena sp. YARC | 853 |
| JAJSRW010002068.1_53855_5_136 | family5 | IS607 | Microglena sp. YARC | 2095 |
| JAJSRW010002070.1_20041_1_54 | family4 | Mariner/Tc1 | Microglena sp. YARC | 2096 |
| JAJSRW010002071.1_45795_6_88 | family5 | unknown | Microglena sp. YARC | 1233 |
| JAJSRW010002071.1_82893_6_161 | family5 | unknown | Microglena sp. YARC | 2097 |
| JAJSRW010002071.1_90536_2_173 | family5 | unknown | Microglena sp. YARC | 2098 |
| JAJSRW010002078.1_46994_5_126 | unclassified | Mariner/Tc1 | Microglena sp. YARC | 2099 |
| JAJSRW010002093.1_71750_5_179 | family4 | Mariner/Tc1 | Microglena sp. YARC | 2100 |
| JAJSRW010002097.1_15544_1_48 | family4 | Mariner/Tc1 | Microglena sp. YARC | 2101 |
| JAJSRW010002099.1_25729_1_74 | unclassified | Mariner/Tc1 | Microglena sp. YARC | 694 |
| JAJSRW010002100.1_27945_6_79 | family5 | IS607 | Microglena sp. YARC | 2102 |
| JAJSRW010002100.1_45807_6_128 | unclassified | Mariner/Tc1 | Microglena sp. YARC | 2103 |
| JAJSRW010002102.1_26906_2_105 | family4 | Mariner/Tc1 | Microglena sp. YARC | 862 |
| JAJSRW010002102.1_33392_5_122 | family4 | Mariner/Tc1 | Microglena sp. YARC | 2104 |
| JAJSRW010002102.1_61350_6_190 | unclassified | Mariner/Tc1 | Microglena sp. YARC | 2105 |
| JAJSRW010002102.1_81043_4_259 | family4 | Mariner/Tc1 | Microglena sp. YARC | 2106 |
| JAJSRW010002102.1_92013_3_286 | unclassified | Mariner/Tc1 | Microglena sp. YARC | 2107 |
| JAJSRW010002102.1_112756_1_331 | unclassified | Mariner/Tc1 | Microglena sp. YARC | 2108 |
| JAJSRW010002103.1_52865_5_112 | family4 | Mariner/Tc1 | Microglena sp. YARC | 2109 |
| JAJSRW010002103.1_62730_3_136 | family4 | Mariner/Tc1 | Microglena sp. YARC | 2110 |
| JAJSRW010002103.1_80901_3_196 | unclassified | Mariner/Tc1 | Microglena sp. YARC | 2111 |
| JAJSRW010002105.1_44713_1_121 | family4 | Mariner/Tc1 | Microglena sp. YARC | 2112 |
| JAJSRW010002105.1_48150_6_126 | family5 | IS607 | Microglena sp. YARC | 2113 |
| JAJSRW010002105.1_56043_6_152 | unclassified | Mariner/Tc1 | Microglena sp. YARC | 2114 |
| JAJSRW010002107.1_35840_5_95 | unclassified | Mariner/Tc1 | Microglena sp. YARC | 2115 |
| JAJSRW010002108.1_42165_3_113 | family4 | Mariner/Tc1 | Microglena sp. YARC | 2116 |
| JAJSRW010002110.1_29106_6_76 | family4 | Mariner/Tc1 | Microglena sp. YARC | 1124 |
| JAJSRW010002112.1_122951_5_338 | family4 | Mariner/Tc1 | Microglena sp. YARC | 691 |
| JAJSRW010002112.1_134701_4_374 | unclassified | Mariner/Tc1 | Microglena sp. YARC | 2117 |
| JAJSRW010002114.1_9183_3_30 | unclassified | Mariner/Tc1 | Microglena sp. YARC | 2118 |
| JAJSRW010002115.1_26359_1_70 | unclassified | IS607 | Microglena sp. YARC | 2119 |
| JAJSRW010002116.1_17026_1_50 | family4 | Mariner/Tc1 | Microglena sp. YARC | 2120 |
| JAJSRW010002116.1_40973_2_120 | family4 | Mariner/Tc1 | Microglena sp. YARC | 2121 |
| JAJSRW010002119.1_74090_5_162 | family5 | unknown | Microglena sp. YARC | 2122 |
| JAJSRW010002123.1_15298_1_48 | unclassified | Mariner/Tc1 | Microglena sp. YARC | 2123 |
| JAJSRW010002123.1_71171_5_210 | family4 | Mariner/Tc1 | Microglena sp. YARC | 682 |
| JAJSRW010002124.1_17872_4_62 | family4 | Mariner/Tc1 | Microglena sp. YARC | 2124 |
| JAJSRW010002124.1_23819_2_76 | family4 | Mariner/Tc1 | Microglena sp. YARC | 1198 |
| JAJSRW010002126.1_20403_3_71 | unclassified | Mariner/Tc1 | Microglena sp. YARC | 2125 |
| JAJSRW010002126.1_68593_1_215 | unclassified | Mariner/Tc1 | Microglena sp. YARC | 2126 |
| JAJSRW010002131.1_51113_5_114 | family5 | IS607 | Microglena sp. YARC | 2127 |
| JAJSRW010002131.1_117488_2_278 | family4 | Mariner/Tc1 | Microglena sp. YARC | 1216 |
| JAJSRW010002133.1_53479_1_135 | unclassified | Mariner/Tc1 | Microglena sp. YARC | 2128 |
| JAJSRW010002139.1_29996_5_106 | family5 | unknown | Microglena sp. YARC | 1268 |
| JAJSRW010002140.1_35645_5_104 | unclassified | Mariner/Tc1 | Microglena sp. YARC | 702 |
| JAJSRW010002140.1_67697_2_198 | family4 | Mariner/Tc1 | Microglena sp. YARC | 2129 |
| JAJSRW010002140.1_95375_2_269 | unclassified | Mariner/Tc1 | Microglena sp. YARC | 2130 |
| JAJSRW010002151.1_43633_1_110 | unclassified | Mariner/Tc1 | Microglena sp. YARC | 2131 |
| JAJSRW010002151.1_59026_4_148 | family4 | Mariner/Tc1 | Microglena sp. YARC | 1952 |
| JAJSRW010002161.1_32003_5_92 | family4 | Mariner/Tc1 | Microglena sp. YARC | 2132 |
| JAJSRW010002165.1_43943_2_113 | unclassified | Mariner/Tc1 | Microglena sp. YARC | 1271 |
| JAJSRW010002168.1_49803_6_124 | unclassified | Mariner/Tc1 | Microglena sp. YARC | 2133 |
| JAJSRW010002182.1_62081_2_183 | unclassified | IS607 | Microglena sp. YARC | 2134 |
| JAJSRW010002191.1_23720_5_56 | family4 | Mariner/Tc1 | Microglena sp. YARC | 2135 |
| JAJSRW010002191.1_31248_3_77 | family4 | Mariner/Tc1 | Microglena sp. YARC | 2136 |
| JAJSRW010002195.1_29437_4_77 | unclassified | Mariner/Tc1 | Microglena sp. YARC | 1135 |
| JAJSRW010002195.1_56931_3_141 | family4 | Mariner/Tc1 | Microglena sp. YARC | 2137 |
| JAJSRW010002195.1_83294_2_214 | unclassified | Mariner/Tc1 | Microglena sp. YARC | 2138 |
| JAJSRW010002197.1_80731_1_234 | family5 | IS607 | Microglena sp. YARC | 1380 |
| JAJSRW010002198.1_39995_5_97 | unclassified | Mariner/Tc1 | Microglena sp. YARC | 2139 |
| JAJSRW010002200.1_95564_2_223 | family4 | Mariner/Tc1 | Microglena sp. YARC | 902 |
| CM039490.1_62841016_1_53409 | unclassified | unknown | Begonia | 2140 |
| | | | darthvaderiana | |
| CM039490.1_63088165_4_53711 | unclassified | unknown | Begonia | 2141 |
| | | | darthvaderiana | |
| JAGQDJ010000018.1_353756_2_454 | unclassified | unknown | Triops longicaudatus | 2142 |
| CP060766.1_73181_2_355 | unclassified | unknown | Chloropicon primus | 2143 |
| JAACYD010000781.1_41413_1_61 | unclassified | unknown | Idolea baltica | 2144 |
| JALECJ010000056.1_1304101_1_5508 | family3 | unknown | Amoeboaphelidium | 2145 |
| | | | protococcarum | |
| JALGPX010000001.1_206429_5_296 | family5 | unknown | Amoeboaphelidium | 2146 |
| | | | occidentale | |
| JALGPX010000009.1_84762_3_114 | family4 | unknown | Amoeboaphelidium | 2147 |
| | | | occidentale | |
| LT558118.1_1089397_4_3235 | unclassified | unknown | Ustilago bromivora | 2148 |
| LT558125.1_307719_3_909 | unclassified | unknown | Ustilago bromivora | 2149 |
| LT558131.1_555784_1_1527 | unclassified | unknown | Ustilago bromivora | 2150 |
| FLTE01000131 1_271672_1_464 | unclassified | unknown | Synstelium | 2151 |
| | | | polycarpum | |
| FNXT01000187.1_52941_6_192 | unclassified | unknown | Tetradesmus obliquus | 2152 |
| FWWN02000687.1_94321_1_227 | unclassified | unknown | Rhizomucor pusillus | 2153 |
| FWWN02000640.1_42265_4_81 | unclassified | unknown | Rhizomucor pusillus | 2154 |
| FWWN02000620.1_62395_1_108 | unclassified | unknown | Rhizomucor pusillus | 2155 |
| FWWN02000177.1_67963_4_138 | unclassified | unknown | Rhizomucor pusillus | 2156 |
| CACKRE030000584.1_61786_4_165 | family4 | IS4 | Ectocarpus sp. CCAP | 2157 |
| | | | 1310/34 | |
| CACKRE030004767.1_46922_2_168 | family5 | unknown | Ectocarpus sp. CCAP | 2158 |
| | | | 11310/34 | |
| CADDIJ020000232.1_32486_2_108 | unclassified | unknown | Tetradesmus | 2159 |
| | | | acuminalus | |
| CADDIJ020000741.1_41266_6_141 | unclassified | unknown | Tetradesmus | 2160 |
| | | | acuminalus | |
| CADDIJ020001268.1_115815_6_435 | unclassified | unknown | Tetradesmus | 2161 |
| | | | acuminalus | |
| CADDIJ020001736.1_17018_2_64 | unclassified | unknown | Tetradesmus | 2162 |
| | | | acuminalus | |
| CADDIJ020002159.1_73176_3_221 | unclassified | unknown | Tetradesmus | 2163 |
| | | | acuminalus | |
| CADDIJ020002770.1_19498_1_68 | unclassified | unknown | Tetradesmus | 2164 |
| | | | acuminalus | |
| CADDIJ020002999.1_216400_1_758 | unclassified | unknown | Tetradesmus | 2165 |
| | | | acuminalus | |
| CADDIJ020003124.1_33989_2_120 | unclassified | unknown | Tetradesmus | 2166 |
| | | | acuminalus | |
| CAJHJB010000002.1_315622_4_1352 | family5 | unknown | Tilletia controversa | 2167 |
| CAJHJB010000009.1_720_6_11 | family5 | unknown | Tilletia controversa | 2168 |
| CAJHJB010000035.1_266014_1_1073 | family5 | unknown | Tilletia controversa | 2169 |
| CAJHJB010000051 1_47859_6_211 | family5 | unknown | Tilletia controversa | 2168 |
| CAJHJB010000109 1_36402_6_125 | unclassified | unknown | Tilletia controversa | 2170 |
| CAJHJB010000135.1_51369_3_181 | family5 | unknown | Tilletia controversa | 2171 |
| CAJHJB010000143.1_26191_1_123 | family5 | unknown | Tilletia controversa | 2172 |
| CAJHJB010000167.1_5129_5_8 | unclassified | unknown | Tilletia controversa | 2173 |
| CAJHJB010000167.1_10794_3_32 | unclassified | unknown | Tilletia controversa | 2174 |
| CAJHJB010000218.1_37962_6_147 | family5 | unknown | Tilletia controversa | 2175 |
| CAJHJB010000246.1_33770_5_110 | family5 | unknown | Tilletia controversa | 2176 |
| CAJHJB010000756.1_148064_5_614 | family5 | unknown | Tilletia controversa | 2177 |
| CAJHJB010000845.1_82511_2_394 | family5 | unknown | Tilletia controversa | 2178 |
| CAJHJB010000889.1_160720_4_632 | family5 | unknown | Tilletia controversa | 2179 |
| CAJHJB010000934.1_23178_3_107 | family5 | unknown | Tilletia controversa | 2180 |
| LR990144.1_15470604_6_6974 | family3 | piggyBac | Hypena proboscidalis | 2181 |
| LR990156.1_6348400_4_3123 | unclassified | piggyBac | Hypena proboscidalis | 2182 |
| LR990290.1_10715894_2_7980 | unclassified | unknown | Apotomis turbidana | 2183 |
| LR990641.1_17052915_3_12022 | unclassified | unknown | Xestia xanthographa | 2184 |
| LR990987.1_23094022_4_16049 | unclassified | unknown | Mamestra brassicae | 2185 |
| LR990957.1_10044645_6_4715 | unclassified | piggyBac | Craniophora ligustri | 2186 |
| HG995345.1_6920748_3_3704 | family3 | piggyBac | Lysandra bellargus | 2187 |
| HG995376.1_23632887_6_19441 | unclassified | unknown | Atethmia centrago | 2188 |
| HG995366.1_16439652_3_12552 | family3 | unknown | Atethmia centrago | 2189 |
| ER997763.1_13047692_2_5630 | unclassified | unknown | Autographa pulchrina | 2190 |
| OU015445.1_6964487_5_3876 | unclassified | piggyBac | Hemaris fuciformis | 2191 |
| CAJRHG030000010.1_5292338_5_3815 | unclassified | unknown | Tenebrio molitor | 2192 |
| CAJRHG030000011.1_8344601_5_7808 | family3 | unknown | Tenebrio molitor | 2193 |
| CAJRHG030000013.1_2823539_5_2432 | family3 | unknown | Tenebrio molitor | 2194 |
| OU342882.1_4482313_1_2764 | family3 | unknown | Cydia splendana | 2195 |
| OU452166.1_17889430_4_9894 | unclassified | unknown | Peribalodes | 2196 |
| | | | rhomboidaria | |
| OU452290.1_6483053_2_3337 | unclassified | unknown | Pammene fasciana | 2197 |
| OU611751.1_16674410_2_41785 | unclassified | unknown | Dunaliella primolecta | 2198 |
| OU611752.1_8064371_2_19946 | unclassified | unknown | Dunaliella primolecta | 2199 |
| OU611753.1_9386196_3_23418 | unclassified | unknown | Dunaliella primolecta | 2200 |
| OU611754.1_3916533_6_8736 | unclassified | unknown | Dunaliella primolecta | 2201 |
| OU611754.1_12193117_1_29223 | unclassified | unknown | Dunaliella primolecta | 2202 |
| OU611755.1_5492748_6_13787 | unclassified | unknown | Dunaliella primolecta | 2203 |
| OU611755.1_7258767_6_18100 | unclassified | unknown | Dunaliella primolecta | 2204 |
| OU611758.1_10936003_1_28455 | unclassified | unknown | Dunaliella primolecta | 2205 |
| OU611761 1_2441050_4_6499 | unclassified | unknown | Dunaliella primolecta | 2206 |
| OU611765 1_1944247_4_5031 | unclassified | unknown | Dunaliella primolecta | 2207 |
| OU696529 1_122718565_4_55048 | unclassified | unknown | Bellardia pandia | 2208 |
| OU696530.1_88951801_1_44085 | family3 | unknown | Bellardia pandia | 2209 |
| OU696531.1_1786231_1_704 | unclassified | unknown | Bellardia pandia | 2210 |
| OU696533.1_88379_5_33 | family3 | unknown | Bellardia pandia | 2211 |
| OU696533.1_2511258_3_1134 | family3 | unknown | Bellardia pandia | 2212 |
| OU696533.1_38208038_2_16505 | family3 | unknown | Bellardia pandia | 2213 |
| OU696696.1_375352889_2_316571 | family4 | unknown | Platycheirus | 2214 |
| | | | albimanus | |
| OU696697 1_4649761_4_2742 | family4 | unknown | Platycheirus | 2215 |
| | | | albimanus | |
| OU696697 1_5373854_2_3162 | unclassified | unknown | Platycheirus | 2216 |
| | | | albimanus | |
| OU696697.1_5435451_6_3198 | family4 | unknown | Platycheirus | 2217 |
| | | | albimanus | |
| OU696697.1_6470271_6_3828 | unclassified | unknown | Platycheirus | 2218 |
| | | | albimanus | |
| OU696697.1_6497693_2_3848 | unclassified | unknown | Platycheirus | 2219 |
| | | | albimanus | |
| OU696697.1_21151095_3_11983 | family4 | unknown | Platycheirus | 2220 |
| | | | albimanus | |
| OU696697.1_21257757_3_12055 | family4 | unknown | Platycheirus | 2221 |
| | | | albimanus | |
| OU696697.1_21307357_1_12091 | family4 | unknown | Platycheirus | 2222 |
| | | | albimanus | |
| OU696697.1_22384492_1_12742 | family4 | unknown | Platycheirus | 2223 |
| | | | albimanus | |
| OU696697.1_22437156_3_12770 | family4 | unknown | Platycheirus | 2224 |
| | | | albimanus | |
| OU696697.1_22452981_3_12788 | family4 | unknown | Platycheirus | 2225 |
| | | | albimanus | |
| OU696697.1_121532515_4_78212 | unclassified | unknown | Platycheirus | 2226 |
| | | | albimanus | |
| OU696697.1_121535647_4_78222 | unclassified | unknown | Platycheirus | 2227 |
| | | | albimanus | |
| OU696697.1_121546975_4_78276 | unclassified | unknown | Platycheirus | 2228 |
| | | | albimanus | |
| OU696697.1_121550225_5_78288 | unclassified | unknown | Platycheirus | 2226 |
| | | | albimanus | |
| OU696697.1_121560806_5_78334 | unclassified | unknown | Platycheirus | 2228 |
| | | | albimanus | |
| OU696698 1_8312763_6_4802 | family4 | unknown | Platycheirus | 2229 |
| | | | albimanus | |
| OU696698 1_8526516_3_4929 | family4 | unknown | Platycheirus | 2230 |
| | | | albimanus | |
| OU696698.1_8596261_4_4970 | unclassified | unknown | Platycheirus | 2231 |
| | | | albimanus | |
| OU696698.1_100758981_3_67308 | unclassified | unknown | Platycheirus | 2232 |
| | | | albimanus | |
| OU744725.1_24778934_2_10911 | unclassified | unknown | Steromphala cineraria | 2233 |
| OU823241.1_12160417_1_8379 | unclassified | unknown | Dryobotodes eremita | 2234 |
| OU975421 1_14036330_2_9776 | unclassified | unknown | Philereme vetulata | 2235 |
| OV884057.1_148167706_1_74176 | family3 | unknown | Pollenia angustigena | 2236 |
| OV884058.1_2455944_6_913 | unclassified | unknown | Pollenia angustigena | 2237 |
| OV884058.1_2463781_4_918 | family3 | unknown | Pollenia angustigena | 2238 |
| OV884058.1_94029593_5_45213 | unclassified | unknown | Pollenia angustigena | 2239 |
| OV884058.1_124449286_1_57897 | family3 | unknown | Pollenia angustigena | 2240 |
| OV884058.1_212556054_6_95683 | family3 | unknown | Pollenia angustigena | 2241 |
| OV884058.1_217672309_4_97957 | unclassified | unknown | Pollenia angustigena | 2242 |
| OV884058.1_243306972_6_109355 | family3 | unknown | Pollenia angustigena | 2243 |
| OV884059.1_177581582_5_79627 | unclassified | unknown | Pollenia angustigena | 2244 |
| OV884059.1_226742220_6_101264 | family3 | unknown | Pollenia angustigena | 2245 |
| OV884060.1_32324967_6_13191 | family3 | unknown | Pollenia angustigena | 2246 |
| OV884060.1_32654732_2_13370 | family3 | unknown | Pollenia angustigena | 2247 |
| OV884060.1_32656789_1_13372 | family3 | unknown | Pollenia angustigena | 2247 |
| OV884060.1_32658846_3_13374 | family3 | unknown | Pollenia angustigena | 2248 |
| OV884060.1_32660904_3_13376 | family3 | unknown | Pollenia angustigena | 2248 |
| OV884060.1_32683232_2_13392 | family3 | unknown | Pollenia angustigena | 2249 |
| OV884060.1_32688207_3_13398 | family3 | unknown | Pollenia angustigena | 2250 |
| OV884060.1_32708276_2_13425 | family3 | unknown | Pollenia angustigena | 2251 |
| OV884060.1_32769627_6_13446 | family3 | unknown | Pollenia angustigena | 2252 |
| OV884060.1_157679136_3_73911 | family3 | unknown | Pollenia angustigena | 2253 |
| OV884040.1_14032954_4_6861 | unclassified | unknown | Catocala fraxini | 2254 |
| OW026303.1_14540834_2_8993 | unclassified | unknown | Apotomis betuletana | 2255 |
| OW026308.1_20354177_2_12300 | unclassified | unknown | Apotomis betuletana | 2256 |
| OW052042.1_359571_6_94 | family3 | unknown | Bombylius major | 2257 |
| OW052042.1_11860252_4_3919 | unclassified | unknown | Bombylius major | 2258 |
| OW052042.1_40075472_2_15407 | family3 | unknown | Bombylius major | 2259 |
| OW052042.1_56282901_3_19892 | family3 | unknown | Bombylius major | 2260 |
| OW052043.1_9169345_1_3262 | unclassified | unknown | Bombylius major | 2261 |
| OW052043.1_57259907_5_23240 | family3 | unknown | Bombylius major | 2262 |
| OW052044.1_8625502_1_2553 | family3 | unknown | Bombylius major | 2263 |
| OW052044.1_15368148_3_4847 | unclassified | unknown | Bombylius major | 2264 |
| OW052044.1_23283994_1_8802 | unclassified | unknown | Bombylius major | 2265 |
| OW052044.1_29469103_4_12349 | unclassified | unknown | Bombylius major | 2266 |
| OW052044.1_32858613_3_13389 | unclassified | unknown | Bombylius major | 2267 |
| OW052044.1_42514672_4_16121 | family3 | unknown | Bombylius major | 2268 |
| OW052045.1_11565571_4_4509 | unclassified | unknown | Bombylius major | 2269 |
| OW052045.1_22911446_5_11574 | unclassified | unknown | Bombylius major | 2270 |
| OW052045.1_43185518_5_18154 | unclassified | unknown | Bombylius major | 2271 |
| OW052047.1_20615730_6_8523 | unclassified | unknown | Bombylius major | 2272 |
| OW052220.1_103777_1_75 | family3 | unknown | Nephrotoma | 2273 |
| | | | flavescens | |
| OW052220.1_352909_4_249 | family3 | unknown | Nephrotoma | 2274 |
| | | | flavescens | |
| OW052220.1_1374574_1_736 | unclassified | unknown | Nephrotoma | 2275 |
| | | | flavescens | |
| OW052220.1_324383564_2_195355 | family3 | unknown | Nephrotoma | 2276 |
| | | | flavescens | |
| OW052220.1_330255010_1_197695 | family3 | unknown | Nephrotoma | 2277 |
| | | | flavescens | |
| OW052220.1_333618568_1_198871 | family3 | unknown | Nephrotoma | 2278 |
| | | | flavescens | |
| OW052220.1_333678690_6_198899 | family3 | unknown | Nephrotoma | 2279 |
| | | | flavescens | |
| OW052220.1_333971084_2_199020 | family3 | unknown | Nephrotoma | 2280 |
| | | | flavescens | |
| OW052220.1_334246756_1_199133 | family3 | unknown | Nephrotoma | 2280 |
| | | | flavescens | |
| OW052221.1_3144297_6_1635 | unclassified | unknown | Nephrotoma | 2281 |
| | | | flavescens | |
| OW052221.1_3171763_4_1643 | family3 | unknown | Nephrotoma | 2282 |
| | | | flavescens | |
| CAKOBK010000114.1_9300_6_18 | family3 | unknown | Nephrotoma | 2283 |
| | | | flavescens | |
| CAKOBK010000114.1_22155_3_40 | family3 | unknown | Nephrotoma | 2284 |
| | | | flavescens | |
| CAKOBK010000114.1_93166_1_155 | family3 | unknown | Nephrotoma | 2285 |
| | | | flavescens | |
| CAKOBK010000114.1_169618_1_265 | family3 | unknown | Nephrotoma | 2286 |
| | | | flavescens | |
| NW_004798738.1_19868_5_27 | unclassified | unknown | Aplysia californica | 2287 |
| NW_004798738.1_82777_4_128 | unclassified | unknown | Aplysia californica | 2288 |
| NC_057014.1_27970_1_92 | unclassified | Helitron | Chlamydomonas | 2289 |
| | | | reinhardtii | |
| NC_057019.1_77870_2_383 | unclassified | unknown | Chlamydomonas | 2290 |
| | | | reinhardtii | |
| NC_010127.1_364856_5_1239 | unclassified | unknown | Cyanidioschyzon | 2291 |
| | | | merolae strain 10D | |
| NC_010128.1_60098_2_223 | unclassified | unknown | Cyanidioschyzon | 2292 |
| | | | merolae strain 10D | |
| NC_010131.1_12642_3_40 | unclassified | unknown | Cyanidioschyzon | 2293 |
| | | | merolae strain 10D | |
| NC_010132.1_21102_3_61 | unclassified | unknown | Cyanidioschyzon | 2294 |
| | | | merolae strain 10D | |
| NC_010133.1_86856_6_298 | unclassified | unknown | Cyanidioschyzon | 2295 |
| | | | merolae strain 10D | |
| NC_010133.1_571856_5_1932 | unclassified | unknown | Cyanidioschyzon | 2296 |
| | | | merolae strain 10D | |
| NC_010134.1_88734_6_254 | unclassified | unknown | Cyanidioschyzon | 2297 |
| | | | merolae strain 10D | |
| NC_010134.1_97200_3_281 | unclassified | Bunknown | Cyanidioschyzon | 2297 |
| | | | merolae strain 10D | |
| NC_010134.1_518890_1_1807 | unclassified | unknown | Cyanidioschyzon | 2298 |
| | | | merolae strain 10D | |
| NC_010135.1_746164_1_2741 | unclassified | unknown | Cyanidioschyzon | 2299 |
| | | | merolae strain 10D | |
| NC_010136.1_21014_2_56 | unclassified | unknown | Cyanidioschyzon | 2300 |
| | | | merolae strain 10D | |
| NC_010136.1_139297_1_519 | unclassified | unknown | Cyanidioschyzon | 2301 |
| | | | merolae strain 10D | |
| NC_010136.1_344292_6_1149 | family4 | unknown | Cyanidioschyzon | 2302 |
| | | | merolae strain 10D | |
| NC_010137.1_843931_4_2744 | unclassified | unknown | Cyanidioschyzon | 2303 |
| | | | merolae strain 10D | |
| NC_010139.1_233118_3_856 | unclassified | unknown | Cyanidioschyzon | 2304 |
| | | | merolae strain 10D | |
| NC_010140.1_30208_1_118 | unclassified | unknown | Cyanidioschyzon | 2305 |
| | | | merolae strain 10D | |
| NC_010140.1_57967_4_226 | family4 | unknown | Cyanidioschyzon | 2306 |
| | | | merolae strain 10D | |
| NC_010140.1_472361_2_1837 | unclassified | unknown | Cyanidioschyzon | 2307 |
| | | | merolae strain 10D | |
| NC_010142.1_494581_4_1718 | unclassified | unknown | Cyanidioschyzon | 2308 |
| | | | merolae strain 10D | |
| NC_010142.1_495245_2_1722 | unclassified | unknown | Cyanidioschyzon | 2309 |
| | | | merolae strain 10D | |
| NC_010142.1_899086_4_3103 | unclassified | unknown | Cyanidioschyzon | 2310 |
| | | | merolae strain 10D | |
| NC_010143.1_85707_6_351 | unclassified | unknown | Cyanidioschyzon | 2311 |
| | | | merolae strain 10D | |
| NC_010143.1_319058_2_1182 | unclassified | unknown | Cyanidioschyzon | 2312 |
| | | | merolae strain 10D | |
| NC_010143.1_976487_2_3369 | unclassified | unknown | Cyanidioschyzon | 2313 |
| | | | merolae strain 10D | |
| NC_010144.1_905613_6_3290 | unclassified | unknown | Cyanidioschyzon | 2314 |
| | | | merolae strain 10D | |
| NC_010145.1_572836_1_1917 | unclassified | unknown | Cyanidioschyzon | 2315 |
| | | | merolae strain 10D | |
| NC_010146.1_33513_3_95 | unclassified | unknown | Cyanidioschyzon | 2316 |
| | | | merolae strain 10D | |
| NC_010146.1_57576_3_178 | family4 | unknown | Cyanidioschyzon | 2317 |
| | | | merolae strain 10D | |
| NC_010146.1_346620_3_1254 | unclassified | unknown | Cyanidioschyzon | 2318 |
| | | | merolae strain 10D | |
| NC_010146.1_483534_6_1788 | unclassified | unknown | Cyanidioschyzon | 2319 |
| | | | merolae strain 10D | |
| NC_010146.1_1279735_1_4460 | unclassified | unknown | Cyanidioschyzon | 2320 |
| | | | merolae strain 10D | |
| NW_003307638.1_32923_4_104 | unclassified | unknown | Volvox carteri f. | 2321 |
| | | | nagariensis | |
| NW_009258115.1_4665889_1_13545 | family5 | unknown | Phytophthora sojae | 2322 |
| NW_009258115.1_11645283_3_35380 | family4 | unknown | Phytophthora sojae | 2323 |
| NW_009258116.1_3029766_6_10045 | unclassified | unknown | Phytophthora sojae | 2324 |
| NW_009258116.1_3933880_1_12948 | unclassified | unknown | Phytophthora sojae | 2325 |
| NW_009258117.1_1847063_2_5835 | family4 | unknown | Phytophthora sojae | 2326 |
| NW_009258117.1_6534831_3_21101 | unclassified | unknown | Phytophthora sojae | 2327 |
| NW_009258117.1_7059781_1_22842 | family5 | unknown | Phytophthora sojae | 2328 |
| NW_009258117.1_7116462_3_23026 | family5 | unknown | Phytophthora sojae | 2329 |
| NW_009258118.1_1500687_3_5049 | family5 | unknown | Phytophthora sojae | 2330 |
| NW_009258118.1_4153015_4_13575 | family4 | unknown | Phytophthora sojae | 2331 |
| NW_009258118.1_6646713_6_21481 | unclassified | unknown | Phytophthora sojae | 2332 |
| NW_009258118.1_7274323_4_23547 | unclassified | unknown | Phytophthora sojae | 2333 |
| NW_009258122.1_255893_2_803 | family5 | unknown | Phytophthora sojae | 2334 |
| NW_009258123.1_2622011_2_8155 | family5 | unknown | Phytophthora sojae | 2335 |
| NW_015971538.1_1627117_1_3505 | family4 | unknown | Spizellomyces | 2336 |
| | | | punctatus DAOM | |
| | | | BR117 | |
| NW_015971539.1_198643_1_427 | family4 | unknown | Spizellomyces | 2337 |
| | | | punctatus DAOM | |
| | | | BR117 | |
| NW_015971542.1_131400_6_306 | unclassified | unknown | Spizellomyces | 2338 |
| | | | punctatus DAOM | |
| | | | BR117 | |
| NW_015971545.1_617499_6_1320 | family4 | unknown | Spizellomyces | 2339 |
| | | | punctatus DAOM | |
| | | | BR117 | |
| NW_015971545.1_622552_4_1324 | unclassified | unknown | Spizellomyces | 2340 |
| | | | punctatus DAOM | |
| | | | BR117 | |
| NW_015971546.1_4074_3_10 | family4 | unknown | Spizellomyces | 2341 |
| | | | punctatus DAOM | |
| | | | BR117 | |
| NW_015971548.1_419588_2_898 | family4 | unknown | Spizellomyces | 2342 |
| | | | punctatus DAOM | |
| | | | BR117 | |
| NW_015971553.1_447470_2_968 | unclassified | unknown | Spizellomyces | 2343 |
| | | | punctatus DAOM | |
| | | | BR117 | |
| NC_014441.2_526880_5_2151 | unclassified | unknown | Ostreococcus tauri | 2344 |
| NW_008649015.1_134594_5_217 | family5 | unknown | Phytophthora | 2345 |
| | | | parasitica INRA-310 | |
| NW_008649045.1_214921_1_371 | unclassified | unknown | Phytophthora | 395 |
| | | | parasitica INRA-310 | |
| NW_008649051.1_28492_4_56 | family5 | unknown | Phytophthora | 2346 |
| | | | parasitica INRA-310 | |
| NW_005434673.1_175242_6_504 | family4 | unknown | Guillardia theta | 2347 |
| | | | CCMP2712 | |
| NW_005434668.1_871817_2_2570 | family4 | unknown | Guillardia theta | 2348 |
| | | | CCMP2712 | |
| NW_005434660.1_603797_5_1830 | family4 | unknown | Guillardia theta | 2349 |
| | | | CCMP2712 | |
| NW_005434651.1_691267_1_2142 | unclassified | unknown | Guillardia theta | 2350 |
| | | | CCMP2712 | |
| NW_005434648.1_55050_3_204 | family4 | unknown | Guillardia theta | 2351 |
| | | | CCMP2712 | |
| NW_005434648.1_575129_2_1898 | family4 | unknown | Guillardia theta | 2352 |
| | | | CCMP2712 | |
| NW_005434645.1_422824_4_1595 | unclassified | unknown | Guillardia theta | 2353 |
| | | | CCMP2712 | |
| NW_005434644.1_317610_3_1058 | unclassified | unknown | Guillardia theta | 2354 |
| | | | CCMP2712 | |
| NW_005434644.1_445998_6_1527 | family4 | unknown | Guillardia theta | 2355 |
| | | | CCMP2712 | |
| NW_005434636.1_468164_2_1381 | unclassified | unknown | Guillardia theta | 2356 |
| | | | CCMP2712 | |
| NW_005434634.1_187331_2_552 | unclassified | unknown | Guillardia theta | 2357 |
| | | | CCMP2712 | |
| NW_005434617.1_46377_6_166 | unclassified | unknown | Guillardia theta | 2358 |
| | | | CCMP2712 | |
| NW_005434613.1_489973_1_1671 | unclassified | unknown | Guillardia theta | 2359 |
| | | | CCMP2712 | |
| NW_005434612.1_131751_3_370 | family4 | unknown | Guillardia theta | 2360 |
| | | | CCMP2712 | |
| NW_005434610.1_327841_4_1104 | family4 | unknown | Guillardia theta | 2361 |
| | | | CCMP2712 | |
| NW_005434602.1_356483_2_1116 | family4 | unknown | Guillardia theta | 2362 |
| | | | CCMP2712 | |
| NW_005434596.1_48128_2_126 | family4 | unknown | Guillardia theta | 2363 |
| | | | CCMP2712 | |
| NW_005434592.1_64737_6_237 | unclassified | unknown | Guillardia theta | 2364 |
| | | | CCMP2712 | |
| NW_005434587.1_35046_3_109 | unclassified | unknown | Guillardia theta | 2365 |
| | | | CCMP2712 | |
| NW_005434576.1_19880_2_73 | unclassified | unknown | Guillardia theta | 2366 |
| | | | CCMP2712 | |
| NW_005434563.1_12197_5_32 | unclassified | unknown | Guillardia theta | 2367 |
| | | | CCMP2712 | |
| NW_005434473.1_4422_6_12 | family4 | unknown | Guillardia theta | 2368 |
| | | | CCMP2712 | |
| NW_005434430.1_24602_5_72 | unclassified | unknown | Guillardia theta | 2369 |
| | | | CCMP2712 | |
| NW_019379526.1_355390_4_582 | unclassified | unknown | Copidosoma | 2370 |
| | | | floridanum | |
| NW_019379541.1_757978_4_1070 | unclassified | unknown | Copidosoma | 2371 |
| | | | floridanum | |
| NW_019379561.1_331890_6_707 | unclassified | unknown | Copidosoma | 2372 |
| | | | floridanum | |
| NW_019379654.1_586405_4_767 | unclassified | unknown | Copidosoma | 2373 |
| | | | floridanum | |
| NW_011934124.1_225826_4_1259 | unclassified | unknown | Auxenochlorella | 2374 |
| | | | protothecoides | |
| NW_011934162.1_13_1_3 | unclassified | unknown | Auxenochlorella | 2375 |
| | | | protothecoides | |
| NW_011934167.1_111439_1_636 | unclassified | unknown | Auxenochlorella | 2376 |
| | | | protothecoides | |
| NW_011934226.1_284848_4_1515 | unclassified | unknown | Auxenochlorella | 2377 |
| | | | protothecoides | |
| NW_011934296.1_237836_5_1146 | unclassified | unknown | Auxenochlorella | 2378 |
| | | | protothecoides | |
| NW_011934300.1_66264_6_366 | unclassified | unknown | Auxenochlorella | 2379 |
| | | | protothecoides | |
| NW_011934357.1_21122_5_106 | unclassified | unknown | Auxenochlorella | 2380 |
| | | | protothecoides | |
| NW_011934406.1_110349_3_581 | unclassified | unknown | Auxenochlorella | 2381 |
| | | | protothecoides | |
| NW_011934417.1_57_3_3 | unclassified | unknown | Auxenochlorella | 2382 |
| | | | protothecoides | |
| NW_011934417.1_43869_6_271 | family4 | unknown | Auxenochlorella | 2383 |
| | | | protothecoides | |
| NW_011934462.1_3882_3_28 | unclassified | unknown | Auxenochlorella | 2384 |
| | | | protothecoides | |
| NW_011934477.1_93_3_2 | unclassified | unknown | Auxenochlorella | 2385 |
| | | | protothecoides | |
| NW_014040339.1_29645_2_65 | unclassified | unknown | Sphaeroforma arctica | 2386 |
| | | | JP610 | |
| NW_014040101.1_52326_3_121 | family5 | unknown | Sphaeroforma arctica | 2387 |
| | | | JP610 | |
| NW_017803909.1_397602_3_440 | family5 | unknown | Branchiostoma | 2388 |
| | | | belcher | |
| NW_017265158.1_440352_6_537 | unclassified | unknown | Phycomyces | 2389 |
| | | | blakesleeanus NRRL | |
| | | | 1555(−) | |
| NW_016157086.1_196307_2_163 | family3 | unknown | Rhagoletis zephyria | 2390 |
| NW_016157319.1_279127_1_222 | family3 | unknown | Rhagoletis zephyria | 2391 |
| NW_016157664.1_218365_4_151 | unclassified | unknown | Rhagoletis zephyria | 2392 |
| NW_016158268.1_10368_3_9 | unclassified | unknown | Rhagoletis zephyria | 2393 |
| NW_019671917.1_810622_4_971 | unclassified | unknown | Rhizopus microsporus | 2394 |
| | | | ATCC 52813 | |
| NW_019671917.1_1003277_5_1208 | unclassified | Helitron | Rhizopus microsporus | 2395 |
| | | | ATCC 52813 | |
| NW_019671925.1_396996_6_522 | unclassified | unknown | Rhizopus microsporus | 2396 |
| | | | ATCC 52813 | |
| NW_019671942.1_40339_4_54 | unclassified | unknown | Rhizopus microsporus | 2397 |
| | | | ATCC 52813 | |
| NW_022197436.1_3920722_4_2806 | unclassified | unknown | Contarinia nasturtii | 2398 |
| NW_022197486.1_364771_1_318 | unclassified | hAT | Contarinia nasturtii | 2399 |
| NW_022197486.1_13592901_6_10734 | unclassified | unknown | Contarinia nasturtii | 2400 |
| NW_022197544.1_7420857_6_5679 | unclassified | unknown | Contarinia nasturtii | 2401 |
| NW_022197544.1_9326175_3_7115 | unclassified | EnSpm/CAC | Contarinia nasturtii | 2402 |
| | | TA | | |
| NW_022197577.1_2072883_3_1657 | unclassified | EnSpm/CAC | Contarinia nasturtii | 2403 |
| | | TA | | |
| NW_022197760.1_58146_6_52 | unclassified | EnSpm/CAC | Contarinia nasturtii | 2404 |
| | | TA | | |
| NW_022197768.1_2004690_6_1541 | unclassified | EnSpm/CAC | Contarinia nasturtii | 2405 |
| | | TA | | |
| NW_022197768.1_4159235_2_3182 | unclassified | hAT | Contarinia nasturtii | 2406 |
| NW_022197768.1_5839134_6_4456 | unclassified | EnSpm/CAC | Contarinia nasturtii | 2407 |
| | | TA | | |
| NW_022197846.1_1322509_1_842 | unclassified | EnSpm/CAC | Contarinia nasturtii | 2408 |
| | | TA | | |
| NW_022197981.1_2624887_1_2229 | unclassified | EnSpm/CAC | Contarinia nasturtii | 2409 |
| | | TA | | |
| NW_022198211.1_4006093_4_2791 | unclassified | EnSpm/CAC | Contarinia nasturtii | 2410 |
| | | TA | | |
| NW_022198211.1_4105316_2_2832 | unclassified | unknown | Contarinia nasturtii | 2411 |
| NW_022198526.1_442427_2_332 | unclassified | EnSpm/CAC | Contarinia nasturtii | 2412 |
| | | TA | | |
| NW_022198836.1_504526_4_296 | unclassified | EnSpm/CAC | Contarinia nasturtii | 2413 |
| | | TA | | |
| NW_022199493.1_1436347_1_951 | unclassified | EnSpm/CAC | Contarinia nasturtii | 2414 |
| | | TA | | |
| NW_022199552.1_2750_2_5 | unclassified | unknown | Contarinia nasturtii | 2415 |
| NW_022199689.1_568784_2_395 | unclassified | EnSpm/CAC | Contarinia nasturtii | 2416 |
| | | TA | | |
| NW_022199867.1_292787_2_212 | unclassified | EnSpm/CAC | Contarinia nasturtii | 2417 |
| NW_022200487.1_311749_1_184 | unclassified | EnSpm/CAC | Contarinia nasturtii | 2418 |
| | | TA | | |
| NW_023458562.1_21123157_4_16174 | family3 | unknown | Rhagoletis pomonella | 2419 |
| NW_023458562.1_21235314_6_16250 | unclassified | unknown | Rhagoletis pomonella | 2420 |
| NW_023458562.1_35479862_5_25391 | unclassified | unknown | Rhagoletis pomonella | 2421 |
| NW_023458562.1_43899164_5_30985 | family3 | unknown | Rhagoletis pomonella | 2422 |
| NW_023458566.1_23135934_3_16055 | unclassified | unknown | Rhagoletis pomonelia | 2423 |
| NW_023503307.1_4176287_5_2135 | unclassified | unknown | Bradysia coprophila | 2424 |
| NW_023503409.1_899023_4_506 | unclassified | unknown | Bradysia coprophila | 2425 |
| NW_023503670.1_1220345_2_674 | unclassified | unknown | Bradysia coprophila | 2426 |
| NC_059308.1_10158689_2_4907 | unclassified | IS607 | Mercenaria | 2427 |
| | | | mercenaria | |
| NC_057788.1_16349206_1_9173 | unclassified | unknown | Aphidius gifuensis | 2428 |
| NC_057788.1_22894824_3_12735 | family3 | unknown | Aphidius gifuensis | 2429 |
| NC_057789.1_154442_5_123 | family3 | unknown | Aphidius gifuensis | 2430 |
| NC_057789.1_684411_6_433 | family3 | unknown | Aphidius gifuensis | 2431 |
| NC_057789.1_2208705_6_1062 | unclassified | unknown | Aphidius gifuensis | 2432 |
| NC_057789.1_10040173_1_5032 | unclassified | unknown | Aphidius gifuensis | 2433 |
| NC_057789.1_19336238_5_10420 | unclassified | unknown | Aphidius gifuensis | 2434 |
| NC_057789.1_22019408_5_12231 | unclassified | unknown | Aphidius gifuensis | 2435 |
| NC_057789.1_23458867_4_13009 | unclassified | unknown | Aphidius gifuensis | 2436 |
| NC_057789.1_23544334_1_13053 | family3 | unknown | Aphidius gifuensis | 2437 |
| NC_057790.1_23903243_5_12194 | family3 | unknown | Aphidius gifuensis | 2438 |
| NC_057790.1_24865412_5_12702 | family3 | unknown | Aphidius gifuensis | 2439 |
| NC_057790.1_25089099_3_12826 | family3 | unknown | Aphidius gifuensis | 2440 |
| NC_057791.1_3152831_2_1614 | family3 | unknown | Aphidius gifuensis | 2441 |
| NC_057791.1_23343374_2_11617 | family3 | unknown | Aphidius gifuensis | 2442 |
| NC_057792.1_6103952_2_3272 | family3 | unknown | Aphidius gifuensis | 2443 |
| NC_057792.1_7121084_2_3798 | family3 | unknown | Aphidius gifuensis | 2444 |
| NC_057792.1_14800446_3_8242 | family3 | unknown | Aphidius gifuensis | 2445 |
| NC_057792.1_20724621_3_11308 | unclassified | unknown | Aphidius gifuensis | 2446 |
| NC_057792.1_20796635_5_11341 | unclassified | unknown | Aphidius gifuensis | 2447 |
| NC_057793.1_2277792_3_1161 | unclassified | unknown | Aphidius gifuensis | 2448 |
| NC_057793.1_4268260_1_2098 | family3 | unknown | Aphidius gifuensis | 2449 |
| NW_025220578.1_21625_4_16 | family3 | unknown | Aphidius gifuensis | 2450 |
| NC_061164.1_4121154_6_3558 | unclassified | Mariner/Tc1 | Hydra vulgaris | 2451 |
| EIE76425 | family4 | Mariner/Tc1 | Rhizopus delemar RA | 2452 |
| | | | 99-880 | |
| EIE76429.1 | family4 | Mariner/Tc1 | Rhizopus delemar RA | 2453 |
| | | | 99-880 | |
| EIE76770.1 | unclassified | unknown | Rhizopus delemar RA | 2454 |
| | | | 99-880 | |
| EIE76782.1 | family4 | unknown | Rhizopus delemar RA | 2455 |
| | | | 99-880 | |
| EIE77911.1 | unclassified | unknown | Rhizopus delemar RA | 2456 |
| | | | 99-880 | |
| EIE78100_1 | unclassified | MuDr | Rhizopus delemar RA | 2457 |
| | | | 99-880 | |
| EIE79182.1 | family1 | MuDr | Rhizopus delemar RA | 2458 |
| | | | 99-880 | |
| EIE79429.1 | unclassified | Mariner/Tc1 | Rhizopus delemar RA | 2459 |
| | | | 99-880 | |
| EIE79518.1 | unclassified | Mariner/Tc1 | Rhizopus delemar RA | 2460 |
| | | | 99-880 | |
| EIE80157.1 | family4 | Mariner/Tc1 | Rhizopus delemar RA | 2461 |
| | | | 99-880 | |
| EIE80904.1 | unclassified | Mariner/Tc1 | Rhizopus delemar RA | 2462 |
| | | | 99-880 | |
| EIE83103.1 | family4 | unknown | Rhizopus delemar RA | 2463 |
| | | | 99-880 | |
| EIE83664.1 | unclassified | Mariner/Tc1 | Rhizopus delemar RA | 2464 |
| | | | 99-880 | |
| EIE84513.1 | unclassified | Mariner/Tc1 | Rhizopus delemar RA | 2465 |
| | | | 99-880 | |
| EIE85095 1 | unclassified | unknown | Rhizopus delemar RA | 2466 |
| | | | 99-880 | |
| EIE85196.1 | unclassified | Mariner/Tc1 | Rhizopus delemar RA | 2467 |
| | | | 99-880 | |
| EIE85533.1 | unclassified | Mariner/Tc1 | Rhizopus delemar RA | 2468 |
| | | | 99-880 | |
| EIE85566.1 | family4 | unknown | Rhizopus delemar RA | 2469 |
| | | | 99-880 | |
| EIE85794.1 | unclassified | Mariner/Tc1 | Rhizopus delemar RA | 2470 |
| | | | 99-880 | |
| EIE86467.1 | family4 | unknown | Rhizopus delemar RA | 2471 |
| | | | 99-880 | |
| EIE87734.1 | unclassified | unknown | Rhizopus delemar RA | 2472 |
| | | | 99-880 | |
| EIE88414.1 | family4 | Mariner/Tc1 | Rhizopus delemar RA | 2473 |
| | | | 99-880 | |
| EIE88460.1 | family4 | Mariner/Tc1 | Rhizopus delemar RA | 2474 |
| | | | 99-880 | |
| EIE88935 1 | unclassified | unknown | Rhizopus delemar RA | 2475 |
| | | | 99-880 | |
| EIE90379.1 | family4 | unknown | Rhizopus delemar RA | 2476 |
| | | | 99-880 | |
| EIE91263.1 | unclassified | Mariner/Tc1 | Rhizopus delemar RA | 2477 |
| | | | 99-880 | |
| EIE92280.1 | family4 | Mariner/Tc1 | Rhizopus delemar RA | 2478 |
| | | | 99-880 | |
| KNE68139.1 | unclassified | unknown | Allomyces macrogynus | 2479 |
| | | | ATCC 38327 | |
| CBN80330.1 | family4 | unknown | Ectocarpus siliculosus | 2480 |
| CBN80449.1 | family4 | unknown | Ectocarpus siliculosus | 2481 |
| AGO13614.1 | family5 | unknown | [Ashbya] aceris | 2482 |
| | | | (nom. inval.) | |
| ETS61107.1 | family5 | unknown | Moesziomyces aphidis | 2483 |
| GAQ87932.1 | family5 | unknown | Klebsormidium nitens | 2484 |
| GAQ89740.1 | family4 | unknown | Klebsormidium nitens | 2485 |
| GAQ90267.1 | family4 | unknown | Klebsormidium nitens | 2486 |
| GAQ90579.1 | family4 | unknown | Klebsormidium nitens | 2487 |
| CEP07339.1 | family1 | unknown | Parasitella parasitica | 2488 |
| CEP07343.1 | family4 | unknown | Parasitella parasitica | 2489 |
| CEP07346.1 | family1 | unknown | Parasitella parasitica | 2490 |
| CEP08292.1 | unclassified | unknown | Parasitella parasitica | 2491 |
| CEP09091 1 | unclassified | unknown | Parasitella parasitica | 2492 |
| CEP09711.1 | unclassified | unknown | Parasitella parasitica | 2493 |
| CEP09749.1 | family1 | unknown | Parasitella parasitica | 2494 |
| CEP10059.1 | family4 | unknown | Parasitella parasitica | 2495 |
| CEP11429.1 | unclassified | unknown | Parasitella parasitica | 2496 |
| CEP11659.1 | family4 | unknown | Parasitella parasitica | 2497 |
| CEP11715.1 | family1 | unknown | Parasitella parasitica | 2498 |
| CEP12397.1 | family1 | unknown | Parasitella parasitica | 2499 |
| CEP13400.1 | family1 | unknown | Parasitella parasitica | 2500 |
| CEP13646.1 | unclassified | unknown | Parasitella parasitica | 2501 |
| CEP14216.1 | family4 | unknown | Parasitella parasitica | 2502 |
| CEP14290.1 | family4 | unknown | Parasitella parasitica | 2503 |
| CEP14429 1 | family4 | unknown | Parasitella parasitica | 2504 |
| CEP14831.1 | family1 | unknown | Parasitella parasitica | 2505 |
| CEP15153.1 | family4 | unknown | Parasitella parasitica | 2506 |
| CEP15260.1 | family1 | unknown | Parasitella parasitica | 2507 |
| CEP15551.1 | unclassified | unknown | Parasitella parasitica | 2508 |
| CEP15642.1 | family4 | unknown | Parasitella parasitica | 2509 |
| CEP16359.1 | family4 | unknown | Parasitella parasitica | 2510 |
| CEP16880.1 | family1 | unknown | Parasitella parasitica | 2511 |
| CEP17420 1 | unclassified | unknown | Parasitella parasitica | 2512 |
| CEP17437.1 | family1 | unknown | Parasitella parasitica | 2513 |
| CEP17611.1 | unclassified | unknown | Parasitella parasitica | 2514 |
| CEP17743.1 | unclassified | unknown | Parasitella parasitica | 2515 |
| CEP18280.1 | unclassified | unknown | Parasitella parasitica | 2516 |
| CEP18395.1 | family1 | unknown | Parasitella parasitica | 2517 |
| CEP18459.1 | family1 | unknown | Parasitella parasitica | 2518 |
| CEP18497.1 | unclassified | unknown | Parasitella parasitica | 2519 |
| CEP18690 1 | unclassified | unknown | Parasitella parasitica | 2520 |
| CEP18871.1 | family4 | unknown | Parasitella parasitica | 2521 |
| CEP19244.1 | unclassified | unknown | Parasitella parasitica | 2522 |
| CEP19606.1 | unclassified | unknown | Parasitella parasitica | 2523 |
| CEP19739.1 | family | unknown | Parasitella parasitica | 2524 |
| CEP20106 1 | family4 | unknown | Parasitella parasitica | 2525 |
| CEP20192.1 | family4 | unknown | Parasitella parasitica | 2526 |
| CEP20193.1 | unclassified | unknown | Parasitella parasitica | 2527 |
| GAN07297.1 | unclassified | unknown | Mucor ambiguus | 2528 |
| GAN08662.1 | unclassified | unknown | Mucor ambiguus | 2529 |
| SKXS09892.1 | family4 | unknown | Gonapodya prolifera | 2530 |
| | | | JEL478 | |
| KXS14529.1 | unclassified | unknown | Gonapodya prolifera | 2531 |
| | | | JEL478 | |
| KXS17374.1 | family4 | unknown | Gonapodya prolifera | 2532 |
| | | | JEL478 | |
| KXS18494.1 | unclassified | unknown | Gonapodya prolifera | 2533 |
| | | | JEL478 | |
| RLN51075.1 | family5 | unknown | Nothophytophthora sp. | 2534 |
| | | | Chile5 | |
| RLN67790.1 | family4 | unknown | Nothophytophthora sp. | 2535 |
| | | | Chile5 | |
| RLN68060.1 | family4 | unknown | Nothophytophthora sp. | 2536 |
| | | | Chile5 | |
| RLN71990.1 | unclassified | unknown | Nothophytophthora sp. | 2537 |
| | | | Chile5 | |
| RLN86397.1 | family4 | unknown | Nothophytophthora sp. | 2538 |
| | | | Chile5 | |
| OWZ24033.1 | unclassified | unknown | Phytophthora | 2539 |
| | | | megakarya | |
| OZJ06846.1 | unclassified | unknown | Bifiguratus adelaidae | 2540 |
| KAF5826737.1 | family5 | unknown | Dunaliella salina | 2541 |
| KAF5826738.1 | family5 | unknown | Dunaliella salina | 2542 |
| GAX84515.1 | unclassified | unknown | Chlamydomonas | 2543 |
| | | | eustigma | |
| PIA13712.1 | family4 | unknown | Coemansia reversa | 2544 |
| | | | NRRL 1564 | |
| PIA17319 1 | unclassified | unknown | Coemansia reversa | 2545 |
| | | | NRRL 1564 | |
| PIA17507.1 | unclassified | unknown | Coemansia reversa | 2546 |
| | | | NRRL 1564 | |
| PIA19644.1 | unclassified | unknown | Coemansia reversa | 2547 |
| | | | NRRL 1564 | |
| PNH02916.1 | family4 | unknown | Tetrabaena socialis | 2548 |
| PNH02994.1 | family4 | unknown | Tetrabaena socialis | 2549 |
| PNH04425.1 | family4 | unknown | Tetrabaena socialis | 2550 |
| PNH05839.1 | family4 | unknown | Tetrabaena socialis | 2551 |
| PNH07008.1 | family4 | unknown | Tetrabaena socialis | 2552 |
| PNH07954.1 | unclassified | unknown | Tetrabaena socialis | 2553 |
| PNH08357 1 | family4 | unknown | Tetrabaena socialis | 2554 |
| PNH08370.1 | family4 | unknown | Tetrabaena socialis | 2555 |
| PNH08379.1 | family4 | unknown | Tetrabaena socialis | 2556 |
| PNH12521.1 | unclassified | unknown | Tetrabaena socialis | 2557 |
| PNH12538.1 | family4 | unknown | Tetrabaena socialis | 2558 |
| PNH12545.1 | family4 | unknown | Tetrabaena socialis | 2559 |
| POY76428.1 | unclassified | unknown | Rhodotorula taiwanensis | 2560 |
| GBF88309.1 | unclassified | unknown | Raphidocelis | 2561 |
| | | | subcapitata | |
| GBF91083.1 | unclassified | unknown | Raphidocelis | 2562 |
| | | | subcapitata | |
| GBF96039.1 | family1 | unknown | Raphidocelis | 2563 |
| | | | subcapitata | |
| GBF98263.1 | family1 | unknown | Raphidocelis | 2564 |
| | | | subcapitata | |
| GBF99227.1 | unclassified | unknown | Raphidocelis | 2565 |
| | | | subcapitata | |
| RHZ45176 1 | family5 | unknown | Diversispora epigaea | 2566 |
| RHZ49948.1 | family5 | unknown | Diversispora epigaea | 2567 |
| RHZ58333.1 | family5 | unknown | Diversispora epigaea | 2568 |
| RHZ61369.1 | unclassified | unknown | Diversispora epigaea | 2569 |
| RHZ70779.1 | family5 | unknown | Diversispora epigaea | 2570 |
| RHZ72521.1 | unclassified | unknown | Diversispora epigaea | 2571 |
| RHZ75036.1 | family5 | unknown | Diversispora epigaea | 2572 |
| RHZ76955.1 | family5 | unknown | Diversispora epigaea | 2573 |
| RHZ77223 1 | family5 | unknown | Diversispora epigaea | 2574 |
| RHZ79414.1 | family5 | unknown | Diversispora epigaea | 2575 |
| RHZ81096.1 | unclassified | unknown | Diversispora epigaea | 2576 |
| RHZ81291.1 | family5 | unknown | Diversispora epigaea | 2577 |
| RHZ81354.1 | family5 | unknown | Diversispora epigaea | 2578 |
| RHZ82200.1 | family5 | unknown | Diversispora epigaea | 2579 |
| RHZ83686.1 | unclassified | unknown | Diversispora epigaea | 2580 |
| RHZ86056.1 | unclassified | unknown | Diversispora epigaea | 2581 |
| RHZ861511 | unclassified | unknown | Diversispora epigaea | 2582 |
| RHZ86424.1 | unclassified | unknown | Diversispora epigaea | 2583 |
| RHZ87106.1 | family5 | unknown | Diversispora epigaea | 2584 |
| RHZ89779.1 | family5 | unknown | Diversispora epigaea | 2585 |
| RIB19240.1 | family4 | unknown | Gigaspora rosea | 2586 |
| RKP01393.1 | unclassified | unknown | Caulochytrium | 2587 |
| | | | protostelioides | |
| RKP03931.1 | unclassified | unknown | Caulochytrium | 2588 |
| | | | protostelioides | |
| RUS69625.1 | family5 | unknown | Elysia chlorotica | 2589 |
| RUS69626.1 | family5 | unknown | Elysia chlorotica | 2590 |
| TKA54264.1 | family2 | unknown | Rhodotorula sp. CCFEE | 2591 |
| | | | 5036 | |
| KAF1313874.1 | unclassified | unknown | Globisporangium | 2592 |
| | | | splendens | |
| KAF1317709.1 | family4 | unknown | Globisporangium | 2593 |
| | | | splendens | |
| KAF1319048.1 | family4 | unknown | Globisporangium | 2594 |
| | | | splendens | |
| KAF1325864.1 | unclassified | unknown | Globisporangium | 2595 |
| | | | splendens | |
| SKAF1334321.1 | family4 | unknown | Globisporangium | 2596 |
| | | | splendens | |
| KAF1336069.1 | family4 | unknown | Globisporangium | 2597 |
| | | | splendens | |
| TPX47098.1 | unclassified | unknown | Synchytrium | 2598 |
| | | | endobioticum | |
| TPX47776.1 | unclassified | unknown | Synchytrium | 2599 |
| | | | endobioticum | |
| TPX48128 1 | unclassified | unknown | Synchytrium | 2600 |
| | | | endobioticum | |
| TPX48887.1 | family2 | unknown | Synchytrium | 2601 |
| | | | endobioticum | |
| TPX48990.1 | unclassified | unknown | Synchytrium | 2602 |
| | | | endobioticum | |
| TPX49724.1 | unclassified | unknown | Synchytrium | 2603 |
| | | | endobioticum | |
| TPX49823.1 | family2 | unknown | Synchytrium | 2604 |
| | | | endobioticum | |
| TPX50874.1 | unclassified | unknown | Synchytrium | 2605 |
| | | | endobioticum | |
| TPX52033.1 | family2 | unknown | Synchytrium | 2606 |
| | | | endobioticum | |
| TPX52679.1 | family4 | unknown | Synchytrium | 2607 |
| | | | endobioticum | |
| TPX53465 1 | family2 | unknown | Synchytrium | 2608 |
| | | | endobioticum | |
| TPX53466.1 | family2 | unknown | Synchytrium | 2609 |
| | | | endobioticum | |
| TPX64340.1 | family4 | unknown | Spizellomyces sp. | 2610 |
| | | | ‘palustris’ | |
| TPX60018.1 | unclassified | unknown | Powellomyces hirtus | 2611 |
| KAA6417068.1 | unclassified | unknown | Trebouxia sp. A1-2 | 2612 |
| KAA6417349.1 | family4 | unknown | Trebouxia sp. A1-2 | 2613 |
| KAA6417360.1 | unclassified | unknown | Trebouxia sp. A1-2 | 2614 |
| KAA6418139.1 | family4 | unknown | Trebouxia sp A1-2 | 2615 |
| KAA6418212 1 | family4 | unknown | Trebouxia sp. A1-2 | 2616 |
| KAA6418449.1 | family4 | unknown | Trebouxia sp. A1-2 | 2617 |
| KAA6418944.1 | unclassified | unknown | Trebouxia sp. A1-2 | 2618 |
| KAA6419299.1 | unclassified | unknown | Trebouxia sp. A1-2 | 2619 |
| KAA6419841.1 | unclassified | unknown | Trebouxia sp. A1-2 | 2620 |
| KAA6422705.1 | family4 | unknown | Trebouxia sp. A1-2 | 2621 |
| KAA6427190.1 | unclassified | unknown | Trebouxia sp. A1-2 | 2622 |
| KAA6427833.1 | unclassified | unknown | Trebouxia sp. A1-2 | 2623 |
| KAA8912386.1 | unclassified | unknown | Trichomonascus ciferrii | 2624 |
| KAE8213821 1 | family5 | unknown | Tilletia walkeri | 2625 |
| KAE8214218.1 | family5 | unknown | Tilletia walkeri | 2626 |
| KAF7722554.1 | family1 | Crypton | Apophysomyces | 2627 |
| | | | ossiformis | |
| KAF7724140.1 | unclassified | Crypton | Apophysomyces | 2628 |
| | | | ossiformis | |
| KAF7726709.1 | unclassified | Helitron | Apophysomyces | 2629 |
| | | | ossiformis | |
| KAF7727588.1 | unclassified | Crypton | Apophysomyces | 2630 |
| | | | ossiformis | |
| KAF7731951.1 | family1 | unknown | Apophysomyces | 2631 |
| | | | ossiformis | |
| SKAF8068199.1 | unclassified | unknown | Scenedesmus sp. | 2632 |
| | | | PABB004 | |
| KAF8068341.1 | family1 | unknown | Scenedesmus sp. | 2633 |
| | | | PABB004 | |
| KAF8939596.1 | family2 | unknown | Dissophora ornata | 2634 |
| KAF8941397.1 | unclassified | unknown | Dissophora ornata | 2635 |
| KAF8945173.1 | family2 | unknown | Haplosporangium | 2636 |
| | | | gracile | |
| KAF8947529.1 | family2 | unknown | Haplosporangium | 2637 |
| | | | gracile | |
| KAF9105425.1 | unclassified | unknown | Mortierella sp. GBA35 | 2638 |
| KAF9107457.1 | unclassified | unknown | Mortierella sp. GBA35 | 2639 |
| KAF9100189.1 | unclassified | unknown | Mortierella sp. AD031 | 2640 |
| KAF9146337.1 | family2 | unknown | Mortierella sp. GBA39 | 2641 |
| KAF9185846.1 | unclassified | unknown | Haplosporangium sp. Z 11 | 2642 |
| KAF9191052.1 | unclassified | unknown | Haplosporangium sp. Z 11 | 2643 |
| KAF9191351.1 | unclassified | unknown | Haplosporangium sp. Z 11 | 2644 |
| KAF9188467.1 | family2 | unknown | Haplosporangium sp. Z 767 | 2645 |
| KAF9194653.1 | family1 | unknown | Haplosporangium sp. Z 767 | 2646 |
| KAF9364987.1 | family2 | unknown | Mortierella sp. NVP85 | 2647 |
| KAF9315033.1 | family1 | unknown | Podila horticola | 2648 |
| KAF9319524.1 | family1 | unknown | Podila horticola | 2649 |
| KAF9319607.1 | unclassified | unknown | Podila horticola | 2650 |
| KAF9360179.1 | family2 | unknown | Mortierella sp. AD094 | 2651 |
| KAF9543057.1 | family2 | unknown | Mortierella hygrophila | 2652 |
| SKAF9545295.1 | unclassified | unknown | Mortierella hygrophila | 2653 |
| KAF9902354.1 | unclassified | unknown | Linnemannia zychae | 2654 |
| KAF9903765.1 | unclassified | unknown | Linnemannia zychae | 2655 |
| KAF9912681.1 | family2 | unknown | Linnemannia zychae | 2656 |
| KAF9989918.1 | unclassified | unknown | Mortierella antarctica | 2667 |
| KAG0006297.1 | family2 | unknown | Entomortierella | 2658 |
| | | | chiamydospora | |
| KAG0030533.1 | family2 | unknown | Podila clonocystis | 2659 |
| KAG0051896.1 | family2 | unknown | Gryganskiella | 2660 |
| | | | cystojenkinii | |
| KAG0053222.1 | unclassified | unknown | Gryganskiella | 2661 |
| | | | cystojenkinii | |
| KAG0057380.1 | family2 | unknown | Gryganskiella | 2662 |
| | | | cystojenkinii | |
| KAG0098493.1 | family2 | unknown | Podila epicladia | 2663 |
| KAG0170015.1 | family2 | unknown | Apophysomyces sp. | 2664 |
| | | | BC1015 | |
| KAG0170062 1 | unclassified | unknown | Apophysomyces sp. | 2665 |
| | | | BC1015 | |
| KAG0171590.1 | unclassified | unknown | Apophysomyces sp. | 2666 |
| | | | BC1015 | |
| KAG0172135.1 | unclassified | unknown | Apophysomyces sp. | 2667 |
| | | | BC1015 | |
| KAG0173489.1 | family4 | unknown | Apophysomyces sp. | 2668 |
| | | | BC1015 | |
| KAG0174950.1 | unclassified | unknown | Apophysomyces sp. | 2669 |
| | | | BC1015 | |
| KAG0179622.1 | family2 | unknown | Apophysomyces sp. | 2664 |
| | | | BC102 | |
| KAG0180281.1 | unclassified | unknown | Apophysomyces sp. | 2666 |
| | | | BC1021 | |
| KAG0180333.1 | unclassified | unknown | Apophysomyces sp. | 2670 |
| | | | BC1021 | |
| KAG0181934 1 | family4 | unknown | Apophysomyces sp. | 2671 |
| | | | BC1021 | |
| KAG0190848.1 | unclassified | unknown | Apophysomyces sp. | 2672 |
| | | | BC1034 | |
| KAG0192927.1 | family4 | unknown | Apophysomyces sp. | 2671 |
| | | | BC1034 | |
| KAG0292157.1 | unclassified | unknown | Linnemannia gamsil | 2673 |
| KAG0293674.1 | unclassified | unknown | Linnemannia gamsil | 2674 |
| KAG0295332.1 | unclassified | unknown | Linnemannia gamsil | 2675 |
| KAG0280702.1 | unclassified | unknown | Linnemannia exigua | 2676 |
| KAG0324181.1 | family2 | unknown | Dissophora globulifera | 2677 |
| KAG0360251 1 | unclassified | unknown | Podila minutissima | 2678 |
| KAG0361180.1 | unclassified | unknown | Podila minutissima | 2679 |
| KAG0369561.1 | unclassified | unknown | Gamsiella | 2680 |
| | | | multidivaricata | |
| KAG0379404.1 | unclassified | unknown | Mortierella sp. AD032 | 2681 |
| KAG0205644.1 | unclassified | unknown | Mortierella sp. GBA30 | 2682 |
| KAG0211194.1 | unclassified | unknown | Mortierella sp. GBA30 | 2683 |
| KAG0212394.1 | unclassified | unknown | Mortierella sp. GBA30 | 2684 |
| KAG0241283.1 | unclassified | unknown | Mortierella sp. GBA43 | 2685 |
| KAG0243527.1 | family2 | unknown | Mortierella sp. GBA43 | 2686 |
| KAG0243911 1 | unclassified | unknown | Mortierella sp. GBA43 | 2687 |
| KAG0244257.1 | family1 | unknown | Mortierella sp. GBA43 | 2688 |
| KAG0246022.1 | unclassified | unknown | Mortierella sp. GBA43 | 2689 |
| KAG0246074.1 | unclassified | unknown | Mortierella sp. GBA43 | 2690 |
| KAG0210361.1 | family2 | unknown | Mortierella sp. NVP41 | 2691 |
| SKAG0219994.1 | unclassified | unknown | Mortierella sp. NVP41 | 2692 |
| KAG0220417.1 | family1 | unknown | Mortierella sp. NVP41 | 2693 |
| KAG0261699.1 | family1 | unknown | Actinomortierella | 2694 |
| | | | ambigua | |
| KAG0263341 1 | unclassified | unknown | Actinomortierella | 2695 |
| | | | ambigua | |
| KAG0263678.1 | unclassified | unknown | Actinomortierella | 2696 |
| | | | ambigua | |
| KAG0262509.1 | family2 | unknown | Mortierella polycephala | 2697 |
| KAG1654641.1 | unclassified | unknown | Chlamydomonas sp. | 2698 |
| | | | UWO 241 | |
| KAG1667136.1 | unclassified | unknown | Chlamydomonas sp. | 2699 |
| | | | UWO 241 | |
| KAG1667153.1 | unclassified | unknown | Chlamydomonas sp. | 2700 |
| | | | UWO 241 | |
| KAG1667157.1 | unclassified | unknown | Chlamydomonas sp. | 2701 |
| | | | UWO 241 | |
| KAG1667164.1 | unclassified | unknown | Chlamydomonas sp. | 2702 |
| | | | UWO 241 | |
| KAG1669784 1 | family4 | unknown | Chlamydomonas sp. | 2703 |
| | | | UWO 241 | |
| KAG9286232.1 | family5 | unknown | Geosiphon pyriformis | 2704 |
| KAG2183948.1 | family4 | unknown | Umbelopsis vinacea | 2705 |
| KAG2178235.1 | unclassified | unknown | Umbelopsis isabellina | 2706 |
| KAG2179812.1 | family4 | unknown | Umbelopsis isabellina | 2707 |
| KAG2230328.1 | family4 | unknown | Thamnidium elegans | 2708 |
| KAG2230332.1 | family4 | unknown | Thamnidium elegans | 2709 |
| KAG2230439.1 | unclassified | unknown | Thamnidium elegans | 2710 |
| KAG2231593 1 | unclassified | unknown | Thamnidium elegans | 2711 |
| KAG2231708.1 | unclassified | unknown | Thamnidium elegans | 2712 |
| KAG2232275.1 | unclassified | unknown | Thamnidium elegans | 2713 |
| KAG2232536.1 | unclassified | unknown | Thamnidium elegans | 2714 |
| KAG2232843.1 | unclassified | unknown | Thamnidium elegans | 2715 |
| KAG2233249.1 | unclassified | unknown | Thamnidium elegans | 2716 |
| KAG2233354.1 | unclassified | unknown | Thamnidium elegans | 2717 |
| KAG2233370.1 | family1 | unknown | Thamnidium elegans | 2718 |
| KAG2233420.1 | unclassified | unknown | Thamnidium elegans | 2719 |
| KAG2233685 1 | unclassified | unknown | Thamnidium elegans | 2720 |
| KAG2233690.1 | unclassified | unknown | Thamnidium elegans | 2721 |
| KAG2235244.1 | unclassified | unknown | Thamnidium elegans | 2722 |
| KAG2236204.1 | unclassified | unknown | Thamnidium elegans | 2723 |
| KAG2236350.1 | unclassified | unknown | Thamnidium elegans | 2724 |
| KAG2236378.1 | family4 | unknown | Thamnidium elegans | 2725 |
| KAG2237249.1 | unclassified | unknown | Thamnidium elegans | 2726 |
| KAG2202176.1 | family1 | unknown | Mucor plumbeus | 2727 |
| KAG2202266 1 | family4 | unknown | Mucor plumbeus | 2728 |
| KAG2202343.1 | unclassified | unknown | Mucor plumbeus | 2729 |
| KAG2202838 1 | family4 | unknown | Mucor plumbeus | 2730 |
| KAG2203207.1 | family4 | unknown | Mucor plumbeus | 2731 |
| KAG2204246.1 | unclassified | unknown | Mucor plumbeus | 2732 |
| KAG2205046 1 | unclassified | unknown | Mucor plumbeus | 2733 |
| KAG2205158.1 | family1 | unknown | Mucor plumbeus | 2734 |
| KAG2205588.1 | family4 | unknown | Mucor plumbeus | 2735 |
| KAG2207626 1 | unclassified | unknown | Mucor plumbeus | 2736 |
| KAG2208174.1 | family4 | unknown | Mucor plumbeus | 2737 |
| KAG2208849.1 | unclassified | unknown | Mucor plumbeus | 2738 |
| KAG2209075.1 | family4 | unknown | Mucor plumbeus | 2739 |
| KAG2211536.1 | unclassified | unknown | Mucor plumbeus | 2740 |
| KAG2212010.1 | unclassified | unknown | Mucor plumbeus | 2741 |
| KAG2212219.1 | unclassified | unknown | Mucor plumbeus | 2742 |
| KAG2214857.1 | family4 | unknown | Mucor plumbeus | 2743 |
| KAG2215145 1 | family4 | unknown | Mucor plumbeus | 2744 |
| KAG2215811.1 | family1 | unknown | Mucor plumbeus | 2745 |
| KAG2215819.1 | family4 | unknown | Mucor plumbeus | 2746 |
| KAG2220195.1 | family1 | unknown | Mucor circinatus | 2747 |
| KAG2220256.1 | unclassified | unknown | Mucor circinatus | 2748 |
| KAG2220430.1 | family1 | unknown | Mucor circinatus | 2749 |
| KAG2221705.1 | family2 | unknown | Mucor circinatus | 2750 |
| KAG2222898.1 | family1 | unknown | Mucor circinatus | 2751 |
| KAG2225963.1 | family2 | unknown | Mucor circinatus | 2752 |
| KAG2227710 1 | family1 | unknown | Mucor saturninus | 2753 |
| KAG2195118.1 | unclassified | unknown | Mucor saturninus | 2754 |
| KAG2195154.1 | family1 | unknown | Mucor saturninus | 2755 |
| KAG2195626.1 | unclassified | unknown | Mucor saturninus | 2756 |
| KAG2195909.1 | unclassified | unknown | Mucor saturninus | 2757 |
| KAG2195920.1 | unclassified | unknown | Mucor saturninus | 2758 |
| KAG2196375.1 | unclassified | unknown | Mucor saturninus | 2759 |
| KAG2196762.1 | unclassified | unknown | Mucor saturninus | 2760 |
| KAG2196872 1 | unclassified | unknown | Mucor saturninus | 2761 |
| KAG2197041.1 | unclassified | unknown | Mucor saturninus | 2762 |
| KAG2197153.1 | family4 | unknown | Mucor saturninus | 2763 |
| KAG2197843.1 | family4 | unknown | Mucor saturninus | 2764 |
| KAG2199527.1 | family4 | unknown | Mucor saturninus | 2765 |
| KAG2199655.1 | family1 | unknown | Mucor saturninus | 2766 |
| KAG2200196.1 | family4 | unknown | Mucor saturninus | 2767 |
| KAG2200320.1 | unclassified | unknown | Mucor saturninus | 2768 |
| KAG2200602 1 | family4 | unknown | Mucor saturninus | 2769 |
| KAG2200934.1 | unclassified | unknown | Mucor saturninus | 2770 |
| KAG2201086.1 | family1 | unknown | Mucor saturninus | 2771 |
| KAG2201209.1 | family4 | unknown | Mucor saturninus | 2772 |
| KAG2201671.1 | family4 | unknown | Mucor saturninus | 2773 |
| KAG2201780.1 | family1 | unknown | Mucor saturninus | 2774 |
| KAG2201985.1 | family4 | unknown | Mucor saturninus | 2775 |
| KAG2202060.1 | family4 | unknown | Mucor saturninus | 2776 |
| KAG2203129 1 | unclassified | unknown | Mucor saturninus | 2777 |
| KAG2203304.1 | family4 | unknown | Mucor saturninus | 2778 |
| KAG2203935.1 | family4 | unknown | Mucor saturninus | 2779 |
| KAG2204142.1 | unclassified | unknown | Mucor saturninus | 2780 |
| KAG2204454.1 | family4 | unknown | Mucor saturninus | 2781 |
| KAG2205386.1 | family4 | unknown | Mucor saturninus | 2782 |
| KAG2205942.1 | family1 | unknown | Mucor saturninus | 2783 |
| KAG2206091.1 | family4 | unknown | Mucor saturninus | 2784 |
| KAG2206160.1 | family4 | unknown | Mucor saturninus | 2785 |
| KAG2206531 1 | family4 | unknown | Mucor saturninus | 2786 |
| KAG2208537.1 | family4 | unknown | Mucor saturninus | 2787 |
| KAG2208729.1 | family1 | unknown | Mucor saturninus | 2788 |
| KAG2209788.1 | family4 | unknown | Mucor saturninus | 2789 |
| KAG2209843.1 | unclassified | unknown | Mucor saturninus | 2790 |
| KAG2209941.1 | unclassified | unknown | Mucor saturninus | 2791 |
| KAG2209996.1 | family4 | unknown | Mucor saturninus | 2792 |
| KAG2210265.1 | unclassified | unknown | Mucor saturninus | 2793 |
| KAG2211255 1 | family4 | unknown | Mucor saturninus | 2794 |
| KAG2212573.1 | unclassified | unknown | Mucor saturninus | 2795 |
| KAG2212708.1 | unclassified | unknown | Mucor saturninus | 2796 |
| KAG2212724.1 | family1 | unknown | Mucor saturninus | 2797 |
| KAG2213090.1 | family1 | unknown | Mucor saturninus | 2798 |
| KAG2213969.1 | family4 | unknown | Mucor saturninus | 2799 |
| KAG2213987.1 | family4 | unknown | Mucor saturninus | 2800 |
| KAG3243893.1 | unclassified | unknown | Phytophthora idaei | 2801 |
| KAG3247285 1 | unclassified | unknown | Phytophthora idaei | 2802 |
| KAG3251432.1 | family4 | unknown | Phytophthora idaei | 2803 |
| KAG3252760.1 | family4 | unknown | Phytophthora idaei | 2804 |
| KAG4067160.1 | unclassified | unknown | Bradysia odonphaga | 2805 |
| KAG6972999.1 | unclassified | unknown | Phytophthora aleatoria | 2806 |
| KAG6976358.1 | family5 | unknown | Phytophthora aleatoria | 2807 |
| KAG9389555.1 | unclassified | unknown | Carpediemonas | 2808 |
| | | | membranifera | |
| KAG9389584.1 | family2 | unknown | Carpediemonas | 2809 |
| | | | membranifera | |
| KAG9389658 | family2 | unknown | Carpediemonas | 2810 |
| | | | membranifera | |
| KAG9389843.1 | unclassified | unknown | Carpediemonas | 2811 |
| | | | membranifera | |
| KAG9390001.1 | unclassified | unknown | Carpediemonas | 2812 |
| | | | membranifera | |
| KAG9390050.1 | family2 | unknown | Carpediemonas | 2813 |
| | | | membranifera | |
| KAG9390070.1 | family2 | unknown | Carpediemonas | 2814 |
| | | | membranifera | |
| KAG9390110.1 | family2 | unknown | Carpediemonas | 2815 |
| | | | membranifera | |
| KAG9390166.1 | family2 | unknown | Carpediemonas | 2816 |
| | | | membranifera | |
| KAG9390183.1 | family2 | unknown | Carpediemonas | 2817 |
| | | | membranifera | |
| KAG9390203.1 | family2 | unknown | Carpediemonas | 2818 |
| | | | membranifera | |
| KAG9390282 1 | unclassified | unknown | Carpediemonas | 2819 |
| | | | membranifera | |
| KAG9390284.1 | unclassified | unknown | Carpediemonas | 2820 |
| | | | membranifera | |
| KAG9390510.1 | family2 | unknown | Carpediemonas | 2821 |
| | | | membranifera | |
| KAG9390537.1 | family2 | unknown | Carpediemonas | 2822 |
| | | | membranifera | |
| KAG9391032.1 | family2 | unknown | Carpediemonas | 2823 |
| | | | membranifera | |
| KAG9391193.1 | family2 | unknown | Carpediemonas | 2824 |
| | | | membranifera | |
| KAG9391330.1 | family2 | unknown | Carpediemonas | 2825 |
| | | | membranifera | |
| KAG9391344.1 | unclassified | unknown | Carpediemonas | 2826 |
| | | | membranifera | |
| KAG9391395 1 | unclassified | unknown | Carpediemonas | 2827 |
| | | | membranifera | |
| KAG9391499.1 | family2 | unknown | Carpediemonas | 2828 |
| | | | membranifera | |
| KAG9391610.1 | family2 | unknown | Carpediemonas | 2829 |
| | | | membranifera | |
| KAG9391664.1 | family2 | unknown | Carpediemonas | 2830 |
| | | | membranifera | |
| KAG9391767.1 | family2 | unknown | Carpediemonas | 2831 |
| | | | membranifera | |
| KAG9391882.1 | family2 | unknown | Carpediemonas | 2832 |
| | | | membranifera | |
| KAG9392044.1 | unclassified | unknown | Carpediemonas | 2833 |
| | | | membranifera | |
| KAG9392207.1 | unclassified | unknown | Carpediemonas | 2834 |
| | | | membranifera | |
| KAG9392241 1 | unclassified | unknown | Carpediemonas | 2835 |
| | | | membranifera | |
| KAG9392291.1 | family2 | unknown | Carpediemonas | 2836 |
| | | | membranifera | |
| KAG9392425.1 | unclassified | unknown | Carpediemonas | 2837 |
| | | | membranifera | |
| KAG9392464.1 | unclassified | unknown | Carpediemonas | 2838 |
| | | | membranifera | |
| KAG9392617.1 | family2 | unknown | Carpediemonas | 2839 |
| | | | membranifera | |
| KAG9392819.1 | unclassified | unknown | Carpediemonas | 2840 |
| | | | membranifera | |
| KAG9392864.1 | unclassified | unknown | Carpediemonas | 2841 |
| | | | membranifera | |
| KAG9392881.1 | family2 | unknown | Carpediemonas | 2842 |
| | | | membranifera | |
| SKAG9392899 1 | family2 | unknown | Carpediemonas | 2843 |
| | | | membranifera | |
| KAG9392966.1 | unclassified | unknown | Carpediemonas | 2844 |
| | | | membranifera | |
| KAG9393005.1 | family2 | unknown | Carpediemonas | 2845 |
| | | | membranifera | |
| KAG9393056.1 | family2 | unknown | Carpediemonas | 2846 |
| | | | membranifera | |
| KAG9393074.1 | unclassified | unknown | Carpediemonas | 2847 |
| | | | membranifera | |
| KAG9393079.1 | family2 | unknown | Carpediemonas | 2848 |
| | | | membranifera | |
| KAG9393169.1 | family2 | unknown | Carpediemonas | 2849 |
| | | | membranifera | |
| KAG9393321.1 | unclassified | unknown | Carpediemonas | 2850 |
| | | | membranifera | |
| KAG9393493.1 | unclassified | unknown | Carpediemonas | 2851 |
| | | | membranifera | |
| KAG9393709 1 | family2 | unknown | Carpediemonas | 2852 |
| | | | membranifera | |
| KAG9393727.1 | family2 | unknown | Carpediemonas | 2853 |
| | | | membranifera | |
| KAG9393757.1 | family2 | unknown | Carpediemonas | 2854 |
| | | | membranifera | |
| KAG9394036.1 | family2 | unknown | Carpediemonas | 2855 |
| | | | membranifera | |
| KAG9394045.1 | family2 | unknown | Carpediemonas | 2856 |
| | | | membranifera | |
| KAG9394109.1 | family2 | unknown | Carpediemonas | 2857 |
| | | | membranifera | |
| KAG9394194.1 | unclassified | unknown | Carpediemonas | 2858 |
| | | | membranifera | |
| KAG9394266.1 | unclassified | unknown | Carpediemonas | 2859 |
| | | | membranifera | |
| KAG9394362 1 | unclassified | unknown | Carpediemonas | 2860 |
| | | | membranifera | |
| KAG9394433.1 | family2 | unknown | Carpediemonas | 2861 |
| | | | membranifera | |
| KAG9394522.1 | family2 | unknown | Carpediemonas | 2862 |
| | | | membranifera | |
| KAG9394641.1 | family2 | unknown | Carpediemonas | 2863 |
| | | | membranifera | |
| KAG9394869.1 | unclassified | unknown | Carpediemonas | 2864 |
| | | | membranifera | |
| KAG9394884.1 | family2 | unknown | Carpediemonas | 2865 |
| | | | membranifera | |
| KAG9394955.1 | family2 | unknown | Carpediemonas | 2866 |
| | | | membranifera | |
| KAG9395016.1 | family2 | unknown | Carpediemonas | 2867 |
| | | | membranifera | |
| KAG9395159 1 | unclassified | unknown | Carpediemonas | 2868 |
| | | | membranifera | |
| KAG9395164.1 | family2 | unknown | Carpediemonas | 2869 |
| | | | membranifera | |
| KAG9395265.1 | family2 | unknown | Carpediemonas | 2870 |
| | | | membranifera | |
| KAG9395413.1 | unclassified | unknown | Carpediemonas | 2871 |
| | | | membranifera | |
| KAG9395553.1 | unclassified | unknown | Carpediemonas | 2872 |
| | | | membranifera | |
| KAG9395667.1 | unclassified | unknown | Carpediemonas | 2873 |
| | | | membranifera | |
| KAG9395792.1 | unclassified | unknown | Carpediemonas | 2874 |
| | | | membranifera | |
| KAG9395927.1 | unclassified | unknown | Carpediemonas | 2875 |
| | | | membranifera | |
| KAG9396222 1 | unclassified | unknown | Carpediemonas | 2876 |
| | | | membranifera | |
| KAG9396356.1 | unclassified | unknown | Carpediemonas | 2877 |
| | | | membranifera | |
| KAG9396425.1 | unclassified | unknown | Carpediemonas | 2878 |
| | | | membranifera | |
| KAG9396473.1 | family2 | unknown | Carpediemonas | 2879 |
| | | | membranifera | |
| KAG9396562.1 | family2 | unknown | Carpediemonas | 2880 |
| | | | membranifera | |
| KAG9396717.1 | family2 | unknown | Carpediemonas | 2881 |
| | | | membranifera | |
| KAG9396906.1 | unclassified | unknown | Carpediemonas | 2882 |
| | | | membranifera | |
| KAG9396907.1 | unclassified | unknown | Carpediemonas | 2883 |
| | | | membranifera | |
| KAG9396923.1 | unclassified | unknown | Carpediemonas | 2884 |
| | | | membranifera | |
| KAG9396966 1 | unclassified | unknown | Carpediemonas | 2885 |
| | | | membranifera | |
| KAG9397148.1 | family2 | unknown | Carpediemonas | 2886 |
| | | | membranifera | |
| KAG9397168.1 | family2 | unknown | Carpediemonas | 2887 |
| | | | membranifera | |
| KAG9397200.1 | unclassified | unknown | Carpediemonas | 2888 |
| | | | membranifera | |
| KAG9397205.1 | unclassified | unknown | Carpediemonas | 2889 |
| | | | membranifera | |
| KAG9397261.1 | unclassified | unknown | Carpediemonas | 2890 |
| | | | membranifera | |
| KAG9397293.1 | family2 | unknown | Carpediemonas | 2891 |
| | | | membranifera | |
| KAG9397407.1 | family2 | unknown | Carpediemonas | 2892 |
| | | | membranifera | |
| KAG9397488 1 | unclassified | unknown | Carpediemonas | 2893 |
| | | | membranifera | |
| KAG9397570.1 | family2 | unknown | Carpediemonas | 2894 |
| | | | membranifera | |
| KAH3690924.1 | family5 | unknown | Dreissena polymorpha | 2895 |
| KAH3717670.1 | family5 | unknown | Dreissena polymorpha | 2896 |
| KAH3717683.1 | family5 | unknown | Dreissena polymorpha | 2897 |
| KAH3753320.1 | family5 | unknown | Dreissena polymorpha | 2898 |
| KAH3753529.1 | family5 | unknown | Dreissena polymorpha | 2899 |
| KAH3777210.1 | family5 | unknown | Dreissena polymorpha | 2900 |
| KAH3783259.1 | family5 | unknown | Dreissena polymorpha | 2901 |
| KAH3785325.1 | family5 | unknown | Dreissena polymorpha | 2902 |
| KAH3786489.1 | family5 | unknown | Dreissena polymorpha | 2903 |
| KAH3788369.1 | family5 | unknown | Dreissena polymorpha | 2899 |
| KAH3788417.1 | family5 | unknown | Dreissena polymorpha | 2899 |
| KAH3796522.1 | family5 | unknown | Dreissena polymorpha | 2904 |
| KAH3797817.1 | family5 | unknown | Dreissena polymorpha | 2905 |
| KAH3798297.1 | family5 | unknown | Dreissena polymorpha | 2906 |
| KAH3800667.1 | family5 | unknown | Dreissena polymorpha | 2907 |
| KAH3822762.1 | family5 | unknown | Dreissena polymorpha | 2908 |
| KAH3847409.1 | family5 | unknown | Dreissena polymorpha | 2909 |
| KAH3847468.1 | family5 | unknown | Dreissena polymorpha | 2910 |
| KAH3848479.1 | family5 | unknown | Dreissena polymorpha | 2909 |
| KAH3850879.1 | family5 | unknown | Dreissena polymorpha | 2911 |
| KAH3856132.1 | family5 | unknown | Dreissena polymorpha | 2906 |
| KAH3857843.1 | family5 | unknown | Dreissena polymorpha | 2912 |
| KAH3875098.1 | family5 | unknown | Dreissena polymorpha | 2913 |
| KAH3892374.1 | family5 | unknown | Dreissena polymorpha | 2914 |
| KAH7460451.1 | unclassified | unknown | Phytophthora ramorum | 2915 |
| KAH7460704.1 | unclassified | unknown | Phytophthora ramorum | 2916 |
| BDA45239.1 | family4 | unknown | Coccomyxa sp. Obi | 2917 |
| BDA45247.1 | family4 | unknown | Coccomyxa sp. Obi | 2918 |
| KAH8939218.1 | family4 | unknown | Sphagnum fallax | 2919 |
| KAI1313906.1 | unclassified | unknown | Mortierella claussenii | 2920 |
| KAI1314437.1 | unclassified | unknown | Mortierella claussenii | 2921 |
| KAI1314465.1 | unclassified | unknown | Mortierella ciaussenii | 2922 |
| KAI1318043.1 | unclassified | unknown | Mortierella claussenii | 2923 |
| UPQ96798.1 | family5 | unknown | Chloropicon primus | 2924 |
| UPQ97078.1 | family5 | unknown | Chloropicon primus | 2925 |
| UPQ97476.1 | family5 | unknown | Chloropicon primus | 2926 |
| UPQ97837.1 | family5 | unknown | Chloropicon primus | 2927 |
| UPQ98623.1 | family5 | unknown | Chloropicon primus | 2928 |
| UPQ98730.1 | family5 | unknown | Chloropicon primus | 2929 |
| UPQ98918.1 | family5 | unknown | Chloropicon primus | 2930 |
| UPQ99020.1 | family5 | unknown | Chloropicon primus | 2931 |
| UPQ99383.1 | family5 | unknown | Chloropicon primus | 2932 |
| UPQ99790.1 | family5 | unknown | Chloropicon primus | 2933 |
| UPR00079.1 | family5 | unknown | Chloropicon primus | 2934 |
| UPR00108 1 | family5 | unknown | Chloropicon primus | 2935 |
| UPR00316.1 | family4 | unknown | Chloropicon primus | 2936 |
| UPR00366.1 | family5 | unknown | Chloropicon primus | 2937 |
| UPR00402.1 | family5 | unknown | Chloropicon primus | 2938 |
| UPR00632.1 | family4 | unknown | Chloropicon primus | 2939 |
| UPR00713.1 | family5 | unknown | Chloropicon primus | 2940 |
| UPR00946.1 | family5 | unknown | Chloropicon primus | 2941 |
| UPR01096.1 | family5 | unknown | Chloropicon primus | 2942 |
| UPR01191 1 | family5 | unknown | Chloropicon primus | 2943 |
| UPR01611.1 | family5 | unknown | Chloropicon primus | 2944 |
| UPR02798.1 | family5 | unknown | Chloropicon primus | 2945 |
| UPR02811.1 | family5 | unknown | Chloropicon primus | 2946 |
| UPR02884.1 | family5 | unknown | Chloropicon primus | 2947 |
| UPR03441.1 | family5 | unknown | Chloropicon primus | 2948 |
| UPR03652.1 | family5 | unknown | Chloropicon primus | 2949 |
| UPR04221.1 | family5 | unknown | Chloropicon primus | 2950 |
| UPR04245.1 | family5 | unknown | Chloropicon primus | 2951 |
| UPR04476.1 | family5 | unknown | Chloropicon primus | 2952 |
| UPR04700 1 | family5 | unknown | Chloropicon primus | 2953 |
| UPR05249.1 | family5 | unknown | Chloropicon primus | 2954 |
| UPR05283.1 | family5 | unknown | Chloropicon primus | 2955 |
| KAI3432486.1 | family5 | unknown | Chlorella vulgaris | 2956 |
| KAI3432514.1 | family5 | unknown | Chlorella vulgaris | 2957 |
| KAI3434474.1 | family4 | unknown | Chlorella vulgaris | 2958 |
| KAI3434641.1 | family4 | unknown | Chlorella vulgaris | 2959 |
| KAI3478986.1 | unclassified | unknown | Cichorium endivia | 2960 |
| KAI3481072.1 | family5 | unknown | Cichorium endivia | 2961 |
| KAI3642692.1 | unclassified | unknown | Amoeboaphelidium | 2962 |
| | | | protococcarum | |
| KAI3642987.1 | family3 | unknown | Amoeboaphelidium | 2963 |
| | | | protococcarum | |
| KAI3643808.1 | family4 | unknown | Amoeboaphelidium | 2964 |
| | | | protococcarum | |
| KAI3643855.1 | unclassified | unknown | Amoeboaphelidium | 2965 |
| | | | protococcarum | |
| KAI3644220.1 | family3 | unknown | Amoeboaphelidium | 2966 |
| | | | protococcarum | |
| KAI3644388.1 | unclassified | unknown | Amoeboaphelidium | 2967 |
| | | | protococcarum | |
| KAI3645257.1 | unclassified | unknown | Amoeboaphelidium | 2968 |
| | | | protococcarum | |
| KAI3645462.1 | unclassified | unknown | Amoeboaphelidium | 2969 |
| | | | protococcarum | |
| KAI3645709.1 | unclassified | unknown | Amoeboaphelidium | 2970 |
| | | | protococcarum | |
| KAI3645781.1 | unclassified | unknown | Amoeboaphelidium | 2971 |
| | | | protococcarum | |
| KAI3646743.1 | unclassified | unknown | Amoeboaphelidium | 2972 |
| | | | protococcarum | |
| KAI3646791.1 | family4 | unknown | Amoeboaphelidium | 2973 |
| | | | protococcarum | |
| KAI3647306.1 | unclassified | unknown | Amoeboaphelidium | 2974 |
| | | | protococcarum | |
| KAI3647309.1 | unclassified | unknown | Amoeboaphelidium | 2975 |
| | | | protococcarum | |
| KAI3647402.1 | family2 | unknown | Amoeboaphelidium | 2976 |
| | | | protococcarum | |
| KAI3649069.1 | unclassified | unknown | Amoeboaphelidium | 2977 |
| | | | protococcarum | |
| KAI3649414.1 | unclassified | unknown | Amoeboaphelidium | 2978 |
| | | | protococcarum | |
| KAI3650837.1 | unclassified | unknown | Amoeboaphelidium | 2979 |
| | | | protococcarum | |
| KAI3650911.1 | family3 | unknown | Amoeboaphelidium | 2980 |
| | | | protococcarum | |
| KAI3651404.1 | family3 | unknown | Amoeboaphelidium | 2981 |
| | | | protococcarum | |
| KAI3652076.1 | family4 | unknown | Amoeboaphelidium | 2982 |
| | | | protococcarum | |
| KAI3652816.1 | unclassified | unknown | Amoeboaphelidium | 2983 |
| | | | protococcarum | |
| KAI3652837.1 | family4 | unknown | Amoeboaphelidium | 2984 |
| | | | protococcarum | |
| KAI3652982.1 | family4 | unknown | Amoeboaphelidium | 2985 |
| | | | protococcarum | |
| KAI3653082.1 | unclassified | unknown | Amoeboaphelidium | 2986 |
| | | | protococcarum | |
| KAI3653281.1 | unclassified | unknown | Amoeboaphelidium | 2987 |
| | | | protococcarum | |
| KAI3653511.1 | family2 | unknown | Amoeboaphelidium | 2988 |
| | | | protococcarum | |
| KAI3653576.1 | unclassified | unknown | Amoeboaphelidium | 2989 |
| | | | protococcarum | |
| KAI3653873.1 | unclassified | unknown | Amoeboaphelidium | 2990 |
| | | | protococcarum | |
| KAI3654752.1 | family3 | unknown | Amoeboaphelidium | 2991 |
| | | | protococcarum | |
| KAI3656034.1 | family4 | unknown | Amoeboaphelidium | 2992 |
| | | | occidentale | |
| KAI3658016.1 | family4 | unknown | Amoeboaphelidium | 2993 |
| | | | occidentale | |
| KAI3658238.1 | family4 | unknown | Amoeboaphelidium | 2994 |
| | | | occidentale | |
| KAI3658407.1 | family2 | unknown | Amoeboaphelidium | 2995 |
| | | | occidentale | |
| KAI3658509.1 | family4 | unknown | Amoeboaphelidium | 2996 |
| | | | occidentale | |
| KAI3658640.1 | family2 | unknown | Amoeboaphelidium | 2997 |
| | | | occidentale | |
| KAI3658671.1 | family4 | unknown | Amoeboaphelidium | 2998 |
| | | | occidentale | |
| KAI3658768.1 | family2 | unknown | Amoeboaphelidium | 2999 |
| | | | occidentale | |
| KAI3658844.1 | family4 | unknown | Amoeboaphelidium | 3000 |
| | | | occidentale | |
| KAI3659068.1 | family2 | unknown | Amoeboaphelidium | 3001 |
| | | | occidentale | |
| KAI3659159.1 | family2 | unknown | Amoeboaphelidium | 3002 |
| | | | occidentale | |
| KAI3659245.1 | unclassified | unknown | Amoeboaphelidium | 3003 |
| | | | occidentale | |
| KAI3659698.1 | family4 | unknown | Amoeboaphelidium | 3004 |
| | | | occidentale | |
| KAI3659908.1 | family4 | unknown | Amoeboaphelidium | 3005 |
| | | | occidentale | |
| KAI3660260.1 | family4 | unknown | Amoeboaphelidium | 3006 |
| | | | occidentale | |
| KAI3660383.1 | family4 | unknown | Amoeboaphelidium | 3007 |
| | | | occidentale | |
| KAI3660553.1 | family2 | unknown | Amoeboaphelidium | 3008 |
| | | | occidentale | |
| KAI3660701.1 | family4 | unknown | Amoeboaphelidium | 3009 |
| | | | occidentale | |
| KAI3661111.1 | unclassified | unknown | Amoeboaphelidium | 3010 |
| | | | occidentale | |
| KAI3661173.1 | family5 | unknown | Amoeboaphelidium | 3011 |
| | | | occidentale | |
| KAI3661251.1 | family4 | unknown | Amoeboaphelidium | 3012 |
| | | | occidentale | |
| KAI3661405.1 | family4 | unknown | Amoeboaphelidium | 3013 |
| | | | occidentale | |
| KAI3661409.1 | unclassified | unknown | Amoeboaphelidium | 3014 |
| | | | occidentale | |
| KAI3661488.1 | family4 | unknown | Amoeboaphelidium | 3015 |
| | | | occidentale | |
| KAI3661525.1 | family2 | unknown | Amoeboaphelidium | 3016 |
| | | | occidentale | |
| KAI3661634.1 | family4 | unknown | Amoeboaphelidium | 3017 |
| | | | occidentale | |
| KAI3661661.1 | family4 | unknown | Amoeboaphelidium | 3018 |
| | | | occidentale | |
| KAI3661712.1 | family4 | unknown | Amoeboaphelidium | 3019 |
| | | | occidentale | |
| KAI3661914.1 | unclassified | unknown | Amoeboaphelidium | 3020 |
| | | | occidentale | |
| KAI3662223.1 | family2 | unknown | Amoeboaphelidium | 3021 |
| | | | occidentale | |
| KAI3662498.1 | family4 | unknown | Amoeboaphelidium | 3022 |
| | | | occidentale | |
| SAL94743.1 | family1 | unknown | Absidia glauca | 3023 |
| SAL97145.1 | family4 | unknown | Absidia glauca | 3024 |
| SAL97752.1 | family4 | unknown | Absidia glauca | 3025 |
| SAL98421.1 | unclassified | unknown | Absidia glauca | 3026 |
| SAM03797.1 | family1 | unknown | Absidia glauca | 3027 |
| SAM06988.1 | family4 | unknown | Absidia glauca | 3028 |
| SAM09645.1 | unclassified | unknown | Absidia glauca | 3029 |
| SAM09656.1 | family4 | unknown | Absidia glauca | 3030 |
| SAM09778.1 | family4 | unknown | Absidia glauca | 3031 |
| SAM09785.1 | unclassified | unknown | Absidia glauca | 3032 |
| SAM70572.1 | family5 | unknown | Ustilago bromivora | 3033 |
| SJX65245.1 | family5 | unknown | Sporisorium reilianum f. | 3034 |
| | | | sp. reilianum | |
| CAB1097488.1 | family4 | IS4 | Ectocarpus sp. CCAP | 3035 |
| | | | 1310/34 | |
| CAB1108399.1 | unclassified | unknown | Ectocarpus sp. CCAP | 3036 |
| | | | 1310/34 | |
| CAD6903457.1 | family5 | unknown | Tilletia controversa | 3037 |
| CAD6906770.1 | family4 | unknown | Tilletia controversa | 3038 |
| CAD6907311.1 | family5 | unknown | Tilletia controversa | 3037 |
| CAD6909570.1 | family4 | unknown | Tilletia controversa | 3039 |
| CAD6910971.1 | family5 | unknown | Tilletia controversa | 3040 |
| CAD6913295.1 | family4 | unknown | Tilletia controversa | 3041 |
| CAD6915655.1 | unclassified | unknown | Tilletia controversa | 3042 |
| CAD6938121.1 | family4 | unknown | Tilletia controversa | 3043 |
| CAD6944024 1 | family5 | unknown | Tilletia controversa | 3044 |
| XP_001695189.2 | unclassified | Helitron | Chlamydomonas | 3045 |
| | | | reinhardtii | |
| XP_001698634.2 | unclassified | Helitron | Chlamydomonas | 3046 |
| | | | reinhardtii | |
| XP_042914569.1 | unclassified | unknown | Chlamydomonas | 3047 |
| | | | reinhardtii | |
| XP_042915740.1 | unclassified | unknown | Chlamydomonas | 3048 |
| | | | reinhardtii | |
| XP_042915951.1 | unclassified | Helitron | Chlamydomonas | 3049 |
| | | | reinhardtii | |
| XP_042916162.1 | unclassified | Helitron | Chlamydomonas | 3050 |
| | | | reinhardtii | |
| XP_042916699.1 | family4 | Helitron | Chlamydomonas | 3051 |
| | | | reinhardtii | |
| XP_042916812 1 | family4 | Helitron | Chlamydomonas | 3052 |
| | | | reinhardtii | |
| XP_042917027.1 | family4 | Helitron | Chlamydomonas | 3053 |
| | | | reinhardtii | |
| XP_042917178.1 | family | Helitron | Chlamydomonas | 3054 |
| | | | reinhardtii | |
| XP_042917446.1 | unclassified | Helitron | Chlamydomonas | 3055 |
| | | | reinhardtii | |
| XP_042917603.1 | unclassified | Helitron | Chlamydomonas | 3056 |
| | | | reinhardtii | |
| XP_042918075.1 | family4 | Helitron | Chlamydomonas | 3057 |
| | | | reinhardtii | |
| XP_042919081.1 | unclassified | Helitron | Chlamydomonas | 3058 |
| | | | reinhardtii | |
| XP_042919144.1 | family4 | unknown | Chlamydomonas | 3059 |
| | | | reinhardtii | |
| XP_042919293 1 | unclassified | Helitron | Chlamydomonas | 3060 |
| | | | reinhardtii | |
| XP_042919846.1 | unclassified | unknown | Chlamydomonas | 3061 |
| | | | reinhardtii | |
| XP_042920220.1 | family4 | unknown | Chlamydomonas | 3062 |
| | | | reinhardtii | |
| XP_042920358.1 | family4 | unknown | Chlamydomonas | 3063 |
| | | | reinhardtii | |
| XP_042920684.1 | unclassified | Helitron | Chlamydomonas | 3064 |
| | | | reinhardtii | |
| XP_042920848.1 | unclassified | Helitron | Chlamydomonas | 3065 |
| | | | reinhardtii | |
| XP_042921626.1 | unclassified | unknown | Chlamydomonas | 3066 |
| | | | reinhardtii | |
| XP_042921682.1 | unclassified | Helitron | Chlamydomonas | 3067 |
| | | | reinhardtii | |
| XP_042921881 1 | unclassified | unknown | Chlamydomonas | 3068 |
| | | | reinhardtii | |
| XP_042922048.1 | unclassified | unknown | Chlamydomonas | 3069 |
| | | | reinhardtii | |
| XP_042923002.1 | family4 | Helitron | Chlamydomonas | 3070 |
| | | | reinhardtii | |
| XP_042923294 1 | unclassified | Helitron | Chlamydomonas | 3071 |
| | | | reinhardtii | |
| XP_042924344.1 | family4 | Helitron | Chlamydomonas | 3072 |
| | | | reinhardtii | |
| XP_042924405.1 | unclassified | Helitron | Chlamydomonas | 3073 |
| | | | reinhardtii | |
| XP_042924410.1 | unclassified | Helitron | Chlamydomonas | 3074 |
| | | | reinhardtii | |
| XP_042924494.1 | family4 | unknown | Chlamydomonas | 3075 |
| | | | reinhardtii | |
| XP_042924526.1 | unclassified | Helitron | Chlamydomonas | 3076 |
| | | | reinhardtii | |
| XP_042926489 1 | family4 | Helitron | Chlamydomonas | 3077 |
| | | | reinhardtii | |
| XP_042926726.1 | family4 | Helitron | Chlamydomonas | 3078 |
| | | | reinhardtii | |
| XP_042926735.1 | unclassified | Helitron | Chlamydomonas | 3079 |
| | | | reinhardtii | |
| XP_042926795.1 | unclassified | unknown | Chlamydomonas | 3080 |
| | | | reinhardtii | |
| XP_042926944.1 | unclassified | Helitron | Chlamydomonas | 3081 |
| | | | reinhardtii | |
| XP_042927161.1 | unclassified | Helitron | Chlamydomonas | 3082 |
| | | | reinhardtii | |
| XP_042927577.1 | unclassified | Helitron | Chlamydomonas | 3083 |
| | | | reinhardtii | |
| XP_042927742.1 | unclassified | Helitron | Chlamydomonas | 3084 |
| | | | reinhardtii | |
| XP_042927805 1 | family4 | unknown | Chlamydomonas | 3085 |
| | | | reinhardtii | |
| XP_042928053.1 | family4 | Helitron | Chlamydomonas | 3086 |
| | | | reinhardtii | |
| XP_042928096.1 | unclassified | unknown | Chlamydomonas | 3087 |
| | | | reinhardtii | |
| XP_042928110.1 | family4 | unknown | Chlamydomonas | 3088 |
| | | | reinhardtii | |
| XP_042928294.1 | unclassified | Helitron | Chlamydomonas | 3089 |
| | | | reinhardtii | |
| XP_042928557.1 | unclassified | unknown | Chlamydomonas | 3090 |
| | | | reinhardtii | |
| XP_042928679.1 | family4 | Helitron | Chlamydomonas | 3091 |
| | | | reinhardtii | |
| XP_042928787.1 | family4 | Helitron | Chlamydomonas | 3092 |
| | | | reinhardtii | |
| XP_042928860 1 | unclassified | Helitron | Chlamydomonas | 3093 |
| | | | reinhardtii | |
| XP_020427206.1 | family4 | Sola2 | Heterostelium album | 3094 |
| | | | PN500 | |
| XP_020436138.1 | family4 | Sola2 | Heterostelium album | 3095 |
| | | | PN500 | |
| XP_020436971.1 | unclassified | unknown | Heterostelium album | 3096 |
| | | | PN500 | |
| XP_020437400.1 | family4 | unknown | Heterostelium album | 3097 |
| | | | PN500 | |
| XP_020438426.1 | family4 | Sola2 | Heterostelium album | 3098 |
| | | | PN500 | |
| NP_986403.1 | family5 | unknown | Eremothecium gossypii | 3099 |
| | | | ATCC 10895 | |
| XP_005537574.1 | unclassified | unknown | Cyanidioschyzon | 3100 |
| | | | merolae strain 10D | |
| XP_009515043 1 | family4 | unknown | Phytophthora sojae | 3101 |
| XP_009520384.1 | family4 | unknown | Phytophthora sojae | 3102 |
| XP_009521078.1 | family4 | unknown | Phytophthora sojae | 3103 |
| XP_009523319.1 | unclassified | unknown | Phytophthora sojae | 3104 |
| XP_009523322.1 | unclassified | unknown | Phytophthora sojae | 3105 |
| XP_009524397 1 | unclassified | unknown | Phytophthora sojae | 3106 |
| XP_009529712.1 | unclassified | unknown | Phytophthora sojae | 3107 |
| XP_009531228.1 | family4 | unknown | Phytophthora sojae | 3108 |
| XP_009533819.1 | family4 | unknown | Phytophthora sojae | 3109 |
| XP_009538605 1 | unclassified | unknown | Phytophthora sojae | 3110 |
| XP_016604411.1 | family4 | unknown | Spizellomyces punctatus | 3111 |
| | | | DAOM BR117 | |
| XP_016604940.1 | family4 | unknown | Spizellomyces punctatus | 3112 |
| | | | DAOM BR117 | |
| XP_016605006.1 | family4 | unknown | Spizellomyces punctatus | 3113 |
| | | | DAOM BR117 | |
| XP_016605251.1 | unclassified | unknown | Spizellomyces punctatus | 3114 |
| | | | DAOM BR117 | |
| XP_016605441.1 | family4 | unknown | Spizellomyces punctatus | 3115 |
| | | | DAOM BR117 | |
| XP_016605587.1 | family4 | unknown | Spizellomyces punctatus | 3116 |
| | | | DAOM BR117 | |
| XP_016605978.1 | family4 | unknown | Spizellomyces punctatus | 3117 |
| | | | DAOM BR117 | |
| XP_016605988 1 | family4 | unknown | Spizellomyces punctatus | 3118 |
| | | | DAOM BR117 | |
| XP_016606735.1 | unclassified | unknown | Spizellomyces punctatus | 3119 |
| | | | DAOM BR117 | |
| XP_016607575.1 | family4 | unknown | Spizellomyces punctatus | 3120 |
| | | | DAOM BR117 | |
| XP_016607809.1 | family4 | unknown | Spizellomyces punctatus | 3121 |
| | | | DAOM BR117 | |
| XP_016608331.1 | unclassified | unknown | Spizellomyces punctatus | 3122 |
| | | | DAOM BR117 | |
| XP_016608971.1 | family4 | unknown | Spizellomyces punctatus | 3123 |
| | | | DAOM BR117 | |
| XP_016609661.1 | unclassified | unknown | Spizellomyces punctatus | 3124 |
| | | | DAOM BR117 | |
| XP_016610335.1 | family4 | unknown | Spizellomyces punctatus | 3125 |
| | | | DAOM BR117 | |
| XP_016610425 1 | family4 | unknown | Spizellomyces punctatus | 3126 |
| | | | DAOM BR117 | |
| XP_016611169.1 | unclassified | unknown | Spizellomyces punctatus | 3127 |
| | | | DAOM BR117 | |
| XP_016611748.1 | family4 | unknown | Spizellomyces punctatus | 3128 |
| | | | DAOM BR117 | |
| XP_016612556.1 | family4 | unknown | Spizellomyces punctatus | 3129 |
| | | | DAOM BR117 | |
| XP_016612640.1 | unclassified | unknown | Spizellomyces punctatus | 3130 |
| | | | DAOM BR117 | |
| XP_016612677.1 | family4 | unknown | Spizellomyces punctatus | 3131 |
| | | | DAOM BR117 | |
| XP_016612696.1 | family4 | unknown | Spizellomyces punctatus | 3132 |
| | | | DAOM BR117 | |
| XP_016612786.1 | unclassified | unknown | Spizellomyces punctatus | 3133 |
| | | | DAOM BR117 | |
| XP_004989849 1 | family5 | unknown | Salpingoeca rosetta | 3134 |
| XP_004992632.1 | unclassified | unknown | Salpingoeca rosetta | 3135 |
| XP_004993744.1 | family5 | unknown | Salpingoeca rosetta | 3136 |
| XP_004995966.1 | unclassified | unknown | Salpingoeca rosetta | 3137 |
| XP_004997439.1 | unclassified | unknown | Salpingoeca rosetta | 3138 |
| XP_004349956.1 | unclassified | unknown | Cavenderia fasciculata | 3139 |
| XP_004350608.1 | unclassified | Sola2 | Cavenderia fasciculata | 3140 |
| XP_004350855.1 | unclassified | Sola2 | Cavenderia fasciculata | 3141 |
| XP_004351983.1 | unclassified | Sola2 | Cavenderia fasciculata | 3142 |
| XP_004352393 1 | unclassified | Sola2 | Cavenderia fasciculata | 3143 |
| XP_004353836.1 | unclassified | Sola2 | Cavenderia fasciculata | 3144 |
| XP_004354219.1 | unclassified | Sola2 | Cavenderia fasciculata | 3145 |
| XP_004356196.1 | unclassified | Sola2 | Cavenderia fasciculata | 3146 |
| XP_004360042.1 | unclassified | Sola2 | Cavenderia fasciculata | 3147 |
| XP_004360783.1 | unclassified | Sola2 | Cavenderia fasciculata | 3148 |
| XP_004362358.1 | unclassified | Sola2 | Cavenderia fasciculata | 3149 |
| XP_004366263.1 | unclassified | Sola2 | Cavenderia fasciculata | 3150 |
| XP_004366761 1 | unclassified | Sola2 | Cavenderia fasciculata | 3151 |
| XP_003678658.1 | family5 | unknown | Torulaspora delbrueckii | 3152 |
| XP_003680119.1 | family5 | unknown | Torulaspora delbrueckii | 3153 |
| XP_003680532.1 | family5 | unknown | Torulaspora delbrueckii | 3154 |
| XP_003680809.1 | family5 | unknown | Torulaspora delbrueckii | 3155 |
| XP_003682879.1 | family5 | unknown | Torulaspora delbrueckii | 3156 |
| XP_003682942.1 | family5 | unknown | Torulaspora delbrueckii | 3157 |
| XP_003683194.1 | family5 | unknown | Torulaspora delbrueckii | 3158 |
| XP_008891864 1 | family4 | unknown | Phytophthora parasitica | 3159 |
| | | | INRA-310 | |
| XP_008893772.1 | unclassified | unknown | Phytophthora parasitica | 3160 |
| | | | INRA-310 | |
| XP_008895380.1 | unclassified | unknown | Phytophthora parasitica | 3161 |
| | | | INRA-310 | |
| XP_008898847.1 | unclassified | unknown | Phytophthora parasitica | 3162 |
| | | | INRA-310 | |
| XP_008899131.1 | family4 | unknown | Phytophthora parasitica | 3163 |
| | | | INRA-310 | |
| XP_008899191.1 | family4 | unknown | Phytophthora parasitica | 3164 |
| | | | INRA-310 | |
| XP_008899272.1 | unclassified | unknown | Phytophthora parasitica | 3165 |
| | | | INRA-310 | |
| XP_008899360.1 | unclassified | unknown | Phytophthora parasitica | 3166 |
| | | | INRA-310 | |
| XP_008899976 1 | unclassified | unknown | Phytophthora parasitica | 3167 |
| | | | INRA-310 | |
| XP_008902930.1 | family4 | unknown | Phytophthora parasitica | 3168 |
| | | | INRA-310 | |
| XP_008903972.1 | unclassified | unknown | Phytophthora parasitica | 3169 |
| | | | INRA-310 | |
| XP_008907179.1 | family4 | unknown | Phytophthora parasitica | 3170 |
| | | | INRA-310 | |
| XP_008910010.1 | family4 | unknown | Phytophthora parasitica | 3171 |
| | | | INRA-310 | |
| XP_008911602.1 | unclassified | unknown | Phytophthora parasitica | 3172 |
| | | | INRA-310 | |
| XP_008914859.1 | unclassified | unknown | Phytophthora parasitica | 3173 |
| | | | INRA-310 | |
| XP_008916398.1 | unclassified | unknown | Phytophthora parasitica | 3174 |
| | | | INRA-310 | |
| XP_004342926.1 | family5 | IS607 | Acanthamoeba | 3175 |
| | | | castellanii str. Neff | |
| XP_004344636 1 | family5 | IS607 | Acanthamoeba | 3176 |
| | | | castellanii str. Neff | |
| XP_004367500.1 | unclassified | IS607 | Acanthamoeba | 3177 |
| | | | castellanii str. Neff | |
| XP_005840014.1 | family4 | unknown | Guillardia theta | 3178 |
| | | | CCMP2712 | |
| XP_016275601.1 | family2 | unknown | Rhodotorula toruloides | 3179 |
| | | | NP11 | |
| XP_016275804.1 | unclassified | unknown | Rhodotorula toruloides | 3180 |
| | | | NP11 | |
| XP_016275820.1 | family2 | unknown | Rhodotorula toruloides | 3181 |
| | | | NP11 | |
| XP_016277130.1 | family2 | unknown | Rhodotorula toruloides | 3182 |
| | | | NP11 | |
| XP_012189078.1 | family5 | unknown | Pseudozyma hubeiensis | 3183 |
| | | | SY62 | |
| XP_012192386 1 | unclassified | unknown | Pseudozyma hubeiensis | 3184 |
| | | | SY62 | |
| XP_007876027.1 | family5 | unknown | Pseudozyma flocculosa | 3185 |
| | | | PF-1 | |
| XP_007880192.1 | family4 | unknown | Pseudozyma flocculosa | 3186 |
| | | | PF-1 | |
| XP_016294380.1 | family5 | unknown | Kalmanozyma | 3187 |
| | | | brasiliensis GHG001 | |
| XP_011396347.1 | unclassified | unknown | Auxenochlorella | 3188 |
| | | | protothecoides | |
| XP_011397916.1 | family4 | unknown | Auxenochlorella | 3189 |
| | | | protothecoides | |
| XP_011399019.1 | unclassified | unknown | Auxenochlorella | 3190 |
| | | | protothecoides | |
| XP_011399661.1 | unclassified | unknown | Auxenochlorella | 3191 |
| | | | protothecoides | |
| XP_011399903 1 | unclassified | unknown | Auxenochlorella | 3192 |
| | | | protothecoides | |
| XP_011399941.1 | family4 | unknown | Auxenochlorella | 3193 |
| | | | protothecoides | |
| XP_011400254.1 | family4 | unknown | Auxenochlorella | 3194 |
| | | | protothecoides | |
| XP_011401116.1 | family4 | unknown | Auxenochlorella | 3195 |
| | | | protothecoides | |
| XP_011401262.1 | unclassified | unknown | Auxenochlorella | 3196 |
| | | | protothecoides | |
| XP_011401527 1 | family4 | unknown | Auxenochlorella | 3197 |
| | | | protothecoides | |
| XP_011402082.1 | unclassified | unknown | Auxenochlorella | 3198 |
| | | | protothecoides | |
| XP_018283458.1 | family4 | unknown | Phycomyces | 3199 |
| | | | blakesleeanus NRRL | |
| | | | 1555(−) | |
| XP_018284442.1 | unclassified | unknown | Phycomyces | 3200 |
| | | | blakesleeanus NRRL | |
| | | | 1555(−) | |
| XP_018285343.1 | family4 | unknown | Phycomyces | 3201 |
| | | | blakesleeanus NRRL | |
| | | | 1555(−) | |
| XP_018285963.1 | family4 | unknown | Phycomyces | 3202 |
| | | | blakesleeanus NRRL | |
| | | | 1555(−) | |
| XP_018286800.1 | unclassified | MuDr | Phycomyces | 3203 |
| | | | blakesleeanus NRRL | |
| | | | 1555(−) | |
| XP_018287950.1 | unclassified | unknown | Phycomyces | 3204 |
| | | | blakesleeanus NRRL | |
| | | | 1555(−) | |
| XP_018288086.1 | family4 | unknown | Phycomyces | 3205 |
| | | | blakesleeanus NRRL | |
| | | | 1555(−) | |
| XP_018288675 1 | unclassified | unknown | Phycomyces | 3206 |
| | | | blakesleeanus NRRL | |
| | | | 1555(−) | |
| XP_018288690 1 | family1 | MuDr | Phycomyces | 3207 |
| | | | blakesleeanus NRRL | |
| | | | 1555(−) | |
| XP_018288974.1 | unclassified | unknown | Phycomyces | 3208 |
| | | | blakesleeanus NRRL | |
| | | | 1555(−) | |
| XP_018289492.1 | unclassified | unknown | Phycomyces | 3209 |
| | | | blakesleeanus NRRL | |
| | | | 1555(−) | |
| XP_018291768.1 | family1 | MuDr | Phycomyces | 3210 |
| | | | blakesleeanus NRRL | |
| | | | 1555(−) | |
| XP_018292020.1 | family4 | unknown | Phycomyces | 3211 |
| | | | blakesleeanus NRRL | |
| | | | 1555(−) | |
| XP_018292728.1 | family1 | MuDr | Phycomyces | 3212 |
| | | | blakesleeanus NRRL | |
| | | | 1555(−) | |
| XP_018293650.1 | family1 | MuDr | Phycomyces | 3213 |
| | | | blakesleeanus NRRL | |
| | | | 1555(−) | |
| XP_018294308.1 | unclassified | unknown | Phycomyces | 3214 |
| | | | blakesleeanus NRRL | |
| | | | 1555(−) | |
| XP_018294584.1 | family4 | unknown | Phycomyces | 3215 |
| | | | blakesleeanus NRRL | |
| | | | 1555(−) | |
| XP_018295028.1 | family4 | unknown | Phycomyces | 3216 |
| | | | blakesleeanus NRRL | |
| | | | 1555(−) | |
| XP_018296539.1 | unclassified | MuDr | Phycomyces | 3217 |
| | | | blakesleeanus NRRL | |
| | | | 1555(−) | |
| XP_018296674.1 | unclassified | unknown | Phycomyces | 3218 |
| | | | blakesleeanus NRRL | |
| | | | 1555(−) | |
| XP_023461129.1 | family1 | unknown | Rhizopus microsporus | 3219 |
| | | | ATCC 52813 | |
| XP_023461179.1 | unclassified | unknown | Rhizopus microsporus | 3220 |
| | | | ATCC 52813 | |
| XP_023461418.1 | unclassified | Mariner/Tc1 | Rhizopus microsporus | 3221 |
| | | | ATCC 52813 | |
| XP_023461704 1 | unclassified | Mariner/Tc1 | Rhizopus microsporus | 3222 |
| | | | ATCC 52813 | |
| XP_023461832.1 | family4 | unknown | Rhizopus microsporus | 3223 |
| | | | ATCC 52813 | |
| XP_023462328.1 | unclassified | Mariner/Tc1 | Rhizopus microsporus | 3224 |
| | | | ATCC 52813 | |
| XP_023462629.1 | family4 | unknown | Rhizopus microsporus | 3225 |
| | | | ATCC 52813 | |
| XP_023462775.1 | unclassified | Mariner/Tc1 | Rhizopus microsporus | 3226 |
| | | | ATCC 52813 | |
| XP_023462864.1 | unclassified | Mariner/Tc1 | Rhizopus microsporus | 3227 |
| | | | ATCC 52813 | |
| XP_023463005.1 | family4 | unknown | Rhizopus microsporus | 3228 |
| | | | ATCC 52813 | |
| XP_023463010.1 | unclassified | Mariner/Tc1 | Rhizopus microsporus | 3229 |
| | | | ATCC 52813 | |
| XP_023463133.1 | family4 | unknown | Rhizopus microsporus | 3230 |
| | | | ATCC 52813 | |
| XP_023463135 1 | unclassified | unknown | Rhizopus microsporus | 3231 |
| | | | ATCC 52813 | |
| XP_023463235.1 | family4 | unknown | Rhizopus microsporus | 3232 |
| | | | ATCC 52813 | |
| XP_023463440.1 | family4 | unknown | Rhizopus microsporus | 3233 |
| | | | ATCC 52813 | |
| XP_023464057.1 | unclassified | unknown | Rhizopus microsporus | 3234 |
| | | | ATCC 52813 | |
| XP_023464109.1 | unclassified | Mariner/Tc1 | Rhizopus microsporus | 3235 |
| | | | ATCC 52813 | |
| XP_023464264.1 | family4 | Helitron | Rhizopus microsporus | 3236 |
| | | | ATCC 52813 | |
| XP_023464572.1 | unclassified | unknown | Rhizopus microsporus | 3237 |
| | | | ATCC 52813 | |
| XP_023465090.1 | unclassified | unknown | Rhizopus microsporus | 3238 |
| | | | ATCC 52813 | |
| XP_023465121 1 | unclassified | unknown | Rhizopus microsporus | 3239 |
| | | | ATCC 52813 | |
| XP_023465196.1 | family4 | unknown | Rhizopus microsporus | 3240 |
| | | | ATCC 52813 | |
| XP_023465962.1 | unclassified | Mariner/Tc1 | Rhizopus microsporus | 3241 |
| | | | ATCC 52813 | |
| XP_023466312.1 | unclassified | Mariner/Tc1 | Rhizopus microsporus | 3242 |
| | | | ATCC 52813 | |
| XP_023466447.1 | family4 | unknown | Rhizopus microsporus | 3243 |
| | | | ATCC 52813 | |
| XP_023466532.1 | unclassified | Mariner/Tc1 | Rhizopus microsporus | 3244 |
| | | | ATCC 52813 | |
| XP_023466582.1 | unclassified | Helitron | Rhizopus microsporus | 3245 |
| | | | ATCC 52813 | |
| XP_023466755.1 | unclassified | unknown | Rhizopus microsporus | 3246 |
| | | | ATCC 52813 | |
| XP_023466803 1 | unclassified | Mariner/Tc1 | Rhizopus microsporus | 3247 |
| | | | ATCC 52813 | |
| XP_023467209.1 | family4 | unknown | Rhizopus microsporus | 3248 |
| | | | ATCC 52813 | |
| XP_023467346.1 | unclassified | Mariner/Tc1 | Rhizopus microsporus | 3249 |
| | | | ATCC 52813 | |
| XP_023467516.1 | unclassified | Mariner/Tc1 | Rhizopus microsporus | 3250 |
| | | | ATCC 52813 | |
| XP_023468085.1 | unclassified | unknown | Rhizopus microsporus | 3251 |
| | | | ATCC 52813 | |
| XP_023468711.1 | family1 | unknown | Rhizopus microsporus | 3252 |
| | | | ATCC 52813 | |
| XP_023469144.1 | family4 | unknown | Rhizopus microsporus | 3253 |
| | | | ATCC 52813 | |
| XP_023469367.1 | unclassified | unknown | Rhizopus microsporus | 3254 |
| | | | ATCC 52813 | |
| XP_023469378 1 | unclassified | unknown | Rhizopus microsporus | 3255 |
| | | | ATCC 52813 | |
| XP_023469574.1 | unclassified | Mariner/Tc1 | Rhizopus microsporus | 3256 |
| | | | ATCC 52813 | |
| XP_023469623.1 | unclassified | Mariner/Tc1 | Rhizopus microsporus | 3257 |
| | | | ATCC 52813 | |
| XP_023469701.1 | unclassified | Mariner/Tc1 | Rhizopus microsporus | 3258 |
| | | | ATCC 52813 | |
| XP_023469935.1 | unclassified | Mariner/Tc1 | Rhizopus microsporus | 3259 |
| | | | ATCC 52813 | |
| XP_023470021.1 | unclassified | Mariner/Tc1 | Rhizopus microsporus | 3260 |
| | | | ATCC 52813 | |
| XP_023470071.1 | unclassified | Mariner/Tc1 | Rhizopus microsporus | 3261 |
| | | | ATCC 52813 | |
| XP_023470155.1 | family4 | unknown | Rhizopus microsporus | 3262 |
| | | | ATCC 52813 | |
| XP_023470396.1 | unclassified | Mariner/Tc1 | Rhizopus microsporus | 3263 |
| | | | ATCC 52813 | |
| XP_023470407 1 | unclassified | unknown | Rhizopus microsporus | 3264 |
| | | | ATCC 52813 | |
| XP_023470544.1 | unclassified | unknown | Rhizopus microsporus | 3265 |
| | | | ATCC 52813 | |
| XP_023470878.1 | family4 | unknown | Rhizopus microsporus | 3266 |
| | | | ATCC 52813 | |
| XP_023470993.1 | unclassified | unknown | Rhizopus microsporus | 3267 |
| | | | ATCC 52813 | |
| XP_023470995.1 | unclassified | Mariner/Tc1 | Rhizopus microsporus | 3268 |
| | | | ATCC 52813 | |
| XP_023471310.1 | unclassified | unknown | Rhizopus microsporus | 3269 |
| | | | ATCC 52813 | |
| XP_023471443.1 | unclassified | unknown | Rhizopus microsporus | 3270 |
| | | | ATCC 52813 | |
| XP_025596354.1 | family1 | unknown | Tilletiopsis | 3271 |
| | | | washingtonensis | |
| XP_025697227.1 | family1 | unknown | Tilletiopsis | 3272 |
| | | | washingtonensis | |
| XP_025600046.1 | family1 | unknown | Tilletiopsis | 3273 |
| | | | washingtonensis | |
| XP_025601420.1 | family1 | unknown | Tilletiopsis | 3274 |
| | | | washingtonensis | |
| XP_044542499.1 | family5 | unknown | Naegleria lovaniensis | 3275 |
| XP_044542650.1 | family5 | unknown | Naegleria lovaniensis | 3276 |
| XP_044543679.1 | family5 | unknown | Naegleria lovaniensis | 3277 |
| XP_044543706.1 | family5 | unknown | Naegleria lovaniensis | 3278 |
| XP_044543766.1 | family5 | unknown | Naegleria lovaniensis | 3279 |
| XP_044543835.1 | family5 | unknown | Naegleria lovaniensis | 3280 |
| XP_044544685.1 | family5 | unknown | Naegleria lovaniensis | 3281 |
| XP_044544914.1 | unclassified | unknown | Naegleria lovaniensis | 3282 |
| XP_044545323.1 | family5 | unknown | Naegleria lovaniensis | 3283 |
| XP_044547014.1 | family5 | unknown | Naegleria lovaniensis | 3284 |
| XP_044547555.1 | family5 | unknown | Naegleria lovaniensis | 3285 |
| XP_044547675.1 | family5 | unknown | Naegleria lovaniensis | 3286 |
| XP_044553920.1 | family5 | unknown | Naegleria lovaniensis | 3287 |
| XP_044554645 1 | family5 | unknown | Naegleria lovaniensis | 3288 |
| XP_044554697.1 | family5 | unknown | Naegleria lovaniensis | 3289 |
| XP_044555062.1 | family5 | unknown | Naegleria lovaniensis | 3290 |
| XP_044555963.1 | family5 | unknown | Naegleria lovaniensis | 3291 |
| XP_044556121.1 | family5 | unknown | Naegleria lovaniensis | 3292 |
| XP_045973048.1 | unclassified | unknown | Morchella importuna | 3293 |
| XP_031616473.1 | unclassified | unknown | Contarinia nasturtii | 3294 |
| XP_031616577.1 | unclassified | EnSpm/CACTA | Contarinia nasturtii | 3295 |
| XP_031616699.1 | family3 | hAT | Contarinia nasturtii | 3296 |
| XP_031616702.1 | family3 | EnSpm/CACTA | Contarinia nasturtii | 3297 |
| XP_031616836.1 | family3 | EnSpm/CACTA | Contarinia nasturtii | 3298 |
| XP_031616837.1 | family3 | EnSpm/CACTA | Contarinia nasturtii | 3299 |
| XP_031616961.1 | family3 | unknown | Contarinia nasturtii | 3300 |
| XP_031617141.1 | family3 | hAT | Contarinia nasturtii | 3301 |
| XP_031617325.1 | family3 | hAT | Contarinia nasturtii | 3302 |
| XP_031617330.1 | family3 | hAT | Contarinia nasturtii | 3303 |
| XP_031617348.1 | family3 | EnSpm/CACTA | Contarinia nasturtii | 3304 |
| XP_031617488 1 | unclassified | EnSpm/CACTA | Contarinia nasturtii | 3305 |
| XP_031617490.1 | family3 | hAT | Contarinia nasturtii | 3306 |
| XP_031617961.1 | family3 | EnSpm/CACTA | Contarinia nasturtii | 3307 |
| XP_031618039.1 | family3 | EnSpm/CACTA | Contarinia nasturtii | 3308 |
| XP_031618152.1 | unclassified | EnSpm/CACTA | Contarinia nasturtii | 3309 |
| XP_031618433.1 | family3 | hAT | Contarinia nasturtii | 3310 |
| XP_031618444.1 | family3 | EnSpm/CACTA | Contarinia nasturtii | 3311 |
| XP_031618460.1 | family3 | hAT | Contarinia nasturtii | 3312 |
| XP_031618637 1 | family3 | EnSpm/CACTA | Contarinia nasturtii | 3313 |
| XP_031618838.1 | family3 | EnSpm/CACTA | Contarinia nasturtii | 3314 |
| XP_031618887.1 | family3 | hAT | Contarinia nasturtii | 3315 |
| XP_031618944.1 | unclassified | hAT | Contarinia nasturtii | 3316 |
| XP_031619050.1 | family3 | EnSpm/CACTA | Contarinia nasturtii | 3317 |
| XP_031619657 1 | family3 | hAT | Contarinia nasturtii | 3318 |
| XP_031619966.1 | unclassified | hAT | Contarinia nasturtii | 3319 |
| XP_031620448.1 | family3 | EnSpm/CACTA | Contarinia nasturtii | 3320 |
| XP_031620681 1 | family3 | EnSpm/CACTA | Contarinia nasturtii | 3321 |
| XP_031620828.1 | unclassified | EnSpm/CACTA | Contarinia nasturtii | 3322 |
| XP_031620848.1 | unclassified | hAT | Contarinia nasturtii | 3323 |
| XP_031620883.1 | unclassified | unknown | Contarinia nasturtii | 3324 |
| XP_031620919.1 | unclassified | EnSpm/CACTA | Contarinia nasturtii | 3325 |
| XP_031620937.1 | family3 | EnSpm/CACTA | Contarinia nasturtii | 3326 |
| XP_031620998.1 | unclassified | unknown | Contarinia nasturtii | 3327 |
| XP_031621033.1 | unclassified | hAT | Contarinia nasturtii | 3328 |
| XP_031621097.1 | unclassified | EnSpm/CACTA | Contarinia nasturtii | 3329 |
| XP_031621127 1 | family3 | hAT | Contarinia nasturtii | 3330 |
| XP_031621303.1 | family3 | EnSpm/CACTA | Contarinia nasturtii | 3331 |
| XP_031621608.1 | family3 | EnSpm/CACTA | Contarinia nasturtii | 3332 |
| XP_031621620.1 | family3 | EnSpm/CACTA | Contarinia nasturtii | 3333 |
| XP_031621798.1 | unclassified | EnSpm/CACTA | Contarinia nasturtii | 3334 |
| XP_031621839.1 | family3 | hAT | Contarinia nasturtii | 3335 |
| XP_031622029.1 | unclassified | EnSpm/CACTA | Contarinia nasturtii | 3336 |
| XP_031622107.1 | family3 | hAT | Contarinia nasturtii | 3337 |
| XP_031622434 1 | family3 | hAT | Contarinia nasturtii | 3338 |
| XP_031622521.1 | unclassified | EnSpm/CACTA | Contarinia nasturtii | 3339 |
| XP_031622559.1 | family3 | hAT | Contarinia nasturtii | 3340 |
| XP_031622730.1 | unclassified | unknown | Contarinia nasturtii | 3341 |
| XP_031622851.1 | family3 | EnSpm/CACTA | Contarinia nasturtii | 3342 |
| XP_031622950.1 | family3 | EnSpm/CACTA | Contarinia nasturtii | 3343 |
| XP_031622954.1 | family3 | EnSpm/CACTA | Contarinia nasturtii | 3344 |
| XP_031623265.1 | family3 | hAT | Contarinia nasturtii | 3345 |
| XP_031623944 1 | family3 | hAT | Contarinia nasturtii | 3346 |
| XP_031624111.1 | family3 | EnSpm/CACTA | Contarinia nasturtii | 3347 |
| XP_031624185.1 | family3 | EnSpm/CACTA | Contarinia nasturtii | 3348 |
| XP_031624379.1 | family3 | hAT | Contarinia nasturtii | 3349 |
| XP_031624392.1 | unclassified | hAT | Contarinia nasturtii | 3350 |
| XP_031624410.1 | unclassified | EnSpm/CACTA | Contarinia nasturtii | 3351 |
| XP_031625051.1 | family3 | hAT | Contarinia nasturtii | 3352 |
| XP_031625217.1 | family3 | hAT | Contarinia nasturtii | 3353 |
| XP_031625311 1 | family3 | EnSpm/CACTA | Contarinia nasturtii | 3354 |
| XP_031625369.1 | family3 | EnSpm/CACTA | Contarinia nasturtii | 3355 |
| XP_031625745.1 | unclassified | EnSpm/CACTA | Contarinia nasturtii | 3356 |
| XP_031626183.1 | family3 | EnSpm/CACTA | Contarinia nasturtii | 3357 |
| XP_031626185.1 | unclassified | EnSpm/CACTA | Contarinia nasturtii | 3358 |
| XP_031626212.1 | family3 | EnSpm/CACTA | Contarinia nasturtii | 3359 |
| XP_031626439.1 | family3 | hAT | Contarinia nasturtii | 3360 |
| XP_031627342.1 | family3 | EnSpm/CACTA | Contarinia nasturtii | 3361 |
| XP_031627394.1 | unclassified | EnSpm/CACTA | Contarinia nasturtii | 3362 |
| XP_031627444 1 | family3 | hAT | Contarinia nasturtii | 3363 |
| XP_031627716.1 | family3 | hAT | Contarinia nasturtii | 3364 |
| XP_031627772.1 | family3 | EnSpm/CACTA | Contarinia nasturtii | 3365 |
| XP_031627783.1 | family3 | EnSpm/CACTA | Contarinia nasturtii | 3366 |
| XP_031627905.1 | family3 | EnSpm/CACTA | Contarinia nasturtii | 3367 |
| XP_031628498.1 | unclassified | EnSpm/CACTA | Contarinia nasturtii | 3368 |
| XP_031628639.1 | family3 | EnSpm/CACTA | Contarinia nasturtii | 3307 |
| XP_031628924.1 | family3 | EnSpm/CACTA | Contarinia nasturtii | 3369 |
| XP_031629247 1 | family3 | EnSpm/CACTA | Contarinia nasturtii | 3370 |
| XP_031629266.1 | family3 | hAT | Contarinia nasturtii | 3371 |
| XP_031629516.1 | family3 | hAT | Contarinia nasturtii | 3372 |
| XP_031629529.1 | unclassified | EnSpm/CACTA | Contarinia nasturtii | 3373 |
| XP_031629636.1 | unclassified | EnSpm/CACTA | Contarinia nasturtii | 3374 |
| XP_031629640.1 | unclassified | EnSpm/CACTA | Contarinia nasturtii | 3375 |
| XP_031629932.1 | family3 | hAT | Contarinia nasturtii | 3376 |
| XP_031629964.1 | family3 | hAT | Contarinia nasturtii | 3377 |
| XP_031630059 1 | family3 | hAT | Contarinia nasturtii | 3378 |
| XP_031630191.1 | family3 | hAT | Contarinia nasturtii | 3379 |
| XP_031630389.1 | unclassified | EnSpm/CACTA | Contarinia nasturtii | 3380 |
| XP_031630407.1 | family3 | EnSpm/CACTA | Contarinia nasturtii | 3381 |
| XP_031630819.1 | unclassified | unknown | Contarinia nasturtii | 3382 |
| XP_031630875.1 | unclassified | EnSpm/CACTA | Contarinia nasturtii | 3383 |
| XP_031631412.1 | family3 | hAT | Contarinia nasturtii | 3384 |
| XP_031631473.1 | family3 | EnSpm/CACTA | Contarinia nasturtii | 3385 |
| XP_031631483 1 | family3 | hAT | Contarinia nasturtii | 3386 |
| XP_031631640.1 | family3 | hAT | Contarinia nasturtii | 3387 |
| XP_031631931.1 | family3 | hAT | Contarinia nasturtii | 3388 |
| XP_031632164.1 | family3 | EnSpm/CACTA | Contarinia nasturtii | 3389 |
| XP_031632461.1 | family3 | hAT | Contarinia nasturtii | 3390 |
| XP_031632502.1 | family3 | EnSpm/CACTA | Contarinia nasturtii | 3391 |
| XP_031632536.1 | family3 | unknown | Contarinia nasturtii | 3392 |
| XP_031632555.1 | unclassified | EnSpm/CACTA | Contarinia nasturtii | 3393 |
| XP_031632646.1 | unclassified | EnSpm/CACTA | Contarinia nasturtii | 3394 |
| XP_031632753 1 | unclassified | EnSpm/CACTA | Contarinia nasturtii | 3395 |
| XP_031633011.1 | family3 | hAT | Contarinia nasturtii | 3396 |
| XP_031633121.1 | unclassified | EnSpm/CACTA | Contarinia nasturtii | 3397 |
| XP_031633293.1 | family3 | hAT | Contarinia nasturtii | 3398 |
| XP_031633783.1 | family3 | unknown | Contarinia nasturtii | 3399 |
| XP_031634211.1 | family3 | EnSpm/CACTA | Contarinia nasturtii | 3400 |
| XP_031634436.1 | unclassified | EnSpm/CACTA | Contarinia nasturtii | 3401 |
| XP_031634440.1 | family3 | EnSpm/CACTA | Contarinia nasturtii | 3402 |
| XP_031634467.1 | family3 | EnSpm/CACTA | Contarinia nasturtii | 3403 |
| XP_031634544.1 | family3 | EnSpm/CACTA | Contarinia nasturtii | 3404 |
| XP_031634623.1 | unclassified | unknown | Contarinia nasturtii | 3405 |
| XP_031634919.1 | family3 | EnSpm/CACTA | Contarinia nasturtii | 3406 |
| XP_031634965.1 | family3 | EnSpm/CACTA | Contarinia nasturtii | 3407 |
| XP_031634991.1 | family3 | EnSpm/CACTA | Contarinia nasturtii | 3408 |
| XP_031635104.1 | family3 | hAT | Contarinia nasturtii | 3409 |
| XP_031635277.1 | family3 | unknown | Contarinia nasturtii | 3410 |
| XP_031635311 1 | family3 | EnSpm/CACTA | Contarinia nasturtii | 3411 |
| XP_031635322.1 | unclassified | EnSpm/CACTA | Contarinia nasturtii | 3412 |
| XP_031635522.1 | family3 | EnSpm/CACTA | Contarinia nasturtii | 3413 |
| XP_031635568.1 | family3 | unknown | Contarinia nasturtii | 3414 |
| XP_031635719.1 | unclassified | unknown | Contarinia nasturtii | 3415 |
| XP_031636019.1 | family3 | EnSpm/CACTA | Contarinia nasturtii | 3416 |
| XP_031636215.1 | family3 | EnSpm/CACTA | Contarinia nasturtii | 3417 |
| XP_031636257.1 | unclassified | EnSpm/CACTA | Contarinia nasturtii | 3418 |
| XP_031636340 1 | family3 | hAT | Contarinia nasturtii | 3419 |
| XP_031636455.1 | unclassified | hAT | Contarinia nasturtii | 3420 |
| XP_031636513.1 | unclassified | unknown | Contarinia nasturtii | 3421 |
| XP_031636596.1 | family3 | hAT | Contarinia nasturtii | 3422 |
| XP_031636628.1 | family3 | EnSpm/CACTA | Contarinia nasturtii | 3423 |
| XP_031636640.1 | family3 | EnSpm/CACTA | Contarinia nasturtii | 3424 |
| XP_031636678.1 | family3 | EnSpm/CACTA | Contarinia nasturtii | 3425 |
| XP_031636679.1 | family3 | EnSpm/CACTA | Contarinia nasturtii | 3426 |
| XP_031636698.1 | family3 | hAT | Contarinia nasturtii | 3427 |
| XP_031636737 1 | family3 | EnSpm/CACTA | Contarinia nasturtii | 3428 |
| XP_031636818.1 | family3 | EnSpm/CACTA | Contarinia nasturtii | 3429 |
| XP_031636914.1 | family3 | hAT | Contarinia nasturtii | 3430 |
| XP_031637308.1 | unclassified | EnSpm/CACTA | Contarinia nasturtii | 3431 |
| XP_031637319.1 | family3 | EnSpm/CACTA | Contarinia nasturtii | 3432 |
| XP_031637464.1 | family3 | EnSpm/CACTA | Contarinia nasturtii | 3433 |
| XP_031637482.1 | family3 | EnSpm/CACTA | Contarinia nasturtii | 3434 |
| XP_031637485.1 | family3 | unknown | Contarinia nasturtii | 3435 |
| XP_031637908 1 | unclassified | EnSpm/CACTA | Contarinia nasturtii | 3436 |
| XP_031638037.1 | family3 | hAT | Contarinia nasturtii | 3437 |
| XP_031640162.1 | family3 | EnSpm/CACTA | Contarinia nasturtii | 3438 |
| XP_031640164.1 | family3 | EnSpm/CACTA | Contarinia nasturtii | 3439 |
| XP_031640166.1 | family3 | EnSpm/CACTA | Contarinia nasturtii | 3440 |
| XP_031640440.1 | family3 | unknown | Contarinia nasturtii | 3441 |
| XP_031640441.1 | family3 | EnSpm/CACTA | Contarinia nasturtii | 3442 |
| XP_031640556.1 | family3 | EnSpm/CACTA | Contarinia nasturtii | 3443 |
| XP_031640679 1 | family3 | EnSpm/CACTA | Contarinia nasturtii | 3444 |
| XP_031640846.1 | unclassified | EnSpm/CACTA | Contarinia nasturtii | 3445 |
| XP_037024089.1 | family3 | unknown | Bradysia coprophila | 3446 |
| XP_037028726.1 | unclassified | unknown | Bradysia coprophila | 3447 |
| XP_037031051.1 | unclassified | unknown | Bradysia coprophila | 3448 |
| XP_037031186.1 | family3 | unknown | Bradysia coprophila | 3449 |
| XP_037031206.1 | family3 | unknown | Bradysia coprophila | 3450 |
| XP_037031540.1 | family3 | unknown | Bradysia coprophila | 3451 |
| XP_037033154 1 | family3 | unknown | Bradysia coprophila | 3452 |
| XP_037033156.1 | family3 | unknown | Bradysia coprophila | 3453 |
| XP_037035229.1 | family3 | unknown | Bradysia coprophila | 3454 |
| XP_037040211.1 | family3 | unknown | Bradysia coprophila | 3455 |
| XP_037042101.1 | family3 | unknown | Bradysia coprophila | 3456 |
| XP_037042105.1 | family3 | unknown | Bradysia coprophila | 3457 |
| XP_037048453.1 | unclassified | unknown | Bradysia coprophila | 3458 |
| XP_037051825.1 | family3 | unknown | Bradysia coprophila | 3459 |
| XP_045183411.1 | family5 | IS607 | Mercenaria mercenaria | 3460 |
| XP_045186055 1 | family5 | unknown | Mercenaria mercenaria | 3461 |
| XP_045205872.1 | family5 | unknown | Mercenaria mercenaria | 3462 |
| XP_045206369.1 | family5 | unknown | Mercenaria mercenaria | 3463 |
| XP_045208820.1 | family5 | unknown | Mercenaria mercenaria | 3464 |
| XP_044004010.1 | unclassified | unknown | Aphidius gifuensis | 3465 |
| GL502812.1: | unclassified | unknown | Mayetiola destructor | 3466 |
| 559181-580065: + | | | | |
| CH476755.1: | unclassified | unknown | Rhizopus delemar RA | 3467 |
| 53072-54487: + | | | 99-880 | |
| CH476750.1: | unclassified | Mariner/Tc1 | Rhizopus delemar RA | 3468 |
| 82388-85210: − | | | 99-880 | |
| CH476749.1: | family4 | unknown | Rhizopus delemar RA | 3469 |
| 598965-600204: − | | | 99-880 | |
| CH476743.1: | family1 | MuDr | Rhizopus delemar RA | 3470 |
| 754068-757846: + | | | 99-880 | |
| CH476742.1: | unclassified | unknown | Rhizopus delemar RA | 3471 |
| 1103027-1103774: − | | | 99-880 | |
| CH476739.1: | unclassified | Mariner/Tc1 | Rhizopus delemar RA | 3472 |
| 501936-504925: + | | | 99-880 | |
| CH476737.1: | family4 | unknown | Rhizopus delemar RA | 3473 |
| 439453-440756: + | | | 99-880 | |
| CH476737.1: | family1 | MuDr | Rhizopus delemar RA | 3474 |
| 517626-522156: + | | | 99-880 | |
| CH476737.1: | family1 | MuDr | Rhizopus delemar RA | 3475 |
| 943989-947807: + | | | 99-880 | |
| CH476737.1: | family1 | MuDr | Rhizopus delemar RA | 3476 |
| 1041236-1045211: − | | | 99-880 | |
| CH476737.1: | family1 | MuDr | Rhizopus delemar RA | 3477 |
| 1859738-1863186: + | | | 99-880 | |
| CH476736.1: | unclassified | unknown | Rhizopus delemar RA | 3478 |
| 756363-757685: − | | | 99-880 | |
| CH476736.1: | family1 | MuDr | Rhizopus delemar RA | 3479 |
| 2716391-2721150: + | | | 99-880 | |
| CH476736.1: | unclassified | MuDr | Rhizopus delemar RA | 3480 |
| 3240726-3241580: + | | | 99-880 | |
| CH476734.1: | family4 | Mariner/Tc1 | Rhizopus delemar RA | 3481 |
| 867351-869189: − | | | 99-880 | |
| CH476734.1: | unclassified | Mariner/Tc1 | Rhizopus delemar RA | 3482 |
| 1317013-1318395: + | | | 99-880 | |
| CH476733.1: | family1 | MuDr | Rhizopus delemar RA | 3483 |
| 1337469-1338723: − | | | 99-880 | |
| CH476733.1: | unclassified | Mariner/Tc1 | Rhizopus delemar RA | 3484 |
| 4195473-4197041: + | | | 99-880 | |
| CH476732.1: | family1 | MuDr | Rhizopus delemar RA | 3485 |
| 211008-213403: + | | | 99-880 | |
| CH476732.1: | unclassified | unknown | Rhizopus delemar RA | 3486 |
| 1341645-1343773: − | | | 99-880 | |
| CH476732.1: | unclassified | MuDr | Rhizopus delemar RA | 3487 |
| 3818428-3819514: − | | | 99-880 | |
| KK076428.1: | family1 | unknown | Mucor irregularis B50 | 3488 |
| 177705-181147: + | | | | |
| AZYI01000217.1: | unclassified | unknown | Mucor irregularis B50 | 3489 |
| 158009-158688: + | | | | |
| AZYI01000219.1: | unclassified | unknown | Mucor irregularis B50 | 3490 |
| 92890-94901: + | | | | |
| KK076431.1: | family4 | unknown | Mucor irregularis B50 | 3491 |
| 5536-8258: + | | | | |
| KK076431.1: | unclassified | unknown | Mucor irregularis B50 | 3492 |
| 52803-55087: + | | | | |
| KK076431.1: | family4 | unknown | Mucor irregularis B50 | 3493 |
| 67215-69818: + | | | | |
| KK076432.1: | family4 | unknown | Mucor irregularis B50 | 3494 |
| 1-3886: + | | | | |
| KK076433.1: | family1 | unknown | Mucor irregularis B50 | 3495 |
| 31990-38852: − | | | | |
| AZYI01000228.1: | family1 | unknown | Mucor irregularis B50 | 3496 |
| 63934-65946: − | | | | |
| AZY101000229.1: | family1 | unknown | Mucor irregularis B50 | 3497 |
| 1-839: + | | | | |
| KK076434.1: | unclassified | unknown | Mucor irregularis B50 | 3498 |
| 430397-433559: − | | | | |
| KK076434.1: | family1 | unknown | Mucor irregularis B50 | 3499 |
| 508451-509969: − | | | | |
| KK076434.1: | family4 | unknown | Mucor irregularis B50 | 3500 |
| 1165940-1168069: − | | | | |
| KK076439.1: | unclassified | unknown | Mucor irregularis B50 | 3501 |
| 290-3281: + | | | | |
| KK076439.1: | family4 | unknown | Mucor irregularis B50 | 3502 |
| 7725-9105: + | | | | |
| KK076439.1: | family1 | unknown | Mucor irregularis B50 | 3503 |
| 173113-176086: + | | | | |
| KK076439.1: | family4 | unknown | Mucor irregularis B50 | 3504 |
| 332164-334540: − | | | | |
| KK076439.1: | unclassified | unknown | Mucor irregularis B50 | 3505 |
| 340330-343216: − | | | | |
| KK076439.1: | family4 | unknown | Mucor irregularis B50 | 3506 |
| 567730-575361: − | | | | |
| AZY101000253.1: | family1 | unknown | Mucor irregularis B50 | 3507 |
| 1-1866: + | | | | |
| AZY101000253.1: | unclassified | unknown | Mucor irregularis B50 | 3508 |
| 60254-61872: − | | | | |
| KK076459.1: | family1 | unknown | Mucor irregularis B50 | 3509 |
| 574858-577931: − | | | | |
| KK076459.1: | unclassified | unknown | Mucor irregularis B50 | 3510 |
| 1021735-1024164: − | | | | |
| KK076470.1: | family1 | unknown | Mucor irregularis B50 | 3511 |
| 551859-555502: + | | | | |
| BKK076494.1: | unclassified | unknown | Mucor irregularis B50 | 3512 |
| 180061-182138: + | | | | |
| KK076494.1: | family4 | unknown | Mucor irregularis B50 | 3513 |
| 183519-184543: − | | | | |
| KK076495.1: | unclassified | unknown | Mucor irregularis B50 | 3514 |
| 608995-611755: − | | | | |
| AZYI01000088.1: | unclassified | unknown | Mucor irregularis B50 | 3515 |
| 8445-9479: + | | | | |
| AZYI01000091.1: | unclassified | unknown | Mucor irregularis B50 | 3516 |
| 4125-5999: − | | | | |
| AZYI01000091.1: | family1 | MuDr | Mucor irregularis B50 | 3517 |
| 80420-84080: − | | | | |
| KK076500.1: | family1 | unknown | Mucor irregularis B50 | 3518 |
| 111737-115341: − | | | | |
| KK076505.1: | unclassified | unknown | Mucor irregularis B50 | 3519 |
| 42799-47473: − | | | | |
| KK076505.1: | unclassified | unknown | Mucor irregularis B50 | 3520 |
| 208071-209689: + | | | | |
| AZY101000112.1: | unclassified | unknown | Mucor irregularis B50 | 3521 |
| 692-4421: − | | | | |
| AZYI01000112.1: | family4 | unknown | Mucor irregularis B50 | 3522 |
| 30685-33315: + | | | | |
| AZYI01000012.1: | family1 | unknown | Mucor irregularis B50 | 3523 |
| 389648-393208: − | | | | |
| AZY101000012.1: | unclassified | unknown | Mucor irregularis B50 | 3524 |
| 683970-688015: + | | | | |
| KK076510.1: | unclassified | unknown | Mucor irregularis B50 | 3525 |
| 15293-16719: + | | | | |
| KK076515.1: | family4 | unknown | Mucor irregularis B50 | 3526 |
| 190620-193749: − | | | | |
| KK076517.1: | family1 | unknown | Mucor irregularis B50 | 3527 |
| 444850-448623: − | | | | |
| KK076518.1: | family4 | unknown | Mucor irregularis B50 | 3528 |
| 52790-54853: − | | | | |
| KK076518.1: | family1 | MuDr | Mucor irregularis B50 | 3529 |
| 161477-165976: + | | | | |
| KK076520.1: | family1 | unknown | Mucor irregularis B50 | 3530 |
| 164191-169026: + | | | | |
| KK076520.1: | unclassified | unknown | Mucor irregularis B50 | 3531 |
| 3154865-319722: + | | | | |
| KK076526.1: | family1 | unknown | Mucor irregularis B50 | 3532 |
| 230419-231424: − | | | | |
| AZYI01000160.1: | family4 | unknown | Mucor irregularis B50 | 3533 |
| 61734-64366: − | | | | |
| AZYI01000166.1: | unclassified | unknown | Mucor irregularis B50 | 3534 |
| 173170-173970: − | | | | |
| AZYI01000169.1: | unclassified | unknown | Mucor irregularis B50 | 3535 |
| 120052-121833: − | | | | |
| AZYI01000017.1: | unclassified | unknown | Mucor irregularis B50 | 3536 |
| 330183-334227: − | | | | |
| KK076529.1: | unclassified | unknown | Mucor irregularis B50 | 3537 |
| 28271-29882: − | | | | |
| KK076532.1: | family1 | MuDr | Mucor irregularis B50 | 3538 |
| 248890-250440: + | | | | |
| AZYI01000018.1: | unclassified | MuD: | Mucor irregularis B50 | 3539 |
| 121810-128487: − | | | | |
| AZYI01000193.1: | unclassified | unknown | Mucor irregularis B50 | 3540 |
| 1-1088: + | | | | |
| KK076537.1: | family4 | unknown | Mucor irregularis B50 | 3541 |
| 45627-49440: − | | | | |
| KK076538.1: | unclassified | MuDr | Mucor irregularis B50 | 3542 |
| 53760-57828: − | | | | |
| KK099956.1: | unclassified | unknown | Rhizomucor miehei | 3543 |
| 196007-197428: + | | | CAU432 | |
| KK099979.1: | unclassified | unknown | Rhizomucor miehei | 3544 |
| 120391-121325: + | | | CAU432 | |
| KK099981.1: | family4 | unknown | Rhizomucor miehei | 3545 |
| 77756-79958: + | | | CAU432 | |
| KK100000.1: | unclassified | unknown | Rhizomucor miehei | 3546 |
| 15246-16752: + | | | CAU432 | |
| KK100018.1: | family4 | unknown | Rhizomucor miehei | 3547 |
| 1301800-131386: + | | | CAU432 | |
| KK100021.1: | unclassified | unknown | Rhizomucor miehei | 3548 |
| 119952-121012: − | | | CAU432 | |
| KK100065.1: | family4 | unknown | Rhizomucor miehei | 3549 |
| 1-1470: + | | | CAU432 | |
| KK100069.1: | unclassified | unknown | Rhizomucor miehei | 3550 |
| 150792-152099: − | | | CAU432 | |
| KK100105.1: | unclassified | unknown | Rhizomucor miehei | 3551 |
| 80919-81596: − | | | CAU432 | |
| KK100116.1: | unclassified | unknown | Rhizomucor miehei | 3546 |
| 119444.120950: + | | | CAU432 | |
| KK100128.1: | family4 | unknown | Rhizomucor miehei | 3552 |
| 90217-92296: + | | | CAU432 | |
| KK100131.1: | family4 | unknown | Rhizomucor miehei | 3553 |
| 546386-550907: + | | | CAU432 | |
| KK100138.1: | unclassified | unknown | Rhizomucor miehei | 3554 |
| 109372-110154: + | | | CAU432 | |
| KK100139.1: | family4 | unknown | Rhizomucor miehei | 3555 |
| 209152-211457: − | | | CAU432 | |
| KK100149.1: | family4 | unknown | Rhizomucor miehei | 3556 |
| 129046-130155: + | | | CAU432 | |
| KK100155.1: | unclassified | unknown | Rhizomucor miehei | 3557 |
| 83875-85006: − | | | CAU432 | |
| KK100168.1: | unclassified | unknown | Rhizomucor miehei | 3558 |
| 223536-225818: + | | | CAU432 | |
| KK100174.1: | unclassified | unknown | Rhizomucor miehei | 3559 |
| 119433-121009: + | | | CAU432 | |
| KK100182.1: | family4 | unknown | Rhizomucor miehei | 3549 |
| 1-1480 + | | | CAU432 | |
| KK100185.1: | unclassified | unknown | Rhizomucor miehei | 3560 |
| 54623-55689: + | | | CAU432 | |
| KK100185.1: | unclassified | unknown | Rhizomucor miehei | 3561 |
| 56565-58870: − | | | CAU432 | |
| KK100192.1: | unclassified | unknown | Rhizomucor miehei | 3562 |
| 164260-165504: − | | | CAU432 | |
| AZAH01000003.1: | family5 | unknown | Eremothecium coryli | 3563 |
| 333932-335311: − | | | CBS 5749 | |
| JPYR01000057.1: | unclassified | unknown | Belgica antarctica | 3564 |
| 64-1677: − | | | | |
| JPYR01000175.1: | family3 | unknown | Belgica antarctica | 3565 |
| 21033-42466: − | | | | |
| KN714622.1: | unclassified | unknown | Coccomyxa sp. | 3566 |
| 14966-17681: + | | | LA000219 | |
| KN714622 1: | family4 | unknown | Coccomyxa sp. | 3567 |
| 18517-23980 − | | | LA000219 | |
| KN714622.1: | family4 | unknown | Coccomyxa sp. | 3568 |
| 82478-86721: − | | | LA000219 | |
| KN714622.1: | family4 | unknown | Coccomyxa sp. | 3568 |
| 87258-90321: − | | | LA000219 | |
| KN714626.1 | unclassified | unknown | Coccomyxa sp. | 3569 |
| 88680-92513: − | | | LA000219 | |
| KN714628.1: | family4 | unknown | Coccomyxa sp. | 3570 |
| 360-3100: − | | | LA000219 | |
| KN714628.1: | unclassified | unknown | Coccomyxa sp. | 3571 |
| 4237-9070: − | | | LA000219 | |
| LN720687.1: | unclassified | unknown | Parasitella parasitica | 3572 |
| 1-1266: − | | | | |
| LN731111.1: | family4 | unknown | Parasitella parasitica | 3573 |
| 60955-62026: + | | | | |
| CP010918 1: | family5 | unknown | Sporisorium | 3574 |
| 228328-230459: − | | | scitamineum | |
| LNCG01144782.1: | unclassified | unknown | Arabis nordmanniana | 3575 |
| 9741-10711: − | | | | |
| FAPP01001005.1: | unclassified | unknown | Heliconius ismenius | 3576 |
| 110184-111173: − | | | | |
| FAPP01002938.1: | unclassified | unknown | Heliconius ismenius | 3577 |
| 75913-77073: + | | | | |
| KQ965778.1: | unclassified | unknown | Gonapodya prolifera | 3578 |
| 183366-187233: + | | | JEL478 | |
| BCHG01000001.1: | unclassified | unknown | Mucor circinelloides | 3579 |
| 371842-373368: + | | | | |
| BCHG01000004.1: | unclassified | unknown | Mucor circinelloides | 3580 |
| 442648-443848: − | | | | |
| BCHG01000006.1: | family4 | unknown | Mucor circinelloides | 3581 |
| 1-2382: + | | | | |
| BBCHG01000024.1: | unclassified | unknown | Mucor circinelloides | 3582 |
| 151978-155173: − | | | | |
| BCHG01000033.1: | unclassified | unknown | Mucor circinelloides | 3583 |
| 228240-230605: + | | | | |
| BCHG01000046.1: | family4 | unknown | Mucor circinelloides | 3584 |
| 20645-24382: + | | | | |
| BCHG01000053 1: | unclassified | unknown | Mucor circinelloides | 3585 |
| 60844-61731: − | | | | |
| BCHG01000066.1: | unclassified | unknown | Mucor circinelloides | 3586 |
| 84438-86892: − | | | | |
| BCHG01000066.1: | unclassified | unknown | Mucor circinelloides | 3587 |
| 138978-141282: + | | | | |
| BCHG01000071.1: | unclassified | unknown | Mucor circinelloides | 3588 |
| 164724-166751: − | | | | |
| BCHG01000076.1: | family4 | unknown | Mucor circinelloides | 3589 |
| 12686-13481: + | | | | |
| BCHG01000086.1: | family1 | unknown | Mucor circinelloides | 3590 |
| 131731-132859: − | | | | |
| BCHG01000114.1: | unclassified | unknown | Mucor circinelloides | 3591 |
| 99040-100453: − | | | | |
| BCHG01000117.1: | unclassified | unknown | Mucor circinelloides | 3592 |
| 14690-15505 + | | | | |
| BCHG01000127.1: | family1 | unknown | Mucor circinelloides | 3593 |
| 11912-15476: − | | | | |
| BCHG01000176 1: | family1 | unknown | Mucor circinelloides | 3594 |
| 60292-65306: − | | | | |
| BKV441875.1: | unclassified | unknown | Gongronella sp. w5 | 3595 |
| 1090408-1091085: + | | | | |
| KV441879.1: | family4 | unknown | Gongronella sp. w5 | 3596 |
| 800856-805185: + | | | | |
| KV441881.1: | family4 | unknown | Gongronella sp. w5 | 3597 |
| 169956-171502: − | | | | |
| KV441884.1: | family4 | unknown | Gongronella sp. w5 | 3598 |
| 144575-147786: + | | | | |
| KV441884.1: | family4 | unknown | Gongronella sp. w5 | 3599 |
| 257523-261938: + | | | | |
| KV441884.1: | unclassified | unknown | Gongronella sp. w5 | 3600 |
| 262754-263490: + | | | | |
| KV441887.1: | family4 | unknown | Gongronella sp. w5 | 3601 |
| 458770-461220: + | | | | |
| KV441890.1: | unclassified | unknown | Gongronella sp. w5 | 3602 |
| 103971-107339: − | | | | |
| KV441890.1: | family4 | unknown | Gongronella sp. w5 | 3603 |
| 130559-133740: − | | | | |
| KV441890.1: | unclassified | unknown | Gongronella sp. w5 | 3604 |
| 445151-447709: + | | | | |
| KV441890.1: | unclassified | unknown | Gongronella sp. w5 | 3605 |
| 448292-449568: + | | | | |
| KV441890.1: | family4 | unknown | Gongronella sp. w5 | 3606 |
| 450411-454006: + | | | | |
| KV441896.1: | family4 | unknown | Gongronella sp. w5 | 3607 |
| 107234-110003: + | | | | |
| BKV441896.1: | family4 | unknown | Gongronella sp. w5 | 3608 |
| 1696800-171757: − | | | | |
| KV441900.1: | family4 | unknown | Gongronella sp. w5 | 3609 |
| 192985-196598: − | | | | |
| KV441900.1: | family4 | unknown | Gongronella sp. w5 | 3610 |
| 299819-304309: + | | | | |
| KV441903.1: | unclassified | unknown | Gongronella sp. w5 | 3611 |
| 85716-89614: + | | | | |
| KV441903.1: | family4 | unknown | Gongronella sp. w5 | 3612 |
| 169936-172780: − | | | | |
| KV441905.1: | family4 | unknown | Gongronella sp. w5 | 3613 |
| 190736-193027: − | | | | |
| KV441905.1: | family4 | unknown | Gongronella sp. w5 | 3614 |
| 354593-357207: + | | | | |
| KV441908.1: | unclassified | unknown | Gongronella sp. w5 | 3615 |
| 79666-81877: + | | | | |
| KV441912.1: | family4 | unknown | Gongronella sp. w5 | 3616 |
| 52900-57598: − | | | | |
| KV441912.1: | unclassified | unknown | Gongronella sp. w5 | 3617 |
| 59376-65931: − | | | | |
| KV441919.1: | family | unknown | Gongronella sp. w5 | 3618 |
| 196576-199809: − | | | | |
| KV441920.1: | unclassified | unknown | Gongronella sp. w5 | 3619 |
| 90288-97985: + | | | | |
| KV441925.1: | Eunclassified | unknown | Gongronella sp. w5 | 3620 |
| 179873-182909: − | | | | |
| KV441927.1: | unclassified | unknown | Gongronella sp. w5 | 3621 |
| 217673-219715: − | | | | |
| KV441938.1: | family4 | unknown | Gongronella sp. w5 | 3622 |
| 1015300-102941: + | | | | |
| KV441961.1: | family4 | unknown | Gongronella sp. w5 | 3623 |
| 43381-45676: − | | | | |
| KV441970.1: | family4 | unknown | Gongronella sp. w5 | 3624 |
| 31188-34685: − | | | | |
| BDDA01000005.1: | family4 | unknown | Chlamydomonas | 3625 |
| 45218-48443 + | | | asymmetrica | |
| BDDC01000032.1: | unclassified | unknown | Chlamydomonas | 3626 |
| 54060-58781: + | | | asymmetrica | |
| BDDC01000036.1: | unclassified | unknown | Chlamydomonas | 3627 |
| 85939-88734: − | | | asymmetrica | |
| BDDC01000308.1: | unclassified | unknown | Chlamydomonas | 3628 |
| 62905-67030: − | | | asymmetrica | |
| BDDC01000434.1: | unclassified | unknown | Chlamydomonas | 3629 |
| 15260-29765: − | | | asymmetrica | |
| LUGH01000025.1: | unclassified | unknowni | Chlamydomonas | 3630 |
| 11359-12072: − | | | asymmetrica | |
| JUFY01029430.1: | family3 | unknown | Leptopilina clavipes | 3631 |
| 79529-80543: − | | | | |
| BCKB01000001.1: | family5 | unknown | Candida sp. JCM 15000 | 3632 |
| 1195228-1199125: | | | | |
| BCKB01000002.1: | family5 | unknown | Candida sp. JCM 15000 | 3633 |
| 2722962-2724596: | | | | |
| KV918763.1: | unclassified | unknown | Porphyra umbilicalis | 3634 |
| 703397-705721: − | | | | |
| KV918798.1: | unclassified | unknown | Porphyra umbilicalis | 3635 |
| 278033-279747: − | | | | |
| KV918800.1: | unclassified | unknown | Porphyra umbilicalis | 3636 |
| 147268-149072: − | | | | |
| KV918810.1: | unclassified | unknown | Porphyra umbilicalis | 3637 |
| 135410-137020: + | | | | |
| KV918876.1: | unclassified | unknown | Porphyra umbilicalis | 3638 |
| 26076-27796: + | | | | |
| KV918917.1: | unclassified | unknown | Porphyra umbilicalis | 3639 |
| 67516-69200: − | | | | |
| KV918974.1: | unclassified | unknown | Porphyra umbilicalis | 3640 |
| 115721-117295: − | | | | |
| KV919123.1: | unclassified | unknown | Porphyra umbilicalis | 3641 |
| 55466-57256: + | | | | |
| NDFZ01005234.1: | unclassified | unknown | Mamestra configurata | 3642 |
| 2318-3849: + | | | | |
| NIVO01056274.1: | unclassified | unknown | Ammotragus lervia | 3643 |
| 18333-19379: − | | | | |
| NIVO01056274.1: | unclassified | unknown | Ammotragus lervia | 3644 |
| 66120-67274: − | | | | |
| BEGY01000135.1: | family4 | unknown | Chlamydomonas | 3645 |
| 2986-4086: + | | | eustigma | |
| BEGY01000159.1: | family5 | unknown | Chlamydomonas | 3646 |
| 57604-58284: + | | | eustigma | |
| NMRB01000222.1: | family5 | unknown | Notospermus | 3647 |
| 400927-402390: − | | | geniculatus | |
| NMRB01000412.1: | family5 | unknown | Notospermus | 3648 |
| 270388-271089: + | | | geniculatus | |
| NMRB01000909.1: | family5 | unknown | Notospermus | 3649 |
| 107659-109122: − | | | geniculatus | |
| NMRB01001973.1: | family5 | unknown | Notospermus | 3650 |
| 19531-21042: − | | | geniculatus | |
| MZZL01000010.1: | unclassified | unknown | Apophysomyces | 3651 |
| 48119-52047: − | | | variabilis | |
| MZZL01000106.1: | unclassified | unknown | Apophysomyces | 3652 |
| 13133-14649: − | | | variabilis | |
| MZZL01000106.1: | family1 | Crypton | Apophysomyces | 3653 |
| 90375-93309: + | | | variabilis | |
| MZZL01000110.1: | unclassified | Helitron | Apophysomyces | 3654 |
| 98390-99273: + | | | variabilis | |
| MZZL01000117.1: | unclassified | unknown | Apophysomyces | 3655 |
| 8147-9247: − | | | variabilis | |
| MZZL01000117 1: | unclassified | unknown | Apophysomyces | 3656 |
| 243737-244859: + | | | variabilis | |
| MZZL01000126.1: | unclassified | unknown | Apophysomyces | 3657 |
| 12907-14747: − | | | variabilis | |
| MZZL01000128.1: | unclassified | unknown | Apophysomyces | 3658 |
| 14240-15256: − | | | variabilis | |
| MZZL01000132.1: | family4 | unknown | Apophysomyces | 3659 |
| 67433-69995: − | | | variabilis | |
| MZZL01000133.1: | unclassified | unknown | Apophysomyces | 3660 |
| 138379-141880: + | | | variabilis | |
| MZZL01000136.1: | family1 | Crypton | Apophysomyces | 3661 |
| 196030-200314: + | | | variabilis | |
| MZZL01000136.1: | unclassified | Helitron | Apophysomyces | 3662 |
| 215433-217536: + | | | variabilis | |
| MZZL01000137.1: | family1 | unknown | Apophysomyces | 3663 |
| 24845-29090: + | | | variabilis | |
| MZZL01000137 1: | family1 | Crypton | Apophysomyces | 3664 |
| 156488-157406: − | | | variabilis | |
| MZZL01000137.1: | family1 | unknown | Apophysomyces | 3665 |
| 230359-234604: + | | | variabilis | |
| MZZL01000138.1: | family1 | unknown | Apophysomyces | 3666 |
| 65997-72463: + | | | variabilis | |
| MZZL01000138.1: | family4 | Mariner/Tc1 | Apophysomyces | 3667 |
| 104282-106830: + | | | variabilis | |
| MZZL01000138.1: | family1 | Helitron | Apophysomyces | 3668 |
| 170745-172038: − | | | variabilis | |
| MZZL01000138.1: | family4 | Mariner/Tc1 | Apophysomyces | 3669 |
| 345075-348185: + | | | variabilis | |
| MZZL01000138.1: | unclassified | CryptonF | Apophysomyces | 3670 |
| 486636-490567: − | | | variabilis | |
| MZZL01000022.1: | family4 | Mariner/Tc1 | Apophysomyces | 3671 |
| 26318-28242: − | | | variabilis | |
| MZZL01000025 1: | unclassified | unknown | Apophysomyces | 3672 |
| 117916-120931: + | | | variabilis | |
| MZZL01000029.1: | unclassified | CryptonF | Apophysomyces | 3673 |
| 119279-123210: − | | | variabilis | |
| MZZL01000031.1: | family4 | unknown | Apophysomyces | 3674 |
| 40583-43190: − | | | variabilis | |
| MZZL01000031.1: | family4 | Mariner/Tc1 | Apophysomyces | 3675 |
| 94035-97085: + | | | variabilis | |
| MZZL01000032.1: | unclassified | unknown | Apophysomyces | 3676 |
| 97709-98722: + | | | variabilis | |
| MZZL01000033.1: | family4 | Mariner/Tc1 | Apophysomyces | 3677 |
| 129423-132187: − | | | variabilis | |
| MZZL01000039.1: | family1 | Crypton | Apophysomyces | 3678 |
| 314463-318764: − | | | variabilis | |
| MZZL01000376.1: | unclassified | CryptonF | Apophysomyces | 3679 |
| 426609-430540: − | | | variabilis | |
| MZZL01000380 1: | family2 | unknown | Apophysomyces | 3680 |
| 34363-38931: + | | | variabilis | |
| MZZL01000380.1: | unclassified | unknown | Apophysomyces | 3681 |
| 213176-215088: + | | | variabilis | |
| MZZL01000380.1: | unclassified | Helitron | Apophysomyces | 3682 |
| 392549-393494: + | | | variabilis | |
| MZZL01000380.1: | unclassified | Mariner/Tc1 | Apophysomyces | 3683 |
| 761291-762401: + | | | variabilis | |
| MZZL01000384.1: | family4 | unknown | Apophysomyces | 3684 |
| 229191-231184: − | | | variabilis | |
| MZZL01000384.1: | unclassified | CryptonF | Apophysomyces | 3685 |
| 323153-327082: − | | | variabilis | |
| MZZL01000385.1: | unclassified | unknown | Apophysomyces | 3686 |
| 23598-26307: + | | | variabilis | |
| MZZL01000386.1: | unclassified | Mariner/Tc1 | Apophysomyces | 3687 |
| 253911-254922: − | | | variabilis | |
| MZZL01000386.1: | family4 | Mariner/Tc1 | Apophysomyces | 3688 |
| 339173-341605: − | | | variabilis | |
| MZZL01000386 1: | unclassified | unknown | Apophysomyces | 3689 |
| 364831-367078: − | | | variabilis | |
| MZZL01000386.1: | unclassified | Helitron | Apophysomyces | 3690 |
| 552132-552816: + | | | variabilis | |
| MZZL01000387.1: | family1 | unknown | Apophysomyces | 3691 |
| 134566-139645: − | | | variabilis | |
| MZZL01000387.1: | family4 | unknown | Apophysomyces | 3692 |
| 356160-359095: + | | | variabilis | |
| MZZL01000388.1: | family4 | Mariner/Tc1 | Apophysomyces | 3693 |
| 155928-158473: − | | | variabilis | |
| MZZL01000389.1: | family4 | unknown | Apophysomyces | 3694 |
| 381701-383159: − | | | variabilis | |
| MZZL01000390.1: | unclassified | unknown | Apophysomyces | 3695 |
| 146898-151616: − | | | variabilis | |
| MZZL01000390.1: | family1 | Crypton | Apophysomyces | 3696 |
| 504471-506061: + | | | variabilis | |
| MZZL01000391 1: | family4 | unknown | Apophysomyces | 3697 |
| 29700-32587: + | | | variabilis | |
| MZZL01000391.1: | family4 | Mariner/Tc1 | Apophysomyces | 3698 |
| 632474-634425: − | | | variabilis | |
| MZZL01000392.1: | family4 | Mariner/Tc1 | Apophysomyces | 3699 |
| 151683-154232: + | | | variabilis | |
| MZZL01000393.1: | family1 | Crypton | Apophysomyces | 3700 |
| 513083-514220: + | | | variabilis | |
| MZZL01000393.1: | family2 | unknown | Apophysomyces | 3701 |
| 717603-720647: + | | | variabilis | |
| MZZL01000393.1: | family4 | unknown | Apophysomyces | 3702 |
| 788821-791607: + | | | variabilis | |
| MZZL01000394.1: | family1 | unknown | Apophysomyces | 3703 |
| 114121-118366: − | | | variabilis | |
| MZZL01000394.1: | family1 | Crypton | Apophysomyces | 3704 |
| 222473-226756: + | | | variabilis | |
| MZZL01000394 1: | family4 | unknown | Apophysomyces | 3705 |
| 242337-244617: + | | | variabilis | |
| MZZL01000396.1: | family1 | Crypton | Apophysomyces | 3706 |
| 131952-133150: − | | | variabilis | |
| MZZL01000398.1: | family1 | unknown | Apophysomyces | 3703 |
| 181685-185930: − | | | variabilis | |
| MZZL01000398.1: | unclassified | CryptonF | Apophysomyces | 3707 |
| 289435-293609: − | | | variabilis | |
| MZZL01000398.1: | unclassified | unknown | Apophysomyces | 3708 |
| 517644-518762: + | | | variabilis | |
| MZZL01000398.1: | family4 | unknown | Apophysomyces | 3709 |
| 928208-930466: + | | | variabilis | |
| MZZL01000399.1: | unclassified | unknown | Apophysomyces | 3710 |
| 500974-502968: − | | | variabilis | |
| MZZL01000399.1: | family1 | unknown | Apophysomyces | 3663 |
| 619821-624066: + | | | variabilis | |
| MZZL01000400 1: | family4 | Mariner/Tc1 | Apophysomyces | 3711 |
| 108030-110976: + | | | variabilis | |
| MZZL01000401.1: | unclassified | Helitron | Apophysomyces | 3712 |
| 369118-370032: + | | | variabilis | |
| MZZL01000401.1: | family4 | unknown | Apophysomyces | 3713 |
| 381393-384192: − | | | variabilis | |
| MZZL01000401.1: | family4 | Mariner/Tc1 | Apophysomyces | 3714 |
| 456274-459219: − | | | variabilis | |
| MZZL01000401.1: | family4 | unknown | Apophysomyces | 3715 |
| 699584-701445: + | | | variabilis | |
| MZZL01000401.1: | family4 | unknown | Apophysomyces | 3716 |
| 801029-802637: + | | | variabilis | |
| MZZL01000401.1: | unclassified | unknown | Apophysomyces | 3717 |
| 860778-866626: + | | | variabilis | |
| MZZL01000401.1: | family4 | unknown | Apophysomyces | 3718 |
| 1116034-1118445: | | | variabilis | |
| MZZL01000401.1: | unclassified | unknown | Apophysomyces | 3719 |
| 1154658-1156811: | | | variabilis | |
| MZZL01000401.1: | family4 | unknown | Apophysomyces | 3720 |
| 1331073-1333602: + | | | variabilis | |
| MZZL01000402.1: | family4 | Mariner/Tc1 | Apophysomyces | 3721 |
| 90866-93413 + | | | variabilis | |
| MZZL01000402.1: | unclassified | unknown | Apophysomyces | 3722 |
| 152151-153114: + | | | variabilis | |
| MZZL01000402.1: | unclassified | unknown | Apophysomyces | 3723 |
| 304166-306179: + | | | variabilis | |
| MZZL01000403.1: | family1 | Helitron | Apophysomyces | 3724 |
| 585236-586850: + | | | variabilis | |
| MZZL01000403.1: | family4 | Mariner/Tc1 | Apophysomyces | 3725 |
| 629578-632524: − | | | variabilis | |
| MZZL01000403.1: | unclassified | Helitron | Apophysomyces | 3726 |
| 958216-960768: − | | | variabilis | |
| MZZL01000404.1: | family4 | Helitron | Apophysomyces | 3727 |
| 96893-99866: + | | | variabilis | |
| MZZL01000404 1: | unclassified | unknown | Apophysomyces | 3728 |
| 117565-118398: − | | | variabilis | |
| MZZL01000405.1: | family4 | unknown | Apophysomyces | 3729 |
| 784015-786028: − | | | variabilis | |
| MZZL01000405.1: | family1 | Helitron | Apophysomyces | 3730 |
| 1195503-1198282: | | | variabilis | |
| MZZL01000405.1: | family4 | Mariner/Tc1 | Apophysomyces | 3731 |
| 1203946-1206515: + | | | variabilis | |
| MZZL01000405.1: | family4 | Mariner/Tc1 | Apophysomyces | 3732 |
| 1376639-1379352: | | | variabilis | |
| MZZL01000407.1: | family4 | Mariner/Tc1 | Apophysomyces | 3733 |
| 74195-77140: − | | | variabilis | |
| MZZL01000408.1: | unclassified | Helitron | Apophysomyces | 3734 |
| 143039-145973: + | | | variabilis | |
| MZZL01000408.1: | unclassified | CryptonF | Apophysomyces | 3735 |
| 294765-296371: + | | | variabilis | |
| MZZL01000408.1: | unclassified | unknown | Apophysomyces | 3736 |
| 372566-373668: + | | | variabilis | |
| MZZL01000408.1: | unclassified | unknown | Apophysomyces | 3737 |
| 694540-696187: − | | | variabilis | |
| MZZL01000408.1: | family4 | Mariner/Tc1 | Apophysomyces | 3738 |
| 810428-813108: + | | | variabilis | |
| MZZL01000408.1: | unclassified | CryptonF | Apophysomyces | 3739 |
| 820687-824671: − | | | variabilis | |
| MZZL01000408.1: | unclassified | Helitron | Apophysomyces | 3740 |
| 980539-982576: − | | | variabilis | |
| MZZL01000408.1: | family1 | Helitron | Apophysomyces | 3741 |
| 1383363-1386263: + | | | variabilis | |
| MZZL01000408.1: | family4 | unknown | Apophysomyces | 3742 |
| 1386743-1389025: | | | variabilis | |
| MZZL01000408.1: | family1 | Crypton | Apophysomyces | 3743 |
| 1544342-1548402: | | | variabilis | |
| MZZL01000408.1: | unclassified | Mariner/Tc1 | Apophysomyces | 3744 |
| 1739201-1741105: + | | | variabilis | |
| MZZL01000408.1: | family4 | Mariner/Tc1 | Apophysomyces | 3745 |
| 1891686-1895689: + | | | variabilis | |
| MZZL01000408.1: | unclassified | Helitron | Apophysomyces | 3746 |
| 2152005-2152926: + | | | variabilis | |
| MZZL01000408.1: | unclassified | CryptonF | Apophysomyces | 3747 |
| 2183634-2188141: + | | | variabilis | |
| MZZL01000408.1: | family4 | Mariner/Tc1 | Apophysomyces | 3748 |
| 2440035-2442740: | | | variabilis | |
| MZZL01000408.1: | unclassified | CryptonF | Apophysomyces | 3749 |
| 2583108-2587039: | | | variabilis | |
| MZZL01000409.1: | family4 | unknown | Apophysomyces | 3750 |
| 58755-60279: − | | | variabilis | |
| MZZL01000409.1: | family4 | Mariner/Tc1 | Apophysomyces | 3751 |
| 370817-373763: − | | | variabilis | |
| MZZL01000409.1: | unclassified | Helitron | Apophysomyces | 3752 |
| 592515-594722: + | | | variabilis | |
| MZZL01000409 1: | family4 | unknown | Apophysomyces | 3753 |
| 735730-738720: − | | | variabilis | |
| MZZL01000409.1: | unclassified | unknown | Apophysomyces | 3754 |
| 754685-756463: + | | | variabilis | |
| MZZL01000409.1: | family1 | Helitron | Apophysomyces | 3755 |
| 872937-876132: + | | | variabilis | |
| MZZL01000409.1: | unclassified | unknown | Apophysomyces | 3756 |
| 913664-915599: − | | | variabilis | |
| MZZL01000409.1: | unclassified | CryptonF | Apophysomyces | 3757 |
| 1210974-1214905: | | | variabilis | |
| MZZL01000409.1: | family1 | unknown | Apophysomyces | 3758 |
| 1282851-1287096: + | | | variabilis | |
| MZZL01000409.1: | unclassified | Mariner/Tc1 | Apophysomyces | 3759 |
| 1305638-1308109: + | | | variabilis | |
| MZZL01000409.1: | family4 | Helitron | Apophysomyces | 3760 |
| 1356417-1359405 | | | variabilis | |
| MZZL01000409.1: | family4 | unknown | Apophysomyces | 3761 |
| 1461420-1466147: | | | variabilis | |
| MZZL01000409.1: | family4 | Mariner/Tc1 | Apophysomyces | 3762 |
| 1608817-1611668: + | | | variabilis | |
| MZZL01000409.1: | family1 | unknown | Apophysomyces | 3763 |
| 1753336-1757581: | | | variabilis | |
| MZZL01000409.1: | family4 | Helitron | Apophysomyces | 3764 |
| 1901830-1905050: | | | variabilis | |
| MZZL01000409.1: | unclassified | unknown | Apophysomyces | 3765 |
| 1969698-1973572: + | | | variabilis | |
| MZZL01000409 1: | unclassified | Helitron | Apophysomyces | 3766 |
| 2123038-2125336: | | | variabilis | |
| MZZL01000409 1: | unclassified | CryptonF | Apophysomyces | 3767 |
| 2158941-2162872: | | | variabilis | |
| MZZL01000409.1: | unclassified | CryptonF | Apophysomyces | 3768 |
| 3303057-3307231: + | | | variabilis | |
| MZZL01000409.1: | family1 | Crypton | Apophysomyces | 3769 |
| 3320577-3324861: | | | variabilis | |
| MZZL01000409.1: | unclassified | Helitron | Apophysomyces | 3770 |
| 3659451-3662389: + | | | variabilis | |
| MZZL01000409.1: | unclassified | unknown | Apophysomyces | 3771 |
| 3875517-3880623: | | | variabilis | |
| MZZL01000045.1: | family4 | unknown | Apophysomyces | 3772 |
| 77673-80225: + | | | variabilis | |
| MZZL01000047.1: | family1 | unknown | Apophysomyces | 3773 |
| 1458-4289: + | | | variabilis | |
| MZZL01000047.1: | unclassified | unknown | Apophysomyces | 3774 |
| 55456-56778: − | | | variabilis | |
| MZZL01000054.1: | family1 | Crypton | Apophysomyces | 3775 |
| 34860-39144: − | | | variabilis | |
| MZZL01000054.1: | family1 | unknown | Apophysomyces | 3763 |
| 72213-76458: − | | | variabilis | |
| MZZL01000055.1: | family4 | unknown | Apophysomyces | 3776 |
| 322457-323740: − | | | variabilis | |
| MZZL01000059 1: | family1 | unknown | Apophysomyces | 3777 |
| 80468-81307: − | | | variabilis | |
| MZZL01000075.1: | unclassified | unknown | Apophysomyces | 3778 |
| 70050-73316: + | | | variabilis | |
| MZZL01000076.1: | family1 | unknown | Apophysomyces | 3663 |
| 2502-16747: − | | | variabilis | |
| MZZL01000076.1: | family4 | unknown | Apophysomyces | 3779 |
| 144122-145964: − | | | variabilis | |
| MZZL01000082.1: | family1 | Crypton | Apophysomyces | 3780 |
| 66780-70432: − | | | variabilis | |
| MZZL01000092.1: | family4 | unknown | Apophysomyces | 3781 |
| 7968-11902: + | | | variabilis | |
| NQII01001228.1: | unclassified | unknown | Clitarchus hooker | 3782 |
| 30549-36453: − | | | | |
| PGGS01000007.1: | family4 | unknown | Tetrabaena socialis | 3783 |
| 516219-518777: − | | | | |
| PGGS01000007.1: | family4 | unknown | Tetrabaena socialis | 3784 |
| 532046-533815: − | | | | |
| PGGS01000133.1: | family4 | unknown | Tetrabaena socialis | 3785 |
| 188027-189545: − | | | | |
| PGGS01000625.1: | family4 | Mariner/Tc1 | Tetrabaena socialis | 3786 |
| 27523-29262: − | | | | |
| BCIH01000001.1: | family4 | unknown | Prototheca cufis | 3787 |
| 8534293-537447: + | | | | |
| BCIH01000002.1: | unclassified | unknown | Prototheca cufis | 3788 |
| 1187796-1192032: + | | | | |
| BCIH01000002.1: | family4 | unknown | Prototheca cufis | 3789 |
| 2201916-2203639: | | | | |
| BCIH01000003.1: | unclassified | unknown | Prototheca cufis | 3790 |
| 1246311-1247254: | | | | |
| BBCIH01000004.1: | unclassified | unknown | Prototheca cufis | 3791 |
| 430022-430865: − | | | | |
| BCIH01000004.1: | family4 | unknown | Prototheca cufis | 3792 |
| 1439052-1444786: + | | | | |
| BCIH01000004.1: | unclassified | unknown | Prototheca cufis | 3793 |
| 1446072-1448817: + | | | | |
| BCIH01000004.1: | family4 | unknown | Prototheca cufis | 3794 |
| 1450413-1454446: | | | | |
| BBCIH01000005.1: | unclassified | unknown | Prototheca cufis | 3795 |
| 403855-404549: + | | | | |
| BCIH01000005.1: | unclassified | unknown | Prototheca cufis | 3796 |
| 1142029-1147293: + | | | | |
| BCIH01000006.1: | family4 | unknown | Prototheca cufis | 3797 |
| 532526-535410: + | | | | |
| BCIH01000007.1: | family4 | unknown | Prototheca cufis | 3798 |
| 276132-279429: − | | | | |
| BCIH01000007.1: | unclassified | unknown | Prototheca cufis | 3799 |
| 297605-301818: + | | | | |
| BCIH01000007.1: | family4 | unknown | Prototheca cufis | 3800 |
| 1135944-1138218: + | | | | |
| BCIH01000008.1 | family4 | unknown | Prototheca cufis | 3801 |
| 790269-794753: + | | | | |
| BCIH01000008.1: | unclassified | unknown | Prototheca cufis | 3802 |
| 1080289-1081012: | | | | |
| &BCIH01000008.1: | family4 | unknown | Prototheca cufis | 3803 |
| 1122019-1123272: | | | | |
| BBCIH01000009.1: | family4 | unknown | Prototheca cufis | 3804 |
| 213864-218168: + | | | | |
| BCIH01000009.1 | unclassified | unknown | Prototheca cufis | 3805 |
| 1004004-1004848: + | | | | |
| BCIH01000010.1 | family4 | unknown | Prototheca cufis | 3806 |
| 111428-114362: − | | | | |
| BCIH01000010.1: | unclassified | unknown | Prototheca cufis | 3807 |
| 315828-325011: − | | | | |
| BCIH01000012.1: | unclassified | unknown | Prototheca cufis | 3808 |
| 271774-274765: + | | | | |
| BCIH01000012.1: | family4 | unknown | Prototheca cufis | 3809 |
| 288014-291126: + | | | | |
| BCIH01000012.1: | family4 | unknown | Prototheca cufis | 3810 |
| 308775-317698: − | | | | |
| BBCIH01000012.1: | family4 | unknown | Prototheca cufis | 3811 |
| 430117-434260: − | | | | |
| BCIH01000012.1: | unclassified | unknown | Prototheca cufis | 3812 |
| 575442-585140: − | | | | |
| BCIH01000018.1: | family4 | unknown | Prototheca cufis | 3813 |
| 12522-45713: + | | | | |
| BBCIH01000020.1: | family4 | unknown | Prototheca cufis | 3814 |
| 110840-113993: − | | | | |
| BCHH01000021.1: | unclassified | unknown | Prototheca cufis | 3815 |
| 23529-26524: − | | | | |
| PGRX01007193.1: | unclassified | unknown | Periplaneta americana | 3816 |
| 109804-111117: + | | | | |
| BDS101000009.1: | unclassified | unknown | Eudorina sp. 2006-703- | 3817 |
| 964760-972392: − | | | Eu-15 | |
| PJQL01000003.1: | unclassified | unknown | Rhizopus azygosporus | 3818 |
| 38618-44609: + | | | | |
| PQFF01000009.1: | unclassified | unknown | Diversispora epigaea | 3819 |
| 123804-125494: + | | | | |
| PQFF01000199.1: | family5 | unknown | Diversispora epigaea | 3820 |
| 19171-20985: − | | | | |
| PQFF01000388.1: | unclassified | unknown | Diversispora epigaea | 3821 |
| 328895-329826: − | | | | |
| PQFF01000435.1: | unclassified | unknown | Diversispora epigaea | 3822 |
| 33124-35270: + | | | | |
| PQFF01000438.1: | family5 | unknown | Diversispora epigaea | 3823 |
| 79049-80874: + | | | | |
| PQFF01000007.1: | family5 | unknown | Diversispora epigaea | 3824 |
| 900924-902186: + | | | | |
| QKYT01000198.1: | unclassified | unknown | Glomus cerebriforme | 3825 |
| 175160-176615: − | | | | |
| QKYT01000331.1: | unclassified | unknown | Glomus cerebriforme | 3826 |
| 69540-71437: + | | | | |
| QKYT01000063 1: | family5 | unknown | Glomus cerebriforme | 3827 |
| 55055-59735: + | | | | |
| QKYT01000548.1: | unclassified | unknown | Glomus cerebriforme | 3828 |
| 62556-63572: + | | | | |
| QKYT01000063.1: | family5 | unknown | Glomus cerebriforme | 3829 |
| 41511-43234: − | | | | |
| QKYT01000713.1: | unclassified | unknown | Glomus cerebriforme | 3830 |
| 12029-13976: + | | | | |
| QKWP01000049.1: | family5 | unknown | Gigaspora rosea | 3831 |
| 168877-170295: + | | | | |
| QKWP01000162 1: | unclassified | unknown | Gigaspora rosea | 3832 |
| 369834-372065: − | | | | |
| BQKWP01000232.1: | family5 | unknown | Gigaspora rosea | 3833 |
| 52786-54420: + | | | | |
| QKWP01000239.1: | unclassified | unknown | Gigaspora rosea | 3834 |
| 404008-405369: − | | | | |
| QKWP01000284.1: | family5 | unknown | Gigaspora rosea | 3835 |
| 287409-289043: + | | | | |
| QKWP01000336.1: | family5 | unknown | Gigaspora rosea | 3836 |
| 340061-341617: − | | | | |
| QKWP01000446.1: | family5 | unknown | Gigaspora rosea | 3837 |
| 118180-119813: − | | | | |
| QKWP01000462.1: | unclassified | unknown | Gigaspora rosea | 3838 |
| 136602-138082: + | | | | |
| QKWP01000518.1: | unclassified | unknown | Gigaspora rosea | 3839 |
| 263418-264245: − | | | | |
| QKWP01000624 1: | family5 | unknown | Gigaspora rosea | 3840 |
| 61238-63970: + | | | | |
| QKWP01000655.1: | family5 | unknown | Gigaspora rosea | 3841 |
| 216357-217991: + | | | | |
| QKWP01000728.1: | family5 | unknown | Gigaspora rosea | 3842 |
| 220724-222498: + | | | | |
| QKWP01000745.1: | family5 | unknown | Gigaspora rosea | 3841 |
| 62923-64557: + | | | | |
| QKWP01000775.1: | family5 | unknown | Gigaspora rosea | 3843 |
| 125316-126504: − | | | | |
| QKWP01001060.1: | family5 | unknown | Gigaspora rosea | 3844 |
| 147174-148610: + | | | | |
| QKWP01001114.1: | family5 | unknown | Gigaspora rosea | 3845 |
| 90436-91872: + | | | | |
| QKWP01001247.1: | family5 | unknown | Gigaspora rosea | 3841 |
| 141266-142900: + | | | | |
| QKWP01001321 1: | family5 | unknown | Gigaspora rosea | 3846 |
| 127987-129594: − | | | | |
| QKWP01001382.1: | family5 | unknown | Gigaspora rosea | 3847 |
| 126841-127896: − | | | | |
| QKWP01001449.1: | family5 | unknown | Gigaspora rosea | 3848 |
| 62744-63445: + | | | | |
| QKWP01001449.1: | family5 | unknown | Gigaspora rosea | 3849 |
| 82473-83972: − | | | | |
| QKWP01001449.1: | family5 | unknown | Gigaspora rosea | 3850 |
| 93715-95241: + | | | | |
| QKWP01001507.1: | unclassified | unknown | Gigaspora rosea | 3851 |
| 19972-20799: − | | | | |
| QKWP01001568.1: | family5 | unknown | Gigaspora rosea | 3852 |
| 60705-61971: + | | | | |
| QKWP01001721.1: | family5 | unknown | Gigaspora rosea | 3853 |
| 1783-3467: + | | | | |
| QKWP01001750 1: | family4 | unknown | Gigaspora rosea | 3854 |
| 94796-96187: + | | | | |
| QKWP01001797.1: | family5 | unknown | Gigaspora rosea | 3855 |
| 9912-10742: + | | | | |
| QKWP01001822.1: | family5 | unknown | Gigaspora rosea | 3856 |
| 72642-74085: − | | | | |
| QKWP01002017.1 | family5 | unknown | Gigaspora rosea | 3857 |
| 6054-7663: − | | | | |
| QKWP01002061 1: | unclassified | unknown | Gigaspora rosea | 3858 |
| 6388-10234: + | | | | |
| QKWP01002574.1: | family4 | unknown | Gigaspora rosea | 3859 |
| 14120-15440: + | | | | |
| QKXD01004045.1: | unclassified | unknown | Pogostemon cablin | 3860 |
| 116002-120600: − | | | | |
| QKXD01021245.1: | unclassified | unknown | Pogostemon cablin | 3861 |
| 224605-225839: + | | | | |
| QKXD01021245.1: | unclassified | unknown | Pogostemon cablin | 3862 |
| 863782-874061: + | | | | |
| PPHX02000002.1: | unclassified | unknown | Torulaspora franciscae | 3863 |
| 221077-223314: + | | | | |
| PPHX02000002.1: | family5 | unknown | Torulaspora franciscae | 3864 |
| 663091-664428: + | | | | |
| PPHX02000002.1: | family5 | unknown | Torulaspora franciscae | 3865 |
| 742534-743982: − | | | | |
| &PPHX02000009 1: | family5 | unknown | Torulaspora franciscae | 3866 |
| 445156-446616: − | | | | |
| PPHX02000011.1: | family5 | unknown | Torulaspora franciscae | 3867 |
| 170061-171521: − | | | | |
| PPHX02000006.1: | unclassified | unknown | Torulaspora franciscae | 3868 |
| 56789-59198: − | | | | |
| PPHX02000006.1: | unclassified | unknown | Torulaspora franciscae | 3869 |
| 413576-414880: − | | | | |
| PPJW01000049.1: | family5 | unknown | Lipomyces sp. NRRL Y- | 3870 |
| 122345-123769: − | | | 11553 | |
| QZCP01000001 1: | family3 | unknown | Brevipalpus yothersi | 3871 |
| 244314-253786: − | | | | |
| PVIO02825835.1: | unclassified | unknown | Procavia capensis | 3872 |
| 456374-457396: − | | | | |
| QAXP01005199.1: | unclassified | unknown | Characiochloris sp. | 3873 |
| 27794-30820: − | | | AAM3 | |
| QAXP01006027.1: | unclassified | unknown | Characiochloris sp. | 3874 |
| 50941-51624: + | | | AAM3 | |
| SNMR01039333.1: | unclassified | unknown | Tuta absoluta | 3875 |
| 43937-44914: − | | | | |
| MRUE01002290.1: | unclassified | unknown | Drosophila neonasuta | 3876 |
| 90336-96044: − | | | | |
| MRUE01002745.1: | unclassified | unknown | Drosophila neonasuta | 3877 |
| 37373-43763: + | | | | |
| CP031824 1: | family2 | unknown | Lichtheimia ramosa | 3878 |
| 2132304-2136629: − | | | | |
| CP031826.1: | family2 | unknown | Lichtheimia ramosa | 3879 |
| 1135643-1140384: − | | | | |
| CP031827.1: | family4 | unknown | Lichtheimia ramosa | 3880 |
| 1895703-1898091: + | | | | |
| CP031827.1: | family1 | unknown | Lichtheimia ramosa | 3881 |
| 2305537-2307888: + | | | | |
| CP031828.1: | family1 | unknown | Lichtheimia ramosa | 3882 |
| 960626-966860: − | | | | |
| CP031828.1: | unclassified | unknown | Lichtheimia ramosa | 3883 |
| 2796555-2797359: + | | | | |
| CP031830.1: | family1 | unknown | Lichtheimia ramosa | 3884 |
| 893023-896273: + | | | | |
| CP031831.1: | family4 | unknown | Lichtheimia ramosa | 3885 |
| 2025866-2027034: + | | | | |
| WEIE01000169.1: | unclassified | unknown | Ursus thibetanus | 3886 |
| 838263-839429: + | | | thibetanus | |
| VZXH01000147.1: | unclassified | unknown | Saccharomyces | 3887 |
| 31099-35408 + | | | cerevisiae × | |
| | | | Saccharomyces | |
| | | | eubayanus × | |
| | | | Saccharomyces | |
| | | | kudriavzevii × | |
| | | | Saccharomyces uvarum | |
| WTPW01000019.1: | unclassified | IS607 | Gigaspora margarita | 3888 |
| 574419-576750: + | | | | |
| WTPW01000032.1: | family5 | unknown | Gigaspora margarita | 3889 |
| 868975-870795: + | | | | |
| WTPW01000046.1: | family5 | IS607 | Gigaspora margarita | 3890 |
| 193707-194884: − | | | | |
| WTPW01000076.1: | family5 | IS607 | Gigaspora margarita | 3891 |
| 229855-231036: + | | | | |
| WTPW01000100.1: | family5 | unknown | Gigaspora margarita | 3892 |
| 489567-490478: + | | | | |
| WTPW01000108: | unclassified | IS607 | Gigaspora margarita | 3893 |
| 28684-31006: − | | | | |
| WTPW01000115.1: | family5 | IS607 | Gigaspora margarita | 3894 |
| 1663434-665877: − | | | | |
| WTPW01000123.1: | family5 | unknown | Gigaspora margarita | 3895 |
| 665253-667238: + | | | | |
| WTPW01000180.1: | unclassified | unknown | Gigaspora margarita | 3896 |
| 490806-497772: − | | | | |
| WTPW01000192.1: | family5 | IS607 | Gigaspora margarita | 3897 |
| 322200-324652: − | | | | |
| WTPW01000200.1: | family5 | unknown | Gigaspora margarita | 3898 |
| 543933-544844: − | | | | |
| WTPW01000208.1: | family5 | unknown | Gigaspora margarita | 3899 |
| 514535-516355: + | | | | |
| WTPW01000226.1: | family5 | IS607 | Gigaspora margarita | 3900 |
| 11905-14314: + | | | | |
| WTPW01000260 1: | family5 | IS607 | Gigaspora margarita | 3901 |
| 488421-491898: − | | | | |
| WTPW01000291.1: | family5 | IS607 | Gigaspora margarita | 3902 |
| 97221-99680: − | | | | |
| WTPW01000291.1: | family5 | unknown | Gigaspora margarita | 3903 |
| 160296-162092: + | | | | |
| WTPW01000305.1: | family5 | IS607 | Gigaspora margarita | 3904 |
| 102725-105168: + | | | | |
| WTPW01000313.1: | family5 | IS607 | Gigaspora margarita | 3905 |
| 199549-201998: − | | | | |
| WTPW01000342: | unclassified | IS607 | Gigaspora margarita | 3906 |
| 341619-343944: − | | | | |
| WTPW01000361.1: | family5 | IS607 | Gigaspora margarita | 3907 |
| 66101-68920: − | | | | |
| WTPW01000383.1: | family5 | IS607 | Gigaspora margarita | 3908 |
| 208707-211157: + | | | | |
| WTPW01000395 1: | family5 | IS607 | Gigaspora margarita | 3909 |
| 70506-72959: − | | | | |
| WTPW01000406.1: | family5 | IS607 | Gigaspora margarita | 3910 |
| 220192-222638: + | | | | |
| WTPW01000459.1: | family5 | IS607 | Gigaspora margarita | 3911 |
| 273835-275563: + | | | | |
| WTPW01000471.1: | family5 | IS607 | Gigaspora margarita | 3912 |
| 291755-294206: − | | | | |
| WTPW01000477.1: | family5 | IS607 | Gigaspora margarita | 3913 |
| 414261-416718: + | | | | |
| WTPW01000501.1: | family5 | unknown | Gigaspora margarita | 3914 |
| 141823-143619: − | | | | |
| WTPW01000503.1: | family5 | IS607 | Gigaspora margarita | 3915 |
| 4271-6721: + | | | | |
| WTPW01000521.1: | family5 | IS607 | Gigaspora margarita | 3916 |
| 156817-159289: − | | | | |
| WTPW01000575.1: | unclassified | unknown | Gigaspora margarita | 3917 |
| 186104-186785: − | | | | |
| WTPW01000589.1: | family5 | IS607 | Gigaspora margarita | 3918 |
| 156950-159396: + | | | | |
| WTPW01000634.1: | unclassified | unknown | Gigaspora margarita | 3919 |
| 238731-241206: − | | | | |
| WTPW01000638.1: | family5 | IS607 | Gigaspora margarita | 3920 |
| 227110-228838: + | | | | |
| WTPW01000658.1: | family5 | IS607 | Gigaspora margarita | 3921 |
| 338302-340530: + | | | | |
| WTPW01000741.1: | family5 | IS607 | Gigaspora margarita | 3922 |
| 222198-224649: − | | | | |
| WTPW01000773.1: | unclassified | IS607 | Gigaspora margarita | 3923 |
| 302678-305013: + | | | | |
| WTPW01000801 1: | family5 | IS607 | Gigaspora margarita | 3924 |
| 24063-25146: + | | | | |
| WTPW01000804.1: | unclassified | unknown | Gigaspora margarita | 3925 |
| 158127-160594: + | | | | |
| WTPW01000819.1: | family5 | unknown | Gigaspora margarita | 3926 |
| 110389-111741: + | | | | |
| WTPW01000825.1: | family5 | IS607 | Gigaspora margarita | 3927 |
| 250252-252704: − | | | | |
| WTPW01000831.1: | family5 | IS607 | Gigaspora margarita | 3928 |
| 118992-121430: − | | | | |
| WTPW01000865.1: | family5 | IS607 | Gigaspora margarita | 3929 |
| 182156-185488: + | | | | |
| WTPW01000872.1: | family5 | IS607 | Gigaspora margarita | 3930 |
| 173293-175754: + | | | | |
| WTPW01000878.1: | family5 | IS607 | Gigaspora margarita | 3931 |
| 264165-266623: − | | | | |
| WTPW01000885 1: | family5 | IS607 | Gigaspora margarita | 3932 |
| 98976-101428: + | | | | |
| WTPW01000906.1: | family5 | IS607 | Gigaspora margarita | 3933 |
| 268965-271408: + | | | | |
| WTPW01000918.1: | family5 | IS607 | Gigaspora margarita | 3934 |
| 161634-164091: + | | | | |
| WTPW01000920.1: | family5 | IS607 | Gigaspora margarita | 3935 |
| 18490-20941: − | | | | |
| WTPW01000923.1: | family5 | IS607 | Gigaspora margarita | 3935 |
| 39038-41489: + | | | | |
| WTPW01000925.1: | family5 | IS607 | Gigaspora margarita | 3936 |
| 260616-263057: − | | | | |
| WTPW01000931.1: | family5 | IS607 | Gigaspora margarita | 3937 |
| 59177-61629: − | | | | |
| WTPW01000941.1: | family5 | unknown | Gigaspora margarita | 3938 |
| 24261-26059: + | | | | |
| WTPW01000967 1: | family5 | IS607 | Gigaspora margarita | 3939 |
| 210619-213143: + | | | | |
| WTPW01000961.1: | family5 | IS607 | Gigaspora margarita | 3940 |
| 97830-100278: − | | | | |
| WTPW01000962.1: | family5 | unknown | Gigaspora margarita | 3941 |
| 183311-185152: − | | | | |
| WTPW01000982.1: | family5 | IS607 | Gigaspora margarita | 3942 |
| 17683-21210: + | | | | |
| WTPW01000989.1: | family5 | IS607 | Gigaspora margarita | 3943 |
| 82499-84951 + | | | | |
| WTPW01001075.1: | family5 | unknown | Gigaspora margarita | 3944 |
| 109799-111091: − | | | | |
| WTPW01001087.1: | family5 | IS607 | Gigaspora margarita | 3935 |
| 118916-121367: − | | | | |
| WTPW01001107.1: | family5 | unknown | Gigaspora margarita | 3945 |
| 69509-70180: − | | | | |
| WTPW01001107 1: | family5 | unknown | Gigaspora margarita | 3946 |
| 81750-83899: + | | | | |
| WTPW01001134.1: | family5 | IS607 | Gigaspora margarita | 3947 |
| 33586-36525: − | | | | |
| WTPW01001140.1: | family5 | unknown | Gigaspora margarita | 3948 |
| 191296-192663: − | | | | |
| WTPW01001214.1: | family5 | IS607 | Gigaspora margarita | 3949 |
| 74462-76911: − | | | | |
| WTPW01001251.1: | family5 | IS607 | Gigaspora margarita | 3950 |
| 181894-184307: − | | | | |
| WTPW01001284.1: | family5 | IS607 | Gigaspora margarita | 3961 |
| 98421-100872: + | | | | |
| WTPW01001293 1: | family5 | IS607 | Gigaspora margarita | 3952 |
| 43475-45923: − | | | | |
| WTPW01001297.1: | family5 | IS607 | Gigaspora margarita | 3953 |
| 133217-134875: − | | | | |
| WTPW01001323.1: | family5 | IS607 | Gigaspora margarita | 3954 |
| 118707-121156: + | | | | |
| WTPW01001328 1: | family5 | IS607 | Gigaspora margarita | 3955 |
| 178760-181255: − | | | | |
| WTPW01001363.1: | unclassified | IS607 | Gigaspora margarita | 3956 |
| 149134-151581: + | | | | |
| WTPW01001430.1: | family5 | unknown | Gigaspora margarita | 3957 |
| 61596-63408: − | | | | |
| WTPW01001470.1: | family5 | unknown | Gigaspora margarita | 3958 |
| 71180-72982: − | | | | |
| WTPW01001592.1: | family5 | IS607 | Gigaspora margarita | 3959 |
| 32134-34582: − | | | | |
| WTPW01001698.1: | family5 | IS607 | Gigaspora margarita | 3960 |
| 119733-122176: − | | | | |
| WTPW01001699.1: | family5 | IS607 | Gigaspora margarita | 3961 |
| 85724-88177: + | | | | |
| WTPW01001709.1: | family5 | unknown | Gigaspora margarita | 3962 |
| 68068-69743: + | | | | |
| WTPW01001764 1: | family5 | IS607 | Gigaspora margarita | 3963 |
| 76149-78605: − | | | | |
| WTPW01001769.1: | family5 | unknown | Gigaspora margarita | 3964 |
| 140530-142075: + | | | | |
| WTPW01001770.1: | family5 | unknown | Gigaspora margarita | 3965 |
| 108532-110373: + | | | | |
| WTPW01001827.1: | family5 | IS607 | Gigaspora margarita | 3966 |
| 17508-19951: − | | | | |
| WTPW01001840.1: | family5 | IS607 | Gigaspora margarita | 3967 |
| 128081-130538: − | | | | |
| WTPW01001893.1: | unclassified | IS607 | Gigaspora margarita | 3968 |
| 81997-84430: − | | | | |
| WTPW01001915.1: | family5 | IS607 | Gigaspora margarita | 3969 |
| 51574-54027: + | | | | |
| WTPW01002021.1: | family5 | IS607 | Gigaspora margarita | 3970 |
| 116541-118996: − | | | | |
| WTPW01002119 1: | family5 | IS607 | Gigaspora margarita | 3971 |
| 88575-91036: − | | | | |
| WTPW01002226.1: | family5 | unknown | Gigaspora margarita | 3972 |
| 48464-49529: − | | | | |
| WTPW01002252.1: | family5 | unknown | Gigaspora margarita | 3973 |
| 74610-76331: − | | | | |
| WTPW01002257.13: | family5 | unknown | Gigaspora margarita | 3974 |
| 15489-21834: + | | | | |
| WTPW01002260.1: | family5 | IS607 | Gigaspora margarita | 3975 |
| 96240-98691: + | | | | |
| WTPW01002296.1: | family5 | IS607 | Gigaspora margarita | 3976 |
| 92098-94550: + | | | | |
| WTPW01002313.1: | family5 | IS607 | Gigaspora margarita | 3977 |
| 88590-91032: − | | | | |
| WTPW01002383.1: | family5 | unknown | Gigaspora margarita | 3978 |
| 49982-50986: − | | | | |
| WTPW01002438 1: | family5 | unknown | Gigaspora margarita | 3979 |
| 49070-50895: − | | | | |
| WTPW01002447.1: | family5 | unknown | Gigaspora margarita | 3980 |
| 79028-80815: + | | | | |
| WTPW01002560.1: | family5 | IS607 | Gigaspora margarita | 3981 |
| 63185-66774: + | | | | |
| WTPW01002755.1: | family5 | IS607 | Gigaspora margarita | 3982 |
| 23491-25936: − | | | | |
| WTPW01002909.1: | family5 | unknown | Gigaspora margarita | 3983 |
| 9208-11025: + | | | | |
| WTPW01002909.1: | family5 | unknown | Gigaspora margarita | 3984 |
| 13285-15081: − | | | | |
| WTPW01003008.1: | family5 | unknown | Gigaspora margarita | 3985 |
| 29135-30955: + | | | | |
| VTZB01002170.1: | family5 | unknown | Zostera nigricaulis | 3986 |
| 19876-22161: + | | | | |
| WTXV01007334.1: | unclassified | unknown | Nymphicus hollandicus | 3987 |
| 286513240-286514391: − | | | | |
| WTXV01017334.1: | unclassified | unknown | Nymphicus hollandicus | 3988 |
| 1125985-1127061: + | | | | |
| CM020618.1: | unclassified | unknown | Neopyropia yezcensis | 3989 |
| 5922058-5924002: − | | | | |
| CM020618.1: | unclassified | unknown | Neopyropia yezcensis | 3990 |
| 7898887-7900647: + | | | | |
| 8CM020618.1: | unclassified | unknown | Neopyropia yezcensis | 3991 |
| 21754926-21756720: − | | | | |
| CM020618.1: | unclassified | unknown | Neopyropia yezcensis | 3992 |
| 28812947-28814907: + | | | | |
| CM020618.1: | unclassified | unknown | Neopyropia yezcensis | 3993 |
| 30767776-30769750: − | | | | |
| CM020618.1: | unclassified | unknown | Neopyropia yezcensis | 3994 |
| 32682605-32684545: + | | | | |
| CM020618.1: | unclassified | unknown | Neopyropia yezcensis | 3995 |
| 35208075-35210069: − | | | | |
| CM020618 1: | unclassified | unknown | Neopyropia yezcensis | 3996 |
| 38021769-38024243: − | | | | |
| CM020619.1: | unclassified | unknown | Neopyropia yezcensis | 3997 |
| 3396210-3397930: + | | | | |
| CM020619.1: | unclassified | unknown | Neopyropia yezcensis | 3998 |
| 7556925-7558675: + | | | | |
| CM020619.1: | unclassified | unknown | Neopyropia yezcensis | 3999 |
| 10732656-10734430: − | | | | |
| CM020619.1: | unclassified | unknown | Neopyropia yezcensis | 4000 |
| 12199525-12202235: + | | | | |
| CM020619.1: | unclassified | unknown | Neopyropia yezcensis | 4001 |
| 13864650-13866614: − | | | | |
| CM020619.1: | unclassified | unknown | Neopyropia yezcensis | 4002 |
| 27928257-27930247: + | | | | |
| CM020620.1: | unclassified | unknown | Neopyropia yezcensis | 4003 |
| 4360291-4362015: − | | | | |
| CM020620 1: | unclassified | unknown | Neopyropia yezcensis | 4004 |
| 14670471-14672265: − | | | | |
| OM020620.1: | unclassified | unknown | Neopyropia yezcensis | 4005 |
| 14944733-14946717: − | | | | |
| CM020620.1: | unclassified | unknown | Neopyropia yezcensis | 4006 |
| 19707594-19709544: + | | | | |
| BOM020620.1: | unclassified | unknown | Neopyropia yezoensis | 4007 |
| 20272456-20274420: − | | | | |
| WURW01000734.1: | unclassified | unknown | Taenaris catops | 4008 |
| 49542-50711: − | | | | |
| WUCQ01007778.1: | unclassified | unknown | Actias luna | 4009 |
| 75526543-75527646: − | | | | |
| WUCQ01007778.1: | unclassified | unknown | Actias luna | 4010 |
| 86915982-86917286: − | | | | |
| WUCQ01007778.1: | unclassified | unknown | Actias luna | 4011 |
| 126351581-126352492: + | | | | |
| WUCQ01077778.1: | unclassified | unknown | Actias luna | 4012 |
| 12124251-12125399: + | | | | |
| WUCQ01077778.1: | unclassified | unknown | Actias luna | 4013 |
| 32455775-32456851: + | | | | |
| WUCQ01077778.1: | unclassified | unknown | Actias luna | 4014 |
| 34572211-34573413: + | | | | |
| WUCQ01077778.1: | lunclassified | unknown | Actias luna | 4015 |
| 37213527 37214522: + | | | | |
| WUCQ01077778.1: | unclassified | unknown | Actias luna | 4016 |
| 75792678-75793838: − | | | | |
| WUCQ01077778.1: | unclassified | unknown | Actias luna | 4017 |
| 87775609-87779184: − | | | | |
| WUCQ01077778.1: | unclassified | unknown | Actias luna | 4018 |
| 103213693-103216561: − | | | | |
| WSYR01074443.1: | unclassified | unknown | Ara chloropterus | 4019 |
| 103979132-103993562: + | | | | |
| WSYR01074443.1 | unclassified | unknown | Ara chloropterus | 4020 |
| 259118267-259122796: + | | | | |
| WUAS01019668.1: | unclassified | unknown | Stiretrus anchorago | 4021 |
| 6414069-6415805: − | | | | |
| JAAAKD010000076.1: | unclassified | unknown | Danaus melanipous | 4022 |
| 10253399-10255315: − | | | | |
| JAAAKD010007556.1: | unclassified | unknown | Danaus melanippus | 4023 |
| 69245847-69247055: + | | | | |
| JAAAKH010069999.1: | unclassified | unknown | Psitleuteles goldiei | 4024 |
| 17675279-17676349: − | | | | |
| JAAAKH010069999.1: | unclassified | unknown | Psitteuteles goldiei | 4025 |
| 42318047-42319801: + | | | | |
| JAAAKI010000065.1: | unclassified | unknown | Lorius garrulus | 4026 |
| 11435721-11437112: + | | | | |
| JAAAKA010075556.1: | unclassified | unknown | Ara militaris | 4027 |
| 62938684-62939862: − | | | | |
| JAACMV010000010.1: | family4 | unknown | Picochlorum sp. ‘celeri’ | 4028 |
| 1077717-1085911: + | | | | |
| JAACMV010000011.1: | family4 | unknown | Picochlorum sp. ‘celeri’ | 4029 |
| 1140793-1145296: − | | | | |
| JAACMV010000016.1: | family4 | unknown | Picochlorum sp. ‘celeri’ | 4030 |
| 1069557-1077761: + | | | | |
| JAACMV010000019.1: | family4 | unknown | Picochlorum sp. ‘celeri’ | 4031 |
| 31999-36463: + | | | | |
| WUQG01007200.1: | unclassified | unknown | Androctonus | 4032 |
| 45840601-45841905 + | | | mauritanicus | |
| WUQG01053200.1: | unclassified | unknown | Androctonus | 4033 |
| 2516302-2518436: + | | | mauritanicus | |
| WUQG01072000.1: | unclassified | unknown | Androctonus | 4034 |
| 31171992-31173219: − | | | mauritanicus | |
| WUQG01072000.1: | unclassified | unknown | Androctonus | 4035 |
| 69307618-69324180: − | | | mauritanicus | |
| WUQG01072000.1: | unclassified | unknown | Androctonus | 4036 |
| 70235536-70236771: − | | | mauritanicus | |
| WUQG01072000.1: | unclassified | unknown | Androctonus | 4037 |
| 80021028-80022452: − | | | mauritanicus | |
| WUQG01072000.1: | unclassified | unknown | Androctonus | 4038 |
| 92813826-92818960: + | | | mauritanicus | |
| WUQG01072000.1: | unclassified | unknown | Androctonus | 4039 |
| 96807287-396823381: − | | | mauritanicus | |
| WUQG01072000.1: | unclassified | unknown | Androctonus | 4040 |
| 98457271-98458268: − | | | mauritanicus | |
| WUQG01072000.1: | unclassified | unknown | Androctonus | 4041 |
| 107344322-107348676: + | | | mauritanicus | |
| WUQG01072000.1: | unclassified | unknown | Androctonus | 4042 |
| 128310945-128316993: − | | | mauritanicus | |
| WUQG01072000.1: | unclassified | unknown | Androctonus | 4043 |
| 147128421-147139128: − | | | mauritanicus | |
| WUQG01072000.1 | unclassified | unknown | Androctonus | 4044 |
| 163262940-163264387: − | | | mauritanicus | |
| WUQG01072000.1: | unclassified | unknown | Androctonus | 4045 |
| 183988981-184017762: − | | | mauritanicus | |
| WUQG01072000.1: | unclassified | unknown | Androctonus | 4046 |
| 211308332-211309556: + | | | mauritanicus | |
| WUQG01072000.1: | unclassified | unknown | Androctonus | 4047 |
| 212655957-212660504: − | | | mauritanicus | |
| WUQG01072000.1: | unclassified | unknown | Androctonus | 4048 |
| 220584340-220586784: + | | | mauritanicus | |
| WUQG01072000.1: | unclassified | unknown | Androctonus | 4049 |
| 249621103-249626490: − | | | mauritanicus | |
| WUQG01072000.1: | unclassified | unknown | Androctonus | 4050 |
| 292107369-292110816: − | | | mauritanicus | |
| WUQG01072000.1: | unclassified | unknown | Androctonus | 4051 |
| 319588195-319589643: + | | | mauritanicus | |
| WURU01067777.1: | unclassified | unknown | Pionus senilis | 4052 |
| 367758932-367778903: − | | | | |
| WURU01107777.1: | unclassified | unknown | Pionus senilis | 4053 |
| 3388672-3390210: + | | | | |
| WURS01075445.1: | unclassified | unknown | Rhinocypha anisoptera | 4054 |
| 321231989-321233155: − | | | | |
| JAADKT010065556.1: | unclassified | unknown | Chrysaora chesapeakei | 4055 |
| 22043520-22044500: + | | | | |
| JAAOEG010055556.1: | unclassified | unknown | Papilio bianor | 4056 |
| 3097245-3098061: + | | | | |
| JAAOEG010055556.1: | unclassified | unknown | Papilio bianor | 4057 |
| 29806250-29808017: + | | | | |
| JAAGUD0100000655.1: | unclassified | unknown | Magicicada | 4058 |
| 576832-578954: + | | | septendecula | |
| JAAGUD0100006545.1: | family3 | unknown | Magicicada | 4059 |
| 8055106-8062356: − | | | septendecula | |
| WMKK01000002.1: | unclassified | unknown | Ostreococcus | 4060 |
| 2-3814: + | | | mediterraneus | |
| WMKK01000022.1: | family5 | unknown | Ostreococcus | 4061 |
| 631273-635498: − | | | mediterraneus | |
| JAAONU010000013.1: | family5 | unknown | Cyclina sinensis | 4062 |
| 36421714-36422583: + | | | | |
| JAAONU010000013.1: | family5 | unknown | Cyclina sinensis | 4063 |
| 36451117-36452559: − | | | | |
| JAAONU010000003.1: | family5 | unknown | Cyclina sinensis | 4062 |
| 6177841-6178710: + | | | | |
| JABMIG010000150.1: | family4 | unknown | Cyclotella cryptica | 4064 |
| 149327. 159200: + | | | | |
| JABMIG010000380.1: | family4 | unknown | Cyclotella cryptica | 4065 |
| 46783-53721: + | | | | |
| JABMIG010000030.1: | unclassified | unknown | Cyclotella cryptica | 4066 |
| 557309-560275: + | | | | |
| JABMIG010000067.1: | family4 | unknown | Cyclotella cryptica | 4067 |
| 586595-589269: + | | | | |
| JABMIG010000024.1: | unclassified | unknown | Cyclotella cryptica | 4068 |
| 46553-53514: − | | | | |
| JABRWK010000006.1: | family3 | unknown | Hypothenemus hampei | 4069 |
| 764673-766167: + | | | | |
| JABWAE010000001.1: | family4 | unknown | Chlorella sp. BAC 9706 | 4070 |
| 904509-910362: − | | | | |
| WUAN01000744 1: | unclassified | unknown | Graphium doson | 4071 |
| 377485-378561: + | | | | |
| WUAN01007434.1: | unclassified | unknown | Graphium doson | 4072 |
| 2191731-2192777: + | | | | |
| WUAN01007434.1: | unclassified | unknown | Graphium doson | 4073 |
| 23731503-23732660: − | | | | |
| CP060300 1: | family5 | unknown | Anthracocystis panici- | 4074 |
| 841420-844346: − | | | leucophaei | |
| JABAYA010000130.1: | unclassified | unknown | Apophysomyces | 4075 |
| 81646-82751: − | | | ossiformis | |
| JABAYA010000139.1: | unclassified | unknown | Apophysomyces | 4076 |
| 67079-68835: − | | | ossiformis | |
| JABAYA010000155.1: | unclassified | unknown | Apophysomyces | 4077 |
| 510-1768: + | | | ossiformis | |
| JABAYA010000181.1: | family2 | unknown | Apophysomyces | 4078 |
| 20519-22081: − | | | ossiformis | |
| JABAYA010000194.1: | family4 | unknown | Apophysomyces | 4079 |
| 16669-20013: − | | | ossiformis | |
| JABAYA010000210.1: | unclassified | unknown | Apophysomyces | 4080 |
| 26961-27966: + | | | ossiformis | |
| JABAYA010000029.1: | family1 | unknown | Apophysomyces | 4081 |
| 26651-30569: + | | | ossiformis | |
| JABAYA010000035.1: | unclassified | Mariner/Tc1 | Apophysomyces | 4082 |
| 32315-35645: − | | | ossiformis | |
| JABAYA010000038.1: | unclassified | unknown | Apophysomyces | 4083 |
| 186686-188139: + | | | ossiformis | |
| JABAYA010000042.1: | unclassified | unknown | Apophysomyces | 4084 |
| 89766-93515: − | | | ossiformis | |
| JABAYA010000042.1: | family2 | unknown | Apophysomyces | 4085 |
| 131486-135530: + | | | ossiformis | |
| JABAYA010000058.1: | unclassified | unknown | Apophysomyces | 4086 |
| 52443-53393: − | | | ossiformis | |
| JABAYA010000078.1: | unclassified | unknown | Apophysomyces | 4087 |
| 69208-70856: − | | | ossiformis | |
| CM026547.1: | family4 | unknown | Scenedesmus sp. | 4088 |
| 2099038-2101099: − | | | PABB004 | |
| JABVCE010000014.1: | family1 | unknown | Scenedesmus sp. | 4089 |
| 608854-611841: − | | | PABB004 | |
| JABVCE010000002.1: | family1 | unknown | Scenedesmus sp. | 4090 |
| 800838-802233: − | | | PABB004 | |
| JABVCE010000002.1: | unclassified | unknown | Scenedesmus sp. | 4091 |
| 1172664-1179053: + | | | PABB004 | |
| JABVCE010000021.1: | family1 | unknown | Scenedesmus sp. | 4092 |
| 108512-114686: − | | | PABB004 | |
| JABVCE010000021.1: | unclassified | unknown | Scenedesmus sp. | 4093 |
| 264443-266569: + | | | PABB004 | |
| JABVCE010000004.1: | unclassified | unknown | Scenedesmus sp. | 4094 |
| 855211-857734: − | | | PABB004 | |
| JABVCE010000042.1: | family1 | unknown | Scenedesmus sp. | 4095 |
| 60237-64998: − | | | PABB004 | |
| JABVCE010000007.1: | family1 | unknown | Scenedesmus sp. | 4096 |
| 629123-636090: + | | | PABB004 | |
| JABVCE010000008.1: | family1 | unknown | Scenedesmus sp. | 4097 |
| 1058709-1065435: + | | | PABB004 | |
| JABVCE010000009.1: | family1 | unknown | Scenedesmus sp. | 4098 |
| 744742-749769: − | | | PABB004 | |
| WUAR01000723.1: | unclassified | unknown | Chrysaora achlyos | 4099 |
| 16101861-16105453: + | | | | |
| JAAZWU010000147.1: | unclassified | unknown | Apophysomyces sp. | 4100 |
| 24218-28927: | | | BC1015 | |
| JAAZWU010000162.1: | unclassified | unknown | Apophysomyces sp. | 4101 |
| 16903-17795: + | | | BC1015 | |
| JAAZWU010000025.1 | unclassified | unknown | Apophysomyces sp. | 4102 |
| 62888-64178: | | | BC1015 | |
| JAAZWU010000026.1: | unclassified | unknown | Apophysomyces sp. | 4103 |
| 10200-11929: + | | | BC1015 | |
| JAAZWU010000038.1: | family4 | unknown | Apophysomyces sp | 4104 |
| 74228-76912: | | | BC1015 | |
| JAAZWU010000069.1: | unclassified | unknown | Apophysomyces sp. | 4105 |
| 58756-59831: + | | | BC1015 | |
| JAAZWV010000147.1: | unclassified | unknown | Apophysomyces sp. | 4100 |
| 27998-32707: + | | | BC1021 | |
| JAAZWV010000151.1: | unclassified | unknown | Apophysomyces sp. | 4101 |
| 36284-37176: | | | BC1021 | |
| JAAZWV010000153.1: | family4 | unknown | Apophysomyces sp. | 4106 |
| 23578-26781: + | | | BC1021 | |
| JAAZWV010000020.1: | unclassified | unknown | Apophysomyces sp. | 4107 |
| 32547-35896: | | | BC1021 | |
| JAAZWV010000027.1: | unclassified | unknown | Apophysomyces sp. | 4102 |
| 37991-39281: + | | | BC1021 | |
| JAAZWV010000059.1: | unclassified | unknown | Apophysomyces sp. | 4105 |
| 16934-18009: | | | BC1021 | |
| JAAZWW010000142.1: | unclassified | unknown | Apophysomyces sp. | 4100 |
| 24219-28928: | | | BC1034 | |
| JAAZWW010000160.1: | unclassified | unknown | Apophysomyces sp. | 4101 |
| 17080-17972: + | | | BC1034 | |
| JAAZWW010000165.1: | family4 | unknown | Apophysomyces sp. | 4108 |
| 23538-26740: + | | | BC1034 | |
| JAAZWW010000181.1: | family2 | unknown | Apophysomyces sp. | 4109 |
| 49280-51013: | | | BC1034 | |
| JAAZWW010000020.1: | family4 | unknown | Apophysomyces sp. | 4104 |
| 16016-18700: + | | | BC1034 | |
| JAAZWW010000026.1: | unclassified | unknown | Apophysomyces sp. | 4110 |
| 87660-91810: | | | BC1034 | |
| JAAZWW010000039.1: | unclassified | unknown | Apophysomyces sp. | 4102 |
| 39174-40464: + | | | BC1034 | |
| JAAZWW010000070.1: | unclassified | unknown | Apophysomyces sp. | 4105 |
| 58756-59831: + | | | BC1034 | |
| VFSX01000171.1: | unclassified | unknown | Chlamydomonas sp. | 4111 |
| 85050-87155: − | | | UWO 241 | |
| VFSX01000171.1: | unclassified | unknown | Chlamydomonas sp. | 4112 |
| 187367-190393: + | | | UWO 241 | |
| VFSX01000484.1: | unclassified | unknown | Chlamydomonas sp. | 4113 |
| 69840-71903: + | | | UWO 241 | |
| VFSX01000366.1: | family4 | unknown | Chlamydomonas sp. | 4114 |
| 32915-34067: − | | | UWO 241 | |
| JAEPRE010000020.1: | unclassified | unknown | Thamnidium elegans | 4115 |
| 58040-60363: + | | | | |
| JAEPRC010000022.1: | family4 | unknown | Mucor plumbeus | 4116 |
| 49667-51418: − | | | | |
| JAEPRD010000074.1: | family4 | unknown | Mucor saturninus | 4117 |
| 3378-4572: − | | | | |
| JAFDOW010000598.1: | family3 | unknown | Bradysia odoriphaga | 4118 |
| 8744500-8755292: + | | | | |
| JAFDOW010000836.1: | unclassified | unknown | Bradysia odoriphaga | 4119 |
| 968493-969279: + | | | | |
| JAFDOW010000956.1: | unclassified | unknown | Bradysia odoriphaga | 4120 |
| 5833379-5835597: + | | | | |
| JAFDOW010000956.1: | unclassified | unknown | Bradysia odoriphaga | 4121 |
| 6004710-6006546: − | | | | |
| JAFDOW010001337.1: | family3 | unknown | Bradysia odoriphaga | 4122 |
| 418137-421459: + | | | | |
| JAFDOW010001453.1: | unclassified | unknown | Bradysia odoriphaga | 4123 |
| 236473-237939: − | | | | |
| JAFDOW010001453.1: | family3 | unknown | Bradysia odoriphaga | 4124 |
| 1302478-1307130: + | | | | |
| JAFDOW010000468.1: | family3 | unknown | Bradysia odoriphaga | 4125 |
| 498593-502084: + | | | | |
| JAFDOW010000474.1: | unclassified | unknown | Bradysia odoriphaga | 4126 |
| 986380-1007444: + | | | | |
| JAFDOW010000474.1: | unclassified | unknown | Bradysia odoriphaga | 4127 |
| 3860745-3881026: − | | | | |
| JAFDOW010000239.1: | family3 | unknown | Bradysia odoriphaga | 4128 |
| 2718707-2740243: − | | | | |
| JAFDOW010000806.1: | family3 | unknown | Bradysia odoriphaga | 4129 |
| 4283048-4284439: − | | | | |
| JAFDOW010000349.1: | unclassified | unknown | Bradysia odoriphaga | 4130 |
| 537995-541131: − | | | | |
| JAFDOW010000248.1: | unclassified | unknown | Bradysia odoriphaga | 4131 |
| 101790-122644: − | | | | |
| JAEUYN010001147.1: | unclassified | unknown | Euura lappo | 4132 |
| 439644-440377: − | | | | |
| JAEUYN010000162.1: | family3 | unknown | Euura lappo | 4133 |
| 97570-99575: − | | | | |
| JAEUYN010001654.1: | unclassified | unknown | Euura lappo | 4134 |
| 72293-75602: + | | | | |
| JAEUYN010001913.1: | family3 | unknown | Euura lappo | 4135 |
| 238442-247471: + | | | | |
| JAEUYN010001968.1: | unclassified | unknown | Euura lappo | 4136 |
| 174177-177488: + | | | | |
| JAEUYN010002101.1: | unclassified | unknown | Euura lappo | 4137 |
| 53388-69297: − | | | | |
| JAEUYN010002121.1: | unclassified | unknown | Euura lappo | 4138 |
| 143472-151116: + | | | | |
| JAEUYN010002205.1: | unclassified | unknown | Euura lappo | 4139 |
| 218894 222203: + | | | | |
| JAEUYN010000551.1: | unclassified | unknown | Euura lappo | 4140 |
| 314335-317347: − | | | | |
| JAEUYN010000564.1: | unclassified | unknown | Euura lappo | 4141 |
| 53845-57150: − | | | | |
| JAEUYN010000684.1: | family3 | unknown | Euura lappo | 4142 |
| 399820-403090: − | | | | |
| JAEUYN010000684.1: | family3 | unknown | Euura lappo | 4143 |
| 448876-452146: − | | | | |
| JAEUYN010000847.1: | unclassified | unknown | Euura lappo | 4144 |
| 98638-101796: | | | | |
| JAEUYN010000847.1: | family3 | unknown | Euura lappo | 4145 |
| 219043-222313: + | | | | |
| JAEUYN010000870.1: | family3 | unknown | Euura lappo | 4146 |
| 990863-994133: + | | | | |
| JAEUYN010000978.1: | unclassified | unknown | Euura lappo | 4147 |
| 675959-679327: − | | | | |
| JAHBBA010000995.1: | family4 | unknown | Skeletonema costatum | 4148 |
| 130523-133497: + | | | | |
| JAHBBA010001084.1: | family1 | unknown | Skeletonema costatum | 4149 |
| 115877-122838: + | | | | |
| RJVT01000118.1: | unclassified | unknown | Cotesia chilonis | 4150 |
| 1-9003: − | | | | |
| RJVT01000176.1: | family3 | unknown | Cotesia chilonis | 4151 |
| 10481-12280: − | | | | |
| JAHBON010000544.1: | family3 | unknown | Listronotus oregonensis | 4152 |
| 22611-24731: + | | | | |
| JAHBCN010000544.1: | family3 | unknown | Listronotus oregonensis | 4153 |
| 82949-86079: − | | | | |
| JAHBCN010000544.1: | unclassified | unknown | Listronotus oregonensis | 4154 |
| 91246-93170: − | | | | |
| JAHBCN010000544.1: | unclassified | unknown | Listronotus oregonensis | 4155 |
| 105163-108234: + | | | | |
| JAHBCN010000544.1: | family3 | unknown | Listronotus oregonensis | 4156 |
| 130962-132905: − | | | | |
| JAHBCN010001574.1: | unclassified | unknown | Listronotus oregonensis | 4157 |
| 69237-79713: − | | | | |
| JAHBCN010003033.1: | family3 | unknown | Listronotus oregonensis | 4158 |
| 48547-50471: − | | | | |
| JADEYJ010000112.1: | family3 | unknown | Leptopilina boulardi | 4159 |
| 3561395-3565072: − | | | | |
| JADEYJ010000112.1: | family3 | unknown | Leptopilina boulardi | 4160 |
| 3569737-3571256: + | | | | |
| JADEYJ010000278.1: | unclassified | EnSpm/CACTA | Leptopilina boulardi | 4161 |
| 2110333-2116413: − | | | | |
| JADEYJ010000325.1: | family3 | Mariner/Tc1 | Leptopilina boulardi | 4162 |
| 5120989-5122557: + | | | | |
| JADEYJ010000072.1: | family3 | unknown | Leptopilina boulardi | 4163 |
| 858411-862276: + | | | | |
| CM034318.1: | unclassified | unknown | Melopolophium | 4164 |
| 8928882-8947237: + | | | dirhodum | |
| CM035915.1: | family5 | unknown | Dreissena polymorpha | 4165 |
| 158552012-158553457: + | | | | |
| CM035927.1: | family5 | unknown | Dreissena polymorpha | 2901 |
| 70824624-70826063: + | | | | |
| JAIWYP010000060.1: | family5 | unknown | Dreissena polymorpha | 4166 |
| 210169-211614: − | | | | |
| CM037045.1: | family3 | unknown | Mythimna separata | 4167 |
| 16025063-16026736: + | | | | |
| CM037048.1: | family3 | unknown | Mythimna separata | 4168 |
| 13146752-13148053: − | | | | |
| JABVZY010000462.1: | unclassified | unknown | Drosophila nannoptera | 4169 |
| 12371-19035: − | | | | |
| CM037556.1: | unclassified | unknown | Sitodiplosis mosellana | 4170 |
| 5002165-5009538: + | | | | |
| CM037556.1: | family3 | hAT | Sitodiplosis mosellana | 4171 |
| 61250153-12508295: − | | | | |
| CM037556.1: | family3 | EnSpm/CACTA | Sitodiplosis mosellana | 4172 |
| 16659005-16660365: − | | | | |
| CM037556.1: | family3 | unknown | Sitodiplosis mosellana | 4173 |
| 17433263-17435797: + | | | | |
| CM037556.1: | unclassified | EnSpm/CACTA | Sitodiplosis mosellana | 4174 |
| 17755826-17757529: + | | | | |
| CM037556.1: | family3 | unknown | Sitodiplosis mosellana | 4175 |
| 20714575-20723029: + | | | | |
| CM037556.1: | family3 | unknown | Sitodiplosis mosellana | 4176 |
| 21006311-21026962: − | | | | |
| CM037556.1: | family3 | unknown | Sitodiplosis mosellana | 4177 |
| 21776893-21812879: + | | | | |
| CM037556.1: | unclassified | unknown | Sitodiplosis mosellana | 4178 |
| 22379539-22392489: + | | | | |
| CM037556.1: | unclassified | unknown | Sitodiplosis mosellana | 4179 |
| 23911203-23924658: + | | | | |
| CM037556.1: | family3 | hAT | Sitodiplosis mosellana | 4180 |
| 24833267-24835520: + | | | | |
| CM037556.1: | unclassified | unknown | Sitodiplosis mosellana | 4181 |
| 25106932-25108613: − | | | | |
| CM037556.1: | unclassified | hAT | Sitodiplosis mosellana | 4182 |
| 25303748-25304528: + | | | | |
| CM037556.1: | family3 | hAT | Sitodiplosis mosellana | 4183 |
| 25555981-25562624: + | | | | |
| CM037556.1: | unclassified | unknown | Sitodiplosis mosellana | 4184 |
| 25620690-25629284: − | | | | |
| CM037556.1: | unclassified | unknowni | Sitodiplosis mosellana | 4185 |
| 26416213-26417713: + | | | | |
| CM037556.1: | unclassified | unknown | Sitodiplosis mosellana | 4186 |
| 26436650-26438500: + | | | | |
| CM037556.1: | family3 | unknown | Sitodiplosis mosellana | 4187 |
| 27202170-27216500: + | | | | |
| CM037556.1: | family3 | IhAT | Sitodiplosis mosellana | 4188 |
| 27403815-27406056: − | | | | |
| CM037556.1: 4251 | family3 | EnSpm/CACTA | Sitodiplosis mosellana | 4189 |
| 27528225-27530664: − | | | | |
| CM037556 1: | family3 | hAT | Sitodiplosis mosellana | 4190 |
| 27632199-27634324: + | | | | |
| CM037556.1: | family3 | EnSpm/CACTA | Sitodiplosis mosellana | 4191 |
| 29503135-29506183: + | | | | |
| CM037556.1: | unclassified | unknown | Sitodiplosis mosellana | 4192 |
| 31083313-31086074: + | | | | |
| CM037556.1: 4251 | family3 | unknown | Sitodiplosis mosellana | 4193 |
| 31346364-31348050: + | | | | |
| CM037556.1: | unclassified | unknown | Sitodiplosis mosellana | 4194 |
| 40351860-40372145: + | | | | |
| CM037556.1: | unclassified | unknown | Sitodiplosis mosellana | 4195 |
| 42514419-42517112: − | | | | |
| CM037556.1: 4251 | family3 | hAT | Sitodiplosis mosellana | 4196 |
| 42616219-42618759: + | | | | |
| 8CM037556.1: | family3 | hAT | Sitodiplosis mosellana | 4197 |
| 43966452-43968981: − | | | | |
| CM037556 1: | unclassified | unknown | Sitodiplosis mosellana | 4198 |
| 44614663-44615341: − | | | | |
| BCM037556.1: | family3 | EnSpm/CACTA | Sitodiplosis mosellana | 4199 |
| 47722397-47724747: + | | | | |
| CM037557.1: | unclassified | EnSpm | Sitodiplosis mosellana | 4200 |
| 70897-72833: + | | | | |
| 8CM037557.1: | unclassified | unknown | Sitodiplosis mosellana | 4201 |
| 645898-662844: + | | | | |
| CM037557.1: | unclassified | unknown | Sitodiplosis mosellana | 4202 |
| 1229099-1231297: + | | | | |
| CM037557.1: | family3 | hAT | Sitodiplosis mosellana | 4203 |
| 1494718-1497236: + | | | | |
| CM037557.1: | family3 | EnSpm/CACTA | Sitodiplosis mosellana | 4204 |
| 2212919-2215740: + | | | | |
| CM037557.1: | family3 | unknown | Sitodiplosis mosellana | 4205 |
| 4258738-4283886: − | | | | |
| CM037557 1: | family3 | unknown | Sitodiplosis mosellana | 4206 |
| 4514753-4517285 + | | | | |
| CM037557.1: | family3 | EnSpm/CACTA | Sitodiplosis mosellana | 4207 |
| 5448542-5451294: − | | | | |
| CM037557.1: | family3 | EnSpm/CACTA | Sitodiplosis mosellana | 4208 |
| 10670662-10673199: − | | | | |
| CM037557.1: | unclassified | EnSpm/CACTA | Sitodiplosis mosellana | 4209 |
| 17095683-17099856: + | | | | |
| CM037557.1: | family3 | unknown | Sitodiplosis mosellana | 4210 |
| 20229089-20236489: − | | | | |
| CM037557.1: | family3 | EnSpm/CACTA | Sitodiplosis mosellana | 4211 |
| 23663169-23665180: + | | | | |
| CM037557.1: | family | unknown | Sitodiplosis mosellana | 4212 |
| 25493082-25514104: − | | | | |
| CM037557.1: | family3 | unknown | Sitodiplosis mosellana | 4213 |
| 26992269-27013339: − | | | | |
| CM037557.1: | family3 | unknown | Sitodiplosis mosellana | 4214 |
| 27291322-27314078: − | | | | |
| CM037557.1: | unclassified | unknown | Sitodiplosis mosellana | 4215 |
| 28542784-28552576: − | | | | |
| CM037557.1: | family3 | unknown | Sitodiplosis mosellana | 4216 |
| 34028405-34041378: − | | | | |
| CM037557.1: | family3 | unknown | Sitodiplosis mosellana | 4217 |
| 34401039-34412414: + | | | | |
| CM037557.1: | family3 | EnSpm/CACTA | Sitodiplosis mosellana | 4218 |
| 38939530-38942025: + | | | | |
| CM037557.1: | family3 | unknown | Sitodiplosis mosellana | 4219 |
| 39045946-39067117: − | | | | |
| CM037557.1. | family3 | unknown | Sitodiplosis mosellana | 4220 |
| 42001348-42022418: − | | | | |
| CM037557.1: | unclassified | EnSpm | Sitodiplosis mosellana | 4221 |
| 43523675-43525205: + | | | | |
| CM037558.1: | unclassified | unknown | Sitodiplosis mosellana | 4222 |
| 6823995-6845759: − | | | | |
| CM037558.1: | family3 | unknown | Sitodiplosis mosellana | 4223 |
| 7149065-7170135: + | | | | |
| CM037558.1: | unclassified | unknown | Sitodiplosis mosellana | 4224 |
| 10205040-10226004: − | | | | |
| CM037558.1: | unclassified | unknown | Sitodiplosis mosellana | 4225 |
| 11084049-11085656: + | | | | |
| CM037558.1: | unclassified | unknown | Sitodiplosis mosellana | 4226 |
| 12385264-12401573: + | | | | |
| CM037558.1: | family3 | hAT | Sitodiplosis mosellana | 4227 |
| 12564972-12571660: − | | | | |
| CM037558.1: | unclassified | unknown | Sitodiplosis mosellana | 4228 |
| 13001357-13002229: + | | | | |
| CM037558.1: | unclassified | unknown | Sitodiplosis mosellana | 4229 |
| 13809193-13821978: + | | | | |
| CM037558.1: | family3 | EnSpm/CACTA | Sitodiplosis mosellana | 4230 |
| 14409010-14411559: − | | | | |
| CM037558 1: | family3 | EnSpm/CACTA | Sitodiplosis mosellana | 4231 |
| 14492241-14494679: + | | | | |
| CM037558.1: | family3 | unknown | Sitodiplosis mosellana | 4232 |
| 14717983-14726509: + | | | | |
| CM037558.1: | family3 | unknown | Sitodiplosis mosellana | 4233 |
| 14752635-14767673: + | | | | |
| CM037558.1: | unclassified | unknown | Sitodiplosis mosellana | 4234 |
| 14776222-14810168: − | | | | |
| CM037558.1: | unclassified | hAT | Sitodiplosis mosellana | 4235 |
| 16032637-16034226: − | | | | |
| CM037558.1: | family3 | unknown | Sitodiplosis mosellana | 4236 |
| 16115234-16137381: + | | | | |
| CM037558.1: | unclassified | unknown | Sitodiplosis mosellana | 4237 |
| 16197645-16211121: − | | | | |
| CM037558.1: | family3 | hAT | Sitodiplosis mosellana | 4238 |
| 16223382-16225821: − | | | | |
| CM037558 1: | family3 | unknown | Sitodiplosis mosellana | 4239 |
| 16685371-16694701: + | | | | |
| CM037558.1: | unclassified | hAT | Sitodiplosis mosellana | 4240 |
| 16779115-16780265: + | | | | |
| CM037558.1: | family3 | EnSpm/CACTA | Sitodiplosis mosellana | 4241 |
| 17050431-17052972: − | | | | |
| CM037558.1: | family3 | unknown | Sitodiplosis mosellana | 4242 |
| 18112952-18114362: − | | | | |
| CM037558.1: | unclassified | unknown | Sitodiplosis mosellana | 4243 |
| 18423351-18430838: + | | | | |
| CM037558.1: | family3 | hAT | Sitodiplosis mosellana | 4244 |
| 18565843-18568082: − | | | | |
| CM037558.1: | family3 | EnSpm/CACTA | Sitodiplosis mosellana | 4245 |
| 18980493-18982845: − | | | | |
| CM037558.1: | family3 | hAT | Sitodiplosis mosellana | 4246 |
| 19342411-19344840: + | | | | |
| CM037558.1: | family3 | EnSpm/CACTA | Sitodiplosis mosellana | 4247 |
| 19378956-19381310: − | | | | |
| CM037558.1: | unclassified | unknown | Sitodiplosis mosellana | 4248 |
| 20865219-20886983: − | | | | |
| CM037558.1: | unclassified | unknown | Sitodiplosis mosellana | 4249 |
| 20987152-20992318: − | | | | |
| CM037558.1: | unclassified | unknown | Sitodiplosis mosellana | 4250 |
| 21078897-21079523: + | | | | |
| CM037558.1: | family3 | unknown | Sitodiplosis mosellana | 4251 |
| 21655603-21675736: − | | | | |
| CM037558.1: | family3 | hAT | Sitodiplosis mosellana | 4252 |
| 21964948-21971292: − | | | | |
| CM037558.1: | family3 | hAT | Sitodiplosis mosellana | 4253 |
| 22078624-22081138: − | | | | |
| CM037558.1: | family3 | EnSpm/CACTA | Sitodiplosis mosellana | 4254 |
| 24352289-24354642: − | | | | |
| CM037558.1: | family3 | EnSpm/CACTA | Sitodiplosis mosellana | 4255 |
| 24594938-24597292: − | | | | |
| CM037558.1: | family3 | hAT | Sitodiplosis mosellana | 4256 |
| 25615714-25618256: + | | | | |
| CM037558.1: | family3 | unknown | Sitodiplosis mosellana | 4257 |
| 27590642-27610744: + | | | | |
| CM037558.1: | family3 | unknown | Sitodiplosis mosellana | 4258 |
| 28947094-28968149: − | | | | |
| CM037558.1: | unclassified | unknown | Sitodiplosis mosellana | 4259 |
| 29174831-29176436: − | | | | |
| CM037558.1: | family3 | unknown | Sitodiplosis mosellana | 4260 |
| 30124110-30145199: + | | | | |
| CM037558.1: | family3 | unknown | Sitodiplosis mosellana | 4261 |
| 30924596-30939637: − | | | | |
| CM037558.1: | family3 | unknown | Sitodiplosis mosellana | 4262 |
| 30993446-31007828: + | | | | |
| CM037558.1: | family3 | EnSpm/CACTA | Sitodiplosis mosellana | 4263 |
| 34731497-34733281: − | | | | |
| CM037558.1: | family3 | unknown | Sitodiplosis mosellana | 4264 |
| 34830659-34851040: − | | | | |
| CM037558.1: | unclassified | hAT | Sitodiplosis mosellana | 4265 |
| 39646722-39647649: + | | | | |
| CM037558.1: | unclassified | unknown | Sitodiplosis mosellana | 4266 |
| 40801866-40816180: − | | | | |
| CM037558.1 | unclassified | unknown | Sitodiplosis mosellana | 4267 |
| 41260131-41260916: + | | | | |
| CM037558.1: | family3 | EnSpm/CACTA | Sitodiplosis mosellana | 4268 |
| 41531398-41533754: − | | | | |
| CM037558.1: | unclassified | unknown | Sitodiplosis mosellana | 4269 |
| 41555715-41556410: − | | | | |
| CM037559.1: | family3 | hAT | Sitodiplosis mosellana | 4270 |
| 3669111-3671364: − | | | | |
| CM037559.1: | family3 | hAT | Sitodiplosis mosellana | 4271 |
| 5090294-5092813: + | | | | |
| CM037559.1: | unclassified | EnSpm/CACTA | Sitodiplosis mosellana | 4272 |
| 5958120-5958970: + | | | | |
| CM037559.1: | family3 | EnSpm/CACTA | Sitodiplosis mosellana | 4273 |
| 6669466-6671371: + | | | | |
| CM037559.1: | family3 | unknown | Sitodiplosis mosellana | 4274 |
| 8061293-8099727: + | | | | |
| CM037559.1: | unclassified | unknown | Sitodiplosis mosellana | 4275 |
| 9267297-9274428: + | | | | |
| CM037559.1: | family3 | hAT | Sitodiplosis mosellana | 4276 |
| 11741045-11743363: + | | | | |
| CM037559.1: | family3 | unknown | Sitodiplosis mosellana | 4277 |
| 12696086-12708483: + | | | | |
| CM037559.1: | unclassified | unknown | Sitodiplosis mosellana | 4278 |
| 13309787-13313145: − | | | | |
| CM037559.1: | unclassified | unknown | Sitodiplosis mosellana | 4279 |
| 19122395-19123420: − | | | | |
| CM037559.1: | unclassified | hAT | Sitodiplosis mosellana | 4280 |
| 20036206-20037026: + | | | | |
| CM037559.1: | family3 | unknown | Sitodiplosis mosellana | 4281 |
| 20752186-20761201: − | | | | |
| CM037559.1: | family3 | unknown | Sitodiplosis mosellana | 4282 |
| 20868295-20897247: − | | | | |
| CM037559.1: | family3 | unknown | Sitodiplosis mosellana | 4283 |
| 20942028-20946805: + | | | | |
| CM037559.1: | family3 | hAT | Sitodiplosis mosellana | 4284 |
| 21083928-21086366: + | | | | |
| CM037559.1: | family3 | unknown | Sitodiplosis mosellana | 4285 |
| 21184658-21198083: + | | | | |
| CM037559.1: | family3 | hAT | Sitodiplosis mosellana | 4286 |
| 22179504-22181712: + | | | | |
| CM037559.1: | unclassified | EnSpm | Sitodiplosis mosellana | 4287 |
| 22417664-22419974: + | | | | |
| CM037559.1: | family3 | hAT | Sitodiplosis mosellana | 4288 |
| 22711034-22713471: − | | | | |
| CM037559.1: | family3 | unknown | Sitodiplosis mosellana | 4289 |
| 24338786-24348759: − | | | | |
| CM037559.1: | unclassified | hAT | Sitodiplosis mosellana | 4290 |
| 25835977-25837398: + | | | | |
| CM037559.1: | family3 | EnSpm/CACTA | Sitodiplosis mosellana | 4291 |
| 25908653-25910044: − | | | | |
| CM037559.1: | family3 | unknown | Sitodiplosis mosellana | 4292 |
| 29890853-29924466: + | | | | |
| CM037559.1: | family3 | unknown | Sitodiplosis mosellana | 4293 |
| 29928123-29941239: + | | | | |
| CM037559.1: | unclassified | hAT | Sitodiplosis mosellana | 4294 |
| 30120643-30121671: + | | | | |
| CM037559.1: | family3 | EnSpm/CACTA | Sitodiplosis mosellana | 4295 |
| 35234230-35236541: + | | | | |
| CM037559.1: | unclassified | unknown | Sitodiplosis mosellana | 4296 |
| 35713731-35732101: − | | | | |
| CM037559.1: | family3 | unknown | Sitodiplosis mosellana | 4297 |
| 37453181-37464428: − | | | | |
| CM037559.1: | family3 | unknown | Sitodiplosis mosellana | 4298 |
| 38687839-38696007: − | | | | |
| CM037559.1: | family3 | EnSpm/CACTA | Sitodiplosis mosellana | 4299 |
| 40222072-40224624: − | | | | |
| CM037859.1: | family5 | unknown | Anadara kagoshimensis | 4300 |
| 66211-67608: + | | | | |
| CM037862.1: | family5 | unknown | Anadara kagoshimensis | 4301 |
| 67015186-67016583: + | | | | |
| CM037868.1: | family5 | unknown | Anadara kagoshimensis | 4301 |
| 27048380-27049777: + | | | | |
| CM037869.1: | family5 | unknown | Anadara kagoshimensis | 4300 |
| 59270370-59271767: − | | | | |
| CM037874.1: | family5 | unknown | Anadara kagoshimensis | 4301 |
| 60560888-60562285: − | | | | |
| CM037875.1: | family5 | unknown | Anadara kagoshimensis | 4302 |
| 102628-103347: − | | | | |
| JACFYK010000025.1: | family5 | unknown | Anadara kagoshimensis | 4301 |
| 3932-5329: − | | | | |
| JACFYK010000023.1: | family5 | unknown | Anadara kagoshimensis | 4300 |
| 64326-65723: − | | | | |
| CM039390.1: | unclassified | unknown | Spodoptera exigua | 4303 |
| 38266-39435: + | | | | |
| CM039390.1: | unclassified | unknown | Spodoptera exigua | 4304 |
| 146801-148027: + | | | | |
| CM039390.1: | unclassified | unknown | Spodoptera exigua | 4305 |
| 153102-153848: + | | | | |
| CM039490.1: | unclassified | unknown | Begonia darthvaderiana | 4306 |
| 61450470-61454752: + | | | | |
| CM039490.1: | unclassified | unknown | Begonia darthvaderiana | 4307 |
| 61919489-61925183: + | | | | |
| CM039490 1: | unclassified | unknown | Begonia darthvaderiana | 4308 |
| 61976205-61984451: + | | | | |
| CM039490.1: | unclassified | unknown | Begonia darthvaderiana | 4309 |
| 62252119-62255933: + | | | | |
| CM039490.1: | unclassified | unknown | Begonia darthvaderiana | 4310 |
| 625286263-62531587: + | | | | |
| JAGUCF010035274.1: | unclassified | unknown | Micropterna sequax | 4311 |
| 89044-90411: + | | | | |
| JABFQM010000130.1: | unclassified | unknown | Zelostemma sp. ZL- | 4312 |
| 42478-44310: | | | 2020 | |
| JAFMSR010000003.1: | family5 | unknown | Saxidomus purpurata | 4313 |
| 29325095-29325742: + | | | | |
| JAFMSR010000003.1: | family5 | unknown | Saxidomus purpurata | 4314 |
| 41772491-41773174: − | | | | |
| JAFMSR010000003.1: | family5 | unknown | Saxidomus purpurata | 4315 |
| 53726127-53727560: − | | | | |
| JAFMSR010000005.1: | family5 | unknown | Saxidomus purpurata | 4316 |
| 13277001-13277804: − | | | | |
| JAFMSR010000006.1: | family5 | unknown | Saxidomus purpurata | 4317 |
| 33499182-33500621: − | | | | |
| JAFMSR010000006.1: | family5 | unknown | Saxidomus purpurata | 4318 |
| 33503451-33504890: − | | | | |
| JAFMSR010000006.1: | family5 | unknown | Saxidomus purpurata | 4319 |
| 33507590-33509029: + | | | | |
| JAFMSR010000023.1: | family5 | unknown | Saxidomus purpurata | 4320 |
| 669245-670659: − | | | | |
| JAFMSR010000039.1: | family5 | unknown | Saxidomus purpurata | 4321 |
| 154737-156170: + | | | | |
| JAFMSR010000048.1: | family5 | unknown | Saxidomus purpurata | 4322 |
| 70996-72435: + | | | | |
| JAFMSR010000048.1: | family5 | unknown | Saxidomus purpurata | 4323 |
| 73546-74985: + | | | | |
| JAFMSR010000048.1: | family5 | unknown | Saxidomus purpurata | 4324 |
| 108112-109089: + | | | | |
| JAFMSR010000048.1: | family5 | unknown | Saxidomus purpurata | 4325 |
| 168488-169921: − | | | | |
| CP060768 1: | unclassified | unknown | Chloropicon primus | 4326 |
| 465377-468668: − | | | | |
| JALBYD010000010.1: | family5 | unknown | Pseudozyma pruni | 4327 |
| 464870-467437: − | | | | |
| JALBYD010000015.1: | family5 | unknown | Pseudozyma pruni | 4328 |
| 291970 293857: + | | | | |
| JALBYD010000016.1: | unclassified | unknown | Pseudozyma pruni | 4329 |
| 106006-107921: + | | | | |
| JALBYD010000003.1: | family5 | unknown | Pseudozyma pruni | 4330 |
| 158366-160497: + | | | | |
| JALBYD010000033.1: | unclassified | unknown | Pseudozyma pruni | 4331 |
| 929-1585: + | | | | |
| JALCCG010000157.1: | family5 | unknown | Sporisorium sorghi | 4332 |
| 19007-23250: − | | | | |
| JALCCG010000029.1: | family5 | unknown | Sporisorium sorghi | 4333 |
| 89341-91305: + | | | | |
| JALCCG010000055.1: | family5 | unknown | Sporisorium sorghi | 4334 |
| 2-1569: + | | | | |
| JALCCG010000084.1: | family5 | unknown | Sporisorium sorghi | 4335 |
| 14942-16732: − | | | | |
| HG739480.1: | unclassified | unknown | Coffea canephora | 4336 |
| 189179-193807: + | | | | |
| LT554300.1: | family4 | unknown | Absidia giauca | 4337 |
| 175793-178362: − | | | | |
| FNXT01001188.1: | unclassified | unknown | Tetradesmus obliquus | 4338 |
| 3583-5570: + | | | | |
| FWWN02000704.1: | family1 | unknown | Rhizomucor pusillus | 4339 |
| 212076-215216: − | | | | |
| FWWN02000701.1: | unclassified | unknown | Rhizomucor pusillus | 4340 |
| 71328-72277: + | | | | |
| FWWN02000658.1: | unclassified | unknown | Rhizomucor pusillus | 4341 |
| 100865-102852: + | | | | |
| WWN02000629.1: | unclassified | unknown | Rhizomucor pusillus | 4342 |
| 83775-85331: − | | | | |
| FWWN020006251: | unclassified | unknown | Rhizomucor pusillus | 4343 |
| 1260-5049: − | | | | |
| FWWN020006131: | unclassified | unknown | Rhizomucor pusillus | 4344 |
| 73613-75396: + | | | | |
| FWWN02000525.1: | family4 | unknown | Rhizomucor pusillus | 4345 |
| 1145-2564 + | | | | |
| FWWN020005251: | unclassified | unknown | Rhizomucor pusillus | 4346 |
| 17783-18847: + | | | | |
| FWWN02000666.1: | unclassified | unknown | Rhizomucor pusillus | 4347 |
| 40343-41127: + | | | | |
| FWWN02000334.1: | unclassified | unknown | Rhizomucor pusillus | 4348 |
| 1-1166: + | | | | |
| FWWN02000468.1: | family1 | unknown | Rhizomucor pusillus | 4349 |
| 1-1497: + | | | | |
| FWWN020005261: | family4 | unknown | Rhizomucor pusillus | 4350 |
| 1145-2529 + | | | | |
| FWWN02000681.1: | family4 | unknown | Rhizomucor pusillus | 4351 |
| 483-1944: + | | | | |
| FWWN020001771.: | unclassified | unknown | Rhizomucor pusillus | 4352 |
| 26341-28889: − | | | | |
| FWWN02000182.1: | unclassified | unknown | Rhizomucor pusillus | 4353 |
| 497-2398: − | | | | |
| WWN020001491: | unclassified | lunknown | Rhizomucor pusillus | 4354 |
| 15965-17807: + | | | | |
| FWWN02000626.1: | unclassified | unknown | Rhizomucor pusillus | 4355 |
| 99799-102053: + | | | | |
| FWWN02000604.1: | unclassified | unknown | Rhizomucor pusillus | 4356 |
| 21993-22750: − | | | | |
| FWWN020001321: | unclassified | unknown | Rhizomucor pusillus | 4357 |
| 38169-39154: + | | | | |
| FWWN02000492.1: | unclassified | unknown | Rhizomucor pusillus | 4358 |
| 50534-53362: − | | | | |
| BONZK01004246.1: | family4 | unknown | Pharmaceum exiguum | 4359 |
| 10766-13652: + | | | | |
| BOVAF01000054.1: | unclassified | unknown | Odontarrhena argentea | 4360 |
| 21825-23048: − | | | | |
| OVBJ01000170.1: | unclassified | unknown | Raparia bulbosa | 4360 |
| 9768-10991: − | | | | |
| UCOL01000347.1: | unclassified | unknown | Ormyrus nitidulus | 4361 |
| 370-1707: + | | | | |
| BUFQX01000097.1: | unclassified | unknown | Arapaima gigas | 4362 |
| 390965-391975: + | | | | |
| BUFQX01001056 1: | unclassified | unknown | Arapaima gigas | 4363 |
| 5697-6758: + | | | | |
| CAAKHF010001386 1: | unclassified | unknown | Hippocampus kuda | 4364 |
| 56989-58209: + | | | | |
| CACKRE030004323.1: | unclassified | unknown | Ectocarpus sp. CCAP | 4365 |
| 74603-77375: | | | 1310/34 | |
| CACKRE030005181.1: | family4 | unknown | Ectocarpus sp. CCAP | 4366 |
| 51402-58985: + | | | 1310/34 | |
| CADDIJ020003169.1: | unclassified | unknown | Tetradesmus | 4367 |
| 10618-12087: − | | | acuminatus | |
| LR989850.1: | family3 | unknown | Autographa gamma | 4368 |
| 5644070-5648061 + | | | | |
| LR989865.1: | family3 | unknown | Autographa gamma | 4369 |
| 1902732-1904537: − | | | | |
| LR989849.1: | family3 | unknown | Autographa gamma | 4370 |
| 3110763-3112568: − | | | | |
| LR989849.1: | family3 | unknown | Autographa gamma | 4369 |
| 5261741-5263546: + | | | | |
| LR990127.1: | unclassified | piggyBac | Hypena proboscidalis | 4371 |
| 22733571-22734813: + | | | | |
| LR990128.1: 9400 | family3 | piggyBac | Hypena proboscidalis | 4372 |
| 568-9402373: + | | | | |
| LR990132.1: | family3 | unknown | Hypena proboscidalis | 4373 |
| 9175276-9182345: − | | | | |
| LR990141.1: | family3 | piggyBac | Hypena proboscidalis | 4374 |
| 16679554-16681200: − | | | | |
| LR990143.1: | family3 | piggyBac | Hypena proboscidalis | 4375 |
| 5689262-5690053: + | | | | |
| LR990144 1: | unclassified | piggyBac | Hypena proboscidalis | 4376 |
| 10801131-10802135: − | | | | |
| LR990146.1: | family3 | piggyBac | Hypena proboscidalis | 4377 |
| 7929995-7931803: + | | | | |
| LR990146.1: | family3 | piggyBac | Hypena proboscidalis | 4378 |
| 17116599-17119864: − | | | | |
| LR990156.1: | family3 | piggyBac | Hypena proboscidalis | 4379 |
| 6438058-6439863: + | | | | |
| LR990281.1: | family3 | unknown | Apotomis turbidana | 4380 |
| 11465367-11466419: + | | | | |
| LR990282.1: | family3 | unknown | Apotomis turbidana | 4381 |
| 12310051-12314625: − | | | | |
| LR990282.1: 1487 | family3 | unknown | Apotomis turbidana | 4382 |
| 12320439-12322151: + | | | | |
| LR990282.1: | family3 | piggyBac | Apotomis turbidana | 4383 |
| 14870749-14871537: − | | | | |
| LR990282 1: | family3 | unknown | Apotomis turbidana | 4384 |
| 14871833-14873545: + | | | | |
| LR990288.1: | unclassified | unknown | Apotomis turbidana | 4385 |
| 24260646-24273624: − | | | | |
| LR990294.1: | family3 | unknown | Apotomis turbidana | 4386 |
| 12664139-12665683: + | | | | |
| LR990306.1: | family3 | unknown | Apotomis turbidana | 4387 |
| 1591282-1592994:− | | | | |
| LR990653.1: | unclassified | unknown | Xestia xanthographa | 4388 |
| 26187254-26189448: − | | | | |
| LR990653.1: | family3 | piggyBac | Xestia xanthographa | 4389 |
| 26204419-26206227: + | | | | |
| LR990653.1: | family3 | piggyBac | Xestia xanthographa | 4389 |
| 26252026-26253834: + | | | | |
| LR990653.1: | family3 | piggyBac | Xestia xanthographa | 4389 |
| 26284712-26286520: + | | | | |
| SLR990653.1: | family3 | piggyBac | Xestia xanthographa | 4389 |
| 26308552-26310360: + | | | | |
| LR990653.1: | family3 | piggyBac | Xestia xanthographa | 4390 |
| 26433855-26434712: + | | | | |
| LR990653.1: | family3 | piggyBac | Xestia xanthographa | 4389 |
| 26480725-26482533: − | | | | |
| LR990653.1: | unclassified | unknown | Xestia xanthographa | 4388 |
| 26497505-26499699: + | | | | |
| LR990641.1: | family3 | piggyBac | Xestia xanthographa | 4391 |
| 5979755-5981423: + | | | | |
| BLR990929.1: | unclassified | unknown | Noctua fimbriata | 4392 |
| 8487411-8488320: − | | | | |
| LR990988.1: | family3 | unknown | Mamestra brassicae | 4393 |
| 96231-97490: + | | | | |
| LR990987.1: | unclassified | unknown | Mamestra brassicae | 4394 |
| 17858838-17860368: + | | | | |
| LR991027.1: | unclassified | unknown | Cosmia trapezina | 4395 |
| 27423309-27425747: + | | | | |
| BLR991028.1: | family3 | unknown | Cosmia trapezina | 4396 |
| 25401460-25402320: − | | | | |
| LR991039.1: | family3 | unknown | Cosmia trapezina | 4397 |
| 12659943-12661316: + | | | | |
| LR991040.1: | family3 | unknown | Cosmia trapezina | 4398 |
| 16121172-16124231: + | | | | |
| LR994589.1: | unclassified | piggyBac | Celastrina argiolus | 4399 |
| 214130-216746: + | | | | |
| LR994599.1: | family3 | piggyBac | Celastrina argiolus | 4400 |
| 10105660-10107057: − | | | | |
| LR994549.1: | family3 | piggyBac | Cyaniris semiargus | 4401 |
| 9824309-984211: + | | | | |
| LR994550.1: | family3 | unknown | Cyaniris semiargus | 4402 |
| 7603253-7607152: − | | | | |
| LR994551.1: | family3 | piggyBac | Cyaniris semiargus | 4403 |
| 5426583-5428415: − | | | | |
| LR994558.1: | family3 | piggyBac | Cyaniris semiargus | 4404 |
| 16789923-16791755: − | | | | |
| LR994559.1: | unclassified | piggyBac | Cyaniris semiargus | 4405 |
| 266392-267999: + | | | | |
| LR994566.1: | family3 | piggyBac | Cyaniris semiargus | 4406 |
| 1202002-1203850: + | | | | |
| HG992001 1: | unclassified | unknown | Amphipyra tragopoginis | 4407 |
| 13332124-13333426: + | | | | |
| HG992011.1: | family3 | unknown | Amphipyra tragopoginis | 4408 |
| 18609734-18610600: + | | | | |
| BHG991991.1: | unclassified | unknown | Amphipyra tragopoginis | 4409 |
| 141189637-14121240: + | | | | |
| HG992071.1: | family3 | piggyBac | Lysandra coridon | 4410 |
| 5694542-5695432: − | | | | |
| HG992080.1: | family3 | piggyBac | Lysandra coridon | 4411 |
| 2793509-2795353: − | | | | |
| HG992114.1: | family3 | piggyBac | Lysandra coridon | 4412 |
| 1181748-1183593: + | | | | |
| HG995177.1: | unclassified | unknown | Lycaena phlaeas | 4413 |
| 12878718-12883874: − | | | | |
| HG995325.1: | family3 | piggyBac | Lysandra bellargus | 4414 |
| 6193102-6194946: − | | | | |
| SHG995326 1: | family3 | piggyBac | Lysandra bellargus | 4415 |
| 6960573-6962408: + | | | | |
| HG995327.1: | family3 | piggyBac | Lysandra bellargus | 4416 |
| 3103789-3105633: − | | | | |
| HG995334.1: | family3 | piggyBac | Lysandra bellargus | 4417 |
| 922941-923741: − | | | | |
| HG995342.1: | family3 | piggyBac | Lysandra bellargus | 4418 |
| 5433864-5435708: − | | | | |
| HG995343.1: | family3 | piggyBac | Lysandra bellargus | 4411 |
| 10499395-10501239: + | | | | |
| HG995361.1: | family3 | piggyBac | Lysandra bellargus | 4419 |
| 3811806-3813650 + | | | | |
| HG995391.1: | family3 | unknown | Atethmia centrago | 4420 |
| 1420543-1421622: − | | | | |
| HG995396.1: | family3 | unknown | Atethmia centrago | 4421 |
| 8951890-8952669: − | | | | |
| HG996489 1: | family3 | unknown | Abrostola tripartita | 4422 |
| 9163160-9164815: − | | | | |
| HG996492.1: | family3 | unknown | Abrostola tripartita | 4423 |
| 11401932-11403587: + | | | | |
| HG996494.1: | family3 | unknown | Abrostola tripartita | 4422 |
| 3102699-3104354: + | | | | |
| HG996504.1: | family3 | unknown | Abrostola tripartita | 4422 |
| 2489709-2491364: + | | | | |
| BHG996505.1: | family3 | unknown | Abrostola tripartita | 4422 |
| 5597883-5599538: + | | | | |
| HG996507.1: | family3 | unknown | Abrostola tripartita | 4422 |
| 3089667-3091322: − | | | | |
| HG996486.1: | family3 | unknown | Abrostola tripartita | 4422 |
| 9852619-9854274: − | | | | |
| FR990050.1: | family3 | unknown | Glaucopsyche alexis | 4424 |
| 26762577-26764337: + | | | | |
| FR990061.1: | family3 | unknown | Glaucopsyche alexis | 4425 |
| 10484041-10485399: + | | | | |
| FR990062.1: | family3 | unknown | Glaucopsyche alexis | 4426 |
| 10250125-10251288: − | | | | |
| FR989926.1: | unclassified | piggyBac | Plebejus argus | 4427 |
| 17467969-17469468: − | | | | |
| FR989928.1: | family3 | piggyBac | Plebejus argus | 4428 |
| 1018399-1020228: + | | | | |
| FR989932.1: | unclassified | piggyBac | Plebejus argus | 4429 |
| 11640444-11641592: + | | | | |
| FR997765.1: | family3 | unknown | Autographa pulchrina | 4430 |
| 8794387-8796060: + | | | | |
| FR997773.1: | family3 | unknown | Autographa pulchrina | 4431 |
| 2265970-2267643: − | | | | |
| FR997775.1: | family3 | unknown | Autographa pulchrina | 4430 |
| 5743684-5745357: + | | | | |
| FR997735.1: | unclassified | piggyBac | Ochropleura plecta | 4432 |
| 8096846-8097769: − | | | | |
| OU015433 1: | family3 | piggyBac | Hemaris fuciformis | 4433 |
| 9056383-9058098: − | | | | |
| OU015434.1: | family3 | piggyBac | Hemaris fuciformis | 4434 |
| 12823966-12825681: + | | | | |
| OU015434.1: | family3 | piggyBac | Hemaris fuciformis | 4435 |
| 16884321-16886036: + | | | | |
| OU015436.1: | family3 | piggyBac | Hemaris fuciformis | 4436 |
| 8464903-8466618: − | | | | |
| OU015438.1: | family3 | piggyBac | Hemaris fuciformis | 4437 |
| 6397346-6398596: + | | | | |
| OU015440.1: | family3 | piggyBac | Hemaris fuciformis | 4435 |
| 8810313-8812028 + | | | | |
| OU015443.1: | family3 | piggyBac | Hemaris fuciformis | 4438 |
| 4569843-4571558: + | | | | |
| OU015445.1: | family3 | piggyBac | Hemaris fuciformis | 4439 |
| 6777532-6779247: + | | | | |
| OU015449 1: | family3 | piggyBac | Hemaris fuciformis | 4435 |
| 9357006-9358721 + | | | | |
| OU015450.1: | family3 | piggyBac | Hemaris fuciformis | 4440 |
| 6441931-6443646: − | | | | |
| OU015451.1: | family3 | piggyBac | Hemaris fuciformis | 4435 |
| 208186-209901: + | | | | |
| OU015451.1: | family3 | piggyBac | Hemaris fuciformis | 4435 |
| 8040954-8042669: + | | | | |
| OU015452.1: | unclassified | piggyBac | Hemaris fuciformis | 4441 |
| 2857293-2857973: − | | | | |
| OU015459.1: | family3 | piggyBac | Hemaris fuciformis | 4442 |
| 2040177-2041892: − | | | | |
| OU026102.1: | unclassified | unknown | Idaea aversata | 4443 |
| 11112368-11113564: + | | | | |
| OU342695.1: | family3 | unknown | Mythimna ferrago | 4444 |
| 17197004-17198329: + | | | | |
| OU342662 1: | unclassified | unknown | Chrysoteuchia culmella | 4445 |
| 10075431-10076768: − | | | | |
| OU342641.1: | unclassified | unknown | Chrysoteuchia culmella | 4446 |
| 15387052-15387654: − | | | | |
| OU342872.1: | family3 | unknown | Cydia splendana | 4447 |
| 33817751-33819448: − | | | | |
| OU342876.1: | family3 | unknown | Cydia splendana | 4448 |
| 179608-180975: + | | | | |
| OU342890.1: | family3 | unknown | Cydia splendana | 4449 |
| 10859781-10861148: + | | | | |
| OU342892.1: | family3 | unknown | Cydia splendana | 4450 |
| 3960556-3962145: − | | | | |
| SOU342895.1: | family3 | unknown | Cydia splendana | 4451 |
| 11718911-11719900: − | | | | |
| CAJUYE010000020.1: | family3 | unknown | Cydia splendana | 4452 |
| 143246-145114: − | | | | |
| CAJUYE010000058.1: | family3 | unknown | Cydia splendana | 4453 |
| 217851-219275: + | | | | |
| CAJUYE010000061.1: | family3 | unknown | Cydia splendana | 4454 |
| 89649-93576: − | | | | |
| CAJUYE010000061.1: | family3 | unknown | Cydia splendana | 4455 |
| 1169237-1170961: − | | | | |
| OU426921.1: 1086 | family3 | unknown | Apamea monoglypha | 4456 |
| 2320-10864152: − | | | | |
| OU426935.1: | family3 | unknown | Apamea monoglypha | 4457 |
| 6711911-6713740: − | | | | |
| BOU452290.1: | family3 | unknown | Pammene fasciana | 4458 |
| 6487977-6489008: + | | | | |
| SOU452293.1: | family3 | unknown | Pammene fasciana | 4459 |
| 11879084-11880820: − | | | | |
| OU452293 1: | unclassified | unknown | Pammene fasciana | 4460 |
| 11950249-11951303: + | | | | |
| BOU452293.1: | family3 | unknown | Pammene fasciana | 4461 |
| 11957475-11959211: − | | | | |
| ROU452293.1: | family3 | unknown | Pammene fasciana | 4459 |
| 11990558-11992294: − | | | | |
| OU452293.1: | family3 | unknown | Pammene fasciana | 4462 |
| 12103587-12105323: + | | | | |
| OU452272.1: | family3 | unknown | Pammene fasciana | 4463 |
| 21657950-21659062: − | | | | |
| OU611752 1: | unclassified | unknown | Dunaliella primolecta | 4464 |
| 10413300-10415783: − | | | | |
| OU611752.1: | unclassified | unknown | Dunaliella primolecta | 4465 |
| 10461099-10476303: + | | | | |
| OU611758.1: | unclassified | unknown | Dunaliella primolecta | 4466 |
| 5718323-5719594: − | | | | |
| OU611758 1: | unclassified | unknown | Dunaliella primolecta | 4467 |
| 6087165-6088728 + | | | | |
| OU611764.1: | unclassified | unknown | Dunaliella primolecta | 4468 |
| 2210868-2235305: + | | | | |
| BOU611766.1: | unclassified | unknown | Dunaliella primolecta | 4469 |
| 1841792-1862637: + | | | | |
| OU611790.1: | unclassified | unknown | Hydraecia micacea | 4470 |
| 8745721-8746997: + | | | | |
| OU611841.1: | family3 | unknown | Agrochola circellaris | 4471 |
| 19748400-19749836: + | | | | |
| BOU611842.1: | unclassified | unknown | Agrochola circellaris | 4472 |
| 8492607-8493782 + | | | | |
| OU611850.1: | family3 | piggyBac | Agrochola circellaris | 4473 |
| 11652823-11653983: − | | | | |
| BOU611850.1: | family3 | unknown | Agrochola circellaris | 4474 |
| 13256122-13257789: + | | | | |
| OU611850 1: | family3 | unknown | Agrochola circellaris | 4475 |
| 13888203-13889504: − | | | | |
| OU611856.1: | family3 | unknown | Agrochola circellaris | 4476 |
| 17537245-17539055: + | | | | |
| OU611861.1: | family3 | unknown | Agrochola circellaris | 4477 |
| 13852357-13855548: − | | | | |
| OU744285.1: | family3 | unknown | Griposia aprilina | 4478 |
| 2256847-2259137: + | | | | |
| OU744302.1: | family3 | unknown | Griposia aprilina | 4479 |
| 18894943-18896751: − | | | | |
| ROU753582.1: | unclassified | piggyBac | Agrochola macilenta | 4480 |
| 2460126-2460812 + | | | | |
| OU785227.1: | family3 | piggyBac | Erebia ligea | 4481 |
| 1162945-1164642 + | | | | |
| OU785237.1: | family3 | piggyBac | Erebia ligea | 4482 |
| 16425040-16427579: − | | | | |
| OU785243.1: | family3 | piggyBac | Erebia ligea | 4483 |
| 4336246-4337124: + | | | | |
| OU823242 1: | unclassified | unknown | Dryobotodes eremita | 4484 |
| 23689389-23691479: + | | | | |
| OU823260.1: | family3 | unknown | Dryobotodes eremita | 4485 |
| 7528454-7529721: + | | | | |
| OU823272.1: | family3 | unknown | Dryobotodes eremita | 4486 |
| 955931-957788: + | | | | |
| OU975418.1: | family3 | unknown | Philereme vetulata | 4487 |
| 21508343-21509656: − | | | | |
| OU975428.1: | family3 | unknown | Philereme vetulata | 4488 |
| 11252227-11254059: − | | | | |
| OU975429.1: | family3 | unknown | Philereme vetulata | 4489 |
| 3460958-3463386: − | | | | |
| OU975433.1: | unclassified | unknown | Philereme vetulata | 4490 |
| 10245761-10247269: − | | | | |
| OU975437.1: | family3 | unknown | Philereme vetulata | 4491 |
| 10236213-10238045: − | | | | |
| OU975439 1: | family3 | unknown | Philereme vetulata | 4492 |
| 12358176-12360004: − | | | | |
| OU975448.1: | family3 | unknown | Philereme vetulata | 4493 |
| 1936626-1938458: − | | | | |
| OU975476.1: | family3 | unknown | Philereme vetulata | 4492 |
| 5031214-5033042: − | | | | |
| SOU975479.1: | family3 | unknown | Philereme vetulata | 4494 |
| 1008655-1010487: − | | | | |
| OV179143.1: | family3 | unknown | Euplexia lucipara | 4495 |
| 25290435-25292105: + | | | | |
| OV179144.1: | family3 | unknown | Euplexia lucipara | 4496 |
| 1845407-1847077 + | | | | |
| OV179145.1: | family3 | unknown | Euplexia lucipara | 4495 |
| 7987290-7988960: + | | | | |
| OV179151.1: | family3 | unknown | Euplexia lucipara | 4495 |
| 7572313-7573983: + | | | | |
| OV179158.1: | family3 | unknown | Euplexia lucipara | 4496 |
| 16200897-16202567: + | | | | |
| OV179161.1: | family3 | unknown | Euplexia lucipara | 4496 |
| 16571967-16573637: − | | | | |
| OV179162.1: | family3 | unknown | Euplexia lucipara | 4497 |
| 14194278-14195672: − | | | | |
| OV179165.1: | family3 | unknown | Euplexia lucipara | 4495 |
| 7871645-7873315: + | | | | |
| OV179170.1: | family3 | unknown | Euplexia lucipara | 4495 |
| 1665193-1666863: + | | | | |
| OV656726.1: | family3 | unknown | Macaria notata | 4498 |
| 4023580-4025388 + | | | | |
| OV884032.1: | family3 | unknown | Catocala fraxini | 4499 |
| 13539545-13541338: + | | | | |
| OV884037.1: | family3 | unknown | Catocala fraxini | 4500 |
| 27260348-27261475: − | | | | |
| OV884044.1: | family3 | unknown | Catocala fraxini | 4501 |
| 12817704-12819497: + | | | | |
| OV884053.1: | family3 | unknown | Catocala fraxini | 4502 |
| 13649232-13651025: − | | | | |
| CAKNXH010002387.1: | family3 | unknown | Andricus quercusramuli | 4503 |
| 1053172-1054142: + | | | | |
| CAKNXH010057967.1: | unclassified | unknown | Andricus quercusramuli | 4504 |
| 61695-62781: | | | | |
| CAKNYM010053152.1: | unclassified | unknown | Andricus curvator | 4505 |
| 1097192-1097944: + | | | | |
| OW026300.1: | family3 | unknown | Apotomis betuletana | 4506 |
| 6635756-6637468: − | | | | |
| OW026300.1: | family3 | piggyBac | Apotomis betuletana | 4507 |
| 13787391-13788636: + | | | | |
| OW026301.1: | family3 | piggyBac | Apotomis betuletana | 4508 |
| 23277209-23278733: − | | | | |
| OW026307.1: | family3 | unknown | Apotomis betuletana | 4509 |
| 22977096-22978808: + | | | | |
| OW026312.1: | family3 | unknown | Apotomis betuletana | 4510 |
| 9756084-9756947: + | | | | |
| OW026413.1: | family3 | unknown | Diarsia rubi | 4511 |
| 18830762-18831565: − | | | | |
| OW026416.1: | unclassified | unknown | Diarsia rubi | 4512 |
| 6276175-6283514: − | | | | |
| OW026421.1: | family3 | unknown | Diarsia rubi | 4513 |
| 14119432-14120310: + | | | | |
| OW026427.1: | family3 | unknown | Diarsia rubi | 4514 |
| 88793-90481: − | | | | |
| OW026431.1: | family3 | unknown | Diarsia rubi | 4515 |
| 17648701-17649492: − | | | | |
| OW028674.1: | family3 | unknown | Epinotia nisella | 4516 |
| 4541015-4542124: − | | | | |
| OW028674.1: | family3 | unknown | Epinotia nisella | 4517 |
| 507667-5077950: − | | | | |
| OW028674.1: | family3 | unknown | Epinotia nisella | 4518 |
| 11798600-11799349: − | | | | |
| OW028675.1: | family3 | unknown | Epinotia nisella | 4519 |
| 27643939-27645369: − | | | | |
| OW028682.1: | family3 | unknown | Epinotia nisella | 4520 |
| 14034738-14035874: + | | | | |
| OW028689.1: | family3 | unknown | Epinotia nisella | 4521 |
| 14571178-14572854: − | | | | |
| OW028673.1: | family3 | unknown | Epinotia nisella | 4522 |
| 8941065-8942645: − | | | | |
| OW028673.1: | family3 | unknown | Epinotia nisella | 4523 |
| 37637183-37638292: + | | | | |
| OW028668.1: | family3 | unknown | Diachrysia chrysitis | 4524 |
| 4770093-4773965: + | | | | |
| OW028668.1: | family3 | unknown | Diachrysia chrysitis | 4525 |
| 4778491-4780745: + | | | | |
| OW028668.1: | family3 | unknown | Diachrysia chrysitis | 4526 |
| 4792745-4794649: − | | | | |
| OW028668.1: | family3 | unknown | Diachrysia chrysitis | 4527 |
| 4804327-4806204 + | | | | |
| BOW028668.1: | family3 | unknown | Diachrysia chrysitis | 4528 |
| 4810208-4811641: + | | | | |
| OW028668.1: | family3 | unknown | Diachrysia chrysitis | 4529 |
| 4837673-4839127: + | | | | |
| NC_057004.1: | unclassified | Helitron | Chlamydomonas | 4530 |
| 3115604-3119679: − | | | reinhardtii | |
| NC_057005.1: | unclassified | Helitron | Chlamydomonas | 4531 |
| 477295-478719: + | | | reinhardtii | |
| NC_057005.1: | unclassified | unknown | Chlamydomonas | 4532 |
| 1651008-1653253: − | | | reinhardtii | |
| NC_067005.1: | unclassified | Helitron | Chlamydomonas | 4533 |
| 5119241-5121159: + | | | reinhardtii | |
| NC_057007 1: | unclassified | unknown | Chlamydomonas | 4534 |
| 2624394-2630064: + | | | reinhardtii | |
| NC_057009.1: | unclassified | Helitron | Chlamydomonas | 4535 |
| 9011472-9014383: − | | | reinhardtii | |
| NC_057010.1: | unclassified | unknown | Chlamydomonas | 4536 |
| 291419-295674: − | | | reinhardtii | |
| NC_067014.1: | family4 | unknown | Chlamydomonas | 4537 |
| 1394646-1397811: − | | | reinhardtii | |
| NC_057015.1: | unclassified | unknown | Chlamydomonas | 4538 |
| 2952277-2966282: + | | | reinhardtii | |
| NC_057015.1: | unclassified | Helitron | Chlamydomonas | 4539 |
| 5271419-5273251: − | | | reinhardtii | |
| NC_057015.1: | family4 | unknown | Chlamydomonas | 4540 |
| 9003746-9009901: − | | | reinhardtii | |
| NC_057016 1: | family4 | unknown | Chlamydomonas | 4541 |
| 1733896-1736051: − | | | reinhardtii | |
| NC_057017.1: | unclassified | Helitron | Chlamydomonas | 4542 |
| 143921-145842: + | | | reinhardtii | |
| NC_057020.1: | unclassified | Helitron | Chlamydomonas | 4543 |
| 5602739-5604446: − | | | reinhardtii | |
| NC_057020.1 | unclassified | unknown | Chlamydomonas | 4544 |
| 7047212-7051683: + | | | reinhardtii | |
| NC_010127.1: | family4 | unknown | Cyanidioschyzon | 4545 |
| 52945-57315: + | | | merolae strain 10D | |
| NC_010127.1: | family4 | unknown | Cyanidioschyzon | 4546 |
| 413102-414296: − | | | merolae strain 10D | |
| NC_010128.1: | unclassified | unknown | Cyanidioschyzon | 4547 |
| 82873-83537: − | | | merolae strain 10D | |
| NC_010128.1: | unclassified | unknown | Cyanidioschyzon | 4548 |
| 167579-173750: − | | | merolae strain 10D | |
| NC_010128 1: | family4 | unknown | Cyanidioschyzon | 4549 |
| 373223-375483: + | | | merolae strain 10D | |
| NC_010128.1: | family4 | unknown | Cyanidioschyzon | 4550 |
| 442887-443811: − | | | merolae strain 10D | |
| NC_010129.1: | family4 | unknown | Cyanidioschyzon | 4551 |
| 16761-18051: + | | | merolae strain 10D | |
| NC_010129.1: | unclassified | unknown | Cyanidioschyzon | 4552 |
| 472 400371-401945: − | | | merolae strain 10D | |
| NC_010129.1: | family4 | unknown | Cyanidioschyzon | 4553 |
| 464164-466678: − | | | merolae strain 10D | |
| NC_010129.1: | unclassified | unknown | Cyanidioschyzon | 4554 |
| 472284-473148: − | | | merolae strain 10D | |
| NC_010130.1: | unclassified | unknown | Cyanidioschyzon | 4555 |
| 160981-163535: − | | | merolae strain 10D | |
| NC_010130.1: | family4 | unknown | Cyanidioschyzon | 4556 |
| 331857-336487: + | | | merolae strain 10D | |
| NC_010130 1: | family4 | unknown | Cyanidioschyzon | 4557 |
| 390392-391822: + | | | merolae strain 10D | |
| NC_010130.1: | unclassified | unknown | Cyanidioschyzon | 4558 |
| 465097-466581: − | | | merolae strain 10D | |
| NC_010130.1: | unclassified | unknown | Cyanidioschyzon | 4559 |
| 469372-470742: + | | | merolae strain 10D | |
| NC_010132.1: | unclassified | unknown | Cyanidioschyzon | 4560 |
| 12481-13261: + | | | merolae strain 10D | |
| NC_010132.1: | family4 | unknown | Cyanidioschyzon | 4561 |
| 26351-28351: + | | | merolae strain 10D | |
| NC_010132.1: | unclassified | unknown | Cyanidioschyzon | 4562 |
| 274476-275766: + | | | merolae strain 10D | |
| NC_010132.1: | unclassified | unknown | Cyanidioschyzon | 4563 |
| 482513-485663: + | | | merolae strain 10D | |
| NC_010132.1: | unclassified | unknown | Cyanidioschyzon | 4564 |
| 517768-518892: − | | | merolae strain 10D | |
| NC_010132 1: | unclassified | unknown | Cyanidioschyzon | 4565 |
| 522198-525932: − | | | merolae strain 10D | |
| NC_010133.1: | family4 | unknown | Cyanidioschyzon | 4566 |
| 101723-105433: + | | | merolae strain 10D | |
| NC_010133.1: | family4 | unknown | Cyanidioschyzon | 4567 |
| 213460-215684: − | | | merolae strain 10D | |
| NC_010133.1: | unclassified | unknown | Cyanidioschyzon | 4568 |
| 215755-221095: + | | | merolae strain 10D | |
| NC_010134.1: | unclassified | Bunknown | Cyanidioschyzon | 4569 |
| 11731-13511: + | | | merolae strain 10D | |
| NC_010134.1: | family4 | unknown | Cyanidioschyzon | 4570 |
| 186702-188773: + | | | merolae strain 10D | |
| NC_010134.1: | unclassified | unknown | Cyanidioschyzon | 4571 |
| 215597-217021: − | | | merolae strain 10D | |
| NC_010134.1: | unclassified | unknown | Cyanidioschyzon | 4572 |
| 217612-218960: + | | | merolae strain 10D | |
| NC_010134.1: | unclassified | unknown | Cyanidioschyzon | 4573 |
| 221192-224122: + | | | merolae strain 10D | |
| NC_010134 1: | unclassified | unknown | Cyanidioschyzon | 4574 |
| 235537-237861: − | | | merolae strain 10D | |
| NC_010134.1: | family4 | unknown | Cyanidioschyzon | 4575 |
| 493195-495839: − | | | merolae strain 10D | |
| NC_010134.1: | family4 | unknown | Cyanidioschyzon | 4576 |
| 559490-561540: + | | | merolae strain 10D | |
| NC_010135.1: | family4 | unknown | Cyanidioschyzon | 4577 |
| 16321-17441: + | | | merolae strain 10D | |
| NC_010135.1: | unclassified | unknown | Cyanidioschyzon | 4578 |
| 30041-31523: + | | | merolae strain 10D | |
| NC_010135.1: | family4 | unknown | Cyanidioschyzon | 4579 |
| 247131-249641: + | | | merolae strain 10D | |
| NC_010135.1: | unclassified | unknown | Cyanidioschyzon | 4580 |
| 269021-269963: + | | | merolae strain 10D | |
| NC_010135.1: | unclassified | unknown | Cyanidioschyzon | 4581 |
| 321982-325166: − | | | merolae strain 10D | |
| NC_010135 1: | family4 | unknown | Cyanidioschyzon | 4582 |
| 518348-519968: + | | | merolae strain 10D | |
| NC_010135.1: | family4 | unknown | Cyanidioschyzon | 4583 |
| 598910-600114: − | | | merolae strain 10D | |
| NC_010135.1: | family4 | unknown | Cyanidioschyzon | 4584 |
| 799281-801855: − | | | merolae strain 10D | |
| NC_010136.1: | unclassified | unknown | Cyanidioschyzon | 4585 |
| 8471-9173 + | | | merolae strain 10D | |
| NC_010136.1: | unclassified | unknown | Cyanidioschyzon | 4586 |
| 355025-356063: + | | | merolae strain 10D | |
| NC_010136.1: | family4 | unknown | Cyanidioschyzon | 4587 |
| 417100-419024: − | | | merolae strain 10D | |
| NC_010136.1: | family4 | unknown | Cyanidioschyzon | 4588 |
| 438290-439974: − | | | merolae strain 10D | |
| NC_010136.1: | unclassified | unknown | Cyanidioschyzon | 4589 |
| 520256-523000: − | | | merolae strain 10D | |
| NC_010136 1: | family4 | unknown | Cyanidioschyzon | 4590 |
| 725831-726925: − | | | merolae strain 10D | |
| NC_010136.1: | unclassified | unknown | Cyanidioschyzon | 4591 |
| 793171-795135: − | | | merolae strain 10D | |
| NC_010137.1: | unclassified | unknown | Cyanidioschyzon | 4592 |
| 138772-140661: − | | | merolae strain 10D | |
| NC_010137.1: | family4 | unknown | Cyanidioschyzon | 4593 |
| 165312-166972: + | | | merolae strain 10D | |
| NC_010137.1: | unclassified | unknown | Cyanidioschyzon | 4594 |
| 264626-265506: + | | | merolae strain 10D | |
| NC_010138.1: | family4 | unknown | Cyanidioschyzon | 4595 |
| 130810-135974: − | | | merolae strain 10D | |
| NC_010138.1: | unclassified | unknown | Cyanidioschyzon | 4596 |
| 374953-375766: − | | | merolae strain 10D | |
| NC_010138.1: | family4 | unknown | Cyanidioschyzon | 4597 |
| 613874-616918: + | | | merolae strain 10D | |
| NC_010138 1: | unclassified | unknown | Cyanidioschyzon | 4598 |
| 847703-848647: − | | | merolae strain 10D | |
| NC_010139.1: | family4 | unknown | Cyanidioschyzon | 4599 |
| 301005-304949: − | | | merolae strain 10D | |
| NC_010139.1: | unclassified | unknown | Cyanidioschyzon | 4600 |
| 575074-579138: − | | | merolae strain 10D | |
| NC_010139.1 | family4 | unknown | Cyanidioschyzon | 4601 |
| 627304-629428: − | | | merolae strain 10D | |
| NC_010139.1: | family4 | unknown | Cyanidioschyzon | 4602 |
| 840489-841959: + | | | merolae strain 10D | |
| NC_010139.1: | family4 | unknown | Cyanidioschyzon | 4603 |
| 857154-858428: − | | | merolae strain 10D | |
| NC_010140.1: | family4 | unknown | Cyanidioschyzon | 4604 |
| 24778-27018: + | | | merolae strain 10D | |
| NC_010140.1: | family4 | unknown | Cyanidioschyzon | 4605 |
| 87618-89558: + | | | merolae strain 10D | |
| NC_010140.1: | family4 | unknown | Cyanidioschyzon | 4606 |
| 470658-472422: − | | | merolae strain 10D | |
| NC_010140 1: | unclassified | lunknown | Cyanidioschyzon | 4607 |
| 539995-544435: + | | | merolae strain 10D | |
| NC_010140.1: | family4 | unknown | Cyanidioschyzon | 4608 |
| 772922-775262: + | | | merolae strain 10D | |
| NC_010141.1: | unclassified | unknown | Cyanidioschyzon | 4609 |
| 28626-30930: − | | | merolae strain 10D | |
| NC_010141.1 | unclassified | unknown | Cyanidioschyzon | 4610 |
| 177456-178340: + | | | merolae strain 10D | |
| NC_010141.1: | unclassified | unknown | Cyanidioschyzon | 4611 |
| 198196-199073: + | | | merolae strain 10D | |
| NC_010141.1: | family4 | unknown | Cyanidioschyzon | 4612 |
| 399678-400682: − | | | merolae strain 10D | |
| NC_010141.1: | unclassified | unknown | Cyanidioschyzon | 4613 |
| 407663-408503: + | | | merolae strain 10D | |
| NC_010141.1: | unclassified | unknown | Cyanidioschyzon | 4614 |
| 550942-556892: + | | | merolae strain 10D | |
| NC_010141 1: | unclassified | unknown | Cyanidioschyzon | 4615 |
| 560662-563288: + | | | merolae strain 10D | |
| NC_010141.1: | family4 | unknown | Cyanidioschyzon | 4616 |
| 641878-643565: − | | | merolae strain 10D | |
| NC_010141.1: | unclassified | unknown | Cyanidioschyzon | 4617 |
| 744054-746744: + | | | merolae strain 10D | |
| NC_010142.1: | family4 | unknown | Cyanidioschyzon | 4618 |
| 23431-24641: + | | | merolae strain 10D | |
| NC_010142.1: | unclassified | unknown | Cyanidioschyzon | 4619 |
| 89131-90210: − | | | merolae strain 10D | |
| NC_010142.1: | unclassified | unknown | Cyanidioschyzon | 4620 |
| 126751-127631: + | | | merolae strain 10D | |
| NC_010142.1: | unclassified | unknown | Cyanidioschyzon | 4621 |
| 155981-157061: + | | | merolae strain 10D | |
| NC_010142.1: | family4 | unknown | Cyanidioschyzon | 4622 |
| 198385-200839: − | | | merolae strain 10D | |
| NC_010142 1: | unclassified | unknown | Cyanidioschyzon | 4623 |
| 329426-330960: − | | | merolae strain 10D | |
| NC_010142.1: | family4 | unknown | Cyanidioschyzon | 4624 |
| 368766-370810: − | | | merolae strain 10D | |
| NC_010142.1: | family4 | unknown | Cyanidioschyzon | 4625 |
| 381686-382710: − | | | merolae strain 10D | |
| NC_010142.1: | unclassified | unknown | Cyanidioschyzon | 4626 |
| 569111-569865: − | | | merolae strain 10D | |
| NC_010142.1: | family4 | unknown | Cyanidioschyzon | 4627 |
| 625206-626410: − | | | merolae strain 10D | |
| NC_010142.1: | family4 | unknown | Cyanidioschyzon | 4628 |
| 657703-659140: − | | | merolae strain 10D | |
| NC_010142.1: | family4 | unknown | Cyanidioschyzon | 4629 |
| 691111-693051: + | | | merolae strain 10D | |
| NC_010143.1: | unclassified | unknown | Cyanidioschyzon | 4630 |
| 34613-37323: + | | | merolae strain 10D | |
| NC_010143 1: | unclassified | unknown | Cyanidioschyzon | 4631 |
| 500493-503137: − | | | merolae strain 10D | |
| NC_010143.1: | family4 | unknown | Cyanidioschyzon | 4632 |
| 673825-678769: − | | | merolae strain 10D | |
| NC_010143.1: | unclassified | unknown | Cyanidioschyzon | 4633 |
| 774270-775300: + | | | merolae strain 10D | |
| NC_010144.1: | unclassified | unknown | Cyanidioschyzon | 4634 |
| 43101-45541: + | | | merolae strain 10D | |
| NC_010144.1: | family4 | unknown | Cyanidioschyzon | 4635 |
| 168227-170341: − | | | merolae strain 10D | |
| NC_010144.1: | unclassified | unknown | Cyanidioschyzon | 4636 |
| 1049266-1052620: − | | | merolae strain 10D | |
| NC_010144.1: | unclassified | unknown | Cyanidioschyzon | 4637 |
| 1144712-1146186: − | | | merolae strain 10D | |
| NC_010144.1: | unclassified | unknown | Cyanidioschyzon | 4638 |
| 1186527-1187336: − | | | merolae strain 10D | |
| NC_010144.1: | family4 | unknown | Cyanidioschyzon | 4639 |
| 1236462-1237366: − | | | merolae strain 10D | |
| NC_010145 1: | unclassified | unknown | Cyanidioschyzon | 4640 |
| 7461-8241: + | | | merolae strain 10D | |
| NC_010145.1: | unclassified | unknown | Cyanidioschyzon | 4641 |
| 34466-37200: − | | | merolae strain 10D | |
| NC_010145.1: | family4 | unknown | Cyanidioschyzon | 4642 |
| 247237-250941: − | | | merolae strain 10D | |
| NC_010145.1: | unclassified | unknown | Cyanidioschyzon | 4643 |
| 456389-458016: + | | | merolae strain 10D | |
| NC_010145.1: | family4 | unknown | Cyanidioschyzon | 4644 |
| 520839-525439: + | | | merolae strain 10D | |
| NC_010145.1: | family4 | unknown | Cyanidioschyzon | 4645 |
| 985576-988540: − | | | merolae strain 10D | |
| NC_010145.1: | unclassified | unknown | Cyanidioschyzon | 4646 |
| 1269090-1270481: − | | | merolae strain 10D | |
| NC_010146.1: | family4 | unknown | Cyanidioschyzon | 4647 |
| 15561-17551: + | | | merolae strain 10D | |
| NC_010146 1: | family4 | unknown | Cyanidioschyzon | 4648 |
| 96391-97950: − | | | merolae strain 10D | |
| NC_010146.1: | family4 | unknown | Cyanidioschyzon | 4649 |
| 112781-114941: + | | | merolae strain 10D | |
| NC_010146.1: | unclassified | unknown | Cyanidioschyzon | 4650 |
| 166081-170571: + | | | merolae strain 10D | |
| NC_010146.1: | unclassified | unknown | Cyanidioschyzon | 4651 |
| 463936-467616: + | | | merolae strain 10D | |
| NC_010146.1: | unclassified | unknown | Cyanidioschyzon | 4652 |
| 904961-907835: − | | | merolae strain 10D | |
| NC_010146.1: | family4 | unknown | Cyanidioschyzon | 4653 |
| 1002147-1005827: + | | | merolae strain 10D | |
| NC_010146.1 | family4 | unknown | Cyanidioschyzon | 4654 |
| 1121378-1122498: + | | | merolae strain 10D | |
| NC_010146.1: | family4 | unknown | Cyanidioschyzon | 4655 |
| 1140203-1142437: − | | | merolae strain 10D | |
| NC_010146 1: | family4 | unknown | Cyanidioschyzon | 4656 |
| 1149283-1150547: − | | | merolae strain 10D | |
| NC_010146.1: | family4 | unknown | Cyanidioschyzon | 4657 |
| 1537413-1540133: + | | | merolae strain 10D | |
| NC_010146.1: | family4 | unknown | Cyanidioschyzon | 4658 |
| 1603086-1604300: − | | | merolae strain 10D | |
| NW_003307590.1: | unclassified | unknown | Volvox carteri f. | 4659 |
| 949859-954343: + | | | nagariensis | |
| NC_016450.1: | family5 | unknown | Eremothecium | 4660 |
| 1078978-1079997: − | | | cymbalariae | |
| | | | DBVPG#7215 | |
| NC_016505.1: | family5 | unknown | Torulaspora delbrueckii | 4661 |
| 293841-295259: − | | | | |
| NW_019379486.1: | family3 | unknown | Copidosoma floridanum | 4662 |
| 246836-248192: + | | | | |
| NW_011934209.1: | family4 | unknown | Auxenochlorella | 4663 |
| 522772-527805: − | | | protothecoides | |
| NW_011934213.1: | family4 | unknown | Auxenochlorella | 4664 |
| 547300-553794: + | | | protothecoides | |
| NW_011934269.1: | family4 | unknown | Auxenochlorella | 4665 |
| 224799-230500: − | | | protothecoides | |
| NW_011934272.1: | family4 | unknown | Auxenochlorella | 4666 |
| 54218-57928: − | | | protothecoides | |
| NW_011934473.1: | family4 | unknown | Auxenochlorella | 4667 |
| 276266-281621: − | | | protothecoides | |
| NW_015453458 1: | unclassified | unknown | Ziziphus jujuba | 4668 |
| 168364-173652: − | | | | |
| NW_017265148.1: | unclassified | unknown | Phycomyces | 4669 |
| 370978-372164: − | | | blakesleeanus NRRL | |
| | | | 1555(−) | |
| NW_019671916.1: | unclassified | unknown | Rhizopus microsporus | 4670 |
| 90992-93725: + | | | ATCC 52813 | |
| NW_019671916.1: | unclassified | Mariner/Tc1 | Rhizopus microsporus | 4671 |
| 1392731-1394584: | | | ATCC 52813 | |
| NW_019671916.1: | unclassified | Mariner/Tc1 | Rhizopus microsporus | 4672 |
| 1817422-1819180: + | | | ATCC 52813 | |
| NW_019671916.1: | family4 | unknown | Rhizopus microsporus | 4673 |
| 1947128-1949767: + | | | ATCC 52813 | |
| NW_019671917 1: | family4 | unknown | Rhizopus microsporus | 4674 |
| 398803-399683: − | | | ATCC 52813 | |
| NW_019671917.1: | family1 | unknown | Rhizopus microsporus | 4675 |
| 910332-913415: − | | | ATCC 52813 | |
| NW_019671918.1: | unclassified | Mariner/Tc1 | Rhizopus microsporus | 4676 |
| 36962-38545: + | | | ATCC 52813 | |
| NW_019671918.1: | unclassified | Mariner/Tc1 | Rhizopus microsporus | 4676 |
| 40128-41711: + | | | ATCC 52813 | |
| NW_019671918.1: | unclassified | unknown | Rhizopus microsporus | 4677 |
| 539208-547531: + | | | ATCC 52813 | |
| NW_019671918.1: | family1 | unknown | Rhizopus microsporus | 4678 |
| 936819-939532: + | | | ATCC 52813 | |
| NW_019671918.1: | unclassified | unknown | Rhizopus microsporus | 4679 |
| 1612680-1616477: + | | | ATCC 52813 | |
| NW_019671919.1: | unclassified | Mariner/Tc1 | Rhizopus microsporus | 4680 |
| 261122-262932: + | | | ATCC 52813 | |
| NW_019671920.1: | unclassified | unknown | Rhizopus microsporus | 4681 |
| 186267-188048: − | | | ATCC 52813 | |
| NW_019671921 1: | unclassified | unknown | Rhizopus microsporus | 4682 |
| 219120-221156: − | | | ATCC 52813 | |
| NW_019671921.1: | unclassified | unknown | Rhizopus microsporus | 4683 |
| 394573-397009: + | | | ATCC 52813 | |
| NW_019671921.1: | family4 | unknown | Rhizopus microsporus | 4684 |
| 619533-624860: + | | | ATCC 52813 | |
| NW_019671921.1 | family4 | unknown | Rhizopus microsporus | 4685 |
| 817600-818591: − | | | ATCC 52813 | |
| NW_019671922.1: | unclassified | unknown | Rhizopus microsporus | 4686 |
| 685746-589546: + | | | ATCC 52813 | |
| NW_019671922.1: | unclassified | unknown | Rhizopus microsporus | 4687 |
| 605323-606805: − | | | ATCC 52813 | |
| NW_019671923.1: | family4 | unknown | Rhizopus microsporus | 4688 |
| 610453-611487: + | | | ATCC 52813 | |
| NW_019671924.1: | family4 | Mariner/Tc1 | Rhizopus microsporus | 4689 |
| 460674-462299: − | | | ATCC 52813 | |
| NW_019671925 1: | unclassified | unknown | Rhizopus microsporus | 4690 |
| 186001-187496: − | | | ATCC 52813 | |
| NW_019671926.1: | family4 | Mariner/Tc1 | Rhizopus microsporus | 4691 |
| 597305-599049: − | | | ATCC 52813 | |
| NW_019671926.1: | unclassified | Mariner/Tc1 | Rhizopus microsporus | 4692 |
| 727486-729325: − | | | ATCC 52813 | |
| NW_019671927.1: | unclassified | Mariner/Tc1 | Rhizopus microsporus | 4693 |
| 121628-123254: − | | | ATCC 52813 | |
| NW_019671927.1: | unclassified | Mariner/Tc1 | Rhizopus microsporus | 4694 |
| 276598-277718: − | | | ATCC 52813 | |
| NW_019671927.1: | unclassified | Mariner/Tc1 | Rhizopus microsporus | 4695 |
| 486022-487732: + | | | ATCC 52813 | |
| NW_019671927.1: | family1 | unknown | Rhizopus microsporus | 4696 |
| 629224-632631: + | | | ATCC 52813 | |
| NW_019671928 1: | family4 | unknown | Rhizopus microsporus | 4697 |
| 236559-238070: − | | | ATCC 52813 | |
| NW_019671929.1: | unclassified | unknown | Rhizopus microsporus | 4698 |
| 27 462-30096: + | | | ATCC 52813 | |
| NW_019671929.1: | unclassified | Mariner/Tc1 | Rhizopus microsporus | 4699 |
| 246408-248164: + | | | ATCC 52813 | |
| NW_019671932.1 | unclassified | Mariner/Tc1 | Rhizopus microsporus | 4700 |
| 108923-110570: + | | | ATCC 52813 | |
| NW_019671934.1: | unclassified | unknown | Rhizopus microsporus | 4701 |
| 86192-87557: + | | | ATCC 52813 | |
| NW_019671935.1: | unclassified | unknown | Rhizopus microsporus | 4702 |
| 197046-199154: + | | | ATCC 52813 | |
| NW_019671940.1: | unclassified | Mariner/Tc1 | Rhizopus microsporus | 4703 |
| 83177-84627: − | | | ATCC 52813 | |
| NW_019671941.1: | unclassified | Mariner/Tc1 | Rhizopus microsporus | 4704 |
| 7942-9762: − | | | ATCC 52813 | |
| NW_019671941 1: | family4 | unknown | Rhizopus microsporus | 4705 |
| 68473-69582: + | | | ATCC 52813 | |
| NW_019671941.1: | family4 | Mariner/Tc1 | Rhizopus microsporus | 4706 |
| 188712-190289: − | | | ATCC 52813 | |
| NW_019671949.1: | unclassified | unknown | Rhizopus microsporus | 4707 |
| 57934-58657: − | | | ATCC 52813 | |
| NW_019671953.1: | unclassified | Mariner/Tc1 | Rhizopus microsporus | 4708 |
| 11479-13316: − | | | ATCC 52813 | |
| NW_020271757.1: | family4 | unknown | Sipha flava | 4709 |
| 548937-566639: − | | | | |
| NW_020273045.1: | family4 | unknown | Sipha flava | 4710 |
| 2815490-2816621: | | | | |
| NW_025407833.1: | family5 | unknown | Naegleria lovaniensis | 4711 |
| 601930-602619: + | | | | |
| NW_025407857.1: | unclassified | unknown | Naegleria lovaniensis | 4712 |
| 46739-48640: − | | | | |
| NW_025407870.1: | family5 | unknown | Naegleria lovaniensis | 4713 |
| 91827-93596: + | | | | |
| NW_021133325 1: | unclassified | unknown | Ostrinia furnacalis | 4714 |
| 69226-70991: + | | | | |
| NW_021133325.1: | unclassified | unknown | Ostrinia furnacalis | 4715 |
| 179808-181112: + | | | | |
| NW_021137400.1: | unclassified | unknown | Ostrinia furnacalis | 4716 |
| 485493-486488: − | | | | |
| NW_022197486.1: | unclassified | unknown | Contarinia nasturtii | 4717 |
| 3596548-3617703: | | | | |
| NW_022197486.1: | unclassified | unknown | Contarinia nasturtii | 4718 |
| 13408700-13419079: − | | | | |
| NW_022197544.1: | family3 | hAT | Contarinia nasturtii | 4719 |
| 10002442-10004496: + | | | | |
| NW_022197577.1: | unclassified | unknown | Contarinia nasturtii | 4720 |
| 4300854-4307384: + | | | | |
| NW_022197829.1: | unclassified | unknown | Contarinia nasturtii | 4721 |
| 173815-175839: − | | | | |
| NW_022197846.1: | unclassified | hAT | Contarinia nasturtii | 4722 |
| 3773553-3776032: | | | | |
| NW_022197846.1: | family3 | EnSpm/CACTA | Contarinia nasturtii | 4723 |
| 4055462-4057991: | | | | |
| NW_022197885.1: | unclassified | unknown | Contarinia nasturtii | 4724 |
| 88778-110159: − | | | | |
| NW_022198046.1: | family3 | unknown | Contarinia nasturtii | 4725 |
| 1465114-1487518: | | | | |
| NW_022198211.1: | unclassified | unknown | Contarinia nasturtii | 4726 |
| 3604544-3626021: + | | | | |
| NW_022198340 1: | unclassified | unknown | Contarinia nasturtii | 4727 |
| 508189-549037: − | | | | |
| NW_022198383.1: | unclassified | unknown | Contarinia nasturtii | 4728 |
| 1155457-1171331: + | | | | |
| NW_022198383.1: | unclassified | hAT | Contarinia nasturtii | 4729 |
| 4739272-4740160: + | | | | |
| NW_022198526.1: | unclassified | unknown | Contarinia nasturtii | 4730 |
| 639001-648488: + | | | | |
| NW_022198581.1: | family3 | unknown | Contarinia nasturtii | 4731 |
| 1203606-1205560: + | | | | |
| NW_022198581.1: | family3 | hAT | Contarinia nasturtii | 4732 |
| 1290618-1293683: + | | | | |
| NW_022198645 1: | family3 | hAT | Contarinia nasturtii | 4733 |
| 29963-31605: + | | | | |
| NW_022198763.1: | unclassified | unknown | Contarinia nasturtii | 4734 |
| 1-1208: + | | | | |
| NW_022198836.1: | family3 | unknown | Contarinia nasturtii | 4735 |
| 710270-730289: − | | | | |
| NW 022199493.1: | family3 | unknown | Contarinia nasturtii | 4736 |
| 1448587-1459237: + | | | | |
| NW_022199749.1: | family3 | unknown | Contarinia nasturtii | 4737 |
| 3180-20782: − | | | | |
| NW_022199997.1: | family3 | EnSpm/CACTA | Contarinia nasturtii | 4738 |
| 2002059-2004593: | | | | |
| NC_049716.1: | family3 | unknown | Spodoptera frugiperda | 4739 |
| 11681020-11682684: + | | | | |
| NC_049722.1: | family3 | unknown | Spodoptera frugiperda | 4740 |
| 15480039-15481703: − | | | | |
| NC_049741.1: | family3 | unknown | Spodoptera frugiperda | 4741 |
| 1077296-1078960 + | | | | |
| NW_023503302.1: | family3 | unknown | Bradysis coprophila | 4742 |
| 360359-361564: − | | | | |
| NW_023503302.1: | family3 | unknown | Bradysis coprophila | 4743 |
| 3047366-3051053: | | | | |
| NW_023503307.1: | unclassified | unknown | Bradysis coprophila | 4744 |
| 4154329-4154958: + | | | | |
| NW_023503372.1: | family3 | unknown | Bradysis coprophila | 4745 |
| 1377233-1389749: + | | | | |
| NW_023503372 1: | family3 | unknown | Bradysis coprophila | 4746 |
| 2112066-2129013: + | | | | |
| NW_023503374 1: | unclassified | unknown | Bradysis coprophila | 4747 |
| 7179175-7180410: + | | | | |
| NW_023503509.1 | unclassified | unknown | Bradysis coprophila | 4748 |
| 167492-169054: − | | | | |
| NW_023503608.1: | family3 | unknown | Bradysis coprophila | 4749 |
| 6176163-6177332: + | | | | |
| NW_023503616.1: | unclassified | unknown | Bradysia coprophila | 4750 |
| 6413419-6414778: + | | | | |
| NC_059306.1: | family5 | IS607 | Mercenaria mercenaria | 4751 |
| 10831933-10834683: + | | | | |
| NC_059306.1: | family5 | unknown | Mercenaria mercenaria | 4752 |
| 30007014-30008447: − | | | | |
| NC_059311.1: | family5 | unknown | Mercenaria mercenaria | 4753 |
| 30591809-30592621: + | | | | |
| NC_059311 1: | family5 | IS607 | Mercenaria mercenaria | 4754 |
| 91468146-91469705: − | | | | |
| NC_059316.1: | family5 | IS607 | Mercenaria mercenaria | 4755 |
| 26485785-26487344: + | | | | |
| NC_059318.1: | family5 | IS607 | Mercenaria mercenaria | 4756 |
| 19280174-19281733: − | | | | |
| NC_059318.1: | family5 | unknown | Mercenaria mercenaria | 4757 |
| 27526218-27530427: − | | | | |
| NC_059319.1: | family5 | IS607 | Mercenaria mercenaria | 4758 |
| 9434290-9435213: + | | | | |
| NW_025542418 1: | family5 | unknown | Mercenaria mercenaria | 4759 |
| 143486-144675: + | | | | |
| NW_025542472.1: | family5 | IS607 | Mercenaria mercenaria | 4760 |
| 9431-10990: − | | | | |
| GL376564.1_751154_5_2266: | family4 | Mariner/Tc1 | Globisporangium | 4761 |
| 4186-6590: + | | | ultimum DAOM BR144 | |
| GL376567.1_538132_4_1813: | family4 | Mariner/Tc1 | Globisporangium | 4762 |
| 3854-6256: + | | | ultimum DAOM BR144 | |
| GL376590.1_479212_4_1518: | unclassified | unknown | Globisporangium | 4763 |
| 495-1148: + | | | ultimum DAOM BR144 | |
| GL376590.1_479212_4_1518: | unclassified | unknown | Globisporangium | 4764 |
| 4509-5618 + | | | ultimum DAOM BR144 | |
| GL376590.1_483682_4_1539: | unclassified | unknown | Globisporangium | 4765 |
| 1321-5618: + | | | ultimum DAOM BR144 | |
| GL376590.1_483682_4_1539: | unclassified | unknown | Globisporangium | 4764 |
| 8979-10088: + | | | ultimum DAOM BR144 | |
| GL376602.1_297074_5_715: | unclassified | unknown | Globisporangium | 4766 |
| 3988-5196: + | | | ultimum DAOM BR144 | |
| GL376602.1_297358_4_718: | unclassified | Mariner/Tc1 | Globisporangium | 4766 |
| 5097-6589: + | | | ultimum DAOM BR144 | |
| GL376613.1_512932_1_1737: | family4 | Mariner/Tc1 | Globisporangium | 4767 |
| 3581-6164: + | | | ultimum DAOM BR144 | |
| GL376622.1_623573_5_1981: | family4 | Mariner/Tc1 | Globisporangium | 4768 |
| 5061-7469: + | | | ultimum DAOM BR144 | |
| GL376622.1_653711_2_2070: | family4 | Mariner/Tc1 | Globisporangium | 4769 |
| 5061-7469: + | | | ultimum DAOM BR144 | |
| GL376626.1_196496_5_609: | unclassified | unknown | Globisporangium | 4770 |
| 2985-5393: + | | | ultimum DAOM BR144 | |
| GL376628.1:743020_4_2419: | family4 | unknown | Globisporangium | 4771 |
| 5418-7433: + | | | ultimum DAOM BR144 | |
| GL376634.1_962829_6_3074: | family4 | unknown | Globisporangium | 4772 |
| 4341-6770: + | | | ultimum DAOM BR144 | |
| GG745339.1_432977_2_2446: | family3 | unknown | Allomyces macrogynus | 4773 |
| 1876-6062: + | | | ATCC 38327 | |
| KN714622.1_82915_4_315: | family4 | unknown | Coccomyxa sp. | 4774 |
| 6-1940: + | | | LA000219 | |
| LNOG01006041 1_289809_6_313: | unclassified | unknown | Arabis nordmanniana | 4775 |
| 5016-6210: + | | | | |
| MAPW01000059.1_64438_1_258: | unclassified | unknown | Tilletia indica | 4776 |
| 5007-6704: + | | | | |
| NMPK01000082.1_58039_1_177: | family4 | unknown | Phytophthora plurivora | 4777 |
| 3620-6709: + | | | | |
| MU070117.1_128369_5_223: | family5 | unknown | Dunaliella salina | 4778 |
| 4724-9853: + | | | | |
| MU070513.1_20420_2_42: | family5 | unknown | Dunaliella salina | 4779 |
| 5558-7034: + | | | | |
| PGGS01000203.1_99113_5_298: | family4 | unknown | Tetrabaena socialis | 2552 |
| 915-1949: − | | | | |
| PEFX01000035.1_89855_2_504: | family2 | unknown | Rhodotorula | 2591 |
| 708-6022: + | | | mucilaginosa | |
| NIOD01000030.1_124501_4_315: | family4 | unknown | Phytophthora nicotianae | 4780 |
| 3232-5405: + | | | | |
| NIOD01000043.1_59172_3_145: | family4 | unknown | Phytophthora nicotianae | 4781 |
| 5079-5975: + | | | | |
| NIOD01000066.1_152342_2_395: | family4 | unknown | Phytophthora nicotianae | 4782 |
| 5040-7907: + | | | | |
| NIOD01000158.1_61740_6_147: | family5 | unknown | Phytophthora nicotianae | 4783 |
| 4562-6218: + | | | | |
| NICD01000209.1_54489_6_138: | unclassified | unknown | Phytophthora nicotianae | 4784 |
| 4828-5780: + | | | | |
| NIOD01000209.1_55316_5_140: | unclassified | unknown | Phytophthora nicotianae | 4784 |
| 5487-6439: + | | | | |
| NIOD01000214.1_60196_4_141: | family5 | unknown | Phytophthora nicotianae | 4785 |
| 3129-5999 + | | | | |
| NIOD01000306.1_54637_4_99: | family5 | unknown | Phytophthora nicotianae | 4786 |
| 5379-6326: + | | | | |
| RUS696251: | family5 | unknown | Elysia chlorotica | 2590 |
| 2290-3669: − | | | | |
| CM015678.1_4451986_1_16587: | family4 | unknown | Ectocarpus sp. Ec32 | 4787 |
| 5061-7739: + | | | | |
| CM015678.1_4594180_1_17105: | family4 | unknown | Ectocarpus sp. Ec32 | 4788 |
| 5061-7742: + | | | | |
| MRUE01000618.1_42236_2_220: | unclassified | unknown | Drosophila neonasuta | 4789 |
| 5109-6386: + | | | | |
| MRUE01002290.1_60673_4_329: | unclassified | unknown | Drosophila neonasuta | 4790 |
| 5019-6164: + | | | | |
| VFIW01000153.1_39742_4_107: | unclassified | unknown | Globisporangium | 2592 |
| 3886-5187: + | | | splendens | |
| QEAN01000023.1_15165_3_22: | unclassified | unknown | Synchytrium | 4791 |
| 5169-5949: + | | | endobioticum | |
| QEAN01000080.1_20880_3_36: | family2 | unknown | Synchytrium | 4792 |
| 4017-6230: + | | | endobioticum | |
| VXIU01000001.1_1795503_3_4116: | unclassified | unknown | Trebouxia sp A1-2 | 4793 |
| 3875-6307: + | | | | |
| WTPW01002909.1_13288_4_18: | family5 | unknown | Gigaspora margarita | 4794 |
| 9066-10358: − | | | | |
| WUQG01007200.1_188526638_5_94776: | unclassified | unknown | Androctonus | 4795 |
| 5010-6153: + | | | mauritanicus | |
| WUQG01072000.1_321306127_4_335195: | unclassified | unknown | Androctonus | 4796 |
| 5004-5741: + | | | mauritanicus | |
| JAABLK010000079.1_5948_2_22: | unclassified | unknown | Phytophthora | 4797 |
| 6921-7523: + | | | chlamydospora | |
| JAAKBD010000047.1_269253_6_87.1: | unclassified | unknown | Phytophthora syringae | 4798 |
| 4870-6640: + | | | | |
| QPEY01000524.1_613896_6_1432: | unclassified | unknown | Hydra viridissima | 4799 |
| 5004-8196: + | | | | |
| RJVT01000176.1_148734_6_214: | family3 | unknown | Cotesia chilonis | 4800 |
| 5556-6898: + | | | | |
| JAHDYR010000001.1_148183_4_412: | unclassified | unknown | Carpediemonas | 4801 |
| 2317-6005: + | | | membranifera | |
| JAHDYR010000003.1_723764_2_2338: | unclassified | unknown | Carpediemonas | 4802 |
| 4688-5732: + | | | membranifera | |
| JAHDYR010000004.1_199171_4_876: | unclassified | unknown | Carpediemonas | 2885 |
| 3938-5047: + | | | membranifera | |
| JAHDYR010000004.1_285421_4_1187: | unclassified | unknown | Carpediemonas | 4803 |
| 5166-5887: + | | | membranifera | |
| JAHDYR010000007.1_112008_6_305: | family2 | unknown | Carpediemonas | 4804 |
| 2705-5629: + | | | membranifera | |
| JAHDYR010000007.1_113719_4_314: | family2 | unknown | Carpediemonas | 4804 |
| 5130-8054: + | | | membranifera | |
| JAHDYR010000009.1_276924_3_777: | unclassified | unknown | Carpediemonas | 4805 |
| 3063-5777: + | | | membranifera | |
| JAHDYR010000012.1_1033033_1_3554: | unclassified | unknown | Carpediemonas | 4806 |
| 5040-5850: + | | | membranifera | |
| JAHDYR010000015.1_874571_5_27874: | family2 | unknown | Carpediemonas | 4807 |
| 4785-6056: + | | | membranifera | |
| JAHDYR010000016.1_26414_5_99.5: | family2 | unknown | Carpediemonas | 4808 |
| 106-6122: + | | | membranifera | |
| JAHDYR010000025.1_601483_4_2184: | family2 | unknown | Carpediemonas | 4809 |
| 5247-6263: + | | | membranifera | |
| JAHDYR010000038.1_842218_4_2757: | family2 | unknown | Carpediemonas | 4810 |
| 4489-6074: + | | | membranifera | |
| JAHDYR010000038.1_919526_5_3034: | unclassified | unknown | Carpediemonas | 4811 |
| 4408-5882: + | | | membranifera | |
| JAHDYR010000053.1_233656_4_644: | unclassified | unknown | Carpediemonas | 4812 |
| 332-2244: + | | | membranifera | |
| JAHDYR010000053.1_237090_6_655: | unclassified | unknown | Carpediemonas | 4812 |
| 4018-5930: + | | | membranifera | |
| JAHDYR010000062.1_1122700_4_3603: | unclassified | unknown | Carpediemonas | 4813 |
| 7087-8819: − | | | membranifera | |
| JAHDYR010000062.1_1541691_6_5203: | family2 | unknown | Carpediemonas | 4814 |
| 4127-6005: + | | | membranifera | |
| JAHDYR010000062.1_731309_5_2247: | family2 | unknown | Carpediemonas | 4815 |
| 4957-6223: + | | | membranifera | |
| KAG9390512.1: | family2 | unknown | Carpediemonas | 2821 |
| 6445-8043: + | | | membranifera | |
| JAHRIK010000009.1_183008_5_495: | family4 | unknown | Pythium oligandrum | 4816 |
| 5829-7748: + | | | | |
| CM035915.1_90946635_6_52901: | family5 | unknown | Dreissena polymorpha | 4817 |
| 5046-6491: + | | | | |
| CM037558.1_16048999_4_17345: | unclassified | unknown | Sitodiplosis mosellana | 4818 |
| 943-6102: + | | | | |
| CM039490 1_60984409_4_50914: | unclassified | unknown | Begonia darthvaderiana | 4819 |
| 5064-6170: + | | | | |
| CM039490 1_61139044_1_51104: | unclassified | unknown | Begonia darthvaderiana | 4820 |
| 5064-6170: + | | | | |
| CM039490.1_61221531_6_51209: | unclassified | unknown | Begonia darthvaderiana | 4821 |
| 5004-6122: + | | | | |
| CM039490.1_62469834_3_52899: | unclassified | unknown | Begonia darthvaderiana | 4822 |
| 5064-6170: + | | | | |
| CM039490.1_62469834_3_52899: | unclassified | unknown | Begonia darthvaderiana | 4823 |
| 8250-9702: − | | | | |
| CM039490.1_62473432_4_52906: | unclassified | unknown | Begonia darthvaderiana | 4822 |
| 8545-9651: − | | | | |
| CM039490.1_62882256_3_53456: | unclassified | unknown | Begonia darthvaderiana | 4824 |
| 5034-6188: + | | | | |
| JAFKQN010000742.1_50133_3_59: | unclassified | unknown | Clogmia albipunctata | 4825 |
| 5 010-6068: + | | | | |
| JAJJMA010266249.1_47321_2_229: | unclassified | unknown | Papaver nudicaule | 4826 |
| 5106-6382: + | | | | |
| OVAF01000017.1_116139_6_167: | unclassified | unknown | Odontarrhena argentea | 4827 |
| 5307-6554: + | | | | |
| OVBW01000077.1_39975_3_52: | unclassified | unknown | Erysimum pusillum | 4827 |
| 5307-6554 + | | | | |
| OVBC01000023.1_41447_2_55: | unclassified | unknown | Noccaea caerulescens | 4827 |
| 5307-6554 + | | | | |
| SOVBJ01000026.113265_5_16: | unclassified | unknown | Raparia bulbosa | 4828 |
| 5013-6119: + | | | | |
| OVBJ01000032.1_40466_2_55: | unclassified | unknown | Raparia bulbosa | 4827 |
| 5307-6554: + | | | | |
| CAJHJB010000023.1_121861_1_485: | unclassified | unknown | Tilletia controversa | 4829 |
| 5082-6793: + | | | | |
| CAJHJB010000057.1_13840_4_68: | unclassified | unknown | Tilletia controversa | 4830 |
| 5061-7491: + | | | | |
| CAJHUB010000143.1_38593_4_170: | unclassified | unknown | Tilletia controversa | 4831 |
| 5061-9134: + | | | | |
| LR990971.1_2532660_3 1549: | family3 | unknown | Craniophora ligustri | 4832 |
| 5562-9557: + | | | | |
| FR997765.1_7668579_3_3445: | family3 | unknown | Autographa puichrina | 4833 |
| 5166-86839: + | | | | |
| FR997780.1_4864881_3_2238: | family3 | unknown | Autographa pulchrina | 4430 |
| 5166-6839: + | | | | |
| OU744306.1_14460406_4_9283: | unclassified | unknown | Griposia aprilina | 4834 |
| 4956-6293: + | | | | |
| NC_057005.1_193108_4_936: | unclassified | Helitron | Chlamydomonas | 4835 |
| 5101-6814: + | | | reinhardtii | |
| NC_057009.1_8057102_5_40533: | unclassified | Helitron | Chlamydomonas | 4836 |
| 4525-5553: + | | | reinhardtii | |
| NC_057009.1_8057334_6_40539: | unclassified | unknown | Chlamydomonas | 4837 |
| 5450-7011: + | | | reinhardtii | |
| NC_057012.1_49928_2_198: | unclassified | Helitron | Chlamydomonas | 4838 |
| 4793-5975: + | | | reinhardtii | |
| NC_057020.1_2138560_4_10831: | unclassified | unknown | Chlamydomonas | 4839 |
| 1323-6665: + | | | reinhardtii | |
| NC_057020.1_2138560_4_10831: | unclassified | unknown | Chlamydomonas | 3047 |
| 2629-4109: − | | | reinhardtii | |
| NC_010142.1_610961_2_2116: | unclassified | unknown | Cyanidioschyzon | 4840 |
| 5076-5681: + | | | merolae strain 10D | |
| NC_010142.1_630513_6_2186: | unclassified | unknown | Cyanidioschyzon | 4841 |
| 5076-5684: + | | | merolae strain 10D | |
| NW_015971539.1_1166732_5_2563: | family4 | unknown | Spizellomyces punctatus | 4842 |
| 5772-6974: + | | | DAOM BR117 | |
| NW_015971543.1_73033_1_157: | unclassified | unknown | Spizellomyces punctatus | 4843 |
| 50 10-6896: + | | | DAOM BR117 | |
| NW_008648998.1_452425_1_757: | unclassified | unknown | Phytophthora parasitica | 4844 |
| 5009-5758: + | | | INRA-310 | |
| NW_008649000.1_268316_2_506: | family5 | unknown | Phytophthora parasitica | 4845 |
| 4418-6074: + | | | INRA-310 | |
| NW_008649031 1_22744_4_45: | jfamily5 | unknown | Phytophthora parasitica | 4846 |
| 5010-6428: + | | | INRA-310 | |
| NW_008649031 1_22744_4_45: | unclassified | unknown | Phytophthora parasitica | 4847 |
| 4749-6270: + | | | INRA-310 | |
| XP_008898397 1: | unclassified | unknown | Phytophthora parasitica | 4848 |
| 3344-5477: + | | | INRA-310 | |
| XP_008906570.1: | unclassified | unknown | Phytophthora parasitica | 4849 |
| 2610-5235: + | | | INRA-310 | |
| XP_018291769.1: | family1 | unknown | Phycomyces | 3210 |
| 7006-10192: − | | | blakesleeanus NRRL | |
| | | | 1555(−) | |
| NW_019671932.1:41419_1_58: | family4 | Helitron | Rhizopus microsporus | 4850 |
| 4218-6069: + | | | ATCC 52813 | |
| NW_019671932 1_68711_5_109: | unclassified | unknown | Rhizopus microsporus | 4851 |
| 8604-10627: + | | | ATCC 52813 | |
| NW_019671949 1_66275_2_81: | unclassified | unknown | Rhizopus microsporus | 4852 |
| 3520-5420: + | | | ATCC 52813 | |
| XP_023470993 1: | family4 | unknown | Rhizopus microsporus | 4853 |
| 108-1581: + | | | ATCC 52813 | |
| NW_025407854.1_410711_5_487: | unclassified | unknown | Naegleria lovaniensis | 4854 |
| 3743-5474: + | | | | |
| NW_022197436.1_4743455_2_3419: | family3 | EnSpm/CACTA | Contarinia nasturtii | 4855 |
| 4084-6089: + | | | | |
| NW_022197544.1_2945514_3_2205: | family3 | EnSpm/CACTA | Contarinia nasturtii | 4856 |
| 4183-6754: + | | | | |
| NW_022197544.1_9091125_6_6957: | family3 | EnSpm/CACTA | Contarinia nasturtii | 4857 |
| 3966-5990: + | | | | |
| NW_022197544.1_9769582_4_7435_{—} | family3 | EnSpm/CACTA | Contarinia nasturtii | 4858 |
| 4183-6753: + | | | | |
| NW_022197640.1_2544861_6_1798: | family3 | unknown | Contarinia nasturtii | 4859 |
| 4380-5715: + | | | | |
| NW_022197846.1_3392284_4_2465: | unclassified | EnSpm/CACTA | Contarinia nasturtii | 4860 |
| 4576-5361: + | | | | |
| NW_022198526.1_126602_2_110: | unclassified | EnSpm/CACTA | Contarinia nasturtii | 4861 |
| 5046-5714: + | | | | |
| NW_022198900 1_339549_6_248: | unclassified | EnSpm/CACTA | Contarinia nasturtii | 4862 |
| 5187-6754: + | | | | |
| NW_022199689 1_1150344_6_828: | family3 | EnSpm/CACTA | Contarinia nasturtii | 4863 |
| 3973-6619: + | | | | |
| NW 022201606.1_2426660_2_1913: | family3 | EnSpm/CACTA | Contarinia nasturtii | 4864 |
| 3612-5990: + | | | | |
| XP_031628791 1: | family3 | EnSpm/CACTA | Contarinia nasturtii | 4865 |
| 4266-5627: + | | | | |
| XP_031634211.1: | family3 | unknown | Contarinia nasturtii | 3360 |
| 87-2711: − | | | | |
| EJN40601.1 | family5 | unknown | Acanthamoeba | 4866 |
| | | | polyphaga lentillevirus | |
| EJN40622.1 | family5 | unknown | Acanthamoeba | 4867 |
| | | | polyphaga lentillevirus | |
| EJN40646.1 | family5 | unknown | Acanthamoeba | 4868 |
| | | | polyphaga lentillevirus | |
| AF204951.2_194453_5_611 | | IS4 | Ectocarpus siliculosus | 4869 |
| | | | virus 1 | |
| AF204951.2_220070_5_701 | family4 | IS4 | Ectocarpus siliculosus | 4870 |
| | | | virus 1 | |
| AAK14592.1 | family4 | unknown | Ectocarpus siliculosus | 4871 |
| | | | virus 1 | |
| AAK14636.1 | family4 | unknown | Ectocarpus siliculosus | 4872 |
| | | | virus 1 | |
| AGD92036.1 | family5 | unknown | Megavirus Iba | 4873 |
| AFX93238.1 | family5 | unknown | Megavirus courdo11 | 4874 |
| AUV58341.1 | family5 | unknown | Bandra megavirus | 4875 |
| ARF09408.1 | family4 | unknown | Indivirus ILV1 | 4876 |
| ARF09744.1 | family4 | unknown | Indivirus ILV1 | 4877 |
| ARF09749.1 | family4 | unknown | Indivirus ILV1 | 4878 |
| ARF10041.1 | family5 | unknown | Indivirus ILV1 | 4879 |
| ARF07993.1 | family5 | unknown | Catovirus CTV1 | 4880 |
| ARF08269.1 | family5 | unknown | Catovirus CTV1 | 4881 |
| ARF08502.1 | family5 | unknown | Catovirus CTV1 | 4882 |
| ARF08566.1 | family5 | unknown | Catovirus CTV1 | 4883 |
| ARF08756.1 | family5 | unknown | Catovirus CTV1 | 4884 |
| ARF10201.1 | family5 | unknown | Hokovirus HKV1 | 4885 |
| ARF10353.1 | family5 | unknown | Hokovirus HKV1 | 4886 |
| ARF10531.1 | family4 | unknown | Hokovirus HKV1 | 4887 |
| ARF11649.1 | family5 | unknown | Klosneuvirus KNV1 | 4888 |
| ARF12115.1 | family5 | unknown | Klosneuvirus KNV1 | 4889 |
| ARF12317.1 | family5 | unknown | Klosneuvirus KNV1 | 4890 |
| ARF12491.1 | family4 | unknown | Klosneuvirus KNV1 | 4891 |
| ARF12557.1 | family4 | unknown | Klosneuvirus KNV1 | 4892 |
| JF801956.1_1017448_4_1079 | family5 | unknown | Acanthamoeba | 4893 |
| | | | castellanii mamavirus | |
| AEQ60258.1 | family5 | unknown | Acanthamoeba | 4894 |
| | | | castellanii mamavirus | |
| AEQ60341.1 | family5 | unknown | Acanthamoeba | 4895 |
| | | | castellanii mamavirus | |
| AEQ60366.1 | family5 | unknown | Acanthamoeba | 4868 |
| | | | castellanii mamavirus | |
| AEQ61063.1 | family5 | unknown | Acanthamoeba | 4866 |
| | | | castellanii mamavirus | |
| AEQ61069.1 | family5 | unknown | Acanthamoeba | 4896 |
| | | | castellanii mamavirus | |
| BAV61164.1 | family5 | unknown | Acanthamoeba | 4897 |
| | | | castellanii mamavirus | |
| BAV61187.1 | family5 | unknown | Acanthamoeba | 4898 |
| | | | castellanii mamavirus | |
| BAV61274.1 | family5 | unknown | Acanthamoeba | 4899 |
| | | | castellanii mamavirus | |
| BAV62152.1 | family5 | unknown | Acanthamoeba | 4897 |
| | | | castellanii mamavirus | |
| BAV62175.1 | family5 | unknown | Acanthamoeba | 4898 |
| | | | castellanii mamavirus | |
| BAV62262.1 | family5 | unknown | Acanthamoeba | 4899 |
| | | | castellanii mamavirus | |
| AKI79791.1 | family5 | unknown | Acanthamoeba | 4900 |
| | | | polyphaga mimivirus | |
| AKI79916.1 | family5 | unknown | Acanthamoeba | 4901 |
| | | | polyphaga mimivirus | |
| AKI80442 1 | family5 | unknown | Acanthamoeba | 4902 |
| | | | polyphaga mimivirus | |
| AKI80505.1 | family5 | unknown | Acanthamoeba | 4903 |
| | | | polyphaga mimivirus | |
| AKI78865.1 | family5 | unknown | Acanthamoeba | 4898 |
| | | | polyphaga mimivirus | |
| AKI78943.1 | family5 | unknown | Acanthamoeba | 4904 |
| | | | polyphaga mimivirus | |
| AKI78974.1 | family5 | unknown | Acanthamoeba | 4905 |
| | | | polyphaga mimivirus | |
| AKI79567 1 | family5 | unknown | Acanthamoeba | 4867 |
| | | | polyphaga mimivirus | |
| AKI79638.1 | family5 | unknown | Acanthamoeba | 4906 |
| | | | polyphaga mimivirus | |
| ATZ80118.1 | family4 | unknown | Bodo saltans virus | 4907 |
| ATZ80148.1 | family4 | unknown | Bodo saltans virus | 4908 |
| ATZ80196.1 | family4 | unknown | Bodo saltans virus | 4909 |
| ATZ80468.1 | family5 | unknown | Bodo saltans virus | 4910 |
| ATZ80532.1 | family4 | unknown | Bodo saltans virus | 4911 |
| ATZ80656.1 | family5 | unknown | Bodo saitans virus | 4912 |
| ATZ80674.1 | family4 | unknown | Bodo saltans virus | 4913 |
| ATZ80679.1 | family5 | unknown | Bodo saltans virus | 4914 |
| ATZ81041.1 | family4 | unknown | Bodo saltans virus | 4915 |
| ATZ81049.1 | unclassified | unknown | Bodo saltans virus | 4916 |
| ATZ81163.1 | family4 | unknown | Bodo saltans virus | 4917 |
| AMZ02552.1 | family5 | unknown | Mimivirus Bombay | 4898 |
| AMZ02634.1 | Family5 | unknown | Mimivirus Bombay | 4899 |
| AHJ39954.1 | family5 | unknown | Samba virus | 4899 |
| AMK61750.1 | family5 | unknown | Samba virus | 4897 |
| AMK61763.1 | family5 | unknown | Samba virus | 4898 |
| AMK62044.1 | family5 | unknown | Samba virus | 1 |
| AMK62071.1 | family5 | unknown | Samba virus | 4918 |
| QKU35668.1 | family5 | unknown | Tupanvirus soda lake | 4919 |
| BAAL33487.1 | family4 | unknown | Shrimp white spot | 4920 |
| | | | syndrome virus | |
| AMN83487.1 | family5 | unknown | Faustovirus | 4921 |
| AMN83497.1 | family5 | unknown | Faustovirus | 4922 |
| AMN83646.1 | family5 | unknown | Faustovirus | 4923 |
| AMN83856.1 | family5 | unknown | Faustovirus | 4924 |
| AMN83900.1 | family5 | unknown | Faustovirus | 4925 |
| AMN83910.1 | family5 | unknown | Faustovirus | 4926 |
| AMN84427 1 | family5 | unknown | Faustovirus | 4927 |
| AMN84437.1 | family5 | unknown | Faustovirus | 4925 |
| AMN84694.1 | family5 | unknown | Faustovirus | 4923 |
| AMN84844.1 | family5 | unknown | Faustovirus | 4928 |
| AMN84854.1 | family5 | unknown | Faustovirus | 4921 |
| AMP44014.1 | family5 | unknown | Faustovirus | 4921 |
| AMP44024.1 | family5 | unknown | Faustovirus | 4922 |
| AMP44421.1 | family5 | unknown | Faustovirus | 4925 |
| AMP44432.1 | family5 | unknown | Faustovirus | 4926 |
| AUF82525.1 | family4 | unknown | Tetraselmis virus 1 | 4929 |
| AUF82705.1 | family4 | unknown | Tetraselmis virus 1 | 4930 |
| CAZ69458.1 | family5 | unknown | Emiliania huxleyi virus | 4931 |
| | | | 99B1 | |
| AET73885.1 | family4 | Mariner/Tc1 | Phaeocystis globosa | 4932 |
| | | | virus 14T | |
| AEO97677.1 | family4 | unknown | Emiliania huxleyi virus | 4933 |
| | | | 184 | |
| AYV77370.1 | family4 | unknown | Dasosvirus sp. | 4934 |
| AYV77672.1 | family5 | unknown | Edafosvirus sp. | 4935 |
| AYV77714.1 | family4 | unknown | Edafosvirus sp. | 4936 |
| AYV77780.1 | family5 | unknown | Edafosvirus sp. | 4937 |
| AYV78324.1 | family5 | unknown | Edafosvirus sp. | 4938 |
| AYV78371.1 | family5 | unknown | Edafosvirus sp. | 4939 |
| AYV79948.1 | family4 | unknown | Gaeavirus sp. | 4940 |
| AYV79960.1 | family4 | unknown | Gaeavirus sp | 4941 |
| AYV80427.1 | family4 | unknown | Harvfovirus sp. | 4942 |
| AYV80539.1 | family4 | unknown | Harvfovirus sp. | 4943 |
| AYV82494.1 | family4 | unknown | Hyperionvirus sp. | 4944 |
| AYV83137.1 | family4 | unknown | Hyperionvirus sp. | 4945 |
| AYV83228.1 | family4 | unknown | Hyperionvirus sp. | 4946 |
| AYV83337.1 | family4 | unknown | Hyperionvirus sp. | 4947 |
| AYV84552.1 | family4 | unknown | Hyperionvirus sp. | 4948 |
| AYV85267.1 | family5 | unknown | Satyrvirus sp. | 4949 |
| AYV85325.1 | family5 | unknown | Satyrvirus sp. | 4950 |
| AYV86408.1 | family4 | unknown | Sylvanvirus sp. | 4951 |
| AYV86586.1 | family4 | unknown | Sylvanvirus sp. | 4952 |
| AYV87035.1 | unclassified | unknown | Sylvanvirus sp. | 4953 |
| AYV87049.1 | family4 | unknown | Sylvanvirus sp. | 4954 |
| AYV75595.1 | family4 | unknown | Terrestrivirus sp. | 4955 |
| JX515788.1_275466_3_422 | unclassified | unknown | White spot syndrome | 4956 |
| | | | virus | |
| ALN66283.1 | family4 | unknown | White spot syndrome | 4957 |
| | | | virus | |
| ALN66347.1 | | unknown | White spot syndrome | 4958 |
| | | | virus | |
| AWU58848.1 | family4 | unknown | White spot syndrome | 4920 |
| | | | virus | |
| ASV62795.1 | family4 | unknown | White spot syndrome | 4920 |
| | | | virus | |
| AAL88881.1 | family4 | unknown | Shrimp white spot | 4920 |
| | | | syndrome virus | |
| AZL89709.1 | family5 | unknown | Megavirus baoshan | 4959 |
| UFX99704.1 | family5 | unknown | Megavirus baoshan | 4959 |
| AVL95110.1 | family5 | unknown | Moumouvirus | 4960 |
| | | | australiensis | |
| AET73062.1 | family4 | Mariner/Tc1 | Phaeocystis globosa | 4932 |
| | | | virus 12T | |
| BBB16485.1 | family3 | unknown | Heliothis virescens | 4961 |
| | | | ascovirus 3j | |
| BBB16627.1 | family3 | unknown | Heliothis virescens | 4962 |
| | | | ascovirus 3j | |
| AET42386.1 | family4 | unknown | Emiliania huxleyi virus | 4963 |
| | | | 202 | |
| AEP15317.1 | family4 | unknown | Emiliania huxleyi virus | 4964 |
| | | | 88 | |
| QIG60031.1 | family4 | unknown | Dishui Lake large algae | 4965 |
| | | | virus 1 | |
| QIG60107.1 | family4 | unknown | Dishui Lake large algae | 4966 |
| | | | virus 1 | |
| QIG60123.1 | family5 | unknown | Dishui Lake large algae | 4967 |
| | | | virus 1 | |
| QJX71965.1 | family5 | unknown | Faustovirus | 4968 |
| QJX72058.1 | family5 | unknown | Faustovirus | 4969 |
| QJX72453.1 | family5 | unknown | Faustovirus | 4968 |
| QJX72552.1 | family5 | unknown | Faustovirus | 4970 |
| QJX72962.1 | family5 | unknown | Faustovirus | 4968 |
| QJX73027.1 | family5 | unknown | Faustovirus | 4971 |
| QJX73061 1 | family5 | unknown | Faustovirus | 4972 |
| QJX73467.1 | family5 | unknown | Faustovirus | 4968 |
| QJX73534.1 | family5 | unknown | Faustovirus | 4971 |
| QJX73568.1 | family5 | unknown | Faustovirus | 4972 |
| QJX73934.1 | family5 | unknown | Faustovirus | 4973 |
| QJX74075.1 | family5 | unknown | Faustovirus | 4972 |
| QJX74120.1 | family5 | unknown | Faustovirus | 4974 |
| QKE50206.1 | family5 | unknown | Faustovirus | 4975 |
| QKE50370.1 | family5 | unknown | Faustovirus | 4976 |
| QKE50379.1 | family5 | unknown | Faustovirus | 4977 |
| QKE50417.1 | family5 | unknown | Faustovirus | 4978 |
| QKE50536.1 | family5 | unknown | Faustovirus | 4979 |
| QKE50554.1 | family5 | unknown | Faustovirus | 4980 |
| UCX57035 1 | family5 | unknown | Haliotid herpesvirus 1 | 4981 |
| NP_077663.1 | family4 | unknown | Ectocarpus siliculosus | 4871 |
| | | | virus 1 | |
| NP_077707.1 | family4 | unknown | Eciocarpus siliculosus | 4872 |
| | | | virus 1 | |
| NP_597944.1 | family4 | IS4 | Ectocarpus siliculosus | 4982 |
| | | | virus 1 | |
| NP_597947 1 | family4 | IS4 | Ectocarpus siliculosus | 4983 |
| | | | virus 1 | |
| NP_048981.2 | family5 | unknown | Paramecium bursaria | 4984 |
| | | | Chlorella virus 1 | |
| YP_009220639.1 | family4 | unknown | White spot syndrome | 4920 |
| | | | virus | |
| NP_689193 1 | family3 | unknown | Mamestra configurata | 4985 |
| | | | nucleopolyhedrovirus B | |
| YP_762389.1 | family3 | unknown | Spodoptera frugiperda | 4986 |
| | | | ascovirus 1a | |
| YP_762432.1 | family3 | unknown | Spodoptera frugiperda | 4987 |
| | | | ascovirus 1a | |
| YP_001498150.1 | family5 | IS607 | Paramecium bursaria | 4988 |
| | | | Chlorella virus AR158 | |
| YP_001498717 1 | family5 | unknown | Paramecium bursaria | 4989 |
| | | | Chlorella virus AR158 | |
| YP_001498826.1 | family5 | unknown | Paramecium bursaria | 4984 |
| | | | Chlorella virus AR158 | |
| YP_001110890.1 | family3 | unknown | Heliothis virescens | 4990 |
| | | | ascovirus 3e | |
| YP_001110936.1 | family3 | unknown | Hellothis virescens | 4991 |
| | | | ascovirus 3e | |
| YP_001110975.1 | family3 | unknown | Heliothis virescens | 4992 |
| | | | ascovirus 3e | |
| YP_001111007.1 | family3 | unknown | Hellothis virescens | 4993 |
| | | | ascovirus 3e | |
| YP_001111029.1 | family3 | unknown | Hellothis virescens | 4994 |
| | | | ascovirus 3e | |
| YP_001649036 1 | family3 | unknown | Helicoverpa armigera | 4995 |
| | | | granulovirus | |
| YP_001649139.1 | family3 | unknown | Helicoverpa armigera | 4996 |
| | | | granulovirus | |
| YP_001497276.1 | family5 | IS607 | Paramecium bursaria | 4997 |
| | | | Chlorella virus NY2A | |
| YP_001497530.1 | family5 | unknown | Paramecium bursaria | 4998 |
| | | | Chlorella virus NY2A | |
| YP_001497574.1 | family5 | IS607 | Paramecium bursaria | 4999 |
| | | | Chlorella virus NY2A | |
| YP_001497898.1 | family5 | unknown | Paramecium bursaria | 5000 |
| | | | Chlorella virus NY2A | |
| YP_001497907.1 | unclassified | HIS607 | Paramecium bursaria | 5001 |
| | | | Chlorella virus NY2A | |
| YP_001498025.1 | family5 | unknown | Paramecium bursaria | 4984 |
| | | | Chlorella virus NY2A | |
| YP_003422378 1 | family3 | unknown | Pseudalatia unipuncta | 5002 |
| | | | granulovirus | |
| YP_003422388.1 | family3 | unknown | Pseudalatia unipuncta | 5002 |
| | | | granulovirus | |
| YP_003986571.1 | family5 | unknown | Acanthamoeba | 4897 |
| | | | polyphaga mimivirus | |
| YP_003986594.1 | family5 | unknown | Acanthamoeba | 4898 |
| | | | polyphaga mimivirus | |
| YP_003986680.1 | family5 | unknown | Acanthamoeba | 4899 |
| | | | polyphaga mimivirus | |
| YP_003987301.1 | family5 | unknown | Acanthamoeba | 1 |
| | | | polyphaga mimivirus | |
| YP_003987385.1 | family5 | unknown | Acanthamoeba | 4918 |
| | | | polyphaga mimivirus | |
| YP_003969989.1 | family5 | IS607 | Cafeteria roenbergensis | 5003 |
| | | | virus BV-PW1 | |
| YP_004894452 1 | family5 | unknown | Megavirus chiliensis | 5004 |
| YP_004895071.1 | family5 | unknown | Megavirus chiliensis | 5005 |
| YP_006908738.1 | family5 | unknown | Abalone herpesvirus | 5006 |
| | | | Victoria/AUS/2009 | |
| YP_007354255.1 | family5 | unknown | Acanthamoeba | 5007 |
| | | | polyphaga moumouvirus | |
| YP_007354646.1 | family5 | unknown | Acanthamoeba | 5008 |
| | | | polyphaga moumouvirus | |
| YP_008052532.1 | family4 | Mariner/Tc1 | Phaeocystis globosa | 4932 |
| | | | virus | |
| YP_008319793.2 | family5 | unknown | Pandoravirus dulcis | 5009 |
| YP_008320010 1 | family5 | unknown | Pandoravirus dulcis | 5010 |
| NC_023639 1_794657_5_834 | family5 | unknown | Mimivirus terra2 | 5011 |
| NC_023639.1_811068_6_860 | family5 | unknown | Mimivirus terra2 | 5012 |
| NC_023639.1_852822_3_899 | family4 | unknown | Mimivirus terra2 | 5013 |
| NC_023639.1_937028_2_991 | family5 | unknown | Mimivirus terra2 | 5014 |
| NC_026440.1_2222864_2_12421 | family5 | unknown | Pandoravirus | 5015 |
| | | | inopinatum | |
| YP_009116744.1 | family3 | unknown | Tipula oleracea | 5016 |
| | | | nudivirus | |
| YP_009133245.1 | family3 | unknown | Lambdina fiscellaria | 5017 |
| | | | nucleopolyhedrovirus | |
| YP_009352508.1 | family5 | unknown | Kaumoebavirus | 5018 |
| YP_009352565 1 | family5 | unknown | Kaumcebavirus | 5019 |
| YP_009701561.1 | family3 | unknown | Heliothis virescens | 5020 |
| | | | ascovirus 3f | |
| YP_009701645.1 | family3 | unknown | Heliothis virescens | 5021 |
| | | | ascovirus 3f | |
| YP_009701691.1 | family3 | unknown | Heliothis virescens | 5022 |
| | | | ascovirus 3g | |
| YP_009702061.1 | family3 | unknown | Heliothis virescens | 5023 |
| | | | ascovirus 3g | |
| YP_009702097.1 | family3 | unknown | Heliothis virescens | 5024 |
| | | | ascovirus 3g | |
| YP_009702119.1 | family3 | unknown | Heliothis virescens | 5025 |
| | | | ascovirus 3g | |
| YP_009506113.1 | family3 | unknown | Trichoplusia ni | 5026 |
| | | | granulovirus LBIV-12 | |
| YP_009507514 1 | family5 | unknown | Heterosigma akashiwo | 5027 |
| | | | virus 01 | |
| YP_009507578.1 | family5 | unknown | Heterosigma akashiwo | 5028 |
| | | | virus 01 | |
| YP_009482445.1 | family5 | unknown | Pandoravirus | 5029 |
| | | | neocaledonia | |

[0135] The present invention is further illustrated by the following Examples, which in no way should be construed as further limiting. The entire contents of all of the references (including literature references, issued patents, published patent applications, and co-pending patent applications) cited throughout this application are hereby expressly incorporated by reference.

### EXAMPLES

[0136] Both prokaryotic and eukaryotic genomes are replete with diverse transposons, a broad class of mobile genetic elements (MGE), that widely differ in abundance. Transposons of the highly abundant IS200/605 family encode the TnpA protein, which is a DDE class transposase responsible for the single-strand ‘peel and paste’ transposition mechanism of these MGEs, and TnpB protein the role of which in transposition remains unclear. Numerous non-autonomous transposons encode TnpB alone, requiring a transposase to be supplied in trans. RNA-programmable DNA nucleases serve multiple roles in prokaryotes, including in mobile element defense and spread. These nucleases include argonaut, CRISPR, and the obligate mobile element-guided activity (OMEGA) systems, the latter of which include the TnpB, IscB, IsrB, and IshB nucleases. TnpB contains a RuvC-like nuclease domain (RNase H fold) that is specifically related to the homologous nuclease domain of CasI2, the effector nuclease of type V CRISPR-Cas systems, specifically, CAS12F, suggesting that TnpB is the evolutionary ancestor of Cas12. Phylogenetic analysis of the RuvC-like domains, indeed, supports independent origins of Cas12s of different type V subtypes from distinct groups of TnpBs. Recently, it has been demonstrated experimentally (through biochemical and cellular experiments) that these TnpBs are components of OMEGA (obligate mobile element-guided activity) systems that encode the ωRNA next to the nuclease gene (often overlapping with the 3′-end or the coding region of the latter). The ωRNA-TnpB complex is a RNA-guided DNA endonuclease. The ωRNA resembles a crRNA structurally but is larger and contains a spacer-like, target recognition sequence that lies immediately outside the transposon end suggesting that these nuclease are involved in RNA-guided transposition although other roles in the transposon life cycle cannot be ruled out. The OMEGA nucleases are programmable, that is, cleavage can be directed to any genomic region by replacing the spacer-like region by an arbitrary sequence. Hence these OMEGA nucleases have considerable potential as genome editing tools, and first attempts in this direction have been reported.

[0137] While TnpBs are highly abundant in bacteria and archaea, TnpB homologs (denoted Fanzors) have also been identified in diverse eukaryotes, including metazoans, fungi and many unicellular organisms, and some double-stranded (ds)DNA viruses with large genomes infecting unicellular eukaryotes. Two major groups of Fanzors have been identified: 1) Fanzor1 that are associated with eukaryotic transposons, including Mariners, IS4-like elements, Sola, Helitron, and MuDr, and 2) Fanzor2 systems that are found in IS607-like transposons and are present in dsDNA viral genomes. Despite the similarities between TnpB and Fanzors, Fanzors have not been surveyed comprehensively throughout eukaryotic diversity and, unlike the OMEGA nucleases, neither the biochemical activity of Fanzors nor their role in transposons have been studied experimentally.

[0138] The Examples herein report a comprehensive census of Fanzors in eukaryotic and viral genomes, phylogenetic analysis clarifying their prokaryotic origins and tracing their evolution, and RNA sequencing (RNA-seq) and biochemical experiments demonstrating the programmable RNA-guided endonuclease activity of the Fanzors, showcasing their utility as new genome editing tools.

### Example 1: RuvC Containing TnpB Homologs are Widespread in Eukaryotes and Giant Viruses

[0139] To identify putative RuvC nucleases in eukaryotic and viral genomes, a comprehensive search was performed across eukaryotic and viral genomes using a profile derived from the multiple alignment of the RuvC domains from bacterial TnpB, IscB and IsrB, and the previously identified Fanzor1 and Fanzor2 proteins. This search yielded Fanzor proteins occurring across metazoans, fungi, plants, and diverse unicellular eukaryotesas well as giant viruses of the family Mimiviridae (FIGS. 1A-1B). Clustering these putative nucleases with selected representatives of TnpB, IscB, and IsrB revealed several distinct families of eukaryotic RuvC containing nucleases. One Family, which contains the previously discovered Fanzor1 proteins, occurred in diverse eukaryotes, including fungi, plants, various protists, and animals (FIGS. 1A-1B). In contrast, another Family contains a subset of Fanzor2 proteins with similarity to TnpB and was identified primarily in giant dsDNA viruses of the family Mimiviridae, with most family members occurring at multiple locations within their host genome. Given that giant dsDNA viruses likely acquired bacterial MGEs like TnpBs in amoeba melting pots where viruses, bacteria, and bacteriophages could interact (Boyer et al. 2009), it suggests a potential evolutionary path via horizontal gene transfer. (FIG. 1B) Because of the sequence conservation and these relationships to bacterial TnpB systems, the Fanzor2 family was selected for further analysis.

### Example 2: Fanzor2 is Associated with Conserved and Structured Non-Coding RNAs

[0140] To characterize the Fanzor2 family, the Fanzor2 from Acanthamoeba polyphaga mimivirus (1svMimi Fanzor2) was selected. Leveraging the fact that IsvMimi, is present multiple times in the mimivirus genome, all copies of this Fanzor2 were aligned to find conserved elements both in the ORF and in the surrounding neighborhood. Similar to bacterial TnpB and IscB systems, a strong conservation both within protein-coding regions and in the non-coding region at the 3′ end of the IS607 MGE was found. This non-coding sequence conservation extended 200 base pairs past the end of IsvMimi ORF before reaching the right inverted repeat element IRR, in contrast to the more ORF-proximal IRR found in TnpB MGE. (FIG. 1C) Using in silico RNA secondary structure prediction, a stable fold was found (FIG. 1D), suggesting that it could serve as a nuclease-associated RNA, which is referred to herein as “fRNA”, that could complex with Fanzor2 and program its nuclease activity towards a specific sequence. Expanding this analysis beyond IsvMimi, fRNA conservation across the Fanzor2 family was analyzed by comparing similarities within clusters based on ORF alignments, and surprisingly found that all Fanzor2 clusters had strong conservation on the 3′ end (FIG. 1B).

### Example 3: Fanzor Forms an Ribonucleoprotein Complex with fRNAs

[0141] To evaluate whether the strongly conserved fRNA was associating with the Fanzor2 protein, the Isvmimi locus containing the non-coding RNA region and E. coli codon-optimized Isvmimi Fanzor2 protein in E. coli were co-expressed (FIG. 1E) Indicative of the functional importance of the fRNA, the Isvmimi Fanzor2 protein was unstable when expressed alone, and required co-expression with the fRNA for stable expression. This contribution of the fRNA to the stability of small RuvC proteins has been similarly observed in TnpB systems (Altae-Tran et al. 2021; Karvelis et al. 2021). Purifying the co-complex of Fanzor2 with its fRNA, small RNA sequencing of the associated RNA component of the ribonucleoprotein (RNP) complex was performed, observing enrichment of reads between the 3′ end of the protein ORF and the IRR, in agreement with evolutionarily conserved regions. (FIG. 1F) The strong interaction of these fRNA species with the Fanzor protein suggests that the fRNA might serve as a guide RNA to direct targeting of Isvmimi Fanzor2, similar to the role of ORNA for programming of TnpB (Karvelis et al. 2021; Altae-Tran et al. 2021). Within the Fanzor2 family, it was surprisingly found that there were multiple representative fRNA structures (FIG. 1G), each with features. This conservation of structure is reminiscent of the OMEGA families, where both the IscB and TnpB clades possess limited structural variation.

### Example 4: Fanzor2 is a Programmable RNA-Guided DNA Endonuclease

[0142] It was hypothesized herein that Isvmimi Fanzor2 is guided by the proximal fRNA to target and cleave DNA sequences. To reprogram this activity, an fRNA with the last 21 nucleotides targeting a novel 21 bp sequence was designed. Rosetta cells were co-transformed with both the fRNA with reprogrammed 3′ guide sequence and a Strep tagged Isvmimi to directly obtain the RNP in E. coli. (FIG. 2A) To account for any intrinsic sequence preferences of the Fanzor2 such as a target adjacent motif (TAM), cleavage on a target flanked by a randomized 7 nucleotide (TAM) at the 5′ ends of the 21 bp target spacer sequence was tested. Co-incubation of the Isvmimi RNP complex with this TAM library generated substantial cleavage of the TAM library, as visualized by gel electrophoresis, and cleavage was target dependent with no activity when either the guide or TAM library was changed to eliminate complementarity. (FIG. 2B) To understand the sequence restrictions on RNA-programmed DNA cleavage by Ismimi, the band corresponding to the uncleaved TAM library for next-generation sequencing was prepared and determined depleted TAMs due to Isvmimi cleavage. Significant depletion in the targeting guide condition of specific TAMs was found compared to a non-targeting guide condition with the consensus sequence of depleted sequences showing enrichment of A and T in positions 4 and with semi-relaxed bases at positions 1-3 with the exception of G. (FIG. 2C) To confirm these preferences, the top 8 depleted TAMs were cloned and validated individually via biochemical cleavage assays, where it was found that all putative TAMs were robustly cut in vitro. (FIG. 2D) To confirm that conserved residues of the Isvmimi RuvC domain were responsible for cleavage, the catalytic asparagine (D) residue in the RuvC I domain of Isvmimi to alanine was mutated. The mutant was incapable of either dsDNA cleavage or ssDNA nicking. As prokaryotic RuvC-containing nucleases such as TnpB can demonstrate substantial thermophilic temperature preferences (Altae-Tran et al. 2021), Isvmimi Fanzor2 cleavage was evaluated over a range of temperatures, determining that optimal activity between 30 and 40 degree Celsius.

### Example 5: Fanzor2 Cuts within its TAM and Lacks Collateral Activity

[0143] Having determined the constraints on Isvmimi Fanzor2 cleavage, the location of this cleavage within the target was then mapped. The products from Isvmimi Fanzor2 cleavage were isolated and the locations of the ends were mapped using Sanger sequencing, finding that cleavage occurred in the TAM, with multiple nicks within the non-target strand (NTS) and a single nick in the targeted strand (TS). (FIGS. 2E-2F). The 5′ cleavage location of Fanzor2 is in contrast to the observed cleavage location of Cas12 or TnpB nucleases, which cleave a specific distance away from the PAM or TAM, respectively, on the 3′ sides of the protospacer sequence. In comparison to canonical TnpB families, all observed Fanzor2 nucleases show a substitution of the catalytic RuvC site from a glutamate residue to an aspartate. (FIG. 3A). To find similar catalytic site substitutions among TnpB proteins, glutamate-containing RuvC domains were searched across both prokaryotic and eukaryotic genomes and a distinct arrangement of the RuvC II domain present in all Fanzor proteins was found, with a substantial subfamily of bacterial TnpB proteins also sharing this rearrangement (FIG. 3A). Without wishing to be bound by theory, it was hypothesized the observed cleavage pattern of Fanzor2 might be due to the unique re-arrangement of RuvC 11 domain glutamic acid residue. Comparing the orientation of the RuvC catalytic residues between Isvmimi Fanzor2, TnpB, Cas12f, and the TnpB (FIG. 3B) it was observed that, even with a glutamic acid in RuvC II, the three catalytic residues D324, E467, and D501 of Isvmimi Fanzor2 maintained the close contact of other RuvC pocket, explaining the cleavage activity in light of the rearranged site (FIG. 3B). Furthermore, without wishing to be bound by theory, it was hypothesized that if the distinct RuvC site was responsible for cleavage within in the TAM rather than on the 3′ end, the catalytic pocket would be less solvent exposed, reducing acceptance of outside nucleic acids and the subsequent collateral activity of the enzyme (Chen et al. 2018; Abudayyeh et al. 2016). The Isvmimi Fanzor2 was profiled for either RNA or DNA collateral cleavage activity, by co-incubating an Isvmimi or TnpB RNP complex with a cognate target along with either DNase alert or RNAse alert, single-stranded substrates that become fluorescent upon nucleolytic cleavage. In contrast to TnpB, Isvmimi nuclease was found to lack DNA collateral cleavage activity (FIG. 3C), with neither enzyme having collateral activity on RNA.

[0144] To understand if the glutamate rearrangement drives the unique cleavage properties, including cutting inside of the TAM and lack of collateral, the TnpB (Istvo5 TnpB) was purified, which also processes this glutamate rearrangement.

### Example 6: Diversity of Fanzor1 and Fanzor2 Proteins Across the Eukaryotic Kingdom of Life

[0145] Having demonstrated that the Fanzor2 family had RNA programmable cleavage, the characterization shown herein was expanded to the additional families spanning viruses, plants, metazoans, fungi, and protists. Unlike the Fanzor2 systems, many of these broader family members are associated with diverse transposable element associations and sometimes lack readily identifiable MGE scars, complicating fRNA determination. To characterize an additional family member from plants, the Fanzor1 systems from the green algae Chlamydomonas reinhardtii (Cre Fanzor1) were selected, which contains multiple Fanzor1 copies. Cre Fanzor1 is associated with the eukaryotic Helitron 2 transposons, which do have identifiable short asymmetrical terminal inverted repeats (ATIRs) flanking the MGE insertion ends. The homologous Cre Fanzor1 was aligned to determine the putative conserved fRNA, and, similar to the Fanzor2 families, a strong conservation of fRNA regions was found.

[0146] To determine the relevant fRNA species, the region containing the putative Cre-1 Fanzor1 fRNA and a codon optimized Cre-1 Fanzor1 protein in E. coli were co-expressed. Similar to the Fanzor2 family, the Fanzor1 protein required fRNA co-expression for production of stable protein and RNA sequencing on purified RNP revealed a precise fRNA species processed near the 3′ end of the Fanzor1 protein, overlapping the 3′ ATIR of the MGE. This fRNA had strong predicted secondary structure, but was distinct from the Fanzor2 clade. The conservation of this non-coding RNA was further studied with the closest systems to the Cre systems in terms of protein sequence similarity and found that the non-coding RNA was conserved in both sequence and structure.

[0147] To reprogram Cre Fanzor1 protein cleavage using the putative fRNA, a Cre Fanzor1 RNP containing a guide against the previously used TAM library was purified. As with Isvmimi Fanzor2, Cre Fanzor1 stability was fRNA dependent. Co-incubation of this complex with the TAM library generated two significant bands in a guide and magnesium dependent fashion. Sequencing the uncleaved TAM targets determined a specific TAM preference that validated upon testing individual TAM targets enriched in the screen. The in vitro activity of Cre Fanzor1 showcases that active Fanzor proteins are evolutionarily widespread across diverse lineages.

### Example 7: Fanzor Nucleases can be Adapted for Mammalian Genome Editing

[0148] To test whether programmable Fanzor nuclease could be applied for genome editing given their mesophilic operating temperature, the fRNA guide was engineered for expression in mammalian cells. Because there are two poly U stretches (>5 U) in the putative guide scaffolds for Isvmimi that can block U6 promoter expression, the fifth U inside the guide stem-loop region to interrupt the poly U stretch was mutated. 21 nt guides were designed using this redesigned scaffold against several positions inside the human EMX1 gene and tested for its indel activity in HEK293FT cells.

### Example 8: Widespread Fanzor ORFs Contain Spliced Introns

[0149] As Fanzors extend programmable nucleases into eukaryotes, the emergence of introns across Fanzor diversity was explored. Among the Fanzor families, a wide range of intron numbers was found. Using RNA sequencing data, the presence of three to four introns within the Cre Fanzor1 genes that are removed from the mature mRNA transcript was confirmed. Analyzing the conservation of the locus, it was surprisingly found that the introns are substantially less conserved than exonic sequences, implying that ancestral Fanzors inserted into host genomes via horizontal transfer and acquired introns overtime. It is unclear how splicing plays into the regulation of Fanzor expression and transposition activity.

### Example 9: Transposase Proteins are Associated with Fanzor Systems

[0150] Notably, Fanzor2 proteins occur within the IS607 transposon, which is similar to the TnpA family of proteins, suggesting Fanzor2 might serve as the eukaryotic TnpB counterpart for the known bacterial IS200/605 superfamily. Because of these associations, the full extent of Fanzor2 association with transposase domains was analyzed first, finding primarily an association with IS607 element transposases. These proteins are closely associated and can be found within readily identifiable inverted repeat element ends. By analyzing the host genome junctions with the IRL and IRR, it was found that the Fanzor2 transposons primarily insert in A/T rich target sequences. Many of these target motifs appear similar to the Isvmimi TAM preference, suggesting that Fanzor2 cleavage may be directly related to the insertion site preference for the transposon.

### Example 10: Characterization of Fanzor1

[0151] Unlike Fanzor2 systems, many previously found Fanzor1 proteins are associated with eukaryotic transposons, including DNA transposons from different superfamilies including Helitron, Mariner, IS4-like, Sola and MuDr, however, the full extent of transposons acquiring Fanzor1 into their MGE by analyzing nearby ORFs with transposon domains has not been previously characterized. While helitron and MuDr transposase ORFs do not directly associate with Fanzor1 inside the transposon, the other transposases do strictly associate within the transposon, motivating our guilt by association approach for finding additional transposase associations.

[0152] RNA-guided nucleases serve vital roles in horizontal gene transfer in prokaryotic hosts and mobile elements, allowing for both adaptive immunity a programmable gene flow. RNA programmable DNA nucleases shown herein are similarly abundant in eukaryotic nuclear genomes and viruses, including plant, fungal, and metazoan groups. These Fanzor nucleases, which contain the previously discovered Fanzor1 and Fanzor2 systems (Bao and Jurka 2013), are evolutionarily similar to the TnpB nucleases associated with 1S200/IS605 family transposons. This transfer of these nucleases from a prokaryotic to eukaryotic context may have occurred through large DNA viruses acquiring TnpBs via horizontal gene transfer from bacteria and phages in amoebae, serving as “melting pots” of HGT between prokaryotes and eukaryotes (Boyer et al. 2009). As Fanzor systems spread throughout eukaryotic diversity, introns were acquired within the Fanzor nucleases, likely driven by the improved fitness of spliced genes from enhanced nucleocytoplasmic transport (Dimaano and Ullman 2004). The co-evolution of Fanzors with the nuclear genomes of their eukaryotic hosts is supported by the intron density of Fanzor genes matching the intron density of their host genomes (Basu et al. 2008, Csuros et al. 2011). The co-evolution of Fanzor systems with their hosts nuclear genomes reported herein suggests preferential movement within hosts compared to HGT. The Fanzor family persistence and spread within eukaryotic genomes implies Fanzor systems spread within host genomes with minimal fitness cost or potential fitness gain to the host. Without wishing to be bound by theory, one possible mechanism of positive fitness of Fanzors could be maintenance of genome stability, as is the case with non-LTR retrotransposons that insert in repetitive regions and help maintain repetitive genes (Nelson et al. 2021).

[0153] Fanzor families are associated with diverse transposases, strongly suggesting multiple events capturing Fanzor proteins by these transposons during evolution and a putative role of RNA guided nuclease activity of Fanzors in transposition. This role could be through a variety of mechanisms, including: 1) precise excision of the transposon from the genome via self-homing, 2) passive homing of the transposon to new alleles via leveraging nuclease-induced DSBs and DNA repair mechanisms, such as homologous recombination, and 3) active homing of the transposon using RNA guided DNA binding or cleavage for direct targeting of transposase activity. The latter mechanism would be analogous to the CRISPR-associated Tn7-like transposons that possess RNA-guided transposition via acquisition of RNA-guided DNA binding CRISPR effectors in conjunction with transposase components (Strecker et al. 2019; Klompe et al. 2019). Moreover, as Fanzor-containing transposons harbor associated genes of diverse putative functions and multiple Fanzor families possess N-terminal domains of varying predicted functions, Fanzor families may have additional undetermined roles.

[0154] The biochemical characterization of Fanzor nucleases shown herein revealed both similarities with the related TnpB and CRISPR-Cas12f nuclease, as well as several important distinctions. Similar to the Cas12 and TnpB nucleases, Fanzors generate double stranded breaks through a single RuvC domain; however, unliked the Cas12 and TnpBs, which cut DNA targets distal from the 5′ PAM/TAM on the 3′ end of the guide, Fanzor proteins unexepectedly cut within the 5′ TAM region. Potentially related to the unique cleavage position is the surprising apparent loss of collateral activity from the Fanzor family. Without wishing to be bound by theory, it is hypothesized that because the TAM is more internal to the RNP:DNA complex, it is possible that the activated RuvC domain is not solvent exposed, preventing trans DNA cleavage upon target recognition. As opposed to the more T rich sequence constraints of Cas12 and TnpB families, the Fanzor TAM preference is surprisingly diverse, with AT rich preference for the Fanzor2 family and a GC-rich preference for Fanzor1 proteins. Lastly, while the non-coding RNA of Fanzor2 overlaps with the transposon IRR, much like TnpB's ωRNA, it is further downstream of the Fanzor ORF, whereas the muRNAs are contained within the 3′ of the TnpB ORF. Therefore, the Fanzors are a unique family of eukaryotic programmable nucleases distantly related to TnpBs and Cas12f systems.

[0155] It is surprisingly shown herein that Fanzors can be applied for genome editing with detectable cleavage and indel generation activity in human cells. The Fanzor enzymes provide multiple advantages including precise nuclease activity, a small size, and eukaryotic origins, which may reduce the immunogenicity of these nucleases in humans. The broad distribution of Fanzor proteins across the multiple eukaryotic kingdoms and associated viruses suggests a further, as yet-discovered abundance of RNA-guided systems. The evolution of these nucleases expands the field's understanding of horizontal gene transfer, transposition systems in eukaryotes, the evolution of programmable nucleases, and the spread of mobile genetic elements from prokaryotes to eukaryotes. Future studies utilizing improved abilities to infer spliced genes from eukaryotic diversity will likely uncover more RNA-guided enzymatic systems that might have broad biotechnological promise. Taken together, the Fanzor diversity leaves many systems and associated proteins to be explored and will expand the nuclease toolbox for new human therapeutics.

### Example 11: Fanzor Preliminary Analysis

[0156] Fanzors are predicted to be programmable nucleases. Fanzors (Fanzor1 and Fanzor2) are proteins that were found to contain RuvC nuclease domains in eukaryotic genomes. They are predicted to be programmable nucleases based on RuvC domain and similarity to bacterial TnpBs. Computational analyses conducted herein show how the presence of a conserved non-coding region near the Fanzor genes that is likely the guide RNA for the protein. In this example, a number of these proteins were tested and verified that they are programmable nucleases. The impact of these are that they can be new enzymes for genome editing and they come from eukaryotic systems making them safer and potentially better for human therapeutics.

### Example 12: Fanzor Nucleases are TnpB Homologs Widespread in Eukaryotes and Viruses

[0157] Putative RNA-guided nucleases were identified throughout eukaryotic genomes and their viral genomes by comprehensively mining 22,497 eukaryotic and viral assemblies from NCBI GenBank. This present search, seeded with a multiple alignment of RuvC domains from the previously identified Fanzor1 and Fanzor2 proteins (Bao et al. 2013), yielded 3,655 putative nucleases occurring across metazoans, fungi, algae, choanoflagellida, rhodophyta, unicellular eukaryotes, and multiple viral families (FIG. 6A), expanding on existing eukaryotic RuvC diversity by 100-fold. These nucleases contain existing Fanzor proteins that show similarity to their prokaryotic counterpart TnpB families (FIG. 6A) and frequently occur multiple times within genomes, indicating movement via MGEs in a similar fashion to TnpBs (FIG. 11A). The enzymes were termed Horizontally-transferred Eukaryotic RNA-guided Mobile Element Systems (Fanzor), owing to their mobility. A phylogenetic tree built from a multiple sequence alignment of Fanzor nucleases revealed 5 families, with Fanzor2 systems contained in Fanzor family 5 and Fanzor1 systems contained in all Fanzor families (FIG. 6B). Fanzor families are represented in diverse eukaryotes, including fungi, plants, various protists, and animals, with family 5 systems enriched in viruses, including Phycodnaviridae, Ascoviridae, and Mimiviridae (FIG. 6A-6B). Profiles of each Fanzor family were used to find the closest TnpB orthologs in prokaryotes and built a combined tree of Fanzor and closest TnpBs to understand their evolution (FIG. 6A). The different clades of Fanzor families and their related branches of TnpBs suggest that TnpBs were captured by eukaryotes on at least two independent occasions to convergently evolve the Fanzor superfamily, although many more seeding events are likely based on the presence of similar TnpBs within each of the five Fanzor clades (FIG. 6A).

### Example 13: Fanzor Nucleases Associate with Diverse Transposons

[0158] Given the association of Fanzors with different transposons (Bao et al. 2013), a comprehensive eukaryotic transposon search was performed (Riehl et al, 2022) within 10 kb of all Fanzor MGE sequences (FIG. 6B). This prediction yielded both previously reported transposon families including Mariner, Helitron, and Sola, and new ones that include both retrotransposons like Gypsy and ERV systems and DNA transposons like hAT and CMC (FIG. 11B). Interestingly, the two most frequent associations are with the retrotransposon Gypsy and the DNA transposon hAT, showing the potential acquisition of these Fanzor systems by eukaryotic transposons, potentially to help with retention of transposons inside the eukaryotic genome (FIG. 11B). Transposon association also clustered with Fanzor families: families 1, 3, and 5 commonly occurred with Gypsy domains, while families 2 and 4 associated with hAT, CMC, and Tc1-mariner systems (FIG. 6B).

[0159] Analyzing associations of Fanzor nucleases with surrounding proteins revealed numerous instances of transposase domains, including the serine resolvase found in IS607 elements, further demonstrating the inclusion of Fanzor in transposons (FIG. 11C). Fanzor proteins often contain additional domains beyond the characteristic RuvC-like domain (FIG. 11D), with family 5 containing profiles hits to the helix-turn-helix (HTH) domain and TnpB cluster COG0675, suggesting close evolutionary distance to their ancestor TnpBs.

### Example 14: Fanzor Loci are Associated with Conserved and Structured Non-Coding RNAs

[0160] Since TnpB and IscB systems are known to process either the 3′ end or 5′ end of the MGE RNA into ωRNA and subsequently bind to ωRNA for guided dsDNA cleavage activity (Karvelis et al., 2021; Altae-Train et al. 2021; Nety et al. 2023) a comprehensive noncoding RNA alignment search was performed on all Fanzor loci. The search revealed significantly longer Fanzor noncoding conservation on both the 3′ and 5′ ends of the MGEs compared to TnpB and IscB systems (FIG. 6C-6D). This strong conservation prompted a thorough investigation for specific structural hallmarks. The Fanzor family 5, containing Fanzor2 systems, are most closely related to TnpB, with Fanzor and TnpBs interspersed in the respective clade (FIG. 6A). Given the close relationship between TnpBs and Fanzor family 5, Fanzor family 5 was initially focused on as a likely source for RNA-guided DNA endonucleases. The Fanzor nuclease from the Acanthamoeba polyphaga mimivirus (ApmHNuc) within the IS607 MGE inside the mimivirus genome was selected (FIG. 6E). ApmHNuc co-clusters with an IS607 TnpA transposase inside the MGE flanked by defined inverted repeats elements (FIG. 6E). Copies of the ApmHNuc protein throughout the A. polyphaga mimivirus genome were searched for and three loci were found. Aligning these with the surrounding Fanzor loci to identify conservation throughout the locus (FIG. 6F), a strong conservation was found within the protein-coding regions of the ApmHNuc ORF and in the non-coding region at the 3′ ends of the IS607 MGE (FIG. 6E-6F), similar to bacterial TnpB systems. This non-coding sequence conservation extended 200 base pairs past the end of ApmHNuc ORF, ending at the right inverted repeat (IRR) of the MGE (FIG. 6F). In silico RNA secondary structure analysis of the region between the end of the ApmHNuc ORF and the IRR predicted a stable fold (FIG. 6G), suggesting that the transcript of this conserved region could function as a nuclease-associated RNA, which was termed a Fanzor RNA (fRNA). It was hypothesized that the fRNA could complex with ApmHNuc, potentially directing binding and cleavage activity to a specific sequence. Within the ApmHNuc cluster of systems, a consensus representative fRNA structure had high conservation (FIG. 6G). Interestingly, conservation of the consensus fRNA structure extended upstream into the coding region of the ApmHNuc ORF, indicating possible co-folding with the upstream region (FIG. 6G, gray region) and a potential RNA processing site (FIG. 6G, blue triangle). This conservation of structure is reminiscent of the OMEGA families, where both the IscB and TnpB clades possess limited structural variation (Altae-Train et al. 2021) and where processing of the upstream region of the co-transcribed mRNA-ωRNA can release functional guide RNAs (Nety et al. 2023).

### Example 15: ApmHNuc is a fRNA-Guided DNA Endonuclease

[0161] The conservation of the fRNA and similarity of Fanzor nucleases to prokaryotic RNA-guided nucleases suggested that the fRNA could associate with ApmHNuc and program DNA cleavage through ApmHNuc's conserved RuvC domains. To investigate potential fRNA-ApmHNuc binding, the A. polyphaga mimivirus Fanzor locus, containing the non-coding RNA region, and E. coli codon-optimized ApmHNuc, were co-expressed in E. coli (FIG. 7A, Table 2). Notably, ApmHNuc was unstable when expressed alone and required co-expression with the fRNA for protein stabilization and accumulation (FIGS. 12A-12C), similar to the instability of TnpB in the absence of ωRN (Karvelis et a. 2021; Altae-Train et al. 2021). The ApmHNuc-bound fRNA species was profiled by purifying the fRNA-ApmHNuc uibonucleoprotein (RNP) and sequencing the RNA component of the complex. Small RNA sequencing revealed enriched coverage between the 3′ ends of the protein ORF and the IRR, in agreement with the evolutionary conservation across the region (FIG. 7B).

TABLE 2
Sequences associated with the present disclosure

| Fanzor/ | | | | | |
|---|---|---|---|---|---|
| TnpB | Genome | | SEQ | Associated fRNA | SEQ |
| System | Accession | | ID | Scaffold Sequence | ID |
| names | Number | Protein Sequence | NO: | (neglecting guide) | NO: |
| ApmHNuc | AY653733 | MKEAVKNVKPKVPAKKRIITGSKTKKKVFVK | 1 | AAAAATAGTCTAATAAA | 5 |
| | | KKPPDKKPLKKPVKKTVKTYKLKSIYVSNKD | | ATCAGGGGTACATTCCG | |
| | | LKMSKWIPTPKKEFTEIETNSWYEHRKFENP | | CTAGTACTCCACCCTAC | |
| | | NGSPIQSYNKIVPVVPPESIKQQNLANKRKKT | | GGGTTAAGCAAATGAG | |
| | | NRPIVFISSEKIRIYPTKEQQKILQTWFRLFAC | | AATATCGAAACGGTATG | |
| | | MYNSSIDYINSKKVVLESGRINVAATRKVQNK | | CACAGGATTCTTCGAGT | |
| | | ISVRKALKTIRDNLIKSTNPSIMTHIMDEAIGL | | GATAATCTTAGGATGAC | |
| | | ACSNYKTCLTNYIEGQIKKFDIKPWSISKRRKI | | TCACTAAGGAGATGACT | |
| | | IVIEPGYFKGNSFCPTVFPKMKSSKPLIMIDKT | | AAAGTGTATCATTCAAT | |
| | | VTLQYDSDTRKYILFVPRVTPKYSVNKEKNS | | ATTGTATTGAACGGTAT | |
| | | CGIDPGLRDFLTVYSENETQSICPIEIVVNTTK | | TCTTCCATAGAGAGTTG | |
| | | NEYKKIDKINEIIKTKPNLNSKRKKKLNRGLR | | ATTTTTCGAGTATCCAGA | |
| | | KYHRRVTNKMKDMHYKVSHELVNTFDKICI | | AATATCAACTtTTTATGA | |
| | | GKLNVKSILSKANTVLKSALKRKLATLSFYRF | | GCGG | |
| | | TQRLTHMGYKYGTEVVNVNEYLTTKTCSNC | | | |
| | | GKIKDLGASKIYECESCGMYADRDENAAKNI | | | |
| | | LKVGLKPWYKQK | | | |
| CRE | NC057016 | MAPKRRRDEAEKABEEKDHTTSTKCGLAGL | 2 | GCCGCCATGGCCGCCG | 6 |
| | | LSEKIEADGVAVTREESLAAVDFLVAALTRLRF | | GCGGCGGCGGGGCCGG | |
| | | EALCLLGLVAVRMCEDARREGQGLQPHCATC | | GCTGAGAGCCTGAACG | |
| | | RRLRKTELVEDDMYAAICAVSVCDLTEQGRK | | GCGCTAGCAGGGCGTG | |
| | | RGRPSKRDQHPEDDLERHVCEEHFPRDEEAA | | GGGCTGAGGGTGCACG | |
| | | GARVNRSGLTPFLPPLSKGVFTNVKNHYAAN | | TGTTGATTGGCGCCGAG | |
| | | FAAWLARSFRCRIDDELRELRTPATKKLDKLA | | TGACGTGACTAGTTTGT | |
| | | WSMAHAVLYDGELEQPRWWVGWAQGAAG | | TAGCTGCGGGTTAGCAC | |
| | | AAAAAAAQGAGPAGGAAAAQAWTALVDYV | | GGACTGTGCACCCCAC | |
| | | NAQRASKRAAELLLREVKGAQATYKKASTR | | CCCACCGGCCACGTTCC | |
| | | HMEWAAEILAGLEARRDQLGAQVQQLTQAQ | | GGATTTGCGGGGATGCA | |
| | | PLTREDTQRLASLRRELHRARPFTLTPSPSFAP | | AAGGCCCCCAACATAG | |
| | | IYVPLDNTSMARLPGLLPTLARRHGEVFAGAG | | AGGCGTGTGCTTAGTAG | |
| | | AGAVAPSSFVQAAFGGGGMQSSATLNAVGW | | GCGCCCGCGTCAAGGT | |
| | | GLFQLGGVTSRNAPFANYITTDGVACSVARE | | GGCTGGGTTGATAACGA | |
| | | AHNKPLANLKPATAPADAEELCTLEEMKATQI | | CCCGGGAGGGGAGGGC | |
| | | IGVDPCGGGNWFMAARSPLYQPGPWAWEGV | | TCAGCCCTTTTCCTGCC | |
| | | GPAQRYLLELHDKQLDEELFPGQLPPEPRRRR | | TCCCTAAGGCAGCCACC | |
| | | KGVHRRKQSKHWQPRARTARRRRQKRGRFH | | TCCTTGT | |
| | | MSMGHWRHMSGLERLQPNRPQLAPALQAYV | | | |
| | | GGIPTAATASAARFEERLRYLFASGAAGQAAG | | | |
| | | GPAEAGPRGAVHVLWHYHFSAFRRKRWAAFI | | | |
| | | QRDRALHRVAKQLTGGRPKEEVVVGWGSWA | | | |
| | | FQGGKGGSPISVRGGRAPTGRLIKLLRERYAK | | | |
| | | HVFIIDEYKTSKTCYNCGCQEMAIKRLGGLK | | | |
| | | EGQRPWSVKVCNDCLTTWNRDVSAANVIRV | | | |
| | | LLLLKLMGFERPTKLQRPPWPPAAAGPG* | | | |
| TvoTapB | NC_002689 | MKRANAVKLIVGKETHEKLKELAIVAAKCW | 3 | gggaagcccatgatgatggggtatt | 7 |
| | | NEVNWLRMQQFKEGERVDFSKTEKEVYEKY | | aagcgtggtctctataggtgtctccg | |
| | | KQILKVNTQQVARKNAESWRSFFSLIEEKKG | | catagggaaggtaataaacgcagacc | |
| | | KLPKWFKPRPPGYWKDKSGKYKMLIIIRNDR | | tgaatggtgcaataaatatcctacat | |
| | | YEIDEEKRIIYLKDFKLSLSFNGKLKWRGKQG | | atccccgagtccctaggagctgggag | |
| | | RLEIIYNEARRSWYAYIPVEVQNDVKAEDKL | | cagagggcaactcacagtgagggata | |
| | | KASIDLGIINLATVYVEDGSWYIFKGGSVLSQ | | ggggtaatgggctgaagacccagccc | |
| | | YEYYSKRISVAQKTLARHKQGRSREMKLLHE | | gcggtctaccgctggacgaatggagc | |
| | | KRKRFLKHALNSMVRKIMEEFKNKGVGEIAI | | gggggggtgtcctcacccactagcta | |
| | | GYPKEISKDHGNKLTVNFWNYGYIIRRFEGV | | tgaagtgatgaaaatgaaggcggtaa | |
| | | GEELGVKVVKVDEAWTSKTCSLCGEAHDDG | | actgcaaaccaatgaatcgccacaag | |
| | | RIKRGLYRCLRIGKVINADLNGAINILHIPESL | | ggaaccttcaccctttagg | |
| | | GAGSRGQLTVRDRGNGLKTQPAVYRWTNGA | | | |
| | | GWVSSPTSYEVMKMKAVNCKPMNRHKGTFT | | | |
| | | L | | | |
| Isdra2 | AE000513 | MIRNKAFVVRLYPNAAQTELINRTLGSARFV | 4 | GATTCAAGAATCCCGAA | 8 |
| TnpB | | YNHFLARRIAAYKESGKGLTYGQTSSELTLLK | | GTGAAGAATCTTGCCGT | |
| | | QAEETSWLSEVDKFALQNSLKNLETAYKNFF | | CCGTACATGGACTTGCC | |
| | | RTVKQSGKKVGFPRFRKKRTGESYRTQFINN | | CGAACTGTGGGGAAAC | |
| | | NIQIGEGRLKLPKLGWVKTKGQQDIQGKILN | | CCATGACCGAGACGAG | |
| | | VTVRRIHEGHYEASVLCEVEIPYLPAAPKFAA | | AACGCTGCGCTGAACA | |
| | | GVDVGIKDFAIVTDGVRFKHEQNPKYYRSTL | | TTCGGCGTGAAGCGTT | |
| | | KRLRKAQQTLSRRKKGSARYGKAKTKLARI | | GGTGGCTGCGGGAATC | |
| | | HKRIVNKRQDFLHKLTTSLVREYENIGTGHLK | | TCAGACACCTTAAACGC | |
| | | PDNMRKNRRLALSISDAGWGEFIRQLEYKAA | | TCATGGAGGCTATGTCA | |
| | | WYGRLVSKVSEYFPSSQLCHDCGFKNPEVKN | | GACCTGCTTCGGGGG | |
| | | LAVRTWTCPNCGETHDRDENAALNIRREALV | | CAATGGTCTGCGAAGT | |
| | | AAGISDTLNAHGGYVRPASAGNGLRSENHAT | | GAGAATCACGCGACTTT | |
| | | LVV | | AGTCGTGTGAGGTTCA | |
| | | | | A | |

[0162] It was hypothesized that ApmHNuc is guided by its associated fRNA to target and cleave DNA sequences. Testing this activity required both the engineering of a reprogrammed fRNA and the determination of sequence preferences, akin to a target adjacent motif (TAM) (Karvelis et al. 2021; Altae-Tran et al. 2021). A synthetic fRNA was generated by combining a 3′-terminal 21-nt targeting sequence with the fRNA scaffold (ending at the IRR) determined through RNA profiling. Rosetta cells were co-transformed with plasmids coding for both the synthetic fRNA and ApmHNuc, and isolated the RNP complex from E. coli. To determine potential sequence preferences of ApmHNuc, cleavage on a DNA target containing a randomized 7 nucleotide TAM 5′ of a 21 bp target region complementary to the fRNA targeting sequence was tested. The TAM library was co-incubated with purified ApmHNuc RNPs containing either targeting or scrambled synthetic fRNA guide sequences, and the relative depletion of sequences was profiled with next-generation sequencing (NGS). TAM depletion analysis revealed a strong 5′ GGG motif adjacent to the target site (FIGS. 7C-7D). This TAM was validated on all four possible NGGG sequences, finding robust ApmHNuc cleavage on all four sequences, with no detectable cleavage on sequences lacking the TAM (FIG. 7E). This G rich ApmHNuc TAM is in contrast to the closely related TnpB homologs which universally prefer an A/T rich 5′ TAM similar to CRISPR Cas12 effectors (Nety et al. 2023). Without wishing to be bound by any theory, this change in TAM preference is likely attributed to the nearby IS607 transposase which starts with a recognition sequence of GGG at the 5′ end inverted left repeat element (ILR). Recently, TnpB has been reported to bias their nearby IS element's retention in the genome by targeting the donor joint of IS200/605 transposon for cleavage (Meers et al. 2023). It is likely that Fanzor family 5 members play a similar role in helping their host transposons to retain in the eukaryotic genome and their viruses.

[0163] Similar to TnpB (Nakagawa et al. 2023; Sasnauskas et al. 2021), cleavage by ApmHNuc is likely mediated by conserved acidic residues in the RuvC domain (FIG. 13A). To confirm that the observed cleavage was dependent on the RuvC catalytic mechanism, two ApmHNuc RNP mutants at putative catalytic sites in either RuvC-I (D324A) or RuvC-H (E467A) were purified (FIGS. 13B-13C). While the D324A mutant had no change in RNP stability during protein purification, a significant decrease in expression of the E467A mutant relative to the wild type protein was noticed (FIG. 13B). The cleavage efficiency of these mutants was compared with the wild-type ApmHNuc and, in agreement with the nuclease mechanism, it was found that both RuvC-I and RuvC-II mutants abolished ApmHNuc cleavage activity (FIG. 7F). ApmHNuc cleavage requires magnesium (FIG. 7F), similar to other RuvC nucleases, and optimal activity is between 30 and 40 degree Celsius (FIG. 13D).

[0164] Cleavage locations of RNA-guided nucleases vary substantially, with cleavage sites both up and downstream from the target location. To profile ApmHNuc cleavage patterns, ApmHNuc reaction products were purified and the locations of the cleavage ends were mapped using Sanger sequencing. Cleavage occurred in the 3′ regions of the target sequence, with multiple nicks in both the target strand (TS) and the non-target strand (NTS) (FIG. 7G). The cleavage behavior of ApmHNuc at the 3′ end of the target is similar to the cleavage patterns of Cas12 or TnpB nucleases and in general agreement with programmable RuvC domains. The relative preference for these different nicking sites was sensitively quantified with an NGS-based assay, finding that during dsDNA cleavage by ApmHNuc the enzyme generates nicks on the NTS at positions 19 and 20 and on the TS at positions 15, 18, and 21 with all cleavage occurring inside the target spacer region, suggesting a slightly different cleavage pattern than TnpB nucleases (FIG. 7H).

### Example 16: Fanzor Nucleases Contain a Conserved Rearranged Catalytic Site and Lack Collateral Activity

[0165] Compared to a majority of TnpB families, Fanzor nucleases contain a substitution in the canonical catalytic RuvC-II site from a glutamate residue to a catalytically inert residue (proline, glycine) (FIG. 8A). To find if a subset of TnpBs similar to Fanzor nucleases might also display this substitution, a similarly modified RuvC nuclease domains among the TnpB families was searched for. A similar apparent catalytic inactivation of RuvC-H in a subset of TnpBs was found, in both the clade most related to Fanzor and one clade more distant to Fanzor nucleases (FIGS. 8A-8B). Anticipating the evolution of compensatory mutations in the RuvC-H domain to retain Fanzor activity, nearby conserved acidic residues that could serve as potential catalytic sites were searched for. Notably, all nucleases with a loss of the canonical glutamic acid in the RuvC-II, including all Fanzor members and the rearranged TnpB orthologs, contained an alternative conserved glutamate approximately 45 residues away (FIG. 8A-8I). it was hypothesized that this glutamic acid substituted the role of canonical one in the RuvC-H, to allow for effective cleavage activity.

[0166] To compare the structural conformations of the canonical and alternative catalytic sites, a TnpB from Thermoplasma volcanium GSS1 (TvoTnpB) harboring a rearranged site was selected, and compared experimentally determined or computationally predicted structures between ApmHNuc, TvoTnpB (re-arranged RuvC-II), TnpB from Deinococcus radiodurans R1 (Isdra2; canonical RuvC domain), and Cas12f from uncultured archaeon (UnCas12f) and compared the spatial configurations of the canonical and alternative catalytic glutamic acids (FIG. 8C). Notably, the alternative conserved glutamate of Fanzor nucleases and rearranged TnpBs (E467 of ApmHNuc and E323 of TvoTnpB) were in close proximity with catalytic residues in the RuvC-I and RuvC-III domains, suggesting that these alternatively conserved glutamates compensate for the mutation in the canonical RuvC-II residue (FIG. 8C). In addition, during structural analysis, we found that ApmHNuc is the only protein that has a long disordered stretch in the N-terminus (FIG. 8C). This disordered region is unseen in other TnpBs and CRISPR/Cas12 family members, suggesting that this N-terminal flexible region is an unique feature of Fanzor that likely plays a role in their activity.

[0167] To generalize the activity of the rearranged RuvC domain beyond ApmHNuc, the nuclease activity of TvoTnpB was evaluated, which contains the alternative glutamic acid catalytic residue. TvoTnpB RNPs were generated by co-expressing the TvoTnpB protein with its native locus in E coli, and these RNP were isolated to profile the associated noncoding RNA by NGS. A significant enrichment of noncoding RNA expression was found near the right end (RE) element, similar to other TnpB systems (FIG. 8E). Applying the TAM assay by coexpressing TvoTnpB with a synthetic ωRNA containing a reprogrammed 21 nt spacer, incubating the RNP with a 7N TAM library plasmid, and sequenced the cleavage products, a significant enrichment of a TGAC motif near the 5′ target spacer sequence (FIG. 8F). Notably, this TGAC motif is also present at the 5′ end of the left end (LE) element, marking the start of the Tvo mobile genetic element. As T. volcanium is a thermophile, the in vilro cleavage efficiency was optimized over a range of temperatures, determining an optimal temperature for cleavage of the TGAC TAM at 60° C. (FIG. 15A). All four possible NTGAC TAM sequences along with four negative TAM sequences were validated and TAM-specific cleavage was found, similar to other Fanzor and TnpB proteins (FIG. 8G). The ends of the cleavage products were profiled with NGS, mapping the cleavage position to position 22 in the non-targeting strand and positions 21 and 22 in the targeting strand (FIG. 8H), with a similar cleavage pattern found by Sanger sequencing (FIG. 15B).

[0168] Lastly, it was hypothesized that the rearranged RuvC catalytic site of the Fanzor might be less solvent exposed, as suggested by the structural analysis (FIG. 8C), reducing acceptance of outside nucleic acids and thus affecting the collateral cleavage activity of the enzyme (Chen et al. 2018; Abudayyeh et al. 2016) Both ApmHNuc and TvoTnpB were profiled for either RNA or DNA collateral cleavage activity by co-incubating the RNP complexes with their cognate targets along with either ssRNA or ssDNA cleavage reporters, single-stranded nucleic acid substrates functionalized with a quencher and fluorophore that become fluorescent upon nucleolytic cleavage. It was found that both ApmHNuc and TvoTnpB nucleases lacked collateral DNA and RNA cleavage activity in contrast to the strong collateral cleavage activity of the canonical TnpB Isdra2TnpB (FIG. 8I and FIG. 15C), suggesting that the rearranged RuvC domain has distinct biochemical properties compared to canonical RuvC domains in other TnpB systems and Cas12.

### Example 17: Fanzor Systems have Spread Throughout Diverse Eukaryotic Branches and Associate with their fRNAs

[0169] Whereas the Family 5 Fanzor systems are closely related to TnpB systems, it was found that most Fanzor orthologs, including Fanzor1 nucleases, are distantly related and have radiated throughout all eukaryotic branches of life, including amoeba, fungi, plates, and animals (FIG. 9A). Interestingly, Fanzor systems have even spread to certain higher-order phyla, such as Chordata and Arthopoda, suggesting extensive spread and evolution of these systems. Moreover, whereas many Fanzor systems contain no introns, as might be expected of TnpB-derived mobile genetic elements, we observed many Fanzor systems with extensive intron development of up to
[0170] 9.6 introns/kb (FIG. 9B). Intron acquisition further supports the notion that Fanzor systems have evolved in eukaryotes for significant evolutionary time. Intron densities of Fanzor systems have a weak but significant correlation with host genome intron densities, suggesting co-acquisition of introns with Fanzor systems and hosts after the first acquisition event (FIG. 16A-16B). While a majority of Fanzor clusters have similar numbers of introns, there are a number of clusters that show divergent numbers of introns, suggesting that closely related Fanzor systems are undergoing intron acquisition (FIG. 16C).

[0171] To demonstrate that these expanded Fanzor family members actively process and associate with their cognate fRNAs, family 1 Fanzor from the unicellular green alga Chlamydomonas reinhardtii (CreHNuc) was focused on (FIG. 9C). Notably, the multiple CreHNuc genes encoded in the algae genome transcribe pre-mRNAs with multiple introns. Interestingly, the RuvC domain is coded across multiple exons, with the RuvC-III aspartic acid encoded in the last exon away from the other two catalytic residues. Using RNA sequencing data, we confirmed the presence of four introns within the CreHNuc-1 pre-mRNA that are processed away from the mature mRNA transcript.

[0172] The CreHNuc systems are associated with Helitron 2 transposons, which contain identifiable short target site duplications (TSDs) and asymmetrical terminal inverted repeats (ATIRs). In the CreHNuc-1 system, we found defined TSD and ATIR sequences flanking 5′ and 3′ of the CreHNuc MGE. The CreHNuc-1 system lacks the RepHel domain, indicating that it is an non-autonomous Helitron. It was hypothesized that either the 3′ TSD or the 3′ ATIR sequence indicates the end of the fRNA of CreHNuc-1 and performed small RNA sequencing directly from the native green algae organism, finding significant enrichment of small non-coding RNAs aligning to the 3′ UTR of the CreHNuc-1 mRNA (FIG. 9D). Interestingly, fRNA traces at the CreHNuc-1 locus begin around 100 bp downstream of the end of the last exon and extend across the 3′ ATIR into the TSD (FIG. 9D), suggesting that CreHNuc-1 is likely involved in host Helitron transposition. We hypothesized that the fRNA for these CreHNuc systems are generally marked by the TSD produced by their native transposon upon insertion. Small RNA-sequencing traces were mapped onto all 6 functional copies of CreHNuc and found that all 6 instances of Cre-Hnuc fRNA lie inside the 3′ UTR of their mRNAs and are strongly conserved between the copies (FIG. 9E and FIG. 17A). Moreover, the conservation of this non-coding RNA was studied by searching for this sequence across the Chlamydomonas reinhardtii genome, finding that the non-coding RNA was highly conserved in sequence across 27 different instances (FIG. 17B). The observed fRNA for CreHNuc-1 was computationally folded and strong secondary structures were found, further supporting its potential role in serving as a guide RNA for CreHNuc-1 (FIG. 9F). To generalize these findings beyond the Cre Fanzor locus, fRNA conservation was analyzed by comparing similarities within the Cre Fanzor clusters. It was found that, within the CreHNuc cluster of systems, three representative fRNA structures had high conservation (FIG. 9G), with a conserved upstream region (FIG. 9G, gray region) and a putative cleavage site (FIG. 9G, blue triangle).

[0173] All 6 full-length copies of CreHNuc systems inside the genome were aligned and strong alignment was found near the C-terminal coding region of the Fanzor nuclease, which contains the RuvC domain, and variable N-terminal compositions (FIG. 9E). While unclear why the coding regions of CreHNuc are not conserved like ApmHNuc systems, one possible explanation, without wishing to be bound by any theory, is that the Helitron transposon undergoes rolling circle replication that starts at the 3′ end of the MGE, resulting in variable length replicons and truncations. The C-terminal RuvC domain is likely beneficial for this transposition process and thus is evolutionarily conserved.

[0174] To evaluate the functional role of the CreHNuc-1 fRNA, the CreHNuc-1 protein was co-expressed either with its native fRNA on the 3′ end of the MGE or a scramble RNA sequences. It was found that CreHNuc is only stable when coexpressed with its fRNA, suggesting that CreHNuc actively associates with its fRNA for stability (FIGS. 17C-17D) When the RNP was co-incubated with the 7N randomized TAM library plasmids, no cleavage was observed. This suggests that the CreHNuc and its associated Fanzor clusters might possess functions other than DNA endonuclease, which has been reported for some clades of TnpBs that actively process their own omegaRNA, but fail to cleave dsDNA (Nety et al. 2023) Example 18: Fanzor nucleases evolved nuclear localization signals and can be adapted for mammalian genome editing Since eukaryotic nucleases would need to invade nuclear membranes for genomic activity, unlike their prokaryotic counterpart TnpB, IscB, and CRISPR family proteins, it was hypothesized that Fanzor systems might have evolved nuclear localization signals to actively cross the nuclear membrane. Using Alphafold2 predicted structures of ApmHNuc, a disordered region of 64 amino acids on the N-terminus of ApmHNuc was identified, which was unique to ApmHNuc, but not its TnpB and CRISPR/Cas12 counter parts (FIG. 8C and FIG. 10A). The first 64 amino acids of ApmHNuc were analyzed with an NLS determination program and a strong similarity to canonical nuclear localization signal peptides that are rich in positively charged residues was found (FIG. 18). Given the evolutionary pressure to enter the nucleus, it was predicted that the N-terminal short peptide is likely acquired during evolution to aid entry into the nucleus. To understand how widespread this phenomenon is across Fanzor systems, the end termini of all Fanzor nucleases were analyzed and 8.6% of nucleases were found to have a readily identifiable NLS (FIG. 10B).

[0175] To evaluate the functional activity of the identified ApmHNuc NLS, the N-terminus NLS tag of ApmHNuc was fused to either the N-terminus or C-terminus of super-folded GFP (sfGFP). The sfGFP was also attached onto the N-terminus of wild-type ApmHNuc and visualized its location via fluorescent microscopy. It was found that compared to a wild-type sfGFP, the N-terminus NLS tag of ApmHNuc fused to either terminus of sfGFP resulted in a strong nuclear localization of sfGFP (FIG. 10C). Fusion of sfGFP with ApmHNuc also caused strong nuclear localization of sfGFP (FIG. 10C). These data suggest that the N-terminal NLS tag of ApmHNuc is a natural NLS peptide that likely evolved during the transition from prokaryotes to eukaryotes.

[0176] Next, to test whether Fanzor systems could be applied for mammalian genome editing given their mesophilic operating temperature and eukaryotic nature, ApmHNuc was codon-optimized for mammalian expression and engineered its fRNA guide for expression in mammalian cells. Since the fRNA is longer in length than typical ωRNAs (>350 nt), HEK293T cells were co-transfected with a T7 promoter-driven guide expression plasmid along with human codon-optimized T7 polymerase and wild-type ApmHNuc protein. A reporter plasmid that carries the 21 nt target matching the T7-driven guide was designed in front of a Gaussia luciferase (Gluc) out of frame from the start codon along with a cypridina luciferase (Cluc) driven by a constitutive promoter on the same plasmid to normalize for transfection efficiency. Indel activity would knock the Gluc into frame, allowing for detectable Gluc luciferase activity. Using this reporter system, a significant increase in normalized luciferase was found in the targeting guide condition compared to a non-targeting guide control, suggesting that indel were generated by the ApmHNuc protein (FIG. 10D). Indels were checked for by next-generation sequencing and indel editing in the targeting guide condition for ApmHNuc was found (FIG. 10E). Lastly, the indel pattern was analyzed and 2-5 bp deletions were found near the 3′ end of the target site (FIG. 10F), similar to the indel cleavage patterns of other programmable RuvC containing nucleases like Cas12 or TnpB systems.

### Example 19: Fanzor Nucleases are TnpB Homologs Widespread in Eukaryotes and Viruses

[0177] Putative RNA-guided nucleases were identified across 22,497 eukaryotic and viral assemblies from NCBI GenBank by searching for similarity to a multiple alignment of RuvC domains from known Fanzor1 and Fanzor2 proteins (Bao et al. 2013). There were 3,655 putative nucleases with unique sequences (using a 70/o similarity clustering threshold) that occurred across metazoans, fungi, choanoflagellates, algae, rhodophyta, diverse unicellular eukaryotes, and multiple viral families (FIG. 19A and FIG. 19B), expanding the known diversity of eukaryotic RuvC homologs over 100-fold (FIG. 19A). These Fanzor homologs frequently occur in multiple copies across eukaryotic genomes, with some genomes carrying up to 122 copies. This wide spread of the Fanzors is strongly suggestive of intragenomic mobility, similar to TnpBs (FIG. 24A). Fanzor proteins also are typically substantially larger than TnpB, with a mean size of 620 residues, compared to 480 residues for TnpB proteins (FIG. 19C).

[0178] Phylogenetic analysis of the expanded set of Fanzor nucleases and a selection of closely related TnpBs revealed 5 distinct Fanzor clades supported by bootstrap analysis, with four Fanzor1 families (Fanzor1a-1d) and a single Fanzor2 clade (FIG. 19A). In addition, there are a number of unaffiliated Fanzor systems that could not confidently be assigned to any Fanzor family based on phylogeny. Fanzors are each broadly represented in diverse eukaryotes, and Fanzor2 shows a pronounced enrichment of virus-encoded Fanzors (18.4%, p<1017), including Phycodnaviridae, Ascoviridae, and Mimiviridae (FIG. 19A). Fanzor proteins often contain various domains, in addition to the RuvC-like nuclease domain; in particular, Fanzor2 members contain a helix-turn-helix (HTH) domain, mimicking the domain architecture of the TnpBs (FIG. 24B). Furthermore, direct comparison of specific Fanzors and their closest TnpBs further supports the close evolutionary relationship between these enzymes (FIG. 24C and FIG. 24D). In all families, Fanzors are interspersed with TnpBs, suggesting multiple acquisitions of TnpB during the evolution of eukaryotes. Moreover, TnpB-containing clades that include sparse Fanzors might reflect direct acquisitions from symbiotic bacteria (FIG. 19A).

[0179] Projecting Fanzor hosts onto the eukaryotic tree of life shows broad spread into amoebozoa, several other groups of unicellular eukaryotes, plants, fungi, and animals, including Chordata and Arthopoda (FIG. 19B). Notably, assimilation of Fanzors in eukaryotic genomes was accompanied by intron acquisition: numerous Fanzor loci have intron densities similar to those in host genes, up to ˜9.6 introns/kb (FIG. 19D, FIG. 19E, and FIG. 25).

### Example 20: Fanzor Nucleases Associate with Diverse Transposons

[0180] Fanzors commonly associate with different transposons (Bao et al. 2013). A comprehensive transposon search was performed (Chen et al. 2018) within 10 kb of Fanzors, analyzing the identity of the associated ORFs by domain search (FIG. 19, FIG. 26A, and FIG. 26B; Table 3). Amongst eukaryotic transposons, both previously reported transposon families, including Mariner/Tc1, Helitron, and Sola, and families not previously known to associate with Fanzors, including hAT and CMC DNA transposons were found (FIG. 26A and Table 3). Fanzor-transposon associations included autonomous transposons encoding a transposase, such as in the Crypton and Mariner/Tc1 families, as well as non-autonomous transposons including only transposon ends, such as hAT, EnSpm, and Helitron families (FIGS. 26A-26D and Table 3). Notably, the most frequent associations were with the DNA transposon hAT, suggesting that Fanzors might have some role with these transposons in the respective eukaryotic genomes. Fanzor1a, b, and d clades are most commonly associated with hAT, whereas Fanzor1c preferentially associated with LINE, CMC, and Mariner/Tc1 transposons (FIG. 19A and FIGS. 26A-26D). Fanzor2s associated with diverse transposons, including, Helitron, hAT, and IS607 (FIG. 19A and FIGS. 26B-FIG. 26D). The IS607 transposons encode a TnpA-like transposase, further cementing the close relationship between Fanzor2 and TnpBs.

[0181] Table 3. Fanzor families in eukaryotics genomes and their identified transposon associations.

[0182] Fanzor elements are named after the host species. Fanzor2 elements are indicated by *. The left and right termini are indicated by L. and R. respectively, in the orientation of the encoded Fanzor protein. N: none; n.a.: not available; i.e.: incomplete. #: The encoded Tpase (or coding sequences). If a given Fanzor element does not encode Tpase, but the superfamily it belongs can be determined, the superfamily name is parenthesized. Rows highlighted in white correspond to Fanzor-Transposon associations previously identified (Bao et al. 2013). Bold rows correspond to new transposon associations identified in this study.

| | | | | | Fanzor protein | | | |
|---|---|---|---|---|---|---|---|---|
| Family | Copy | | TIR | TSD | (aa) &(No. | | Tpase ^{#} | |
| (bp) | No. | Termini | (bp) | (bp) | Exons) | | (Superfamily) | Comments |
| MDe-1 | 2 | | | | 815 | (3) | | |
| MDe-2 | 2 | | | | 698 | (4) | | |
| MDe-3 | 1 | | | | 620 | (4) | | |
| MDe-4 | 4 | L.R. | N | n.a. | 731 | (4) | | |
| MDe-5 | 4 | L.R. | N | n.a. | 656 | (4) | | |
| MDe-6 (3852) | 10 | L.R. | N | n.a. | 661 | (4) | | |
| MDe-7 (3937) | 8 | L.R. | 24 | 2 (TA) | 772 | (3) | | |
| MDe-8 | 4 | R. | | | 745 | (3) | | |
| MDe-9 | 3 | R. | | | 764 | (5) | | |
| MDe-10 | 1 | | | | 779 | (3) | | |
| MDe-11 | 3 | R. | | | 713 | (4) | | |
| MDe-12 (3875) | 5 | L.R. | N | n.a. | 677 | (4) | | |
| MDe-13 | 3 | R. | | | 680 | (2) | | |
| HMa-1 | 1 | | | | i.c. | | Mariner | Probably |
| | | | | | | | | from virus |
| SAl-1* | 3 | R. | | | 400 | (1) | | |
| SAl-2* | 3 | R. | | | 498 | (4) | | |
| SPu-1 (2149) | 25 | L.R. | 33 | 2 (TA) | 633 | (1) | | |
| SPu-2 | 2 | | | | 663 | (1) | | |
| SPu-3 (2288) | 2 | L.R. | 25 | 2 (TA) | 626 | (1) | | |
| ROr-1 (5190) | 10 | L.R. | 90 | 2 (TA) | 928 | (3) | Mariner | |
| ROr-2 (4073) | 18 | L.R. | 46 | 2 (TA) | 690 | (2) | Mariner | |
| ROr-3 (2862) | 16 | L.R. | 133 | 2 (TA) | 720 | (2) | | |
| ROr-4 (5244) | 9 | L.R. | 38 | 9 | 1165 | (3) | (MuDr) | |
| AMa-1 | 1 | | | | 871 | (4) | | |
| AMa-2 | 1 | | | | 645 | (3) | | |
| AMa-3 | 1 | | | | 789 | (7) | | |
| PBl-1 (3938) | 4 | L.R. | 12 | 3 (TAN) | 683 | (4) | | |
| PBl-2 | 3 | | | | 677 | (2) | | |
| PBl-3 (4614) | 6 | L.R. | 42 | 9 | 1186 | (3) | (MuDr) | |
| MCi-1 (4036) | 4 | L.R. | 20 | 2 (TA) | 686 | (2) | Mariner | |
| MCi-2A (10235) | 3 | L.R. | N | 11 | 1375 | (4) | Crypton | |
| MCi-2B | 2 | R. | — | — | 1375 | (4) | | |
| MCi-2C | 3 | R. | — | — | 1375 | (4) | | |
| MCi-2D (9295) | 2 | L.R. | N | 12 | 1375 | (4) | | |
| MCi-3 (5305) | 2 | L.R. | 39 | 4? (TTAA) | 1304 | (2) | | |
| MCi-4 (4508) | 6 | L.R. | 31 | 9 | 1245 | (3) | (MuDr) | |
| MCi-5 (7323) | 5 | L.R. | N | n.a. | 1212 | (3) | Harbinger | |
| MCi-6 | 2 | | | | 1231 | (2) | | |
| MCi-7 | 1 | R. | | | 1153 | (3) | | |
| MCi-8 | 1 | | | | 1067 | (2) | | |
| MCi-9 | 1 | | | | 1149 | (3) | | |
| MCi-10 | 1 | | | | 1135 | (4) | | |
| AGo-1* | 1 | | | | 457 | (1) | | |
| ECy-1* | 1 | | | | 455 | (1) | | |
| SCe-1* | 1 | | | | 350 | (1) | | |
| TDe-1* (1785) | 7 | L.R. | | | 486 | (1) | | |
| DFa-1 (11949) | 12 | L.R. | 12 | 4 | 1241 | (10) | (Sola2) | |
| DFa-2 (12887) | 7 | L.R. | 12 | 4 | 1010 | (9) | Sola2 | |
| DFa-3 (10254) | 2 | L.R. | 13 | 4 | 1084 | (10) | (Sola2) | |
| DFa-4 | 1 | | | | 1020 | (13) | — | |
| PPa-1 (13566) | 3 | L.R. | 22 | 4 | 1699 | (7) | Sola2 | |
| PPa-2 | 1 | | | | 945 | (8) | | |
| PPa-3 | 1 | | | | 970 | (9) | | |
| PPa-4 (14423) | 3 | L.R. | 16 | 4 | 1827 | (14) | Sola2 | |
| PPa-5 (15292) | 3 | L.R. | 16 | 4 | 1388 | (12) | Sola2 | |
| PPa-6 | 2 | R. | 16 | 4 | 1218 | (13) | | |
| PPa-7 | 1 | | | | 1756 | (16) | | |
| ACa-1* (2675) | 2 | L.R. | N | 0 | 603 | (1) | TnpA_IS607 | |
| ACa-2* | 1 | | | | 653 | (1) | TnpA_IS607 | |
| VCa-1 | 1 | | | | 768 | (1) | | |
| VCa-2 | 1 | | | | i.c. | | | |
| CRe-1 (3992) | >100 | L.R. | N | 0 or n | 830 | (5) | (Helitron) | Expressed |
| CRe-2 (4882) | >100 | L.R. | N | 0 or n | 906 | (10) | (Helitron) | Expressed |
| CRe-3 (4688) | >100 | L.R. | N | 0 or n | 967 | (10) | (Helitron) | Expressed |
| CRe-4 | 3 | R. | | | 944 | (6) | | |
| CRe-5 | 3 | R. | | | i.c. | | | |
| CVu-1 | n.a | | | | i.c. | | | |
| CMe-1A (3169) | 150 | L.R. | N | n.a. | 734 | (1) | | |
| PUl-1 (3620) | 8 | L.R. | 24 | 2 (TA) | 802 | (1) | Mariner | |
| PUl-2 (3820) | 1 | L.R. | 33 | 2 (TA) | 643 | (3) | Mariner | |
| PUl-3 | 1 | | | | 799 | (1) | | |
| PUl-4 (3356) | 3 | L.R. | 26 | 2 (TA) | 809 | (1) | | |
| PUl-5 | 1 | R. | | | 617 | (1) | | |
| PUl-6 | 5 | R. | | | 642 | (1) | | |
| NOc-1 | 4 | | | | i.c. | | | |
| PSo-1 | 2 | R. | | | 660 | (1) | | |
| PSo-2 | 4 | R. | | | 726 | (1) | | |
| PSo-3 | 3 | | | | 716 | (1) | | |
| PSo-4 | 3 | | | | 785 | | | |
| PSo-5* | 1 | | | | i.c. | | | |
| PCa-1, | 2 | R. | | | 788 | (1) | | |
| PCa-2 (2107) | 2 | L.R. | N | N | 611 | (1) | | |
| PCa-3* | 2 | R. | | | 483 | | | |
| PRa-1 | 1 | | | | i.c. | | | |
| PRa-2* | 2 | R. | | | i.c. | | | |
| ALa-1 | 1 | | | | i.c. | | | |
| ALa-2 | 1 | | | | i.c. | | | |
| ESvi-1A (3180) | 1 | L.R. | 59 | | 890 | (1) | | |
| ESvi-1B (4052) | 1 | L.R. | 25 | 8 | 890 | (1) | IS4 | |
| ESv-1 (2639) | 2 | L.R. | 40 | 2 (TA) | 693 | (1) | | |
| ESv-2 (3603) | 2 | L.R. | 18 | | 757 | (1) | IS4 | |
| SWv-1 (2633) | 1 | L.R. | 21 | 6 | 779 | (1) | | |
| HAgv-1 (1963) | 2 | L.R. | 13 | 4 (TTAT) | 572 | (1) | | |
| HAmv-1 (1925) | 1 | L.R. | 13 | 4 (TTAA) | 592 | (1) | | |
| PUgv-1 (1961) | 2 | L.R. | 13 | 4 (TTAT) | 571 | (1) | | |
| SFav-1 (1954) | 2 | L.R. | 13 | 4 (TTAN) | 606 | (1) | | |
| HVav-1 (1955) | 5 | L.R. | 13 | 4 (TTAN) | 608 | (1) | | |
| MCnv-1 | 1 | R. | | | i.c. | | | |
| PGv-1 (4442) | 1 | L.R. | 29 | 2 (TA) | 625 | (1) | Mariner | |
| EHv88-1 | 1 | | | | 650 | (1) | | |
| EHv99B1-1* (2126) | 1 | L.R. | | | 640 | (1) | | |
| ISvMimi_1* (2549) | 3 | L.R. | | | 520 | (1) | TnpA_IS607 | =APmv-2, |
| | | | | | | | | =ACmv-2 |
| ISvMimi_2* | 1 | | | | 545 | (1) | TnpA_IS607 | =APmv-1, |
| | | | | | | | | =ACmv-1 |
| APmv-3* | 1 | | | | 482 | (1) | | =ACmv-3 |
| MGvc-1*, | 1 | | | | 526 | (1) | | |
| MGvc-2* | 1 | | | | 493 | (1) | | |
| ISvAR158 1* | 1 | | | | 351 | (1) | TnpA_IS607 | |
| ISvNY2A 1* (2164) | 3 | L.R. | | | 395 | (1) | TnpA_IS607 | |
| ISvNY2A 2* (1443) | 2 | L.R. | | | 432 | (1) | | |
| CRv-1* | 1 | | | | 416 | (1) | TnpA_IS607 | |
| FEsv-1* | 1 | | | | 408 | (1) | | |

| | | | | | | | |
|---|---|---|---|---|---|---|---|
| Fanzor1-1_SitMos | >12 | L.R. | 11-bp | 2-bp (NN) | (3) | EnSpm? | |
| Fanzor1-2_SitMos | >8 | L.R. | 74 | 8 (ATGTANNN) | (5) | hAT | |
| Fanzor1-3_SitMos | >14 | L.R. | 12 | 8 | (5) | hAT | |
| Fanzor1-4_SitMos | 1 | — | — | | | | fragmental |
| Fanzor1-5_SitMos | 6 | R. | — | — | | Helitron? | |
| Fanzor1-6_SitMos | >10 | L.R. | 21 | 2-bp (NN) | | EnSpm? | |
| Fanzor1-7_SitMos | 6 | L.R. | 127 | 8 GT(GTGNNNNN) | (4) | hAT | |
| Fanzor1-8_SitMos | >7 | L.R. | 12 | 2-bp (NN) | (3) | EnSpm? | |
| Fanzor1-9_SitMos | >16 | R. | — | — | (4) | | fragmental |
| Fanzor1-10_SitMos | >9 | R. | — | — | | | fragmental |
| Fanzor1-11_SitMos | 1 | — | — | | | | |
| Fanzor1-1_ConNas | >20 | L.R. | 12 | 2 | | EnSpm? | |
| Fanzor1-2_ConNas | >6 | L.R. | 12 | 2 | | EnSpm? | |
| Fanzor1-3_ConNas | >50 | L.R. | 12 | 2 | (2) | EnSpm? | |
| Fanzor1-4_ConNas | >20 | L.R. | 11 | 2 | (3) | EnSpm? | |
| Fanzor1-5_ConNas | >7 | L.R. | 11 | 2 | (3) | EnSpm? | |
| Fanzor1-6_ConNas | >10 | L.R. | 133 | 8 (ATGTANNN) | (5) | hAT | |
| Fanzor1-7_ConNas | >3 | L.R. | 126 | 8 (GTGNNNNN) | (3) | hAT | |
| Fanzor1-8_ConNas | >8 | L.R. | 12 | 2 | (4) | EnSpm? | |
| Fanzor1-9_ConNas | >13 | L.R. | 126 | 8 (ATGTANNN) | (3) | hAT | |
| Fanzor1- 10_ConNas | >6 | L.R. | none | 8 (GCANNNNN) | (4) | hAT? | |
| Fanzor1- 11_ConNas | >10 | L.R. | 133 | 8 (ATGTANNN) | (5) | hAT | |
| Fanzor1- 12_ConNas | >10 | L.R. | 130 | 8 (ATGTANNN) | (3) | hAT | |
| Fanzor1- 13_ConNas | >11 | L.R. | 72 | 2 (TA) | (4) | EnSpm? | |
| Fanzor1- 14_ConNas | >4 | L.R. | 12 | 2 (TA) | (3) | EnSpm? | |
| Fanzor1- 15_ConNas | >3 | L.R. | 16 | 8 (GGTANNNN) | (1) | hAT? | |
| Fanzor1- 16_ConNas | >3 | L.R. | none | 8 (GGTANNNN) | (6) | hAT? | |
| Fanzor1- 17_ConNas | >2 | L.R. | 15 | 8 (GGTANNNN) | (3) | hAT? | |
| Fanzor1- 18_ConNas | >20 | R. | | | | | |
| Fanzor1- 19_ConNas | >4 | L.R. | 121 | 8 (ATGTANNN) | (4) | hAT | |
| Fanzor1-1_ApoVar | >16 | L.R. | none | 0 | (7) | Crypton | |
| Fanzor1-2_ApoVar | 12 | L.R. | none | 0 | | Crypton? | |
| Fanzor1-3_ApoVar | >4 | L.R. | none | | | Helitron | |
| Fanzor1-4_ApoVar | >11 | L.R. | none | | | Crypton | |
| Fanzor1-5_ApoVar | >6 | L.R. | none | | | Helitron | |
| Fanzor1-6_ApoVar | >6 | L.R. | none | | | Helitron? | |
| Fanzor1-7_ApoVar | >5 | L.R. | none | | | Helitron | |
| Fanzor1-8_ApoVar | >5 | L.R. | | TA | | Mariner | |
| Fanzor1- 8B_ApoVar | >5 | L.R. | | TA | | Mariner | |
| Fanzor1-9_ApoVar | =4 | L.R. | 19-bp | TA | | Mariner? | |
| (3996) | | | | | | | |
| Fanzor1-1_RhiMic | 3 | L.R. | 90 | 2 (TA) | (1) | Mariner? | |
| Fanzor1-2_RhiMic | >3 | L.R. | none | 2 (TA) | 3 | Mariner (+) | |
| Fanzor1-3_RhiMic | >4 | L.R. | none | | | Helitron | |
| Fanzor1-4_RhiMic | ~4 | L.?R? | none | | | | |
| Fanzor1-1_MuIr | ~3 | R. | | 0 | | Crypton | |
| Fanzor1-2_MuIr | ~4 | L.R. | 36 | 9 | (5) | MuDR? | |
| Fanzor1-3_MuIr | >4 | R. | | | | | |
| Fanzor1-4_MuIr | >3 | L.R. | | 9 | | MuDR? | |
| Fanzor1-5_MuIr | >4 | L.R. | Weak | 9 | | MuDR? | |
| | | | subterminal | | | | |
| | | | TIRs | | | | |
| Fanzor1-1_ParPar | >10 | L.R. | none | | | Crypton | |
| Fanzor1-2_ParPar | >10 | L.R. | 142 | 2 (TA) | | | |
| Fanzor1-3_ParPar | >3 | L.R. | 24 | 3(TWA) | | | |
| Fanzor2-1_ParPar | >40 | L.R. | 14 | 4 (TTAA) | | | |
| (1660) | | | | | | | |
| Fanzor1-1_KleNit | >6 | L.R. | 27 | 2 (TA) | (1) | Mariner | |
| Fanzor1-1_KleNit | >5 | L.R. | 27 | ? | | | |
| Fanzor1-1_ChlPri | >4 | L.?R? | | | | | |
| Fanzor2-1_ChlPri | >23 | L.R. | 13 | 5 | | | |
| (2654) | | | | | | | |
| Fanzor1- 1_CarMem | =6 | L.R. | none | 5 | 1 | | |
| Fanzor1- 2_CarMem | >6 | L.R. | none | 5 | 1 | | |
| Fanzor1- 3_CarMem | =3 | L.R. | | 5 | | | |
| Fanzor1- 1_MicYARC | >100 | L.R. | 27 | 2(TA) | (1) | Mariner (+) | Target CTA |
| (3453) | | | | | | | |
| Fanzor1- | >14 | L.R. | 27 | 2(TA) | (1) | Mariner | |
| 1N1_MicYARC | | | | | | | |
| Fanzor1- 2_MicYARC | | L.R. | 27 | 2(TA) | (1) | Mariner | Target |
| | | | | | | | CATA |
| Fanzor1- 3_MicYARC | >16 | L.R. | | 2(TA) | | Mariner | |
| Fanzor1- 4_MicYARC | >50 | L.R. | 32 | 2(TA) | | Mariner | Target |
| | | | | | | (+strand) | GTTA, |
| | | | | | | | specific |
| Fanzor1- 5_MicYARC | >2 | L.R. | | 2(TA) | (1) | Mariner(−strand) | Target |
| | | | | | | | CATA, |
| | | | | | | | specific |
| IS607EU-1_MicYARC | >20 | L.R. | none | none | | IS607, S- | |
| | | | | | | recombinase | |
| IS607EU- | | L.R. | | | | IS607, S- | |
| 1_MicYARC (2163) | | | | | | recombinase | |
| Fanzor1-1_XesXan | >4 | L.R. | | TTAA | | piggyBac (by | |
| | | | | | | TIR) | |
| Fanzor1-1_CycCry | >9 | L.R.? | none | | >3 | | 88% |
| Fanzor1-1_EreLig | =3 | L.R. | 17 | 4-bp | 1 | piggy Bac? | |
| Fanzor1-1_AbrTri | =7 | L.R. | 13-bp | 4-bp | | ? | |
| (1873) | | | | | | | |
| Fanzor1-1_CydSpl | =5 | L.R. | 12-bp | 4-bp | 1 | | |
| (1931) | | | | | | | |
| Fanzor1-1_NeHa | >6 | L.R. | | none | 1 | Crypton?? | 14642-bp |
| Fanzor1-2_NeHa | >3 | L.R. | | none | | | |
| Fanzor1-1_HypPro | >4 | L.R. | 9 | TTAA | 1 | piggyBac? | Inserted with |
| | | | | | | | I-element. |
| Fanzor1-1_LysCor | =3 | L.R. | 10 | TTAA | 1 | piggyBac? | |
| (2202) | | | | | | | |
| Fanzor1-1_NeYa | >40 | R. | | | | | |
| IS607EU-h1_PhySoj | >2 | L.? R. | | | | | |
| Fanzor1- | >2 | R. | | | | | |
| 6_PhySoj(2476) | | | | | | | |
| IS607EU-1_UndPin | >3(*) | indeterminate | | | | IS607 | Integrated |
| | | | | | | | insideMuDR |
| Fanzor1-1_LepBou | >3 | L.R. | 24-bp | TA | 1 | Mariner | Target |
| | | | | | | (byTIR) | TGTA |
| Fanzor1-2_LepBou | 2 | L.R. | 33-bp | Mostly TA | 1 | EnSpm | |
| | | | | | | (byTIR) | |
| Fanzor1-3_LepBou | 2 | L.R. | | 2-bp | 1 | EnSpm | |
| | | | | | | (byTIR) | |
| IS607EU-1_GiMa | | | | | | IS607 | |
| IS607EU-2_GiMa | >60 | L.R. | none | none | | IS607 | TnpB |
| | | | | | | | degraded. |
| IS607EU-3_GiMa | >14 | L.R. | none | none | | IS607 | |
| Fanzor1-1_PilApi | >40 | L.R. | 18-bp | 4-bp | | | |
| Fanzor1-2_PilApi | 8 | L.R. | none | none | | | |
| Fanzor1-3_PilApi | >6 | L.R. | 169-bp | TA, likely | | | Old repeat, |
| | | | | | | | 86% identity |
| IS607EU- | >20 | L.R. | none | none | | IS607 | |
| 1_SchTIO01 | | | | | | | |
| Fanzor1-1_VerVer | >28 | L.R. | 20 | 2-bp | | | |
| Fanzor1-1_EuLap | >7 | R. | | | | | |
| Fanzor1-1_GuiThe | 9 | L.R. | 15-bp | 4-bp (ATAN) | | | |
| (2751) | | | | | | | |
| Fanzor1-2_GuiThe | >10 | L.R. | none | 4-bp (TTAW) | | | TnpB |
| (2714) | | | | | | | truncated at |
| | | | | | | | the C- |
| | | | | | | | terminal |
| Fanzor1-3_GuiThe | 1 | L.R. | 18-bp | 4-bp (predicted) | | | |
| (2261) | | | | | | | |
| Fanzor1-1_ApoBC | ~4 | R. | uncertain | uncertain | | | |
| Fanzor1-1_AphGif | 8 | R. | uncertain | Uncertain | | | 5′-end is |
| | | | | | | | flexible. |
| Fanzor1-1_MucSat | >9 | L.R. | 27-bp | 2-bp (TA) | | | |
| Fanzor1-1_BomMaj | >4 | R. | uncertain | uncertain | | | |
| Fanzor1-2_BomMaj | =3 | R. | uncertain | uncertain | | | |
| Fanzor1-1_RhiDel | =3 | L.R. | 78-bp | TA? | | Mariner? | TGTA |
| Fanzor2-1_MerMer | =4 | R. | | | | IS607? | |
| Fanzor1-1_MucSat | >9 | L.R. | 27-bp | 2-bp (TA) | | | |
| Fanzor1-1_BomMaj | >4 | R. | uncertain | uncertain | | | |
| Fanzor1-2_BomMaj | =3 | R. | uncertain | uncertain | | | |
| Fanzor1-1_RhiDel | =3 | L.R. | 78-bp | TA? | | Mariner? | TGTA |
| Fanzor2-1_MerMer | =4 | R. | | | | IS607? | |

### Example 21: Fanzors are Associated with Conserved, Structured Non-Coding RNAs

[0183] TnpB and IscB nucleases process the ends of the transposon-encoded RNA transcript into ωRNA, which complex with the respective nucleases to form a RNA-guided dsDNA endonuclease ribonucleoprotein (RNP) (Karvel et al. 2021; Altae-Tran et al. 202; Nety et al. 2023). Fanzor loci were searched for putative regions encoding OMEGA-like RNAs, based on conservation of non-coding sequence. There was conservation extending beyond the detectable Fanzor ORF on both 5′ and 3′ ends of the ORF, with the conserved regions significantly longer for some Fanzor families than those in TnpB and IscB loci, although some families like the viral-enriched Fanzor2 have non-coding lengths similar to those of TnpB systems (FIG. 19F and FIGS. 26E-26F). These conserved regions indicate either strong conservation within the transposon boundaries, or longer guide RNAs associated with Fanzor enzymes.

[0184] The Fanzor2 from the Acanthamoeba polyphaga mimivirus (ApmFNuc) that is encoded within a IS607 transposon and contains a TnpA transposase and defined inverted terminal repeats was further investigated to explore the potential activity and expression of these conserved regions (FIG. 19E). The A. polyphaga mimivirus genome contains three 1S607 copies which show strong sequence conservation, both within the protein-coding regions but also in the non-coding region at the 3′ ends of the IS607 MGE (FIGS. 19E-19F). This non-coding sequence conservation extended 200 base nucleotides (nt) past the end of ApmFNuc ORF, ending upstream of the right inverted repeat (IRR), designating the right end (RE) of the MGE (FIG. 19G). In silico RNA secondary structure analysis predicted a stable fold (FIG. 19H and FIG. 26E), suggesting that the transcript of this conserved region could function as a Fanzor-associated guide RNA (fRNA). In the alignment of ApmFNuc loci, the predicted fRNA structure was highly conserved, with the conservation extending upstream into the coding region of ApmFNuc, indicating possible co-folding with this portion of the coding region and potential RNA processing site (FIG. 19I and FIG. 26G). This apparent RNA structure conservation is reminiscent of the OMEGA families, where both the IscB and TnpB families show limited structural variation (Altae-Tran et al. 2021), and processing of the upstream region of the mRNA releases functional guide RNAs (Nety et al. 2023).

### Example 22: Viral-Encoded ApmFNuc is a fRNA-Guided DNA Endonuclease

[0185] It was hypothesized that the fRNA forms a complex with ApmFNuc and directs binding and DNA cleavage to a specific sequence in the target. To investigate potential fRNA-ApmFNuc binding, the A. polyphaga mimivirus Fanzor locus, containing the non-coding RNA region, and an E. coli codon-optimized ApmFNuc was co-expressed in E coli (FIG. 20A, Table 4). Notably, ApmFNuc protein was unstable when expressed alone and required co-expression with its fRNA for protein stabilization and accumulation (FIG. 27), similar to the instability of TnpB in the absence of ωRNA (Karvelis et al. 2021, Altae-Train et al. 2021). The fRNA-ApmfNuc RNP was purified and the RNA component of the complex was sequenced. Small RNA sequencing revealed enriched coverage between the 3′ ends of the protein ORF and the IRR, in agreement with the evolutionary conservation across the region (FIG. 20B).

[0186] Testing RNP cleavage activity required both the engineering of a reprogrammed fRNA and the determination of any sequence preferences, akin to the target adjacent motif (TAM) in the case of TnpB and IscB (Karvelis et al. 2021, Altae-Train et al. 2021). A 3′-terminal 21-nt targeting sequence was combined with the fRNA scaffold determined through RNA profiling to engineer a synthetic fRNA, co-expressed the synthetic fRNA and ApmFNuc in E co/i, and isolated the reprogrammed RNP complex. Cleavage on a DNA target containing a randomized 7 nucleotide TAM 5′ of a 21 nt target region complementary to the fRNA targeting sequence was tested to determine potential sequence preferences of ApmFNuc. This TAM library was co-incubated with purified ApmFNuc RNPs containing either targeting or scrambled synthetic fRNA guide sequences. The relative depletion of sequences was profiled with next-generation sequencing (NGS). TAM depletion analysis revealed a strong 5′ GGG motif adjacent to the target site (FIGS. 20C-20D). Robust ApmFNuc activity was validated on all possible NGGG TAMs, with no detectable cleavage of sequences lacking the TAM (FIG. 20E). In contrast to the G-rich ApmFNuc TAM, TnpB homologs of ApmFNuc universally prefer an A/T rich 5′ TAM (Nety et al. 2023). Interestingly, the GGG motif is present at the start of ApmFNuc MGE sequence and likely contributed to the TAM preference of ApmFNuc.

[0187] Cleavage locations of RNA-guided nucleases vary substantially, with cleavage sites located either upstream or downstream of the target sequence. To profile ApmFNuc cleavage patterns, ApmFNuc reaction products were purified and mapped the locations of the cleavage ends using Sanger sequencing. Cleavage occurred in the 3′ regions of the target sequence, with multiple nicks in both the target strand (TS) and the non-target strand (NTS) (FIG. 20F). The cleavage behavior of ApmFNuc at the 3′ end of the target is similar to the cleavage patterns of Casz2 or TnpB nucleases and in general agreement with the properties of programmable RuvC domains (Zetsche et al. 2015, Karvelis et al. 2021, Altae-Tran et al. 2021). The relative preference was quantified for these different nicking sites using an NGS-based assay, finding that during dsDNA cleavage by ApmFNuc the enzyme generated nicks in the NTS at positions 19 and 20, and in the TS at positions 15, 18, and 21 with all cleavage occurring inside the target region, indicating a slightly different cleavage pattern compared to TnpB nucleases (FIG. 20G).

TABLE 4
Fanzor Protein and IRNA sequences relevant for the present disclosure.

| | | | | Associated fRNA | |
|---|---|---|---|---|---|
| Fanzor/ | Fanzor/ | | SEQ | Scaffold Sequence | SEQ |
| TnpB | TnpB | | ID | for biochemistry | ID |
| systems | types | Protein Sequence | NO: | (neglecting guide) | NO: |
| ApmFNuc | Fanzor2 | MKEAVKNVKPKVPAKKRIITGSKTKK | 1 | AAAAATAGTCTAATAAAATCA | 5 |
| | | KVFVKKKPPDKKPLKKPVKKTVKTY | | GGGGTACATTCCGCTAGTACTC | |
| | | KLKSIYVSNKDLKMSKWIPTPKKEFT | | CACCCTACGGGTTAAGCAAATG | |
| | | EIETNSWYEHRKFENPNGSPIQSYNKI | | AGAATATCGAAACGGTATGCA | |
| | | VPVVPPESIKQQNLANKRKKTNRPIVF | | CAGGATTCTTCGAGTGATAATC | |
| | | ISSEKIRIYPTKEQQKILQTWFRLFAC | | TTAGGATGACTCACTAAGGAG | |
| | | MYNSSIDYINSKKVVLESGRINVAAT | | ATGACTAAAGTGTATCATTCAA | |
| | | RKVCNKISVRKALKTIRDNLIKSTNPS | | TATTGTATTGAACGGTATTCTT | |
| | | IMTHIMDEAIGLACSNYKTCLTNYIEG | | CCATAGAGAGTTGATTTTTGGA | |
| | | QIKKFDIKPWSISKRRKIIVIEPGYFKG | | GTATCCAGAAATATCAACTTTTT | |
| | | NSFCPTVFPKMKSSKPLIMIDKTVTLQ | | ATGAGCGG | |
| | | YDSDTRKYILFVPRVTPKYSVNKEKN | | | |
| | | SCGIDPGLRDFLTVYSENETQSICPIEI | | | |
| | | VVNTTKNEYKKIDKINEIIKTKPNLNS | | | |
| | | KRKKKLNRGLRKYHRRVTNKMKDM | | | |
| | | HYKVSHELVNTFDKICIGKLNVKSILS | | | |
| | | KANTVLKSALKRKLATLSFYRFTQRL | | | |
| | | THMGYKYGTEVVNVNEYLTTKTCSN | | | |
| | | CGKIKDLGASKIYECESCGMYADRDE | | | |
| | | NAAKNILKVGLKPWYKQK | | | |
| DpFNuc | Fanzor2 | MKRKREDLTLWDAANVHKHKSMW | 9 | ATTGGATGTTCAAAATGAAGCA | 13 |
| | | YWWEYIRRKDMVNHEKTDCDVIQLL | | TACACTTCGAAGACGTGTGGAG | |
| | | QSASVKKQKTQSDKFLTSFSVGIRPTK | | TGTGTGGAACAATAAACAAAA | |
| | | HQKRVLNEMLRVSNYTYNWCLWLV | | ATCTAGAAAAGAGTGAAACAT | |
| | | NEKGLKPHQFELQKIVCKTNANDVDP | | TTTATTGCGATAACTGCAAATA | |
| | | QYRMENDDWFFNNKMTSVKLTSCK | | TAACACACACAGAGACGTTAA | |
| | | NFCTSYKSAKSLKSKLKRPMSVSNIIQ | | TGGTGCTAGAAATATTTTGCTA | |
| | | GSFCVPKLFIRHLSSKDVSTDNTNMQ | | AAATCGTTGCGCATGTTTCCAT | |
| | | NRYICMMPDNFEKRSNPKERFLKLAK | | TTGTCAATTCGCAGTTATAATT | |
| | | PITKIPPIDHDVKIVKRADGMFIMNIPC | | ACTCTGTAACAATTAGGTCGAT | |
| | | DPKYTRRNASNDTIEKRVCGIDPGGR | | CCATCCTAAATTCGAAAGTCCA | |
| | | TFATVYDPIDCCVFQVGIKEDKQYVIS | | TTGCTACGAGACTTTGCGTATG | |
| | | KLHNKIDHAHMHLTKAQNKKQQQA | | CTTAGTCCAGGGCAATTTTCTGC | |
| | | ARERIVSLKKTHLKLKTFVDDIHLKLS | | CGAATGAAATGGGTTA | |
| | | SHLVKEYQYVALGKINVAQLVKTDR | | | |
| | | PKPLSKRAKRDLLYWQHYRFRQRLT | | | |
| | | HRTTNTECILDVQNEAYTSKTCGVCG | | | |
| | | TINKNLEKSETFYCDQCKYNTHRDVN | | | |
| | | GARNILLKSLRMFPFEKQQQ* | | | |
| MmFNuc | Fanzor2 | MKRKREQMTLWKAAFVNGQETFKS | 10 | ACTTCCAAGACCTGTGGTAATT | 14 |
| | | WIDKARMLELNCDVSSASSTHYSDLN | | GCGGTGTGAAGAACAACAAAC | |
| | | LKTKCAKMEDKFMCTFSVGIRPTSKQ | | TTGGTGGAAAGGAAACGTTTAC | |
| | | KRTLNQMLKVSNHAYNWCNYLVKE | | TTGTGAGTGTTGCAATTACAAA | |
| | | KDFKPKQFDLQRVVIKTNSTDVPAE | | ACTCATCGAGACGTCAACGGA | |
| | | YRLPGDDWFFDNKMSSIKLTACKNFC | | GCGAGAAACATTCTGTGCAAAT | |
| | | TMYKSAQTNQKKTKVDLRNKDIAML | | ACTTGAAACTTTTTCCATTCGC | |
| | | REGSFEVQKKYVRLLTEKDIPDERIRQ | | AGCATAACGAAAGAAACTGAC | |
| | | SRIALMADNFSKSKKDWKERFLRLSK | | AATCGATTTTTTCGGGTTCGAT | |
| | | NVSKIPPLSHDMKVCKRPNGKFVLQI | | TCTATCCCACTTGACTCAAAGA | |
| | | PCDPIYTRQIQVHTSDSICSIDPGGRTF | | GTCAGAGGGCTCGAATACATTT | |
| | | ATCYDPSNIKAFQIGPEADKKEVIHKY | | TCTGCACAGGTTTTGCTAATGC | |
| | | HEKIDYVHRLLAYAQKKKQTQAVQD | | AAGATCTGGGGCAAGAATGTG | |
| | | RIGQLKKLHLKLKTYVDDVHLKLCS | | TTCGGGTCAAATGAGTTA | |
| | | YLVKNYKLVVLGKISVSSIVRKDRPN | | | |
| | | HLAKKANRDLLCWQHYRFRQRLLHR | | | |
| | | VRGTDCEAIAQDERYTSKTCGNCGV | | | |
| | | KNNKLGGKETFICESCNYKTHRDVN | | | |
| | | GARNILCKYLGLFPFAA* | | | |
| BaFNuc | Fanzor2 | MKRTYSATKSSLTLWTAASVKTTSAP | 11 | CGCTCGAGTGGAGGGAACTGA | 15 |
| | | KVVTTFSGWMKKILPTRAETSLTLINP | | CAACTGTAGAGTGGAGATCAC | |
| | | ADIADPSPPKKKAKKTTPATPKPTLRI | | CGACGAACGCTGGACCTCAAA | |
| | | YKIGLRPSPAQRKTLNACIVAANFAY | | GACGTGTGGCATGTGCAGATCC | |
| | | NQCVHLVQHKVCKPHLYDLQKIVAK | | ATCCACCGCGAACTTGGGGCA | |
| | | MKTPEDINHRYAPDRDGWFWKSSTI | | AAAGAACTATTGGAGTGCCCCA | |
| | | VRLLATKDFCAAYKAIVSNKKKDVA | | ACTGCCACTACACCTGCCACAG | |
| | | VIKYKTYDDPEAINPLSGLFGCQKQY | | AGACGTGCACGGAGCTCGAAA | |
| | | ATVTQAGLRLLPRLFGKDPIPLVKKK | | CATCTTGCTGAGAAGCTTCGGA | |
| | | LKVATIDHDFKIEKTSKGKFVLCLTVE | | CAGTTTCCAGTCTAGAAAAACA | |
| | | CSLLRRVKPPAPLFEDGYIHACGIDPG | | CGAACTTTTTCCTTGGCCCAAG | |
| | | VRSFVTVYDPTRQDCYQFGTSAQKA | | GATTGCCAAACACCACTCAAAT | |
| | | ERLDPITNAIDNWNSFVDQHRDKAPP | | CCTCGTTCAGGGGCCTCGAGTG | |
| | | TAIESWSRKTKKLWYKLKNQVRSLH | | GCTGGGCATATATGGGTTA | |
| | | DQVIAHLLGAYNFISLGKLDVSCFRR | | | |
| | | GTTAKSTNRWLRIYRHFEFRTKLLAR | | | |
| | | VEGTDNCRVEITDERWTSKTCGMCR | | | |
| | | SIHRELGAKELFECPNCHYTCHRDVH | | | |
| | | GARNILLRSFGQFPV | | | |
| KnFnuc | Fanzor1 | MDEGADDSEEAKRKRPDITLRRALRK | 12 | GGAGGAGGGAGGACAAGCTAC | 16 |
| | | DKETSVVQTGWKFLCQELGIRDRIEEI | | AAGACGTGCCACAACGTGCGA | |
| | | IPEVTRIRVETCLLLNLHFIRLLDEGRP | | GCGTGTACGAACCCGCTCTGTC | |
| | | IPVIDQNLVGRAMQCTYSKNPQADPD | | GCATGGTGTGGAATAGAGACG | |
| | | LHETFVHHYLPLCPNRPNNSCLPRITN | | TCAACGCAGCTCGTAACATAGC | |
| | | VLLDLRNQLLSNIKNHVAVLFQSRHR | | TTGGATCTGTATGAGCATAGTC | |
| | | AFMKLLLREAAPDVPFFGDADEDLES | | AGAGGCGAGGGCAGGCCAGCG | |
| | | CTRLLTTATLWRPNESVRELLPEYPRI | | GAGTTCACGAGAGCAGGAATG | |
| | | YGRIPEAAIECLQDLVDSVRPEVGPLP | | TGAGGATGACTGAGAATTAGTC | |
| | | AAPQSRPHLYMPWMRIISEEFSDREL | | GAAAGACATAGCTGCCTAGAA | |
| | | RSFSLVPHASESAPFIAITPTTWPELQP | | ACGAGTTCATCTAGGCACTTCG | |
| | | KSGKRKAPGELRDAFPSIGRLESGGK | | GTGAGAATCCGAGATACGGCT | |
| | | TFADRITTDGVSASVYFLVEKRTPPPE | | GGGTACTGTGGCGAGTGTGCCA | |
| | | DRVVHIHPKQRVVGLDPGKHPDFLTG | | TTTTACTCTGAACAGACTGTA | |
| | | IAVTGDWDGIERQEEIIGLGTRDFYHR | | | |
| | | AGFKKRTFLMHSWMSRDLDVAAFN | | | |
| | | KDAPSGNTVSLEDFGKRVTFVCANLY | | | |
| | | VLVRFHTARRVRKLRRRVTIKKQIEV | | | |
| | | DRACKRITAGKKTVVAFGAAQVWA | | | |
| | | GRTKRQCGPCESVKRRLSSHHKATV | | | |
| | | VMIDEFRTSQVCSTCHSDVGKFAVLK | | | |
| | | RQRVMEDGLPTVTEGGRREDEDEDG | | | |
| | | GGRTSYKTCHNVRACTNPLCRMVW | | | |
| | | NRDVNAARNIAWICMSIARGEGRPAE | | | |
| | | FTRAGVWG* | | | |
| CrFNuc | Fanzor1 | MAPKRRRDEAEKAEEEKDHTTSTKC | 2 | GCCGCCATGGCCGCCGGCGGC | 6 |
| | | GLAGLLSEKIEADGVAVTREESLAAV | | GGCGGGGCCGGGCTGAGAGCC | |
| | | DFLVAALTRLRFEALCLLGLVAVRM | | TGAACGGCGCTAGCAGGGCGT | |
| | | CEDARREGQGLQPHCATCRRLRKTEL | | GGGGCTGAGGGTGCACGTGTT | |
| | | VEDDMYAAICAVSVCDLTEQGRKRG | | GATTGGCGGCGAGTGACGTGA | |
| | | RPSKRDQHPEDDLERHVCEEHFPRDE | | CTAGTTTGTTAGCTGCGGGTTA | |
| | | EAAGARVNRSGLTPFLPPLSKGVFTN | | GCACGGACTGTGCACCCCACCC | |
| | | VKNHYAANFAAWLARSFRCRIDDEL | | CACCGGCCACGTTCCGGATTTG | |
| | | RELRTPATKKLDKLAWSMAHAVLYD | | CGGGGATGCAAAGGCCCCCAA | |
| | | GELEQPRWWVGWAQGAAGAAAAA | | CATAGAGGCGTGTGCTTAGTAG | |
| | | AAQGAGPAGGAAAAQAWTALVDYV | | GCGCCCGCGTCAAGGTGGCTG | |
| | | NAQRASKRAAELLLREVKGAQATYK | | GGTTGATAACGACCCGGGAGG | |
| | | KASTRHMEWAAEILAGLEARRDQLG | | GGAGGGCTCAGCCCTTTTCCTG | |
| | | AQVQQLTQAQPLTREDTQRLASLRRE | | CCTCCCTAAGGCAGCCACCTCC | |
| | | LHRARPFTLTPSPSFAPIYVPLDNTSM | | TTGT | |
| | | ARLPGLLPTLARRHGEVFAGAGAGA | | | |
| | | VAPSSFVQAAFGGGGMQSSATLNAV | | | |
| | | GWGLFQLGGVTSRNAPFANYITTDG | | | |
| | | VACSVAREAHNKPLANLKPATAPAD | | | |
| | | AEELCTLEEMKATQIIGVDPCGGGNW | | | |
| | | FMAARSPLYQPGPWAWEGVGPAQR | | | |
| | | YLLELHDKQLDEELFPGQLPPEPRRR | | | |
| | | RKGVHRRKQSKHWQPRARTARRRR | | | |
| | | QKRGRFHMSMGHWRHMSGLERLQP | | | |
| | | NRPQLAPALQAYVGGIPTAATASAAR | | | |
| | | FEERLRYLFASGAAGQAAGGPAEAGP | | | |
| | | RGAVHVLWHYHFSAFRRKRWAAFIQ | | | |
| | | RDRALHRVAKQLTGGRPKEEVVVG | | | |
| | | WGSWAFQGGKGGSPISVRGGRAPTG | | | |
| | | RLIKLLRERYAKHVFIIDEYKTSKTCY | | | |
| | | NCGCQEMAIKRLGGLKEGQRPWSVK | | | |
| | | VCNDCLTTWNRDVSAANVIRVLLLL | | | |
| | | KLMGFERPTKLQRPPWPPAAAGPG* | | | |
| TvoTnpB | TopB2 | MKRANAVKLIVGKETHEKLKELAIV | 3 | gggaagcccatgatgatgggcgta | 7 |
| | | AAKCWNEVNWLRMQQFKEGERVDF | | ttaagcgtggtctctataggtgtc | |
| | | SKTEKEVYEKYKQILKVNTQQVARK | | tccgcatagggaaggtaataaacg | |
| | | NAESWRSFFSLIEEKKGKLPKWFKPR | | cagacctgaatggtgcaataaata | |
| | | PPGYWKDKSGKYKMLIIIRNDRYEID | | tcctacatatccccgagtccctag | |
| | | EEKRIIYLKDFKLSLSFNGKLKWRGK | | gagctgggagcagagggcaactca | |
| | | QGRLEIYNEARRSWYAYIPVEVQND | | cagtgagggataggggtaatgggc | |
| | | VKAEDKLKASIDLGIINLATVYVEDG | | tgaagacccagcccgcggtctacc | |
| | | SWYIFKGGSVLSQYEYYSKRISVAQK | | gctggacgaatggagcgggggggt | |
| | | TLARHKQGRSREMKLLHEKRKRFLK | | gtcctcacccactagctatgaagt | |
| | | HALNSMVRKIMEEFKNKGVGEIAIGY | | gatgaaaatgaaggcggtaaactg | |
| | | PKEISKDHGNKLTVNFWNYGYIIRRF | | caaaccaatgaatcgccacaaggg | |
| | | EGVGEELGVKVVKVDEAWTSKTCSL | | aaccttcaccctttagg | |
| | | CGEAHDDGRIKRGLYRCLRIGKVINA | | | |
| | | DLNGAINILHIPESLGAGSRGQLTVRD | | | |
| | | RGNGLKTQPAVYRWTNGAGWVSSPT | | | |
| | | SYEVMKMKAVNCKPMNRHKGTFTL | | | |

### Example 23: Fanzor RNA-Guided DNA Endonucleases are Present in Diverse Eukaryotic Genomes

[0188] This study sought to explore whether Fanzor2 proteins from diverse eukaryotes also are active RNA-guided nucleases. Three Fanzor2 representatives from three animals and a Fanzor1 representative from a plant were chosen for this study: 1) Fanzor2 from Aercenaria mercenaria (Venus clam, MmFNuc), 2) Fanzor2 from Dreissena polymorpha (Zebra mussel, DpFNuc), 3) Fanzor2 from Batillaria attramentaria (Japanese mud snail; BaFNuc), and 4) Fanzor1 from Klebsormidium nitens (freshwater green algae; KnFNuc) (FIG. 21A). MmFNuc, DpFnuc, BaFnuc, and KnFNuc are all represented by multiple copies in the respective organisms, with 7, 24, 5, and 5 copies per genome, respectively (FIG. 21A and FIG. 28A), suggesting recent mobility of their associated transposons. Constructs for co-expression of the fRNA and Fanzor nuclease were cloned in a cell-free transcription/translation system, allowing for isolation of the resulting RNPs to study their fRNA sequences and cleavage activity (FIG. 21B). The RNPs were affinity purified and the bound fRNAs were sequenced, demonstrating that all four Fanzors co-purified with an RNA species derived from the 3′ non-coding region abutting the transposon RE (FIGS. 21C-21F). These fRNAs were highly structured with diverse structural motifs and domains (FIG. 28B).

[0189] Next, a 7N TAM library was challenged with MmFNuc, DpFNuc, BaFNuc, and KnFNuc RNPs with fRNA guide sequences complementary to the library target. There was strong TAM selection corresponding to TTTA, TA, TTA, and TTA TAMs for MmFNuc, DpFNuc, BaFNuc, and KnFNuc, respectively (FIGS. 21G-21J). Incubation of RNPs with individual preferred TAMs showed robust cleavage, validating all four eukaryotic Fanzor enzymes as RNA-guided nucleases (FIGS. 21K-21N). As with ApmFNuc, these Fanzors generated multiple nicks in the top and bottom DNA strands near the 3′ end of the target (FIGS. 21O-21R). Specific cleavage sites showed diversity, with MmFNuc and KnFNuc nicking more upstream and downstream within the guide target sequence than DpFNuc or BaFNuc (FIGS. 21O-21R). Interestingly, KnFNuc produced highly focused nicks in both the top and the bottom strands rather than multiple nicks, suggesting mechanistic differences between Fanzor1 and Fanzor2 nucleases. Given that ApmFNuc, MmFNuc, DpFNuc, BaFNuc, and KnFNuc all lack introns, an intron-containing FanzorIc from the unicellular green alga Chlamydomonas reinhardtii (CrFNuc) was evaluated (FIGS. 29A-29C). There are six CrFNuc copies in the genome, and they are all associated with Helitron 2 transposons, which contain identifiable short target site duplications (TSDs) and asymmetrical terminal inverted repeats (ATIRs). Small RNA sequencing of a C. reinhardtii isolate showed strong enrichment of non-coding RNAs aligning to the 3′ UTR of the Cr-1 Fanzor mRNA (FIG. 29D), which was strongly conserved across all six copies CrFNuc-1 (FIGS. 31A-31B). Computational secondary structure prediction for the CrFNuc-1 fRNA with the fRNAs of the other five loci revealed a conserved stable secondary structure with a conserved upstream region not present in the RNA-sequencing trace, suggesting possible RNA processing of this region to serve as a guide RNA for CrFNuc-1 (FIGS. 29E-29F). Searches for similar sequences across the C. reinhardtii genome identified 20 additional distinct but highly conserved copies of the fRNA (FIG. 29G). Co-expression of CrFNuc-1 either with its native fRNA on the 3′ end of the MGE or a scrambled RNA sequence produced stable RNP only when coexpressed with its fRNA, similar to ApmFNuc (FIGS. 29H-29I). However, no cleavage was detected when the RNP was co-incubated with the 7N randomized TAM library plasmids, suggesting either failure to reconstitute the RNP activity under the experimental conditions or a lack of endonuclease activity of the native CrFNuc-1.

### Example 24: Fanzor Nucleases Contain a Conserved Rearranged Catalytic Site and Lack Collateral Activity

[0190] Alignment of Fanzor nucleases and TnpB members shows that, compared to the majority of TnpBs, Fanzor nucleases contain a substitution in the catalytic RuvC-11 motif from a glutamate to a catalytically inert residue (proline or glycine) (FIG. 22A). To find TnpBs clades with this substitution, similarly modified RuvC nuclease domains were searched for among the TnpBs. There was similar apparent inactivation of RuvC-II in TnpBs across multiple clades, including a monophyletic group, which was termed TnpB2, in contrast to canonical TnpB1 (FIGS. 22A-22B). Given the demonstrated nuclease activity of ApmFNuc, a search for conserved acidic residues that could potentially compensate for the RuvC-II-inactivating mutations was performed. Indeed, all Fanzor proteins and TnpBs with a loss of the canonical glutamic acid in RuvC-II contained an alternative conserved glutamate approximately 45 residues away (FIGS. 22A-22B).

[0191] AlphaFold2-generated structural models of ApmFNuc, MmFNuc, DpFNuc, BaFNuc, KnFNuc, and a TnpB from Thermoplasma volcanium GSS1 (TvTnpB) that both contain a rearranged catalytic site with the Cryo-EM structures of TnpB from Deinococcus radiodurans R1 (Isdra2) and Cas12f from uncultured archaeon (UnCas12f) containing the canonical catalytic site were compared (FIG. 22C and FIG. 30A) (Takeda et al. 2021, Nakagawa et al. 2023). This comparison showed that the alternative conserved glutamate of Fanzor nucleases and rearranged TnpB (E467 of ApmFNuc and E323 of TvTnpB) were in close proximity with the catalytic residues in the RuvC-I and RuvC-III motifs, suggesting that these alternative, conserved glutamates compensate for the mutation in RuvC-II (FIG. 22C and FIG. 30A).

[0192] To test the predicted role of the conserved alternative glutamate in Fanzor activity, two ApmFNuc RNP with mutations at predicted catalytic sites in RuvC-I (D324A) or the alternative glutamate in RuvC-11 (E467A) were purified (FIGS. 30B-30D). While the D324A mutant showed no change in the RNP stability during protein purification, there was a substantial decrease in the expression of the E467A mutant relative to the wild type protein (FIG. 26B). Comparison of the cleavage efficiencies of these mutants with that of the wild-type ApmFNuc showed, in agreement with the nuclease mechanism, that both RuvC-I and RuvC-II mutants abolished ApmFNuc cleavage activity (FIG. 22D). Thus, the alternative Fanzor glutamate is indeed essential for the nuclease activity. Activity required a temperature range of 30° C. and 40° C. for optimal activity, similar to other mesophilic RuvC nucleases, needed complexing with magnesium or a compensatory metal ion, and was robust across a range of salt concentrations (FIGS. 30E-30G).

[0193] The activity of the TnpB2, TvTnpB, was then profiled to determine if these re-arranged TnpBs were similarly active. TvTnpB RNPs were isolated by co-expressing the enzyme with its native locus in E. coli and profiled associated noncoding RNA by NGS (FIG. 31). Expression of the noncoding RNA species mapped proximal to the RE element, similar to other TnpB systems (FIG. 22E and FIG. 32A). Applying the TAM assay by coexpressing TvTnpB with a synthetic ωRNA containing a reprogrammed 21 nt spacer, incubating the RNP with a 7N TAM library plasmid, and sequencing the cleavage products, showed strong enrichment of a TGAC motif near the 5′ target spacer sequence (FIG. 22F). Notably, this TGAC motif is also present at the 5′ end of the left end (LE), marking the beginning of the TvTnpB-encoding transposon. Because T. volcanium is a thermophile, in vitro cleavage efficiency was optimized over a range of temperatures. The optimal temperature for cleavage at the TGAC TAM at 60° C. (FIG. 32B). All four possible NTGAC TAM sequences were validated along with four negative TAM sequences and demonstrated TAM-specific cleavage, similar to other Fanzors and TnpB nucleases (FIG. 22G). The ends of the cleavage products were profiled with NGS, mapping the cleavage position to position 22 in the non-targeting strand and positions 21 and 22 in the targeting strand (FIG. 32C), with a similar cleavage pattern found by Sanger sequencing (FIG. 32D).

[0194] Although the rearranged RuvC catalytic site of the Fanzors and TnpB2 did not impact on target cleavage, it was hypothesized that it could affect the collateral cleavage activity of the enzyme (Chen et al. 2018, Abudayyeh et al. 2016). ApmFNuc, MmFNuc, DpFNuc, BaFNuc, TvTnpB, and the canonical TnpB Isdra2TnpB were profiled for either RNA or DNA collateral cleavage activity by co-incubating the RNP complexes with their cognate targets along with either RNA or DNA cleavage reporters, single-stranded nucleic acid substrates functionalized with a quencher and fluorophore that become fluorescent upon nucleolytic cleavage. While all nucleases had similar on-target cleavage efficiencies (FIG. 32E), the Fanzor orthologs and TvTnpB lacked detectable collateral DNA and RNA cleavage activity in contrast to the strong collateral cleavage activity Isdra2TnpB (Karvelis et al. 2021) (FIG. 22H and FIG. 32F).

### Example 25: Fanzor Nucleases Contain Nuclear Localization Signals and are Functional for Mammalian Genome Editing

[0195] As eukaryotic RNA-guided endonucleases would need to enter the nucleus to access their genomic targets, it was hypothesized that Fanzor nucleases might have harbor nuclear localization signals to actively cross the nuclear membrane. In the Alphafold2 predicted structures of ApmFNuc, a disordered region of 64 amino acids was discovered at the N-terminus (FIG. 23A). Computational prediction of the nuclear localization signal (NLS) identified a strong, positively-charged NLS within the N-terminal region of ApmFNuc (FIG. 33A).

[0196] To evaluate the localization of ApmFNuc and its NLS, a super-folder GFP (sfGFP) was fused to the N-terminus of ApmFNuc and attached the N-terminal portion of ApmFNuc containing the NLS to either the N-terminus or C-terminus of sfGFP. sfGFP localization was visualized via fluorescent microscopy, finding that sfGFP with the NLS from ApmFNuc fused to either terminus had strong nuclear localization (FIG. 23B). Fusion of sfGFP with the complete ApmFNuc also caused strong nuclear localization of sfGFP (FIG. 23B). These results suggest that ApmFNuc indeed contains a functional NLS, likely acquired after the capture of TnpBs by eukaryotes.

[0197] Next, a broad search for Fanzor-encoded NLS sequences was performed by analyzing each Fanzor ORF for a predicted NLS. Across all Fanzor families, ˜60% of ORFs had readily identifiable NLS sequences, on par with the prediction accuracy of a validated set of NLS-containing proteins (Nguyen et al. 2009) and substantially greater than the fraction of NLS sequences predicted for cytosolic human proteins (FIGS. 33B-33D). A subset of 22 Fanzors across Fanzor1 and Fanzor2 families with predicted N-terminal NLS sequences was selected and screened by fusing the N-terminal 100 amino acids of each Fanzor ortholog to sfGFP, transfecting this panel into HEK293FT cells and visualizing sfGFP distribution. 21 out of 22 predicted N-terminal NLS sequences were functional for nuclear localization in mammalian cells, with varying nuclear localization efficiencies (FIG. 23C, FIG. 33E). This experimental validation of the predicted NLS domains shows that Fanzor nucleases acquired mechanisms for nuclear import to access the genome and perform their genomic functions.

[0198] Next, codon-optimizing ApmFNuc, DpFNuc, MmFNuc, and BaFNuc were then tested for mammalian genome editing by engineering their fRNA guide scaffolds for optimal U6-based expression in mammalian cells by removing poly-U stretches (FIG. 34). A reporter plasmid carrying the 21 nt target matching the fRNA guide was designed and its editing was evaluated by next-generation sequencing of generated insertions and deletions (indels). DpFNuc, MmFNuc, and ApmFNuc with engineered fRNAs had detectable editing activity, with DpFNuc and MmFNuc, achieving ˜0.5%-1% editing on plasmids inside human cells (FIGS. 35A-35D). The indel patterns of DpFnuc and MmFNuc showed 2-35 bp deletions near the 3′ end of the target site (FIGS. 35E-35F), similar to the indel cleavage patterns of other programmable RuvC containing nucleases, such as Cas12 or TnpB (Zetsche et al. 2015, Karvelis et al. 2021, Altae-Tran et al. 2021). Because DpFNuc and MmFNuc displayed the highest levels of plasmid editing, a panel of guides against 7 endogenous genomic targets was designed (FIG. 23D) and showed varying levels of editing, from ˜-0.5%-15% (FIGS. 23E-235F), validating Fanzors as RNA-guided nucleases with activity in mammalian cells. As with plasmid editing, editing outcomes were primarily large deletions, ranging in size from 1-25 bp (FIGS. 23G-23J). To evaluate if Fanzor1 orthologs are also functional for genome editing, the editing efficiency of KnFNuc was also tested and showed editing up to 2% across multiple endogenous genomic targets (FIG. 36), demonstrating that both Fanzor1 and Fanzor2 nucleases can be reprogrammed for human genome editing.

[0199] RNA-guided DNA endonucleases are prominent in prokaryotes including roles in innate immunity mediated by prokaryotic Argonautes (Swarts et al. 2014); adaptive immunity by CRISPR systems (Hsu et al. 2014, Hille et al. 2018, Doudna et al. 2014); RNA-guided transposition by CRISPR-associated transposases (Strecker et al. 2019, Klompe et al. 2019), and still uncharacterized functions of OMEGA nucleases in transposon life cycles (Karvelis et al. 2021, Altae-Tran et al. 2021). In eukaryotes, whereas RNA-guided cleavage of RNA is the cornerstone of the RNA-interference defense machinery and post-transcriptional regulation (Hannon et al. 2002, Hutvagner et al. 2008), RNA-guided cleavage of genomic DNA has not been demonstrated, to our knowledge. The examples show that the previously uncharacterized eukaryotic homologs (Bao et al. 2013) of the OMEGA effector nuclease TnpB are RNA-guided, programmable DNA nucleases. Extensive searching of diverse genomes of eukaryotes and their viruses enabled the discovery of thousands of RuvC-containing Fanzor nucleases. While this manuscript was in review, additional work characterized Fanzor nucleases biochemically and in mammalian cells, further confirming Fanzors as RNA-guided nucleases (Saito et al. 2023).

[0200] Phylogenetic analysis of the Fanzors together with their closest TnpB relatives revealed 5 major Fanzor families, which all contain Fanzor nucleases interspersed with prokaryotic TnpBs, suggesting that TnpBs entered the eukaryotic genomes on multiple, independent occasions. Considering the high abundance of TnpBs in bacteria and archaea, and their mobility, along with the exposure of unicellular eukaryotes to bacteria, this apparent history of multiple jumps into eukaryotic genomes does not appear surprising. Furthermore, given the wide spread of Fanzors in eukaryotes, together with the near ubiquity of TnpBs in bacteria and archaea, it appears likely that TnpBs were originally inherited from both archaeal and bacterial partners in the original endosymbiosis that triggered eukaryogenesis (Lopez-Garcia and Moreira 2023). Subsequent events of TnpB capture by eukaryotes could occur via additional endosymbioses as well as sporadic contacts with bacterial DNA. Notably, however, the high intron density in many Fanzors implies their long evolution in many groups of eukaryotes. The history of Fanzor2, however, is quite distinct from the four Fanzor1 families. This variety of Fanzors are enriched in viruses and in IS607 transposons and are far more closely similar to TnpB than members of other Fanzor families, suggesting likely origin from phagocytosis of TnpB-containing bacteria by amoeba and subsequent spread via amoeba-trophic giant viruses (Boyer et al. 2009).

[0201] Association of Fanzor nucleases with transposases suggests a role for their RNA-guided nuclease activity in transposition similarly to the case of TnpB. The exact nature of that role, however, remains unknown. TnpB has been reported to boost the persistence of the associated transposons in bacterial populations (Pastemak et al. 2013, Meers et al. 2023). TnpB and Fanzors potentially could perform different mechanistic roles in transposon maintenance. In particular, these RNA-guided nucleases could target sites from which a transposon was excised, initiating homology directed repair through a transposon-containing locus, restoring the transposon in the original site and thus serving as an alternate mechanism of transposon propagation (Meers et al. 2023). The association of TnpBs and Fanzors with diverse types of transposases suggests that the function(s) of the RNA-guided nucleases do not strictly depend on the transposition mechanism.

[0202] The biochemical characterization of both viral and eukaryotic Fanzor nucleases revealed both similarities with the homologous TnpB and Cas12 RNA-guided nucleases and several notable distinctions. Like TnpB and Cas12, Fanzor nucleases generate double-stranded breaks through a single RuvC domain and cleave the target DNA near the 3′ end of the target. However, unlike canonical TnpB and Cas12 enzymes, which possess strong collateral activity against free ssDNA, Fanzor nucleases and a subset of related TnpBs contain rearranged catalytic sites that are not conducive to collateral activity. In contrast to the T-rich TAMs of TnpB and PAMs of Cas12, the Fanzor TAM preference is diverse, with a GC preference observed for the viral ApmFNuc and A/T rich preferences for the eukaryotic MmFNuc, DpFNuc, and BaFNuc. In some cases, the TAM preference agrees with the insertion site sequence, which is compatible with the role of Fanzors in transposition. Finally, the fRNA of Fanzors overlaps with the transposon IRR and TIR, much like TnpB's ωRNA, but extends farther downstream of the Fanzor ORF, in contrast to the ωRNAs that ends near the 3′ regions of the TnpB ORF. Furthermore, although the Fanzor nucleases originated from TnpB, some features of these eukaryotic RNA-guided nucleases notably differ from those of the prokaryotic ones, reflecting their adaptation functioning in eukaryotic cells, such as the acquisition of introns and functional NLS sequences for nuclear localization.

[0203] The examples demonstrate that Fanzor nucleases can be applied for efficient genome editing with detectable cleavage and indel generation activity in human cells. While the Fanzor nucleases are compact (˜600 amino acids), which could facilitate delivery, and their eukaryotic origins might help to mitigate the immunogenicity of these nucleases in humans, additional engineering is needed to further improve the activity of these systems in human cells, as has been accomplished for other miniature RNA-guided nucleases such as Cas12f (Bigelyte et al. 2021, Wu et al. 2021, Xu et al. 2021, Kin et al. 2021). The broad distribution of Fanzor nucleases among diverse eukaryotic lineages and associated viruses suggests many more currently unknown RNA-guided systems could exist in eukaryotes, serving as a rich resource for future characterization and development of new biotechnologies.

### Example 26: Phage-Assisted Continuous Evolution (PACE) Selection for Improving the Editing Efficiency of Fanzor Proteins (Prophetic)

[0204] Following protein purification and sequencing, variants of Fanzor proteins are evolved using PACE systems to form a large library of Fanzor mutants. Mutants are then subjected to selection based on the lack of DNA collateral activity using an antibiotic resistance selection system. Cells harboring Fanzor mutants that restore antibiotic resistance are isolated and subjected to additional successive rounds of mutation and selection under varying selection stringencies.

[0205] Those Fanzor mutants that conferred a survival advantage are tested for base editing activity in mammalian cells across >5 endogenous genomic loci to assess editing efficiency, product purity, the size of the editing window, and sequence context preferences. Successive rounds of directed evolution are then performed until the resulting Fanzors perform at a useful level (e.g., >20% editing, >50% product purity, <5% indels, and an editing window of 2-8 nucleotides).

### Example 27: Computational Structure Prediction (Prophetic)

[0206] For each position that is experimentally screened for single mutation effects on Fanzor activity, each residue is computationally mutated into other amino acid types. Single sequence structure prediction is performed using AlphaFold2. The model with the highest per-residue confidence score (pLDDT) is computationally evaluated for enzyme and substrate binding free energy. Candidate Fanzor proteins are physically synthesized and evaluated for their genome editing activity using methods described herein.

### Methods

### Computational Discovery of Fanzors

[0207] A profile of the Fanzor RuvC domain (Fanzor profile) was constructed by aligning the previously discovered Fanzor proteins (seed sequences) with MUSCLE v5 (-align), extracting the RuvC domain, and building a profile HMM with hmmbuild (default options) from the HMMER v3 suite of programs. An initial set of putative Fanzor proteins was gathered by searching all annotated proteins and translated ORFs (stop codon to stop codon) longer than 100 residues in NCBI eukaryotic and viral assemblies (one assembly per species) as well as all full length proteins annotated on eukaryotic and viral sequences in GenBank (hmmsearch-E 0.001-Z 61295632). To predict introns in Fanzor ORFs, AUGUSTUS v3.5.0 and Spain v2.4.13f were applied to the genomic region containing the ORF (10 kb upstream/downstream). AUGUSTUS was used for ab initio gene prediction when there was an available parameter set of the same class as the target species. Tantan was used to soft-mask the genome prior to gene prediction using an “-r” parameter of 0.01 if the genome AT fraction was less than 0.8 and 0.02 otherwise (with the suggested scoring matrix for AT-rich genomes). Spain was used to splice-align Fanzor proteins to the Fanzor ORFs (default options). The protein query set for Spain was generated by searching UniClust90 and GenBank eukaryotic proteins with the Fanzor profile. The Fanzor profile was iteratively refined by repeatedly searching the initial set of proteins (hmmsearch-E 0.0001-domE 1000-Z 69000000), extracting the RuvC domain, clustering with Mmseq2 (-min-seq-id 0.5-c 0.9), aligning the cluster representatives with the profile seed sequences, manually refining the alignment, building a new profile, and using the new profile for the next round. Three rounds of refinement were completed. The refined profile was used for a final round of searches and clusters that would have been included in the profile were kept for the subsequent filtering steps. To reduce the likelihood of including genome assembly contaminants in downstream analysis, all Fanzor proteins from NCBI assemblies marked as contig level completeness or those originating from contigs shorter than 50 kb (only from assemblies) were discarded. The remaining sequences were clustered using a combination of Diamond v2. 1.6 (-evalue 0.0001-id 70-query-cover 90-subject-cover 90-max-target-seqs 500-comp-based-stats 3) and MCL (-I 4.0). Each cluster was aligned with MUSCLE and a consensus sequence was computed using a custom python script. The RuvC domains were extracted from each consensus sequence and all aligned with MUSCLE. The alignment was manually inspected and filtered to yield a final set of Fanzor sequences.

### Computational Discovery of TnpBs

[0208] A profile HMM was constructed from a multiple sequence alignment of each Fanzor family and used to query a custom database of prokaryotic and metagenomic assemblies using HMMER (-E 0.0001-Z 61295632). Sequences identical to another sequence were discarded and the remaining were clustered with Mmseqs2 (-min-seq-id 0.7-c 0.9-s 7). Each TnpB sequence was assigned to a Fanzor family based on the profile that matched it with the highest domain bitscore. The split-RuvC domain was extracted from each cluster representative and further clustered with Mmseqs2 (-min-seq-id 0.5-c 0.9-s 7) for a two-step clustering process. These cluster representatives were aligned with MUSCLE and sequences without alignment to the conserved DED motif were discarded.

### Phylogenetic Analysis of Fanzor

[0209] To make a combined tree of TnpBs and Fanzor sequences, the split-RuvC domain was extracted from every Fanzor consensus sequence and clustered with Mmseqs2 (-min-seq-id 0.9-c 0.9). These cluster representatives were aligned, along with the TnpB split-RuvC domain cluster representatives, using MUSCLE. To make a tree of only Fanzor sequences, the extracted split-RuvC domains were aligned with MUSCLE without clustering. In both cases, a approximately-maximum-likelihood phylogenetic tree was constructed with FastTree2 (-lg-gamma) and visualized with R and the ggtree suite of packages.

### Phylogenetic Analysis of Fanzors and TnpBs

[0210] To make a phylogenetic tree of TnpB and Fanzor sequences, the split-RuvC domain was extracted from every Fanzor consensus sequence and aligned to the split-RuvC domain of a 3 k random subset of the two-step clustered TnpB representatives using MUSCLE (-supers). Sequences appearing to be fragments were discarded from the alignment and the remaining sequences were realigned. An approximately-maximum-likelihood phylogenetic tree was constructed with FastTree2 (-lg-gamma). All branches with a local support value (as computed by FastTree) less than 0.7 were collapsed and the tree rooted at the midpoint. The subsequent tree was visualized with R and the ggtree suite of packages.

### Prediction of NLS in Fanzors

[0211] NLStradamus was used with default threshold at 0.6 and model option 2 (four-state bipartite model) to predict NLS domains. For background false positive rate determination, a comprehensive search on Uniprot is performed by looking for Homo sapiens cytosolic proteins (with reviewed status) and a total of 1126 proteins are pulled out for analysis. For on target false negative rate determination, the original set of training sequences that include known NLS containing proteins from NLStradamus is used (Nguyen Ba et al. 2009). NLS sequences cloned for experimental testing are listed in Table 5.

TABLE 5
NLS sequences relevant for the present disclosure.

| | | | SEQ |
|---|---|---|---|
| | | | ID |
| Organism | Family | NLS sequences | NO: |
| Catovirus CTV1 | Family S | ATGGACTGTTTTATCACTTGCTTGCAGTCTTOGGAGAGAATTTTG | 17 |
| | | AAACGAAAGCAACAGAAGAAAAGGCCGCGCTTGTTCTCTATTC | |
| | | TCCCTCGGAAGTCTGGATTCACTATAAGCTATGTCCCAAATCTT | |
| | | GTCTGACGGGAAA | |
| Prototheca cutis | Unclassified | ATGATGAGGGAAGTTTCTAAAAAAGGGAAAGGAAAGGAAAAG | 18 |
| | | TCCTCTGCTTCCACTTCAAGGAGTAGGAAGAGGAAGAGGAAAA | |
| | | GGCAAAAAAGGTCTTCACAAGCTGCCTCTTCTGCCAAAGCCAGA | |
| | | GCGTCCGCAGTTAATCAC | |
| Andricus curvator | Unclassified | ATGATGGCCTGTAAAATTGGCGCTCTGAAAAGGCGCAAGGGTA | 19 |
| | | AACACGGTAAGATTAATATAAGCTATGCGGAATACAAGGAAAA | |
| | | TCCGTTCAGTTGTTGGAACTATGTTTTTGACATGTATAAGATTAT | |
| | | GAAATAGGCATAGAT | |
| Torulaspora | Family 5 | ATGATGACGGAGATCAACTATTACTGGTTTAAAAAGAAAAAAA | 20 |
| delbrueckii | | AAAAAAACATTGAGTCTAACTCTTGGTTTAACATCAATAGCATA | |
| | | GAAAACAAGAAAAAAGAGTTTGAAGAGAATGATATACCTCGAA | |
| | | CAATGTGAAAGAC | |
| Globisporangim | Unclassified | ATGAAACGCAAACAGCAGAAGAAACGACCGAGACTCTTTTCCA | 21 |
| ultimum | | TCCTTCCGCGCAAGTCAGGATTCACCATTTCCTACGTCCCTATTT | |
| | | CTAGTATGACACTGATGAAACTGCTTTCTATGGGGGATACAGGC | |
| | | ATCAGAGGACGTG | |
| Globisporangim | Family 4 | ATGATGATTAAAGAAAAGTACTCTAGCAACAAGCGCAAAAGGT | 22 |
| ultimum | | ATCCTACCACACACCGAAAGAAACGCATGTCAGACGCCCAAAT | |
| | | CAGTACGAAAGCTACGACAATACACGGCAGAAGCATCCCTCCC | |
| | | GTTTTATGTGCGGAGGTCA | |
| Scenedesmus sp. | Family 1 | ATGATGAATGAAATCCAACTCCCTACCCCGAGGGGGTCCGCGA | 23 |
| PABB004 | | GGCGGAAACGAAAGAGACAAACCGAACCCCAAATAAGTTACGA | |
| | | TCAGGCCAAAAACACTTTGCTTGGTGTGCTTTTGCAGAAACTGA | |
| | | CCGCATCCCCCGGGGCAGT | |
| Scenedesmus sp. | Family 1 | ATGATGAGCTATGGGATTGAGATTGAGACGGTAGCAAAACGAA | 24 |
| PABB004 | | CGAGCAAAAGTAAAAAAAAACGGAAGTTCGCACAGCAACTGCA | |
| | | TTCAGATGGAGAAAGCGTTACCATCCTGTATGAGTCAGAGCTTG | |
| | | AAACTCAAATCTAAACAT | |
| Chlamydomonas | Unclassified | ATGATGAAAGAGGCAGTGAAGAATGTGAAACCCAAAGTGCCAG | 25 |
| sp. ICE-L | | CGAAGAAACGAATAATTACAGGTAGTAAAACTAAGAAGAAGGT | |
| | | TTTCGTGAAAAAGAAGCCGCCGGACAAAAAACCCTTGAAGACC | |
| | | CAACAAGAGCCCGGTCCAA | |
| Chlamydomonas | Unclassified | ATGCCTTTCCTCTGCACGACTCGATACTGTAGACGGCCAAGCAA | 26 |
| sp. ICE-L | | GAATGAGAAAAGAAAGCGCAAGACCTCTCACATTTTGGTGGTG | |
| | | GCACTCCAAATTTGGATTCATAGCGTCGCTCATAGTGATTACTG | |
| | | ATGGTTTCGCCGTC | |
| Chlamydomonas | Family 4 | ATGAAGCGAGCAGGCGGTCGAAAAGGAGGTCACCGGCGAAAG | 27 |
| sp. ICE-L | | CAGTCAAAGCATTGGCAACCGCGGGCACGAACCGCAAGAAGAA | |
| | | GACGCCAAAAAAGAGGAAGACTGCACATGTCCATGGGCCACTT | |
| | | GCGGGGCAGGCTGCCGGACAG | |
| Chlamydomonas | Unclassified | ATGATGCGGGAGGTCAAGGCGGGAACTAAGAGAGCGAGACAG | 28 |
| sp. ICE-L | | CCTGAGGTGAAGAGTGTAGCATTGAAAAAAGCTAAGAAGACAG | |
| | | GTAGGGCTTCCAAGCAGGCTTCTTCCTCTAACACGGCGTTTAGT | |
| | | CGTAGTCGAAGCACACAGA | |
| Catovirus CTV1 | Family 5 | ATGTACCTCTTGATGAAGAAGAAAAAAGAACCTGACAAAAACA | 29 |
| | | AAAGTGACAAAGAAAAAGAGTATGAAGAAAAGTATCGAAAGT | |
| | | ATATCACATCCTATAAGACACACAAGACATCACTCGAAAACAC | |
| | | CACGATGAAGTTGTTC | |
| Indivirus ILV1 | Family 4 | ATGATGAAAAAGCCTAAGGTGAAAGAGAAAGAGAAGGAAAAG | 30 |
| | | GAGAAAGAAAATTTCGATTTTATGAAGACTAATAAGGGGAATA | |
| | | TCCATAAGCTCATAAAGGATAAGATGGTACTCTCTATAATCGGG | |
| | | TAAAGGAGGTTATACT | |
| Apophysomyces | Family 1 | ATGATGGAGACTATCGTAAATAAAGAACCACCCGACAAGCGCA | 31 |
| variabilis | | CCCGCCCGGATCGGGCTGCAAAAATTAAAGACCGCAAAAATGG | |
| | | GGAAGAAAACGTCGTTAAATGTACTCTTTCCAGGATCATAGGTA | |
| | | CCTTCCGTTGACCAAAAT | |
| Apophysomyces | Unclassified | ATGAGCCCCGGATCATCTGCGGCGAGAAAGAAAAACGAGAAGC | 32 |
| variabilis | | AGTGTCGGGTGCAGAAGAAGCGAAAGAGACGCGGCCCGAAAG | |
| | | GTGGGGGTCCGGCCAGTAAAACCGCAAGAAAGACGACAGTAAT | |
| | | GTCTCAAGAAGGGATGCCCATGGG | |
| Apophysomyces | Family 4 | ATGATGGCAAGCCGAAACAAGCGGAAAAAAAAGCCGCAGGCG | 33 |
| variabilis | | AGCACGAGTGCCGACACCCAGAGCGACGACGATTTCCAACAAC | |
| | | TCCTTCCGCCGAAGGGTAAATTGAATATGAAAATGCAGATGAC | |
| | | GAAAACAACCTCTGCAGGTT | |
| Apophysomyces | Unclassified | ATGGTTCACCTTATACTCATTCTTATGACGAAGAAAAAGAAAAA | 34 |
| variabilis | | ATTCAAGAAAAAGAAGATTTTTTACAAAAAATACCACAAATTC | |
| | | AACTGGCTCTCCAGGCTCTTCAATGATAATCAGTTTAGTGAAGA | |
| | | CAAAATTT | |
| Cyanidischyzon | Unclassified | ATGCCACTGACGCGAAGGCGACGACAAAAATCCCGGAGAGGGC | 35 |
| merolae | | TTCACCGGAGACATAGGACGAGGCGGGCGCGACGCAAAGAGCG | |
| | | AGTCATCGAAATCTCCACCCCCAAGTATCGACATCTCGCCCGGT | |
| | | GTTTAGTGCGGAACAG | |
| Cyanidischyzon | Unclassified | ATGTCTCCACGGCCGCAGCCGGCTGCGCCTCCTGCAGCGCAGGG | 36 |
| merolae | | AAGAGCCCGCGGGGGCGCCCCGGCACCCGCTGGCAGACGAGGG | |
| | | GGGGCTGCAGCACCTAGACCGGGGGCGAGGAGACGGGCAGGG | |
| | | CGCAACATCACGAACGGGACGCC | |
| Chlamydomonas | unclassified | ATGTGTAGGAGGTGCCGCATCACGCCACTTTGGCTGGCTGGTCG | 37 |
| reinhardtii | | GAGGATGAAAAAGAGACGACGACGGGTCCTCCGACCCAAAAAG | |
| | | TGCATGATAACAACCCTGTCTCTGGCCAGAACACGGGGTAGGG | |
| | | ATGCGGGCATGAAGGACs | |
| Contarinia | Family 3 | ATGATGTATTGTATGCATGAGGATTCTAGTCATAAAAAGGGTCG | 38 |
| nasturtii | | GCGGCGGACGATGCGGATCAGCTCAAGGGAGTGGGCTTTTCTG | |
| | | ACTCGATCTCGCAAATTTCGACGCCTGTTGAGAAGGCTTAGAAA | |
| | | ACTTAGGCTGTGGACG | |

### Prediction of NLS in Fanzor

[0212] NLStradamus was used with default options to predict NLS domains.

### Prediction of NLS in Fanzors

[0213] NLStradamus was used with default threshold at 0.6 and model option 2 (four-state bipartite model) to predict NLS domains. For background false positive rate determination, a comprehensive search on Uniprot is performed by looking for Homo sapiens cytosolic proteins (with reviewed status) and a total of 1126 proteins are pulled out for analysis. For on target false negative rate determination, the original set of training sequences that include known NLS containing proteins from NLStradamus is used (Nguyen Ba et al 2009). NLS sequences cloned for experimental testing are listed in Table 5.

Prediction of Transposon Associations with Fanzor Systems

[0214] RFSB transposon classifier (Riehl et al. 2022) is used to classify Fanzor-transposon associations by inputting the surrounding 10 kb genomic sequence around the Fanzor protein. The classify mode is used with default parameters to make the prediction. Afterward, all predicted DNA transposon is mapped back to the phylogenetic tree. For all Fanzor nucleases that were classified with transposons, cd-hit is used to cluster these sets of Fanzor proteins with default parameters to find any clusters with two or more sequences for multiple sequence alignments. Then these clusters containing (>2 Fanzor systems) were blasted against all Repbase documented transposons (Bao et al. 2015). Left and right end elements, terminal inverted repeats (TIR), and their associated transposons are then determined by either protein homology to known transposons in Repbase or high similarity of TIR/LE/RE element to known transposon profiles.

Prediction of Fanzor-Associated ncRNA

[0215] Fanzor that were not simply ORF translations were clustered along their entire length at 70% sequence identity and 95% coverage with Mmseqs2 (-min-seq-id 0.7-c 0.95). Each cluster with at least two sequences was subject to ncRNA prediction. For each cluster, the 5′ region of the first exon plus 1.5 kb upstream bases and 3′ region of the last exon plus 1.5 kb downstream bases were cut from sequence. The 5′ and 3′ regions were aligned separately with MAFFT (default options). Each column of the alignment was scored for conservation and the change point in conservation scores was predicted with the R changepoint package to detect a drop in conservation. If the predicted change point was found to be at least 13 bases outside of the exon boundary of every sequence in the alignment, the conserved portion of the exon, plus 11 bases past the change point, were folded with RNAalifold from the ViennaRNA software suite.

### Fanzor and TnpB Protein Purification

[0216] To purify Fanzor or TnpB protein, Rosetta2 DE3 pLys cells were transformed with a twin-strep-sumo tag fused to the N-term of a Fanzor or TnpB construct along with the predicted fRNA/ωRNA driven by a separate vector. Following transformation, single colonies were picked from the agar plate containing antibiotics and picked into a starter culture of 10 mL for overnight incubation at 37 degree Celsius. The starter culture was transferred to 2 L of TB with the designated antibiotics and grown until the OD reached between 0.6-0.8. The culture was moved to 4C for 30 minutes prior to induction with 0.5 mM IPTG induction. The cultures were then grown at 16 degree Celsius overnight and harvested by centrifugation the next day. The pellet is then flash frozen at −80° C. and subsequently homogenized in lysis buffer (0.02M Tris-HCl pH8.0, 0.5M NaCl, 1 mM DTT, and 0.1M cOmplete™, EDTA-free Protease Inhibitor Cocktail (Merck Millipore) with high-pressure sonication for 15 minutes. The homogenized lysates are then centrifuged at 14,000 RPM for 30 minutes at 4° C. The clarified supernatant is isolated from the subsequent bacterial pellet and incubated with Strep-Tactin® XT 4Flow® high capacity resin (Cat. No. 2-5030-010) for 1 hour. Following incubation, the crude solution is loaded onto a Glass Econo-Column® Column for gravity flow chromatography and washed three times with the previously described lysis buffer. To elute tagged protein, 10 units of sumo protease is then added onto the column for on-column cleavage overnight at 4° C. The next day, the eluent is collected and concentrated through an Amicon® Ultra-15 Centrifugal Filter (Cat. No. UFC9030) before continuing to FPLC. To purify desired protein from added sumo protease, the concentrated eluent is loaded onto a Superdex® 200 Increase 10/300 GL gel filtration column (GE Healthcare). The column was equilibrated with running buffer (10 mM HEPES (pH 7.0 at 25° C.), 1 M NaCl, 5 mM MgCl2, 2 mM DTT). The Peak fractions containing RNP are pulled and analyzed by SDS-PAGE. Correct fractions are concentrated again with amicon filter tubes and subsequently buffer is exchanged into storage buffer (0.02M Tris HCL PH8, 0.25M NaCl, 50% glycerol, 2 mM DTT) and stored at −20 for further use. TnpB proteins follow the same purification procedure with the following modifications: T7 express (NEB) pLys strain is used for transformation and subsequent culture.

### Cell-Free Transcription/Translation TAM Screen

[0217] Fanzor protein sequences were E. coli codon optimized using the IDT codon optimization tool, and fRNA scaffolds were synthesized by IDT eBlock gene fragments. Cell-free transcription/translation reactions were carried out using a PURExpress In Vitro Protein Synthesis Kit (NEB) as per the manufacturer's protocol with half-volume reactions, using 75 ng of template for the protein of interest, 125 ng of template for the corresponding fRNA or ωRNA with a guide targeting the TAM library and 30 ng of TAM library plasmid. Reactions were incubated at 37° C. for 4 hours, then quenched by heating up to 95 degree Celcius for 15 minutes and cooling down to 4° C. 10 ug RNase A (Qiagen) is added followed by a 15 min incubation at 50° C. DNA was extracted by PCR purification and adaptors were ligated using an NEBNext Ultra II DNA Library Prep Kit for Illumina (NEB) using the NEBNext Adaptor for Illumina (NEB) as per the manufacturer's protocol. Following adaptor ligation, cleaved products were amplified specifically using one primer specific to the TAM library backbone and one primer specific to the NEBNext adaptor with a 10-cycle PCR using NEBNext High Fidelity 2×PCR Master Mix (NEB) with an annealing temperature of 65° C., followed by a second 12-cycle round of PCR to further add the Illumina i5 adaptor. Amplified libraries were gel extracted, quantified by qubit (Invitrogen) and subjected to paired-end sequencing on an Illumina MiSeq with Read 1 200 cycles, Index 1 8 cycles, Index 2 8 cycles and Read 2 80 cycles. TAMs were extracted and position weight matrix based on the enrichment score was generated and Weblogos were visualized based on this position weight matrix using a custom Python script. All sequencing primers used are listed in Table 6.

TABLE 6
NGS primers relevant for the present disclosure.

| | | SEQ ID |
|---|---|---|
| Name | NGS Primers | NO |
| TAM_NGS_F1 | ACACTCTTTCCCTACACGACGCTCTTCCGATCTCtggaattgtgagcggataacaattt | 39 |
| | cacacagg | |
| TAM_NGS_R | GTGACTGGAGTTCAGACGTGTGCTCTTCCGATCTctgcaaggcgattaagttgggta | 40 |
| | acgcc | |
| Luciferase_Indel_ | ACACTCTTTCCCTACACGACGCTCTTCCGATCTCacgtggagtccaaccctggacc | 41 |
| NGS_F1 | | |
| Luciferase_Indel_ | GTGACTGGAGTTCAGACGTGTGCTCTTCCGATCTtcagcatcgagatccgtggtcgc | 42 |
| NGS_R1 | | |
| EMX1_Fanzor2_ | ACACTCTTTCCCTACACGACGCTCTTCCGATCTCtttgttggagttcgttttcttccttga | 43 |
| NGS_F | aatttcttgg | |
| EMX1_Fanzor2_ | GTGACTGGAGTTCAGACGTGTGCTCTTCCGATCTattgactgtagacctagactacag | 44 |
| NGS_R | accgtcac | |
| HPRT1_Fanzor2_ | ACACTCTTTCCCTACACGACGCTCTTCCGATCTCgggtcacagggcaagactttgtct | 45 |
| NGS_F | C | |
| HPRT1_Fanzor2_ | GTGACTGGAGTTCAGACGTGTGCTCTTCCGATCTtgccaccacgcctggctaatt | 46 |
| NGS_R | | |
| dync1b1_NGS_F | ACACTCTTTCCCTACACGACGCTCTTCCGATCTCatcattccaccaatcaggactcgg | 47 |
| | C | |
| dyne1h1_NGS_R | GTGACTGGAGTTCAGACGTGTGCTCTTCCGATCTccagcctggtcaacctagcgag | 48 |
| | a | |
| b2m_NGS_F | ACACTCTTTCCCTACACGACGCTCTTCCGATCTCccttctccccacagcctccc | 49 |
| b2m_NGS_R | GTGACTGGAGTTCAGACGTGTGCTCTTCCGATCTgctgtaaactagccaggttggga | 50 |
| | atatattgcc | |
| exer4_NGS_F | ACACTCTTTCCCTACACGACGCTCTTCCGATCTCgtctgagtcttcaagttttcactcca | 51 |
| | gctaacac | |
| exer4_NGS_R | GTGACTGGAGTTCAGACGTGTGCTCTTCCGATCTacagtcctaccacgagacataca | 52 |
| | gcaac | |
| CA2_NGS_F | ACACTCTTTCCCTACACGACGCTCTTCCGATCTCagagactcagagtccaagaggg | 53 |
| | aagcc | |
| CA2_NGS_R | GTGACTGGAGTTCAGACGTGTGCTCTTCCGATCTactagggagtggcttatgcacag | 54 |
| | gtatattatgtg | |
| DMD_NGS_F | ACACTCTTTCCCTACACGACGCTCTTCCGATCTCTCCTTCAGTTCTATC | 55 |
| | CATGTTGTTGCAAATGGTAAG | |
| DMD_NGS_R | GTGACTGGAGTTCAGACGTGTGCTCTTCCGATCTTCTTTAATCAATGCT | 56 |
| | TTGTAGTTTTCACTGTATAAATATTTCACC | |
| Grin2b_NGS_F | ACACTCTTTCCCTACACGACGCTCTTCCGATCTCATGTCTGGAATTGAG | 57 |
| | CCAGGTACTGGG | |
| Grin2b_NGS_R | GTGACTGGAGTTCAGACGTGTGCTCTTCCGATCTCATTAACCAGGTAC | 58 |
| | TGGCCCACTATAGGG | |

### Cell-Free Transcription/Translation TAM Screen

[0218] Fanzor protein sequences were E. coli codon optimized using the IDT codon optimization tool, and fRNA scaffolds were synthesized by IDT eBlock gene fragments. Cell-free transcription/translation reactions were carried out using a PURExpress In Vitro Protein Synthesis Kit (NEB) as per the manufacturer's protocol with half-volume reactions, using 75 ng of template for the protein of interest, 125 ng of template for the corresponding fRNA or ωRNA with a guide targeting the TAM library and 30 ng of TAM library plasmid. Reactions were incubated at 37° C. for 4 hours, then quenched by heating up to 95 degree Celcius for 15 minutes and cooling down to 4° C. 10 ug RNase A (Qiagen) is added followed by a 15 min incubation at 50° C. DNA was extracted by PCR purification and adaptors were ligated using an NEBNext Ultra II DNA Library Prep Kit for Illumina (NEB) using the NEBNext Adaptor for Illumina (NEB) as per the manufacturer's protocol. Following adaptor ligation, cleaved products were amplified specifically using one primer specific to the TAM library backbone and one primer specific to the NEBNext adaptor with a 10-cycle PCR using NEBNext High Fidelity 2×PCR Master Mix (NEB) with an annealing temperature of 65° C., followed by a second 12-cycle round of PCR to further add the Illumina i5 adaptor. Amplified libraries were gel extracted, quantified by qubit (Invitrogen) and subjected to paired-end sequencing on an Illumina MiSeq with Read 1 200 cycles, Index 1 8 cycles, Index 2 8 cycles and Read 2 80 cycles. TAMs were extracted and position weight matrix based on the enrichment score was generated and Weblogos were visualized based on this position weight matrix using a custom Python script. All sequencing primers used are listed in table S4.

### In Vitro Biochemical TAM Screen

[0219] 1 uM of purified RNP and 100 ng of the 7N TAM library is incubated at 37 degree Celsius in NEB buffer 3 for 3 hours. Subsequently, reaction is purified and analyzed following the same procedure as cell-free transcription/translation TAM screen. TAM library sequence and guides used are listed in table S5.

### Cell-Free Transcription/Translation Cleavage Assays

[0220] Cell-free transcription/translation reactions were carried out using a PURExpress In Vitro Protein Synthesis Kit (NEB) as per the manufacturer's protocol with half-volume reactions using 75 ng of template for the protein of interest and a 100 ng of fRNA or ωRNA. Reactions were incubated at 37° C. for 4 hours to allow for RNP formation, then placed on ice to quench in vitro transcription/translation. 50-100 ng of target substrate was then added, and the reactions were incubated at the specified temperature for 1 additional hour. Reactions were then quenched by heating up to 95 degrees for 15 minutes and cooling back down to 50-degrees Celcius for addition of 10 ug RNase A (Qiagen) for 10 minutes incubation. DNA was extracted by PCR purification using minElute columns (Qiagen) and run on 6% Novex TBE gels (Thermo Fisher Scientific) as per the manufacturer's protocols, as specified in figures. Gels were stained with 1×SYBR Gold (Thermo Fisher Scientific) for 10-15 min and imaged on a ChemiDoc imager (BioRad) with optimal exposure settings. Each condition was performed twice for replicability.

TABLE 7
TAM library and spacer sequences relevant for the present disclosure.

| | | SEQ |
|---|---|---|
| | | ID |
| Name | NGS Primers | NO |
| TAM Library | gatcaaaggatcttcttgagatcctttttttctgcgcgtaatctgctgcttgcaaacaaaaaaaccaccgctacc | 59 |
| Plasmid | agcggtggtttgtttgccggatcaagagctaccaactctttttccgaaggtaactggcttcagcagagcgcagat | |
| | accaaatactgttcttctagtgtagccgtagttaggccaccacttcaagaactctgtagcaccgcctacatacct | |
| | cgctctgctaatcctgttaccagtggctgctgccagtggcgataagtcgtgtcttaccgggttggactcaagacg | |
| | atagttaccggataagggcagcggtcgggctgaacggggggttcgtgcacacagcccagcttggagcgaacgacc | |
| | tacaccgaactgagatacctacagcgtgagctatgagaaagcgccacgcttcccgaagggagaaaggcggacagg | |
| | tatccggtaagcggcagggtcggaacaggagagcgcacgagggagcttccagggggaaacgcctggtatctttat | |
| | agtcctgtcgggtttcgccacctctgacttgagcgtcgatttttgtgatgctcgtcaggggggcggagcctatgg | |
| | aaaaacgccagcaacgcggcctttttacggttcctggccttttgctggccttttgctcacatgttctttcctgcg | |
| | ttatcccctgattctgtggataaccgtattaccgcctttgagtgagctgataccgctcgccgcagccgaacgacc | |
| | gagcgcagcgagtcagtgagcgaggaagcggaagagcgcccaatacgcaaaccgcctctccccgcgcgttggccg | |
| | attcattaatgcagctggcacgacaggtttcccgactggaaagcgggcagtgagcgcaacgcaattaatgtgagt | |
| | tagctcactcattaggcaccccaggctttacactttatgcttccggctcgtatgttgtgTGGAATTGTGAGCGGA | |
| | TAACAATTTCACACAGGAAACAGCTATGACCATGATTACGCCAAGCTTNNNNNNNGCAGCCACCTC | |
| | CTTGTTATTGGGTACCGAGCTCGAATTCACTGGCCGTCGTTTTACAACG | |
| | TCGTGACTGGGAAAACCCTGGCGTTACCCAACTTAATCGCCTTGCAGca | |
| | catccccctttcgccagctggcgtaatagcgaagaggcccgcaccgatcgcccttcccaacagttgcgcagcctg | |
| | aatggcgaatggcgcctgatgcggtattttctccttacgcaTCTGTGCGGTATTTCACACCGCATA | |
| | TGGTGCACTCTCAGTACAATCTGCTCTGATGCCGCATAGTTAAGCCAG | |
| | CCCCGACACCCGCCAACACCCGCTGACGCGCCCTGACGGGCTTGTCTG | |
| | CTCCCGGCATCCGCTTACAGACAAGCTGTGACCOTCTCcgggagctgcatgtgtc | |
| | agaggttttcaccgtcatcaccgaaacgcgcgagacgaaagggcctcgtgatacgcctatttttataggttaatg | |
| | tcatgataataatggtttcttagacgtcaggtggcacttttcggggaaatgtgcgcggaacccctatttgtttat | |
| | ttttctaaatacattcaaatatgtatccgctcatgagacaataaccctgataaatgcttcaataatattgaaaaa | |
| | ggaagagtatgagtattcaacatttccgtgtcgcccttattcccttttttgcggcattttgccttcctgtttttg | |
| | ctcacccagaaacgctggtgaaagtaaaagatgctgaagatcagttgggtgcacgagtgggttacatcgaactgg | |
| | atctcaacagcggtaagatccttgagagttttcgccccgaagaacgttttccaatgatgagcacttttaaagttc | |
| | tgctatgtggcgcggtattatcccgtattgacgccgggcaagagcaactcggtcgccgcatacactattctcaga | |
| | atgacttggttgagtactcaccagtcacagaaaagcatcttacggatggcatgacagtaagagaattatgcagtg | |
| | tgccataaccatgagtgataacactgcggccaacttacttctgacaacgatcggaggaccgaaggagctaaccgc | |
| | ttttttgcacaacatgggggatcatgtaactcgccttgatcgttgggaaccggagctgaatgaagccataccaaa | |
| | cgacgagcgtgacaccacgatgcctgtagcaatggcaacaacgttgcgcaaactattaactggcgaactacttac | |
| | tctagcttcccggcaacaattaatagactggatggaggcggataaagttgcaggaccacttctgcgctcggccct | |
| | tccggctggctggtttattgctgataaatctggagccggtgagcgtgggtctcgcggtatcattgcagcactggg | |
| | gccagatggtaagccctcccgtatcgtagttatctacacgacggggagtcaggcaactatggatgaacgaaatag | |
| | acagatcgctgagataggtgcctcactgattaagcattggtaactgtcagaccaagtttactcatatatacttta | |
| | gattgatttaaaacttcatttttaatttaaaaggatctaggtgaagatcctttttgataatctcatgaccaaaat | |
| | cccttaacgtgagttttcgttccactgagcgtcagaccccgtagaaaa | |
| 21ntreport | GCAGCCACCTCCTTGTTATTG | 60 |
| EMX1-1 | aaaaaaaagaaaagaaaaaa | 61 |
| EMX1-2 | aagagtggccttgatttgta | 62 |
| EMX1-3 | Baataaaatttaaaaaaaaa | 63 |
| EMX1-4 | gtttccagttttattttgtta | 64 |
| EMX1-5 | gagaaacaaatgaaagggac | 65 |
| DYNC1h1_G1 | gagatggtaggttcttctaa | 66 |
| DYNC1h1_G2 | Batacacatagatatagggtc | 67 |
| DYNC1h1_G3 | aaaaaaacaaaaaaaccaaaa | 68 |
| DYNC1h1_G4 | aacatcaaagtgcactgtcag | 69 |
| DYNC | caaaattcttaattt | 70 |
| B2m_G1 | gtgatcatgtaccctgaata | 71 |
| B2m_G2 | aaagaattttatacacata | 72 |
| B2m_G3 | tacacatatatttagtgtca | 73 |
| B2m_G4 | gtagcactaacacttctctt | 74 |
| B2m_G5 | aatacacttatattcagggt | 75 |
| cxcr4_G1 | tatctgaaaaatgtgtaact | 76 |
| cxcr4_G4 | tatctgaaaaatgtgtaact | 76 |
| cxcr4_G2 | tacgataaataactttt | 77 |
| cxcr4_G3 | agttacacatttttcagata | 78 |
| cxcr4_G5 | attgacttatttatataaat | 79 |
| CA2_G1 | tagtcagaagaagaagtttg | 80 |
| CA2_G2 | cagaaagatccaaacttctt | 81 |
| CA2_G3 | ttcatctgacaacttccttt | 82 |
| CA2_G4 | tagatgaggagacttgtaga | 83 |
| CA2_G5 | attctacaatgatatattgt | 84 |
| DMD_G1 | TATAAATGAATATTCCGTTGT | 85 |
| DMD_G2 | TCCATTTATCTGTTAATGGC | 86 |
| DMD_G3 | CAGTATCATCAGGAAGAATAA | 87 |
| DMD_G4 | TTCTTCCTGATGATACTGTA | 88 |
| DMD_G5 | GTTAAATTTATTCCTCTTTT | 89 |
| GRIN2b_G1 | GCTCCCTAAGGGGACAGACC | 90 |
| GRIN2b_G2 | AGTTTAACTTTATGAAATTGC | 91 |
| GRIN2b_G3 | ACTTTATGAAATTGCCTTTT | 92 |
| GRIN2b_G4 | TTATATGTCAATAATGGTTA | 93 |
| GRIN2b_GS | TATGTCAATAATGGTTATTTC | 94 |

### Small RNA Sequencing

[0221] Heterologous expression in E. coli Rosetta2 chemically competent E. coli were transformed with plasmids containing the locus of interest. A single colony was used to seed a 5 mL overnight culture. Following overnight growth, cultures were spun down, resuspended in 750 μL TRI reagent (Zymo) and incubated for 5 min at room temperature. 0.5 mm zirconia/silica beads (BioSpec Products) were added and the culture was vortexed for approximately 1 minute to mechanically lyse cells. 200 μL chloroform (Sigma Aldrich) was then added, culture was inverted gently to mix and incubated at room temperature for 3 min, followed by spinning at 12000×g at 4° C. for 15 min. The aqueous phase was used as input for RNA extraction using a Direct-zol RNA miniprep plus kit (Zymo). Extracted RNA was treated with 10 units of DNase I (NEB) for 30 min at 37° C. to remove residual DNA and purified again with an RNA Clean & Concentrator-25 kit (Zymo). Ribosomal RNA was removed using a RiboMinus Transcriptome Isolation Kit for bacteria (Thermo Fisher Scientific) as per the manufacturer's protocol using half-volume reactions. The purified sample was then treated with 20 units of T4 polynucleotide kinase (NEB) for 6 h at 37° C. and purified again with an RNA Clean & Concentrator-25 (Zymo) kit. The purified RNA was treated with 20 units of 5′ RNA phosphatase (Lucigen) for 30 min at 37° C. and purified again using an RNA Clean & Concentrator-5 kit (Zymo). Purified RNA was used as input to an NEBNext Small RNA Library Prep for Illumina (NEB) as per the manufacturer's protocol with an extension time of 60 s and 16 cycles in the final PCR. Amplified libraries were gel extracted, quantified by qPCR using a KAPA Library Quantification Kit for Illumina (Roche) on a StepOne Plus machine (Applied Biosystems/Thermo Fisher Scientific) and sequenced on an Illumina NextSeq with Read 1 42 cycles, Read 2 42 cycles and Index 1 6 cycles. Adapters were trimmed using CutAdapt and mapped to loci of interest using BWA-align. Reads were visualized using Genious.

[0222] Ribonucleoprotein: RNPs were purified as described. 100 μL concentrated RNP was used as input. The above protocol was followed with the following modifications: 300 μL TRI reagent (Zymo) and 60 μL chloroform (Sigma Aldrich) were used for RNA extraction.

[0223] PureExpress RNPs: 75 ng of plasmid encoding the Fanzor ORF and 125 ng of the plasmid containing the locus were incubated in 1 unit of pureexpress reactions for 4 hours at 37 degrees Celcius. Afterward, the RNP is affinity purified using the protocol described above for heterologous Rosetta cell protein production and subjected to the same pipeline for small RNA sequencing.

[0224] Chlamydomonas reinhardtii was obtained from the University of Minnesota (CRC). The algae was lysed in trizol with glass beads vigorously shaken for 2 hours at room temperature. Then the above protocol was followed with the following modifications: Ribosomal RNA was removed using a plant specific ribominus rRNA depletion kits as per the manufacturer's protocol and the rRNA-depleted sample was purified using Agencourt RNAClean XP beads (Beckman Coulter) prior to T4 PNK treatment. T4 PNK treatment was performed for 1.5 h and purified with an RNA Clean & Concentrator-5 kit (Zymo). Final PCR in the small RNA library prep contained 10 cycles.

### Collateral Activity Testing

[0225] DNase alert and Rnase alert were purchased from IDT. 1 uM of RNP or 10 uL of PureExpress generated RNP and 10 nM of DNA target containing either the target spacer or a scramble spacer are diluted in 1× DNase/Rnase alert reaction buffer into 50 uL reactions. The solution is mixed well in the reaction test tube and subsequently aliquoted into 384 well plates. The plates are loaded onto applied biosystems qPCR machines and reactions were ran at 37 degree Celsius for ApmHNuc, AmpFNuc2, DrpFNuc2, BaaFNuc2, MemFNuc2, and Isdra2 TnpB, and 60 degree Celsius for TvoTnpB. The SYBR and HEX channel fluorescence intensity is recorded every minute for a duration of 60 minutes. The intensity is normalized by subtracting the non-target DNA sequence from the target DNA sequence group. A positive control DNase (2 uL) and RNAse (2 uL) is ran along with the Fanzor/TnpB group as a positive control to monitor the assay.

### Cloning PAM/TAM Libraries

[0226] Target sequences with 7N degenerate flanking sequences were synthesized by IDT and amplified by PCR with NEBNext High Fidelity 2× Master Mix (NEB). Backbone plasmid was digested with restriction enzymes (pUC19: KPNI and HindIII, Thermo Fisher Scientific) and treated with FastAP alkaline phosphatase (Thermo Fisher Scientific). The amplified library fragment was inserted into the backbone plasmid by Gibson assembly at 50° C. for 1 hour using 2× Gibson Assembly Master Mix (NEB) with an 8:1 molar ratio of insert:vector. The Gibson assembly reaction was then isopropanol precipitated by the addition of an equal volume of isopropanol (Sigma Aldrich), the final concentration of 50 mM NaCl, and 1 μL of GlycoBlue nucleic acid co-precipitant (Thermo Fisher Scientific). After a 15 min incubation at room temperature, the solution was spun down at max speed at 4° C. for 15 min, then the supernatant was pipetted off and the pelleted DNA has resuspended in 12 μL TE and incubated at 50° C. for 10 minutes to dissolve. 2 μL were then transformed by electroporation into Endura Electrocompetent F co/i (Lucigen) as per the manufacturer's instructions, recovered by shaking at 37° C. for 1 h, then plated across 5 22.7 cm×22.7 cm BioAssay plates with the appropriate antibiotic resistance. After 12-16 hours of growth at 37° C., cells were scraped from the plates and midi- or maxi-prepped using a NucleoBond Midi- or Maxi-prep kit (Machery Nagel). The sequence is provided in Table 7.

### In Vitro TAM Discovery

[0227] 1 μM of RNP and 25 ng of TAM library plasmid were incubated at 37 degree for 2 hours in NEB Buffer 3. Reactions were quenched by placing at 4° C. or on ice and adding 10 ug Rnase A (Qiagen) and 8 units Proteinase K (NEB) each followed by a 5 min incubation at 37° C. DNA was extracted by PCR purification and adaptors were ligated using an NEBNext Ultra II DNA Library Prep Kit for Illumina (NEB) using the NEBNext Adaptor for Illumina (NEB) as per the manufacturer's protocol. Following adaptor ligation, cleaved products were amplified specifically using one primer specific to the TAM library backbone and one primer specific to the NEBNext adaptor with a 12-cycle PCR using NEBNext High Fidelity 2×PCR Master Mix (NEB) with an annealing temperature of 63° C., followed by a second 20-cycle round of PCR to further add the Illumina i5 adaptor. Amplified libraries were gel extracted, quantified by qubit dsDNA kit (Invitrogen) and subject to single-end sequencing on an Illumina MiSeq with Read 1 200 cycles, Index 1 8 cycles and Index 2 8 cycles. TAMs were extracted and visualized by Weblogo3. Alternatively, a primer set targeting the TAM library plasmid is used to amplify the uncleaved product for 12 cycle and followed by a second 20 cycle rounds of PCR to add the Illumina i5 adaptor. Amplified libraries were gel extracted and subjected to single end sequencing on an Illumina MiSeq with Read 1 200 cycles, Index 1 8 cycles and Index 2 8 cycles. Depletion of TAMs were calculated by comparing to a non-targeting RNP as control and normalized to the original plasmid library distribution. Primers used are listed in Table 8.

TABLE 8
Additional sequences relevant for the present disclosure

| SEQ ID | | |
|---|---|---|
| NO: | NGS Primers | Name |
| 39 | ACACTCTTTCCCTACACGACGCTCTTCCGATCTCtggaattgtga | TAM_NGS_F1 |
| | gcggataacaatttcacacagg | |
| 40 | GTGACTGGAGTTCAGACGTGTGCTCTTCCGATCTctgcaaggc | TAM_NGS_R |
| | gattaagttgggtaacgcc | |
| 41 | ACACTCTTTCCCTACACGACGCTCTTCCGATCTCacgtggagtc | Luciferase_Indel_ |
| | caaccctggacc | NGS_F1 |
| 42 | GTGACTGGAGTTCAGACGTGTGCTCTTCCGATCTtcagcatcg | Luciferase_Indel_ |
| | agatccgtggtcgc | NGS_R1 |

### In Vitro Cleavage Assays

[0228] Double-stranded DNA (dsDNA) substrates were produced by PCR amplification of pUC19 plasmids containing the target sites and the TAM sequences. All ωRNA and fRNA used in the biochemical assays was in vitro transcribed using the HiScribe T7 Quick High Yield RNA Synthesis kit (NEB) from the DNA templates purchased from IDT. Target cleavage assays performed with ApmHNuc contained 10 nM of DNA substrate, 1 μM of protein, and 4 μM of fRNA in a final 1× reaction buffer of NEB Buffer 3. Assays were allowed to proceed at 37° C. for 2 hour, then briefly shifted to 50° C. for 5 min, and immediately placed on ice to help relax the RNA structure prior to RNA digestion. Reactions were then treated with Rnase A (Qiagen), and Proteinase K (NEB), and purified using a PCR cleanup kit (Qiagen). DNA was resolved by gel electrophoresis on Novex 6% TBE polyacrylamide gels (Thermo Fisher Scientific). 1 uM of purified RNP and 100 ng of the 7N TAM library is incubated at 37 degree Celsius in NEB buffer 3 for 3 hours. Subsequently, reaction is purified and analyzed following the same procedure as cell-free transcription/translation TAM screen. TAM library sequence and guides used are listed in Table 7.

### Cleavage Position Mapping by Next Generation Sequencing

[0229] 1 μM of RNP and 100 ng of the target plasmid were incubated at 37 degree for 3 hours in NEB Buffer 3. Reactions were quenched by placing at 4° C. or on ice and adding 10 ug RNase A (Qiagen) and 8 units Proteinase K (NEB) each followed by a 5 min incubation at 37° C. DNA was extracted by PCR purification and adaptors were ligated using an NEBNext Ultra II DNA Library Prep Kit for Illumina (NEB) using the NEBNext Adaptor for Illumina (NEB) as per the manufacturer's protocol. Following adaptor ligation, cleaved products were amplified specifically using one primer specific to the target plasmid (one on 5′ site of the cleavage and one on 3′ side of the cleavage) and one primer specific to the NEBNext adaptor with a 12-cycle PCR using NEBNext High Fidelity 2×PCR Master Mix (NEB) with an annealing temperature of 63° C., followed by a second 20-cycle round of PCR to further add the Illumina i5 adaptor. Amplified libraries were gel extracted, quantified by qubit dsDNA kit (Invitrogen) and subject to single-end sequencing on an Illumina MiSeq with Read 1 100 cycles, Index 1 8 cycles and Index 2 8 cycles. All sequencing primers are listed in Table 6.

### Confocal Images of Nuclear Localization

[0230] The N-terminal predicted NLS sequences of Fanzor is cloned onto N-terminal of sfGFP by Gibson assembly into a pCMV promoter backbone (NLS sequences cloned are listed in Table 5). 24 hours before transfection, 15,000 HEK293FT cells were plated onto a glass bottom 96 well plates pre-coated with poly-D lysine. 100 ng of NLS-sfGFP construct is transfected into HEK293FT cells using lipofectamine 3000 and 24 hours after transfection, cells were fixed and permeabilized using Fix and Pern kit (Thermofisher) and subsequently stained by either DAPI or SYTO-Red nuclear stain (Thermofisher). All wells were measured via confocal microscopy at room temperature. Cells were focused in the 488 nm channel on the basis of the sfGFP protein. For each well, a 2×2 field of view image at 20× magnification was collected under the following settings and stitched around the center point. Images were collected in 488 nm (32.8% power, 100 ms exposure), 359 nm (35.2% power, 100 ms exposure), and 633 nm (80% power, 100 ms exposure).

### Mammalian Cell Culture and Transfection

[0231] Mammalian cell culture experiments were performed in the HEK293FT line (Thermo Fisher) grown in Dulbecco's Modified Eagle Medium with high glucose, sodium pyruvate, and GlutaMAX (Thermo Fisher), additionally supplemented with 1× penicillin-streptomycin (Thermo Fisher), 10 mM HEPES (Thermo Fisher), and 10% fetal bovine serum (VWR Seradigm). All cells were maintained at confluency below 80%.

[0232] All transfections were performed with Lipofectamine 3000 (Thermo Fisher). Cells were plated 16-20 hours prior to transfection to ensure 90% confluency at the time of transfection. For 96-well plates, cells were plated at 20,000 cells/well. For each well on the plate, transfection plasmids were combined with OptiMEM I Reduced Serum Medium (Thermo Fisher) to a total of 10 μL.

### Mammalian Genome Editing

[0233] fRNA scaffold backbones were cloned into a pUC19-based human U6 expression backbone and human codon-optimized Fanzor proteins were cloned into pCMV-based or pCAG-based destination vector by Gibson Assembly. Then 50 ng of protein expression construct, 50 ng of the corresponding guide construct and an optionally 20 ng of luciferase reporter were transfected in one well of a 96-well plate using lipofectamine 3000 transfection reagent. After 48 hours, reporter DNA was harvested by washing the cells once in 1×DPBS (Sigma Aldrich) and resuspended in 50 μL QuickExtract DNA Extraction Solution (Lucigen) and cycled at 65° C. for 15 min, 68° C. for 15 min then 95° C. for 10 min to lyse cells. 2.5 μL of lysed cells were used as input into each PCR reaction. For library amplification, target reporter regions were amplified with a 12-cycle PCR using NEBNext High Fidelity 2×PCR Master Mix (NEB) with an annealing temperature of 63° C. for 15 s, followed by a second 18-cycle round of PCR to add Illumina adapters and barcodes. The libraries were gel extracted and subject to single-end sequencing on an Illumina MiSeq with Read 1 220 cycles, Index 1 8 cycles, Index 2 8 cycles and Read 2 80 cycles. Insertion/deletion (indel) frequency was analyzed using CRISPResso2. All sequencing primers are listed in Table 6. Guides used for genomic target are listed in Table 7.

### REFERENCES

[0234] 1. V. V. Kapitonov, K. S. Makarova, E. V. Koonin, ISC, a Novel Group of Bacterial and Archaeal DNA Transposons That Encode Cas9 Homologs. J. Bacteriol. 198, 797-807 (2015).
[0235] 2. S. He, C. Guynet, P. Siguier, A. B. Hickman, F. Dyda, M. Chandler, B. Ton-Hoang, IS200/IS605 family single-strand transposition: mechanism of IS608 strand transfer. Nucleic Acids Res. 41, 3302-3313 (2013).
[0236] 3. B. Zetsche, J. S. Gootenberg, O. O. Abudayyeh, 1. M. Slaymaker, K. S. Makarova, P. Essletzbichler, S. E. Volz, J. Joung, J. van der Oost, A. Regev, E. V. Koonin, F. Zhang, Cpf1 is a single RNA-guided endonuclease of a class 2 CRISPR-Cas system. Cell. 163, 759-771 (2015).
[0237] 4. I. Fonfara, H. Richter, M. Bratovič, A. Le Rhun, E. Charpentier, The CRISPR-associated DNA-cleaving enzyme Cpf1 also processes precursor CRISPR RNA. Nature. 532, 517-521 (2016).
[0238] 5. L. B. Harrington, D. Burstein, J. S. Chen, D. Paez-Espino, E. Ma, I. P. Witte, J. C. Cofsky, N. C. Kyrpides, J. F. Banfield, J. A. Doudna, Programmed DNA destruction by miniature CRISPR-Cas14 enzymes. Science (2018), doi:10.1126/science.aav4294.
[0239] 6. T. Karvelis, G. Druteika, G. Bigelyte, K. Budre, R. Zedaveinyte, A. Silanskas, D. Kazlauskas, C. Venclovas, V. Siksnys, Transposon-associated TnpB is a programmable RNA-guided DNA endonuclease. Nature. 599, 692-696 (2021).
[0240] 7. W. Bao, J. Jurka, Homologues of bacterial TnpB_IS605 are widespread in diverse eukaryotic transposable elements. Mob. DNA. 4, 12 (2013).
[0241] 8. H. Altae-Tran, S. Kannan, F. E. Demircioglu, R. Oshiro, S. P. Nety, L. J. McKay, M. Dlakid, W. P. Inskeep, K. S. Makarova, R. K. Macrae, E. V. Koonin, F. Zhang, The widespread IS200/IS605 transposon family encodes diverse programmable RNA-guided endonucleases. Science. 374, 57-65 (2021).
[0242] 9. K. Riehl, C. Riccio, E. A. Miska, M. Hemberg, TransposonUltimate: software for transposon classification, annotation and detection. Nucleic Acids Res. 50, e64 (2022).
[0243] 10. S. P. Nety, H. Altae-Tran, S. Kannan, F. E. Demircioglu, G. Faure, S. Hirano, K. Mears, Y. Zhang, R. K. Macrae, F. Zhang, The Transposon-Encoded Protein TnpB Processes Its Own mRNA into ωRNA for Guided Nuclease Activity. CRISPR J. 6, 232-242 (2023).
[0244] 11. C. Meers, H. Le, S. R. Pesari, F. T. Hoffmann, M. W. G. Walker, J. Gezelle, S. H. Sternberg, Transposon-encoded nucleases use guide RNAs to selfishly bias their inheritance. bioRxiv (2023), p. 2023.03.14.532601.
[0245] 12. R. Nakagawa, H. Hirano, S. N. Omura, S. Nety, S. Kannan, H. Altae-Tran, X. Yao, Y. Sakaguchi, T. Ohira, W. Y. Wu, H. Nakayama, Y. Shuto, T. Tanaka, F. K. Sano, T. Kusakizako, Y. Kise, Y. Itoh, N. Dohmae, J. van der Oost, T. Suzuki, F. Zhang, O. Nureki, Cryo-EM structure of the transposon-associated TnpB enzyme. Nature. 616, 390-397 (2023).
[0246] 13. G. Sasnauskas, G. Tamulaitiene, G. Druteika, A. Carabias, A. Silanskas, D. Kazlauskas, Č. Venclovas, G. Montoya, T. Karvelis, V. Siksnys, TnpB structure reveals minimal functional core of Cas12 nuclease family. Nature. 616, 384-389 (2023).
[0247] 14. J. S. Chen, E. Ma, L. B. Harrington, M. Da Costa, X. Tian, J. M. Palefsky, J. A. Doudna, CRISPR-Cas12a target binding unleashes indiscriminate single-stranded DNase activity. Science. 360, 436-439 (2018).
[0248] 15. O. O. Abudayyeh, J. S. Gootenberg, S. Konermann, J. Joung, I. M. Slaymaker, D. B. T. Cox, S. Shmakov, K. S. Makarova, E. Semenova, L. Minakhin, K. Severinov, A. Regev, E. S. Lander, E. V. Koonin, F. Zhang, C2c2 is a single-component programmable RNA-guided RNA-targeting CRISPR effector. Science. 353, aaf5573 (2016).
[0249] 16. M. Boyer, N. Yutin, I. Pagnier, L. Barrassi, G. Fournous, L. Espinosa, C. Robert, S. Azza, S. Sun, M. G. Rossmann, M. Suzan-Monti, B. La Scola, E. V. Koonin, D. Raoult, Giant Marseillevirus highlights the role of amoebae as a melting pot in emergence of chimeric microorganisms. Proc. Natl. Acad. Sci. U.S.A 106, 21848-21853 (2009).
[0250] 17. G. Bigelyte, J. K. Young, T. Karvelis, K. Budre, R. Zedaveinyte, V. Djukanovic, E. Van Ginkel, S. Paulraj, S. Gasior, S. Jones, L. Feigenbutz, G. S. Clair, P. Barone, J. Bohn, A. Acharya, G. Zastrow-Hayes, S. Henkel-Heinecke, A. Silanskas, R. Seidel, V. Siksnys, Miniature type V-F CRISPR-Cas nucleases enable targeted DNA modification in cells. Nat. Commun. 12, 6191 (2021).
[0251] 18. Z. Wu, Y. Zhang, H. Yu, D. Pan, Y. Wang, Y. Wang, F. Li, C. Liu, H. Nan, W. Chen, Q. Ji, Programmed genome editing by a miniature CRISPR-Cas12f nuclease. Nat. Chem. Biol. 17, 1132-1138 (2021).
[0252] 19. X. Xu, A. Chemparathy, L. Zeng, H. R. Kempton, S. Shang, M. Nakamura, L. S. Qi, Engineered miniature CRISPR-Cas system for mammalian genome regulation and editing. Mol. Cell. 0 (2021), doi.10.1016/j.molcel.2021.08.008.
[0253] 20. D. Y. Kim, J. M. Lee, S. B. Moon, H. J. Chin, S. Park, Y. Lim, D. Kim, T. Koo, J.-H. Ko, Y.-S. Kim, Efficient CRISPR editing with a hypercompact Cas12fl and engineered guide RNAs delivered by adeno-associated virus. Nat. Biotechnol., 1-9 (2021).
[0254] 21. S. Shmakov, A. Smargon, D. Scott, D. Cox, N. Pyzocha, W. Yan, O. O. Abudayyeh, J. S. Gootenberg, K. S. Makarova, Y. I. Wolf, K. Severinov, F. Zhang, E. V. Koonin, Diversity and evolution of class 2 CRISPR-Cas systems. Nat. Rev. Microbiol. 15, 169-182 (2017).
[0255] 22. S. N. Takeda, R. Nakagawa, S. Okazaki, H. Hirano, K. Kobayashi, T. Kusakizako, T. Nishizawa, K. Yamashita, H. Nishimasu, O. Nureki, Structure of the miniature type V-F CRISPR-Cas effector enzyme. Mol. Cell. 81, 558-570.e3 (2021).
[0256] 23. A. N. Nguyen Ba, A. Pogoutse, N. Provart, A. M. Moses, NLStradamus: a simple Hidden Markov Model for nuclear localization signal prediction. BMC Bioinformatics. 10, 202 (2009).
[0257] 24. D. C. Swarts, K. Makarova, Y. Wang, K. Nakanishi, R. F. Ketting, E. V. Koonin, D. J. Patel, J. van der Oost, The evolutionary journey of Argonaute proteins. Nat. Struct. Mol. Biol. 21, 743-753 (2014).
[0258] 25. P. D. Hsu, E. S. Lander, F. Zhang, Development and applications of CRISPR-Cas9 for genome engineering. Cell. 157, 1262-1278 (2014).
[0259] 26. F. Hille, H. Richter, S. P. Wong, M. Bratovi6, S. Ressel, E. Charpentier, The Biology of CRISPR-Cas: Backward and Forward. Cell. 172, 1239-1259 (2018).
[0260] 27. J. A. Doudna, E. Charpentier, The new frontier of genome engineering with CRISPR-Cas9. Science. 346, 1258096 (2014).
[0261] 28. J. Strecker, A. Ladha, Z. Gardner, J. L. Schmid-Burgk, K. S. Makarova, E. V. Koonin, F. Zhang, RNA-guided DNA insertion with CRISPR-associated transposases. Science (2019), doi:10.1126/science.aax9181.
[0262] 29. S. E. Klompe, P. L. H. Vo, T. S. Halpin-Healy, S. H. Sternberg, Transposon-encoded CRISPR-Cas systems direct RNA-guided DNA integration. Nature. 571, 219-225 (2019).
[0263] 30. G. J. Hannon, RNA interference. Nature. 418, 244-251 (2002).
[0264] 31. G. Hutvagner, M. J. Simard, Argonaute proteins: key players in RNA silencing. Nat. Rev. Mol. Cell Biol. 9, 22-32 (2008).
[0265] 32. M. Saito, P. Xu, G. Faure, S. Maguire, S. Kannan, H. Altae-Tran, S. Vo, A. Desimone, R. K. Macrae, F. Zhang, Fanzor is a eukaryotic programmable RNA-guided endonuclease. Nature (2023), doi:10.1038/s41586-023-06356-2.
[0266] 33. P. López-Garcia, D. Moreira, The symbiotic origin of the eukaryotic cell. C. R. Biol. 346, 55-73 (2023).
[0267] 34. M. Boyer, N. Yutin, 1. Pagnier, L. Barrassi, G. Fournous, L. Espinosa, C. Robert, S. Azza, S. Sun, M. G. Rossmann, M. Suzan-Monti, B. La Scola, E. V. Koonin, D. Raoult, Giant Marseillevirus highlights the role of amoebae as a melting pot in emergence of chimeric microorganisms. Proc. Natl. Acad. Sci. U.S.A 106, 21848-21853 (2009).
[0268] 35. C. Pasternak, R. Dulermo, B. Ton-Hoang, R. Debuchy, P. Siguier, G. Coste, M. Chandler, S. Sommer, ISDra2 transposition in Deinococcus radiodurans is downregulated by TnpB. Mol. Microbiol. 88, 443-455 (2013).
[0269] 36. C. Meers, H. Le, S. R. Pesari, F. T. Hoffmann, M. W. G. Walker, J. Gezelle, S. H. Sternberg, Transposon-encoded nucleases use guide RNAs to selfishly bias their inheritance. bioRxiv (2023), doi.10.1101/2023.03.14.532601.
[0270] 37. W. Bao, K. K. Kojima, O. Kohany, Repbase Update, a database of repetitive elements in eukaryotic genomes. Mob. DNA. 6, 11 (2015).
[0271] 38. J. A. Rees, K. Cranston, Automated assembly of a reference taxonomy for phylogenetic data synthesis. Biodivers Data J, e12581 (2017).

[0272] The foregoing written specification is considered to be sufficient to enable one skilled in the art to practice the invention. The present invention is not to be limited in scope by examples provided, since the examples are intended as a single illustration of one aspect of the invention and other functionally equivalent embodiments are within the scope of the invention. Various modifications of the invention in addition to those shown and described herein will become apparent to those skilled in the art from the foregoing description and fall within the scope of the appended claims. The advantages and objects of the invention are not necessarily encompassed by each embodiment of the invention.

1-77. (canceled)

78. A non-naturally occurring, engineered composition comprising:
(a) a Fanzor polypeptide comprising a RuvC domain; and
(b) a fRNA molecule comprising a scaffold and a reprogrammable target spacer sequence,
wherein the fRNA molecule is capable of forming a complex with the Fanzor polypeptide and directing the Fanzor polypeptide to a target polynucleotide sequence.

79. The composition of claim 78, wherein the RuvC domain further comprises a RuvC-I subdomain, a RuvC-II subdomain, and a RuvC-III subdomain, wherein the RuvC-II subdomain is a rearranged RuvC-II subdomain.

80. The composition of claim 78, wherein the Fanzor polypeptide comprises about 200 to about 2212 amino acids.

81. The composition of claim 78, wherein the reprogrammable target spacer sequence comprises about 12 to about 22 nucleotides.

82. The composition of claim 78, wherein the scaffold comprises about 21 to about 1487 nucleotides.

83. The composition of claim 78, wherein the complex binds a target adjacent motif (TAM) sequence 5′ of the target polynucleotide sequence.

84. The composition of claim 83, wherein the TAM sequence comprises GGG, TTTT, TAT, TTG, TMTA, TA, TTA, or TGAC.

85. The composition of claim 78, wherein the target polynucleotide is DNA.

86. The composition of claim 78, wherein the Fanzor polypeptide is selected from a sequence listed in Table 1 or Table 4.

87. The composition of claim 78, wherein the Fanzor polypeptide shares at least 50%, at least 55%, at least 60%, at least 65%, at least 70%, at least 75%, at least 80%, at least 85%, at least 90%, at least 95%, at least 99%, or 100% sequence identity with a Fanzor polypeptide listed in Table 1 or Table 4.

88. The composition of claim 78, wherein
(a) the Fanzor polypeptide is a Fanzor1 polypeptide or a Fanzor2 polypeptide; and/or
(b) the Fanzor polypeptide further comprises a nuclear localization signal (NLS) and/or a helix-turn-helix (HTH) domain.

89. The composition of claim 78, wherein (a) and (b) are comprised by one or more vectors.

90. The composition of claim 78, further comprising one or more of a donor template comprising a donor sequence, optionally for use in homology-directed repair (HDR), a linear insert sequence, optionally for use in non-homologous end joining-based insertion, a reverse transcriptase, optionally for use in prime editing, a recombinase, optionally for use for integration, a transposase, optionally for use for integration, an integrase, optionally for use for integration, a deaminase, optionally for use of base-editing, a transcriptional activator, optionally for use of targeted gene activation, a transcriptional repressor, optionally for use of targeted gene repression, and/or a transposon, optionally for RNA guided transposition.

91. The composition of claim 90, wherein the linear insert sequence comprises DNA or RNA, optionally wherein the RNA is mRNA.

92. The composition of claim 90, wherein
(a) the linear insert is comprised by a viral vector, optionally wherein the viral vector is Adeno-associated viral (AAV) vector, a virus, optionally wherein the virus if an Adenovirus, a lentivirus, a herpes simplex virus; and/or a lipid nanoparticle;
(b) the integration comprises programmable addition via site-specific targeting elements (PASTE); and/or
(c) the transposon is a eukaryotic transposon, optionally wherein the eukaryotic transposon is CMC, Copia, ERV, Gypsy, hAT, helitron, Zaor, Sola, LINE, Tc1-Mariner, Novosib, Crypton, or EnSpm.

93. An engineered cell comprising:
(a) a Fanzor polypeptide comprising an RuvC domain; and
(b) a fRNA molecule comprising a scaffold and a reprogrammable target spacer sequence, wherein the fRNA molecule is capable of forming a complex with the Fanzor polypeptide and directing the Fanzor polypeptide to a target polynucleotide sequence.

94. The engineered cell of claim 93, wherein the engineered cell is a mammalian cell, optionally wherein the mammalian cell is a human cell.

95. The engineered cell of claim 93, further comprising one or more of a donor template comprising a donor sequence, optionally for use in homology-directed repair (HDR), a linear insert sequence, optionally for use in non-homologous end joining-based insertion, a reverse transcriptase, optionally for use in prime editing, a recombinase, optionally for use for integration, a transposase, optionally for use for integration, an integrase, optionally for use for integration, a deaminase, optionally for use of base-editing, a transcriptional activator, optionally for use of targeted gene activation, a transcriptional repressor, optionally for use of targeted gene repression, and/or a transposon, optionally for RNA guided transposition.

96. The engineered cell of claim 95, wherein the linear insert sequence comprises DNA or RNA, optionally wherein the RNA is mRNA.

97. The engineered cell of claim 95, wherein
(a) the linear insert is comprised by a viral vector, optionally wherein the viral vector is Adeno-associated viral (AAV) vector, a virus, optionally wherein the virus is an Adenovirus, a lentivirus, a herpes simplex virus; and/or a lipid nanoparticle;
(b) the integration comprises programmable addition via site-specific targeting elements (PASTE); and/or
(c) the transposon is a eukaryotic transposon, optionally wherein the eukaryotic transposon is CMC, Copia, ERV, Gypsy, hAT, helitron, Zator, Sola, LINE, Tc1-Mariner, Novosib, Crypton, or EnSpm.

98. A method of modifying a target polynucleotide sequence in a cell, comprising delivering to the cell
(a) a nucleic acid encoding a Fanzor polypeptide comprising an RuvC domain; and
(b) a nucleic acid encoding a fRNA molecule comprising a scaffold and a reprogrammable target spacer sequence,
wherein the fRNA molecule is capable of forming a complex with the Fanzor polypeptide and directing the Fanzor polypeptide to a target polynucleotide sequence.

99. The method of claim 98, wherein the modifying comprises cleavage of the target polynucleotide sequence, optionally wherein the target polynucleotide sequence is DNA.

100. The method of claim 99, wherein the cleavage occurs within the target polynucleotide near the 3′ end of the target polynucleotide sequence, about −6 to about +3 nucleotides relative to the 3′ end of the target polynucleotide sequence, or within a TAM sequence.

101. The method of claim 98, wherein one or more mutations comprising substitutions, deletions, and insertion are introduced into the target polynucleotide sequence.

102. The method of claim 98, wherein (a) and (b) are delivered to the cell together.

103. The method of claim 98, wherein (a) and (b) are delivered to the cell separately.

104. The method of claim 98, wherein the delivering to a cell occurs
(a) in vivo;
(b) ex vivo; or
(c) in vitro.

105. The method of claim 98, wherein the cell is a mammalian cell, a human cell, a eukaryotic cell, a prokaryotic cell, a plant cell, a bacterial cell, a fungal cell, a yeast cell, a rodent cell, or a primate cell.

106. A composition comprising a stabilized Fanzor polypeptide comprising an RuvC domain, comprising one or more mutations relative to wildtype Fanzor polypeptide, wherein the mutations stabilize the Fanzor polypeptide.

107. A method of modifying a target polynucleotide sequence in a cell, comprising:
(a) delivering to the cell the composition of claim 106; and
(b) separately delivering to the cell a fRNA molecule.

The application's sequence listing, which the Patent Office published only in electronic form, follows.

SEQUENCE LISTING (5030 sequences)

SEQ ID NO: 1 - protein, 520 aa, Acanthamoeba polyphaga mimivirus
MKEAVKNVKPKVPAKKRIITGSKTKKKVFVKKKPPDKKPLKKPVKKTVKTYKLKSIYVSNKDLKMSKWIPTPKKEFTEIETNSWYEHRKFENPNGSPIQSYNKIVPVVPPESIKQQNLANKRKKTNRPIVFISSEKIRIYPTKEQQKILQTWFRLFACMYNSSIDYINSKKVVLESGRINVAATRKVCNKISVRKALKTIRDNLIKSTNPSIMTHIMDEAIGLACSNYKTCLTNYIEGQIKKFDIKPWSISKRRKIIVIEPGYFKGNSFCPTVFPKMKSSKPLIMIDKTVTLQYDSDTRKYILFVPRVTPKYSVNKEKNSCGIDPGLRDFLTVYSENETQSICPIEIVVNTTKNEYKKIDKINEIIKTKPNLNSKRKKKLNRGLRKYHRRVTNKMKDMHYKVSHELVNTFDKICIGKLNVKSILSKANTVLKSALKRKLATLSFYRFTQRLTHMGYKYGTEVVNVNEYLTTKTCSNCGKIKDLGASKIYECESCGMYADRDENAAKNILKVGLKPWYKQK

SEQ ID NO: 2 - protein, 830 aa, Chlamydomonas reinhardtii
MAPKRRRDEAEKAEEEKDHTTSTKCGLAGLLSEKIEADGVAVTREESLAAVDFLVAALTRLRFEALCLLGLVAVRMCEDARREGQGLQPHCATCRRLRKTELVEDDMYAAICAVSVCDLTEQGRKRGRPSKRDQHPEDDLFRHVCEEHFPRDEEAAGARVNRSGLTPFLPPLSKGVFTNVKNHYAANFAAWLARSFRCRIDDELRELRTPATKKLDKLAWSMAHAVLYDGELEQPRWWVGWAQGAAGAAAAAAAQGAGPAGGAAAAQAWTALVDYVNAQRASKRAAELLLREVKGAQATYKKASTRHMEWAAEILAGLEARRDQLGAQVQQLTQAQPLTREDTQRLASLRRELHRARPFTLTPSPSFAPIYVPLDNTSMARLPGLLPTLARRHGEVFAGAGAGAVAPSSFVQAAFGGGGMQSSATLNAVGWGLFQLGGVTSRNAPFANYITTDGVACSVAREAHNKPLANLKPATAPADAEELCTLEEMKATQIIGVDPCGGGNWFMAARSPLYQPGPWAWEGVGPAQRYLLELHDKQLDEELFPGQLPPEPRRRRKGVHRRKQSKHWQPRARTARRRRQKRGRFHMSMGHWRHMSGLERLQPNRPQLAPALQAYVGGIPTAATASAARFEERLRYLFASGAAGQAAGGPAEAGPRGAVHVLWHYHFSAFRRKRWAAFIQRDRALHRVAKQLTGGRPKEEVVVGWGSWAFQGGKGGSPISVRGGRAPTGRLIKLLRERYAKHVFIIDEYKTSKTCYNCGCQEMAIKRLGGLKEGQRPWSVKVCNDCLTTWNRDVSAANVIRVLLLLKLMGFERPTKLQRPPWPPAAAGPG

SEQ ID NO: 3 - protein, 434 aa, Thermoplasma volcanium
MKRANAVKLIVGKETHEKLKELAIVAAKCWNEVNWLRMQQFKEGERVDFSKTEKEVYEKYKQILKVNTQQVARKNAESWRSFFSLIEEKKGKLPKWFKPRPPGYWKDKSGKYKMLIIIRNDRYEIDEEKRIIYLKDFKLSLSFNGKLKWRGKQGRLEIIYNEARRSWYAYIPVEVQNDVKAEDKLKASIDLGIINLATVYVEDGSWYIFKGGSVLSQYEYYSKRISVAQKTLARHKQGRSREMKLLHEKRKRFLKHALNSMVRKIMEEFKNKGVGEIAIGYPKEISKDHGNKLTVNFWNYGYIIRRFEGVGEELGVKVVKVDEAWTSKTCSLCGEAHDDGRIKRGLYRCLRIGKVINADLNGAINILHIPESLGAGSRGQLTVRDRGNGLKTQPAVYRWTNGAGWVSSPTSYEVMKMKAVNCKPMNRHKGTFTL

SEQ ID NO: 4 - protein, 408 aa, Deinococcus radiodurans
MIRNKAFVVRLYPNAAQTELINRTLGSARFVYNHFLARRIAAYKESGKGLTYGQTSSELTLLKQAEETSWLSEVDKFALQNSLKNLETAYKNFFRTVKQSGKKVGFPRFRKKRTGESYRTQFTNNNIQIGEGRLKLPKLGWVKTKGQQDIQGKILNVTVRRIHEGHYEASVLCEVEIPYLPAAPKFAAGVDVGIKDFAIVTDGVRFKHEQNPKYYRSTLKRLRKAQQTLSRRKKGSARYGKAKTKLARIHKRIVNKRQDFLHKLTTSLVREYEIIGTGHLKPDNMRKNRRLALSISDAGWGEFIRQLEYKAAWYGRLVSKVSEYFPSSQLCHDCGFKNPEVKNLAVRTWTCPNCGETHDRDENAALNIRREALVAAGISDTLNAHGGYVRPASAGNGLRSENHATLVV

SEQ ID NO: 5 - DNA, 226 bp, Acanthamoeba polyphaga mimivirus
  source 1..226: mol_type = genomic DNA
aaaaatagtctaataaaatcaggggtacattccgctagtactccaccctacgggttaagcaaatgagaatatcgaaacggtatgcacaggattcttcgagtgataatcttaggatgactcactaaggagatgactaaagtgtatcattcaatattgtattgaacggtattcttccatagagagttgatttttggagtatccagaaatatcaactttttatgagcgg

SEQ ID NO: 6 - DNA, 304 bp, Chlamydomonas reinhardtii
  source 1..304: mol_type = genomic DNA
gccgccatggccgccggcggcggcggggccgggctgagagcctgaacggcgctagcagggcgtggggctgagggtgcacgtgttgattggcggcgagtgacgtgactagtttgttagctgcgggttagcacggactgtgcaccccaccccaccggccacgttccggatttgcggggatgcaaaggcccccaacatagaggcgtgtgcttagtaggcgcccgcgtcaaggtggctgggttgataacgacccgggaggggagggctcagcccttttcctgcctccctaaggcagccacctccttgt

SEQ ID NO: 7 - DNA, 306 bp, Thermoplasma volcanium
  source 1..306: mol_type = genomic DNA
gggaagcccatgatgatgggcgtattaagcgtggtctctataggtgtctccgcatagggaaggtaataaacgcagacctgaatggtgcaataaatatcctacatatccccgagtccctaggagctgggagcagagggcaactcacagtgagggataggggtaatgggctgaagacccagcccgcggtctaccgctggacgaatggagcggggtgggtgtcctcacccactagctatgaagtgatgaaaatgaaggcggtaaactgcaaaccaatgaatcgccacaagggaaccttcaccctttagg

SEQ ID NO: 8 - DNA, 231 bp, Deinococcus radiodurans
  source 1..231: mol_type = genomic DNA
gattcaagaatcccgaagtgaagaatcttgccgtccgtacatggacttgcccgaactgtggggaaacccatgaccgagacgagaacgctgcgctgaacattcggcgtgaagcgttggtggctgcgggaatctcagacaccttaaacgctcatggaggctatgtcagacctgcttcggcgggcaatggtctgcgaagtgagaatcacgcgactttagtcgtgtgaggttcaa

SEQ ID NO: 9 - protein, 482 aa, synthetic construct
MKRKREDLTLWDAANVHKHKSMWYWWEYIRRKDMVNHEKTDCDVIQLLQSASVKKQKTQSDKFLTSFSVGIRPTKHQKRVLNEMLRVSNYTYNWCLWLVNEKGLKPHQFELQKIVCKTNANDVDPQYRMENDDWFFNNKMTSVKLTSCKNFCTSYKSAKSLKSKLKRPMSVSNIIQGSFCVPKLFIRHLSSKDVSTDNTNMQNRYICMMPDNFEKRSNPKERFLKLAKPITKIPPIDHDVKIVKRADGMFIMNIPCDPKYTRRNASNDTIEKRVCGIDPGGRTFATVYDPIDCCVFQVGIKEDKQYVISKLHNKIDHAHMHLTKAQNKKQQQAARERIVSLKKTHLKLKTFVDDIHLKLSSHLVKEYQYVALGKINVAQLVKTDRPKPLSKRAKRDLLYWQHYRFRQRLTHRTTNTECILDVQNEAYTSKTCGVCGTINKNLEKSETFYCDQCKYNTHRDVNGARNILLKSLRMFPFEKQQQ

SEQ ID NO: 10 - protein, 478 aa, synthetic construct
MKRKREQMTLWKAAFVNGQETFKSWIDKARMLELNCDVSSASSTHYSDLNLKTKCAKMEDKFMCTFSVGIRPTSKQKRTLNQMLKVSNHAYNWCNYLVKEKDFKPKQFDLQRVVTKTNSTDVPAEYRLPGDDWFFDNKMSSIKLTACKNFCTMYKSAQTNQKKTKVDLRNKDIAMLREGSFEVQKKYVRLLTEKDIPDERIRQSRIALMADNFSKSKKDWKERFLRLSKNVSKIPPLSHDMKVCKRPNGKFVLQIPCDPIYTRQIQVHTSDSICSIDPGGRTFATCYDPSNIKAFQIGPEADKKEVIHKYHEKIDYVHRLLAYAQKKKQTQAVQDRIGQLKKLHLKLKTYVDDVHLKLCSYLVKNYKLVVLGKISVSSIVRKDRPNHLAKKANRDLLCWQHYRFRQRLLHRVRGTDCEAIAQDERYTSKTCGNCGVKNNKLGGKETFICESCNYKTHRDVNGARNILCKYLGLFPFAA

SEQ ID NO: 11 - protein, 481 aa, synthetic construct
MKRTYSATKSSLTLWTAASVKTTSAPKVVTTFSGWMKKILPTRAETSLTLINPADIADPSPPKKKAKKTTPATPKPTLRIYKIGLRPSPAQRKTLNACIVAANFAYNQCVHLVQHKVCKPHLYDLQKIVAKMKTPEDINHRYAPDRDGWFWKSSTIVRLLATKDFCAAYKAIVSNKKKDVAVIKYKTYDDPEAINPLSGLFGCQKQYATVTQAGLRLLPRLFGKDPIPLVKKKLKVATIDHDFKIEKTSKGKFVLCLTVECSLLRRVKPPAPLFEDGYIHACGIDPGVRSFVTVYDPTRQDCYQFGTSAQKAERLDPITNAIDNWNSFVDQHRDKAPPTAIESWSRKTKKLWYKLKNQVRSLHDQVIAHLLGAYNFISLGKLDVSCFRRGTTAKSTNRWLRIYRHFEFRTKLLARVEGTDNCRVEITDERWTSKTCGMCRSIHRELGAKELFECPNCHYTCHRDVHGARNILLRSFGQFPV

SEQ ID NO: 12 - protein, 634 aa, synthetic construct
MDEGADDSEEAKRKRPDITLRRALRKDKETSVVQTGWKFLCQELGIRDRIEEIIPEVTRIRVETCLLLNLHFIRLLDEGRPIPVIDQNLVGRAMQCTYSKNPQADPDLHETFVHHYLPLCPNRPNNSCLPRITNVLLDLRNQLLSNIKNHVAVLFQSRHRAFMKLLLREAAPDVPFFGDADEDLESCTRLLTTATLWRPNESVRELLPEYPRIYGRIPEAAIECLQDLVDSVRPEVGPLPAAPQSRPHLYMPWMRIISEEFSDRELRSFSLVPHASFSAPFIAITPTTWPELQPKSGKRKAPGELRDAFPSIGRLESGGKTFADRITTDGVSASVYFLVEKRTPPPEDRVVHIHPKQRVVGLDPGKHPDFLTGIAVTGDWDGIERQEEIIGLGTRDFYHRAGFKKRTFLMHSWMSRDLDVAAFNKDAPSGNTVSLEDFGKRVTFVCANLYVLVRFHTARRVRKLRRRVTIKKQIEVDRACKRITAGKKTVVAFGAAQVWAGRTKRQCGPCESVKRRLSSHHKATVVMIDEFRTSQVCSTCHSDVGKFAVLKRQRVMEDGLPTVTEGGRREDEDEDGGGRTSYKTCHNVRACTNPLCRMVWNRDVNAARNIAWICMSIARGEGRPAEFTRAGVWG

SEQ ID NO: 13 - DNA, 300 bp, synthetic construct
  source 1..300: mol_type = other DNA
attggatgttcaaaatgaagcatacacttcgaagacgtgtggagtgtgtggaacaataaacaaaaatctagaaaagagtgaaacattttattgcgataactgcaaatataacacacacagagacgttaatggtgctagaaatattttgctaaaatcgttgcgcatgtttccatttgtcaattcgcagttataattactctgtaacaattaggtcgatccatcctaaattcgaaagtccattgctacgagactttgcgtatgcttagtccagggcaattttctgccgaatgaaatgggtta

SEQ ID NO: 14 - DNA, 300 bp, synthetic construct
  source 1..300: mol_type = other DNA
acttccaagacctgtggtaattgcggtgtgaagaacaacaaacttggtggaaaggaaacgtttacttgtgagtgttgcaattacaaaactcatcgagacgtcaacggagcgagaaacattctgtgcaaatacttgaaactttttccattcgcagcataacgaaagaaactgacaatcgattttttcgggttcgattctatcccacttgactcaaagagtcagagggctcgaatacattttctgcacaggttttgctaatgcaagatctggggcaagaatgtgttcgggtcaaatgagtta

SEQ ID NO: 15 - DNA, 300 bp, synthetic construct
  source 1..300: mol_type = other DNA
cgctcgagtggagggaactgacaactgtagagtggagatcaccgacgaacgctggacctcaaagacgtgtggcatgtgcagatccatccaccgcgaacttggggcaaaagaactattcgagtgccccaactgccactacacctgccacagagacgtgcacggagctcgaaacatcttgctgagaagcttcggacagtttccagtctagaaaaacacgaactttttccttggcccaaggattgccaaacaccactcaaatcctcgttcaggggcctcgagtggctgggcatatatgggtta

SEQ ID NO: 16 - DNA, 300 bp, synthetic construct
  source 1..300: mol_type = other DNA
ggaggagggaggacaagctacaagacgtgccacaacgtgcgagcgtgtacgaacccgctctgtcgcatggtgtggaatagagacgtcaacgcagctcgtaacatagcttggatctgtatgagcatagtcagaggcgagggcaggccagcggagttcacgagagcaggaatgtgaggatgactgagaattagtcgaaagacatagctgcctagaaacgagttcatctaggcacttcggtgagaatccgagatacggctgggtactgtggcgagtgtgccattttactctgaacagactgta

SEQ ID NO: 17 - DNA, 145 bp, unidentified
  source 1..145: mol_type = genomic DNA; note = Catovirus CTV1
atggactgttttatcacttgcttgcagtcttgggagagaattttgaaacgaaagcaacagaagaaaaggccgcgcttgttctctattctccctcggaagtctggattcactataagctatgtcccaaatcttgtctgacgggaaa

SEQ ID NO: 18 - DNA, 147 bp, Prototheca cutis
  source 1..147: mol_type = genomic DNA
atgatgagggaagtttctaaaaaagggaaaggaaaggaaaagtcctctgcttccacttcaaggagtaggaagaggaagaggaaaaggcaaaaaaggtcttcacaagctgcctcttctgccaaagccagagcgtccgcagttaatcac

SEQ ID NO: 19 - DNA, 146 bp, Andricus curvator
  source 1..146: mol_type = genomic DNA
atgatggcctgtaaaattggcgctctgaaaaggcgcaagggtaaacacggtaagattaatataagctatgcggaatacaaggaaaatccgttcagttgttggaactatgtttttgacatgtataagattatgaaataggcatagat

SEQ ID NO: 20 - DNA, 143 bp, Saccharomyces delbrueckii
  source 1..143: mol_type = genomic DNA
atgatgacggagatcaactattactggtttaaaaagaaaaaaaaaaaaaacattgagtctaactcttggtttaacatcaatagcatagaaaacaagaaaaaagagtttgaagagaatgatatacctcgaacaatgtgaaagac

SEQ ID NO: 21 - DNA, 145 bp, Pythium ultimum
  source 1..145: mol_type = genomic DNA
atgaaacgcaaacagcagaagaaacgaccgagactcttttccatccttccgcgcaagtcaggattcaccatttcctacgtccctatttctagtatgacactgatgaaactgctttctatgggggatacaggcatcagaggacgtg

SEQ ID NO: 22 - DNA, 148 bp, Pythium ultimum
  source 1..148: mol_type = genomic DNA
atgatgattaaagaaaagtactctagcaacaagcgcaaaaggtatcctaccacacaccgaaagaaacgcatgtcagacgcccaaatcagtacgaaagctacgacaatacacggcagaagcatccctcccgttttatgtgcggaggtca

SEQ ID NO: 23 - DNA, 149 bp, Scenedesmus sp.
  source 1..149: mol_type = genomic DNA
atgatgaatgaaatccaactccctaccccgagggggtccgcgaggcggaaacgaaagagacaaaccgaaccccaaataagttacgatcaggccaaaaacactttgcttggtgtgcttttgcagaaactgaccgcatcccccggggcagt

SEQ ID NO: 24 - DNA, 148 bp, Scenedesmus sp.
  source 1..148: mol_type = genomic DNA
atgatgagctatgggattgagattgagacggtagcaaaacgaacgagcaaaagtaaaaaaaaacggaagttcgcacagcaactgcattcagatggagaaagcgttaccatcctgtatgagtcagagcttgaaactcaaatctaaacat

SEQ ID NO: 25 - DNA, 148 bp, Chlamydomonas sp.
  source 1..148: mol_type = genomic DNA
atgatgaaagaggcagtgaagaatgtgaaacccaaagtgccagcgaagaaacgaataattacaggtagtaaaactaagaagaaggttttcgtgaaaaagaagccgccggacaaaaaacccttgaagacccaacaagagcccggtccaa

SEQ ID NO: 26 - DNA, 145 bp, Chlamydomonas sp.
  source 1..145: mol_type = genomic DNA
atgcctttcctctgcacgactcgatactgtagacggccaagcaagaatgagaaaagaaagcgcaagacctctcacattttggtggtggcactccaaatttggattcatagcgtcgctcatagtgattactgatggtttcgccgtc

SEQ ID NO: 27 - DNA, 149 bp, Chlamydomonas sp.
  source 1..149: mol_type = genomic DNA
atgaagcgagcaggcggtcgaaaaggaggtcaccggcgaaagcagtcaaagcattggcaaccgcgggcacgaaccgcaagaagaagacgccaaaaaagaggaagactgcacatgtccatgggccacttgcggggcaggctgccggacag

SEQ ID NO: 28 - DNA, 148 bp, Chlamydomonas sp.
  source 1..148: mol_type = genomic DNA
atgatgcgggaggtcaaggcgggaactaagagagcgagacagcctgaggtgaagagtgtagcattgaaaaaagctaagaagacaggtagggcttccaagcaggcttcttcctctaacacggcgtttagtcgtagtcgaagcacacaga

SEQ ID NO: 29 - DNA, 144 bp, unidentified
  source 1..144: mol_type = genomic DNA; note = Catovirus CTV1
atgtacctcttgatgaagaagaaaaaagaacctgacaaaaacaaaagtgacaaagaaaaagagtatgaagaaaagtatcgaaagtatatcacatcctataagacacacaagacatcactcgaaaacaccacgatgaagttgttc

SEQ ID NO: 30 - DNA, 145 bp, unidentified
  source 1..145: mol_type = genomic DNA; note = Indivirus ILV1
atgatgaaaaagcctaaggtgaaagagaaagagaaggaaaaggagaaagaaaatttcgattttatgaagactaataaggggaatatccataagctcataaaggataagatggtactctctataatcgggtaaaggaggttatact

SEQ ID NO: 31 - DNA, 148 bp, Apophysomyces variabilis
  source 1..148: mol_type = genomic DNA
atgatggagactatcgtaaataaagaaccacccgacaagcgcacccgcccggatcgggctgcaaaaattaaagaccgcaaaaatggggaagaaaacgtcgttaaatgtactctttccaggatcataggtaccttccgttgaccaaaat

SEQ ID NO: 32 - DNA, 152 bp, Apophysomyces variabilis
  source 1..152: mol_type = genomic DNA
atgagccccggatcatctgcggcgagaaagaaaaacgagaagcagtgtcgggtgcagaagaagcgaaagagacgcggcccgaaaggtgggggtccggccagtaaaaccgcaagaaagacgacagtaatgtctcaagaagggatgcccatggg

SEQ ID NO: 33 - DNA, 148 bp, Apophysomyces variabilis
  source 1..148: mol_type = genomic DNA
atgatggcaagccgaaacaagcggaaaaaaaagccgcaggcgagcacgagtgccgacacccagagcgacgacgatttccaacaactccttccgccgaagggtaaattgaatatgaaaatgcagatgacgaaaacaacctctgcaggtt

SEQ ID NO: 34 - DNA, 139 bp, Apophysomyces variabilis
  source 1..139: mol_type = genomic DNA
atggttcaccttatactcattcttatgacgaagaaaaagaaaaaattcaagaaaaagaagattttttacaaaaaataccacaaattcaactggctctccaggctcttcaatgataatcagtttagtgaagacaaaattt

SEQ ID NO: 35 - DNA, 146 bp, Cyanidioschyzon merolae
  source 1..146: mol_type = genomic DNA
atgccactgacgcgaaggcgacgacaaaaatcccggagagggcttcaccggagacataggacgaggcgggcgcgacgcaaagagcgagtcatcgaaatctccacccccaagtatcgacatctcgcccggtgtttagtgcggaacag

SEQ ID NO: 36 - DNA, 152 bp, Cyanidioschyzon merolae
  source 1..152: mol_type = genomic DNA
atgtctccacggccgcagccggctgcgcctcctgcagcgcagggaagagcccgcgggggcgccccggcacccgctggcagacgagggggggctgcagcacctagaccgggggcgaggagacgggcagggcgcaacatcacgaacgggacgcc

SEQ ID NO: 37 - DNA, 148 bp, Chlamydomonas reinhardtii
  source 1..148: mol_type = genomic DNA
atgtgtaggaggtgccgcatcacgccactttggctggctggtcggaggatgaaaaagagacgacgacgggtcctccgacccaaaaagtgcatgataacaaccctgtctctggccagaacacggggtagggatgcgggcatgaaggacs

SEQ ID NO: 38 - DNA, 147 bp, Contarinia nasturtii
  source 1..147: mol_type = genomic DNA
atgatgtattgtatgcatgaggattctagtcataaaaagggtcggcggcggacgatgcggatcagctcaagggagtgggcttttctgactcgatctcgcaaatttcgacgcctgttgagaaggcttagaaaacttaggctgtggacg

SEQ ID NO: 39 - DNA, 67 bp, synthetic construct
  source 1..67: mol_type = other DNA
acactctttccctacacgacgctcttccgatctctggaattgtgagcggataacaatttcacacagg

SEQ ID NO: 40 - DNA, 62 bp, synthetic construct
  source 1..62: mol_type = other DNA
gtgactggagttcagacgtgtgctcttccgatctctgcaaggcgattaagttgggtaacgcc

SEQ ID NO: 41 - DNA, 56 bp, synthetic construct
  source 1..56: mol_type = other DNA
acactctttccctacacgacgctcttccgatctcacgtggagtccaaccctggacc

SEQ ID NO: 42 - DNA, 57 bp, synthetic construct
  source 1..57: mol_type = other DNA
gtgactggagttcagacgtgtgctcttccgatcttcagcatcgagatccgtggtcgc

SEQ ID NO: 43 - DNA, 71 bp, synthetic construct
  source 1..71: mol_type = other DNA
acactctttccctacacgacgctcttccgatctctttgttggagttcgttttcttccttgaaatttgttgg

SEQ ID NO: 44 - DNA, 66 bp, synthetic construct
  source 1..66: mol_type = other DNA
gtgactggagttcagacgtgtgctcttccgatctattgactgtagacctagactacagaccgtcac

SEQ ID NO: 45 - DNA, 59 bp, synthetic construct
  source 1..59: mol_type = other DNA
acactctttccctacacgacgctcttccgatctcgggtcacagggcaagactttgtctc

SEQ ID NO: 46 - DNA, 55 bp, synthetic construct
  source 1..55: mol_type = other DNA
gtgactggagttcagacgtgtgctcttccgatcttgccaccacgcctggctaatt

SEQ ID NO: 47 - DNA, 59 bp, synthetic construct
  source 1..59: mol_type = other DNA
acactctttccctacacgacgctcttccgatctcatcattccaccaatcaggactcggc

SEQ ID NO: 48 - DNA, 57 bp, synthetic construct
  source 1..57: mol_type = other DNA
gtgactggagttcagacgtgtgctcttccgatctccagcctggtcaacctagcgaga

SEQ ID NO: 49 - DNA, 54 bp, synthetic construct
  source 1..54: mol_type = other DNA
acactctttccctacacgacgctcttccgatctcccttctccccacagcctccc

SEQ ID NO: 50 - DNA, 67 bp, synthetic construct
  source 1..67: mol_type = other DNA
gtgactggagttcagacgtgtgctcttccgatctgctgtaaactagccaggttgggaatatattgcc

SEQ ID NO: 51 - DNA, 68 bp, synthetic construct
  source 1..68: mol_type = other DNA
acactctttccctacacgacgctcttccgatctcgtctgagtcttcaagttttcactccagctaacac

SEQ ID NO: 52 - DNA, 62 bp, synthetic construct
  source 1..62: mol_type = other DNA
gtgactggagttcagacgtgtgctcttccgatctacagtcctaccacgagacatacagcaac

SEQ ID NO: 53 - DNA, 61 bp, synthetic construct
  source 1..61: mol_type = other DNA
acactctttccctacacgacgctcttccgatctcagagactcagagtccaagagggaagcc

SEQ ID NO: 54 - DNA, 69 bp, synthetic construct
  source 1..69: mol_type = other DNA
gtgactggagttcagacgtgtgctcttccgatctactagggagtggcttatgcacaggtatattatgtg

SEQ ID NO: 55 - DNA, 70 bp, synthetic construct
  source 1..70: mol_type = other DNA
acactctttccctacacgacgctcttccgatctctccttcagttctatccatgttgttgcaaatggtaag

SEQ ID NO: 56 - DNA, 79 bp, synthetic construct
  source 1..79: mol_type = other DNA
gtgactggagttcagacgtgtgctcttccgatcttctttaatcaatgctttgtagttttcactgtataaatatttcacc

SEQ ID NO: 57 - DNA, 61 bp, synthetic construct
  source 1..61: mol_type = other DNA
acactctttccctacacgacgctcttccgatctcatgtctggaattgagccaggtactggg

SEQ ID NO: 58 - DNA, 63 bp, synthetic construct
  source 1..63: mol_type = other DNA
gtgactggagttcagacgtgtgctcttccgatctcattaaccaggtactggcccactataggg

SEQ ID NO: 59 - DNA, 2681 bp, synthetic construct
  source 1..2681: mol_type = other DNA
gatcaaaggatcttcttgagatcctttttttctgcgcgtaatctgctgcttgcaaacaaaaaaaccaccgctaccagcggtggtttgtttgccggatcaagagctaccaactctttttccgaaggtaactggcttcagcagagcgcagataccaaatactgttcttctagtgtagccgtagttaggccaccacttcaagaactctgtagcaccgcctacatacctcgctctgctaatcctgttaccagtggctgctgccagtggcgataagtcgtgtcttaccgggttggactcaagacgatagttaccggataaggcgcagcggtcgggctgaacggggggttcgtgcacacagcccagcttggagcgaacgacctacaccgaactgagatacctacagcgtgagctatgagaaagcgccacgcttcccgaagggagaaaggcggacaggtatccggtaagcggcagggtcggaacaggagagcgcacgagggagcttccagggggaaacgcctggtatctttatagtcctgtcgggtttcgccacctctgacttgagcgtcgatttttgtgatgctcgtcaggggggcggagcctatggaaaaacgccagcaacgcggcctttttacggttcctggccttttgctggccttttgctcacatgttctttcctgcgttatcccctgattctgtggataaccgtattaccgcctttgagtgagctgataccgctcgccgcagccgaacgaccgagcgcagcgagtcagtgagcgaggaagcggaagagcgcccaatacgcaaaccgcctctccccgcgcgttggccgattcattaatgcagctggcacgacaggtttcccgactggaaagcgggcagtgagcgcaacgcaattaatgtgagttagctcactcattaggcaccccaggctttacactttatgcttccggctcgtatgttgtgtggaattgtgagcggataacaatttcacacaggaaacagctatgaccatgattacgccaagcttnnnnnnngcagccacctccttgttattgggtaccgagctcgaattcactggccgtcgttttacaacgtcgtgactgggaaaaccctggcgttacccaacttaatcgccttgcagcacatccccctttcgccagctggcgtaatagcgaagaggcccgcaccgatcgcccttcccaacagttgcgcagcctgaatggcgaatggcgcctgatgcggtattttctccttacgcatctgtgcggtatttcacaccgcatatggtgcactctcagtacaatctgctctgatgccgcatagttaagccagccccgacacccgccaacacccgctgacgcgccctgacgggcttgtctgctcccggcatccgcttacagacaagctgtgaccgtctccgggagctgcatgtgtcagaggttttcaccgtcatcaccgaaacgcgcgagacgaaagggcctcgtgatacgcctatttttataggttaatgtcatgataataatggtttcttagacgtcaggtggcacttttcggggaaatgtgcgcggaacccctatttgtttatttttctaaatacattcaaatatgtatccgctcatgagacaataaccctgataaatgcttcaataatattgaaaaaggaagagtatgagtattcaacatttccgtgtcgcccttattcccttttttgcggcattttgccttcctgtttttgctcacccagaaacgctggtgaaagtaaaagatgctgaagatcagttgggtgcacgagtgggttacatcgaactggatctcaacagcggtaagatccttgagagttttcgccccgaagaacgttttccaatgatgagcacttttaaagttctgctatgtggcgcggtattatcccgtattgacgccgggcaagagcaactcggtcgccgcatacactattctcagaatgacttggttgagtactcaccagtcacagaaaagcatcttacggatggcatgacagtaagagaattatgcagtgctgccataaccatgagtgataacactgcggccaacttacttctgacaacgatcggaggaccgaaggagctaaccgcttttttgcacaacatgggggatcatgtaactcgccttgatcgttgggaaccggagctgaatgaagccataccaaacgacgagcgtgacaccacgatgcctgtagcaatggcaacaacgttgcgcaaactattaactggcgaactacttactctagcttcccggcaacaattaatagactggatggaggcggataaagttgcaggaccacttctgcgctcggcccttccggctggctggtttattgctgataaatctggagccggtgagcgtgggtctcgcggtatcattgcagcactggggccagatggtaagccctcccgtatcgtagttatctacacgacggggagtcaggcaactatggatgaacgaaatagacagatcgctgagataggtgcctcactgattaagcattggtaactgtcagaccaagtttactcatatatactttagattgatttaaaacttcatttttaatttaaaaggatctaggtgaagatcctttttgataatctcatgaccaaaatcccttaacgtgagttttcgttccactgagcgtcagaccccgtagaaaa

SEQ ID NO: 60 - DNA, 21 bp, synthetic construct
  source 1..21: mol_type = other DNA
gcagccacctccttgttattg

SEQ ID NO: 61 - DNA, 20 bp, synthetic construct
  source 1..20: mol_type = other DNA
aaaaaaaagaaaagaaaaaa

SEQ ID NO: 62 - DNA, 20 bp, synthetic construct
  source 1..20: mol_type = other DNA
aagagtggccttgatttgta

SEQ ID NO: 63 - DNA, 20 bp, synthetic construct
  source 1..20: mol_type = other DNA
aaataaaatttaaaaaaaaa

SEQ ID NO: 64 - DNA, 21 bp, synthetic construct
  source 1..21: mol_type = other DNA
gtttccagttttattttgtta

SEQ ID NO: 65 - DNA, 20 bp, synthetic construct
  source 1..20: mol_type = other DNA
gagaaacaaatgaaagggac

SEQ ID NO: 66 - DNA, 20 bp, synthetic construct
  source 1..20: mol_type = other DNA
gagatggtaggttcttctaa

SEQ ID NO: 67 - DNA, 21 bp, synthetic construct
  source 1..21: mol_type = other DNA
aatacacatagatatagggtc

SEQ ID NO: 68 - DNA, 21 bp, synthetic construct
  source 1..21: mol_type = other DNA
aaaaaaacaaaaaaaccaaaa

SEQ ID NO: 69 - DNA, 21 bp, synthetic construct
  source 1..21: mol_type = other DNA
aacatcaaagtgcactgtcag

SEQ ID NO: 70 - DNA, 15 bp, synthetic construct
  source 1..15: mol_type = other DNA
caaaattcttaattt

SEQ ID NO: 71 - DNA, 20 bp, synthetic construct
  source 1..20: mol_type = other DNA
gtgatcatgtaccctgaata

SEQ ID NO: 72 - DNA, 19 bp, synthetic construct
  source 1..19: mol_type = other DNA
aaagaattttatacacata

SEQ ID NO: 73 - DNA, 20 bp, synthetic construct
  source 1..20: mol_type = other DNA
tacacatatatttagtgtca

SEQ ID NO: 74 - DNA, 20 bp, synthetic construct
  source 1..20: mol_type = other DNA
gtagcactaacacttctctt

SEQ ID NO: 75 - DNA, 20 bp, synthetic construct
  source 1..20: mol_type = other DNA
aatacacttatattcagggt

SEQ ID NO: 76 - DNA, 20 bp, synthetic construct
  source 1..20: mol_type = other DNA
tatctgaaaaatgtgtaact

SEQ ID NO: 77 - DNA, 17 bp, synthetic construct
  source 1..17: mol_type = other DNA
tacgataaataactttt

SEQ ID NO: 78 - DNA, 20 bp, synthetic construct
  source 1..20: mol_type = other DNA
agttacacatttttcagata

SEQ ID NO: 79 - DNA, 20 bp, synthetic construct
  source 1..20: mol_type = other DNA
attgacttatttatataaat

SEQ ID NO: 80 - DNA, 20 bp, synthetic construct
  source 1..20: mol_type = other DNA
tagtcagaagaagaagtttg

SEQ ID NO: 81 - DNA, 20 bp, synthetic construct
  source 1..20: mol_type = other DNA
cagaaagatccaaacttctt

SEQ ID NO: 82 - DNA, 20 bp, synthetic construct
  source 1..20: mol_type = other DNA
ttcatctgacaacttccttt

SEQ ID NO: 83 - DNA, 20 bp, synthetic construct
  source 1..20: mol_type = other DNA
tagatgaggagacttgtaga

SEQ ID NO: 84 - DNA, 20 bp, synthetic construct
  source 1..20: mol_type = other DNA
attctacaatgatatattgt

SEQ ID NO: 85 - DNA, 21 bp, synthetic construct
  source 1..21: mol_type = other DNA
tataaatgaatattccgttgt

SEQ ID NO: 86 - DNA, 20 bp, synthetic construct
  source 1..20: mol_type = other DNA
tccatttatctgttaatggc

SEQ ID NO: 87 - DNA, 21 bp, synthetic construct
  source 1..21: mol_type = other DNA
cagtatcatcaggaagaataa

SEQ ID NO: 88 - DNA, 20 bp, synthetic construct
  source 1..20: mol_type = other DNA
ttcttcctgatgatactgta

SEQ ID NO: 89 - DNA, 20 bp, synthetic construct
  source 1..20: mol_type = other DNA
gttaaatttattcctctttt

SEQ ID NO: 90 - DNA, 20 bp, synthetic construct
  source 1..20: mol_type = other DNA
gctccctaaggggacagacc

SEQ ID NO: 91 - DNA, 21 bp, synthetic construct
  source 1..21: mol_type = other DNA
agtttaactttatgaaattgc

SEQ ID NO: 92 - DNA, 20 bp, synthetic construct
  source 1..20: mol_type = other DNA
actttatgaaattgcctttt

SEQ ID NO: 93 - DNA, 20 bp, synthetic construct
  source 1..20: mol_type = other DNA
ttatatgtcaataatggtta

SEQ ID NO: 94 - DNA, 21 bp, synthetic construct
  source 1..21: mol_type = other DNA
tatgtcaataatggttatttc

SEQ ID NO: 95 - protein, 203 aa, Pythium ultimum
VIWNMPTKKTASLERFKEYVGFMIPRLGLLLTFSVEKPFRKLKLRRFISMQKKLLKMCLQLTEGAGRRTIVGFGGWSNLDISRLIKKCPSGPVKRFERKLQEFCTVVPIDEYRTNKVHADCHTSLVYQYCQQLCRDGVERCLKTYSVLYYPHNGCYGMTVSRDANASRNILQLLQHQMQGTSRPEVLCRGETTKSTNAHKCPM

SEQ ID NO: 96 - protein, 308 aa, Pythium ultimum
RRAQPHLHVMARYSPLHQRRRRRQKSRCGLHRRHRTRRARRKERVIEISTPKYRHLARMNDFRFYNENLKMREPWYAGVIRAMPSFKTSSYDLYFQRLQFFWKHLRFLLVFSAEQAFLRWRFTQDRAKMKALDTLAKRIVPKASKQVCIADGDWSHRDGIKGHASGPVKGFVEALKRRATVIPMDEYRTSITCSCCHQRLKQARLFTKMKRKEDEVDIRQKERPFKKEVKEIMEMAKFKNPKLADKKVVLKCTRNVLRCTNSKCKANFWNRDVNAVRNMLELLKSGLKEKHGARRLGARRLRAFRRGQ

SEQ ID NO: 97 - protein, 242 aa, Pythium ultimum
MTSDSTRESEDARAMVRRCHSAMPSSDSSYDLYFQRLQFFWKHLRFLLVFSAEQAFLRWRFTQDRAKMKALDTLAKRIVPKASKQVCIAYGDWSRRNGIKGHASGPVKGFVEALKRRATVIPMDEYRTSITCSCCHQRLKQARLFTKMKRKEDEVDIRQKERPSKKEVKEIVEMAKFKNPKLADKKVVLKCTRNVLRCTNSKCKANFWNRDINAARNMLELLKSGLKEKHGARRLRVFRRGQ

SEQ ID NO: 98 - protein, 643 aa, Pythium ultimum
RDCLEQRPPTTSVCRFSFFNFVSQTTMKARQSNKRKRPPDEDEIVPDSQEYEESALEEVVSDLSHLSTAPVNAEIKPKRLRPDVTARRAMNTGTTFSVVKTTLNSFCKEKAKALPWESVIKDMNKAVLEAYVLANIHVVRLCQANLPIEPLNNIFFYRCLSATASGVQESRDCEQLKQSVALYNEWRGTGVDRANKKYITDGWQQNASMQMATNTTNAVNLNFYRRFHKHFKRKYDFDGRQAYATLKHILDLKYEGDDPIVLEWRARIPRREVDGKLNSQSHLLLPLTYTFLSDIEERNRVNQTSPDYVEIRSFSLLPLKRGFECSHFKMCKIGLRGLLKRAGINIPSKGPKWNAVSDEWWRELFNIDKFETANRKFAGEIVTDGKAVSILMRKPKQKIGTRELKEEDYDVMWGLNPGRRDLFVATNQNGEKISCSSREFYEDARYKKRNQKIKVWQENRPDILEAARNMPTKKTAQLERLKEYVVFMIPRMDLLLQFSIVKPFRKLKLRSFIFAQKKLRELCLKLTAQAGRRTLVGFGDWSNQDIGGLIKKCPSGPVKPLERMLRQYCRVESVDEFRSSKLHERCHTPLSHQYSKRMCRDGIERILKVHGVLHCKNNGCHGMTVNRDNNASKNMLLLLQLQI

SEQ ID NO: 99 - protein, 245 aa, Pythium ultimum
TRRHQFSAKVKGTSFNIDKFETTSRKFASEILTDGKSVSVVLRKPKRKSTPCNINLADYDVVWGLDPGRRDLFVATNQLGDKVSCSRREYCEYAHINESNQIIRHWQHSQSDVLEAIRNMPTKKTASLECMKEYVDFMVPRLGFLLTFFVAKPFRKLKLRRFISMQKKLRKMCLQLIEGAGRHTIVGFGDWSNRDVAGLIKKCPSGPVKRFERELRESRTVVPIDEYRTSEVHADCHTPLVYQYC

SEQ ID NO: 100 - protein, 333 aa, Pythium ultimum
TASHYILLFRTKNELDEAEKQQSERLVPEGYRPEVVIGLDPGMRSVCTAVRERFAPRQIKRVRRRSVRKKRRRKRSWIRRYDGPKRKNGRDIVEVHAKEYRHLAGFRKRRAWEEVLKNSNPEYGTAIRGMPSFKTSRYKVYLERLHYFWKHAGFLLEICWRKPFLKWKFFNKRSSRIAVDALAARIVPDPSVQTCIAYGNWSRRDGIKGHASSPVKGLQQALAKRAKVVILDEFKTSKLCSTCHRELSPVSYLVDPDLDKRRKRAGKIISRYHSEERKLVECHAVLRCDQKKCEASYWNRDVNAAINIVNLLKYEIEHGGRMAAFARVQDRRD

SEQ ID NO: 101 - protein, 287 aa, Pythium ultimum
PLTRRRRQKSRRGLHRRHRTRRARRKERVIEISTPKYRHLARMNDFRFYNENLKMREPWYAGVMRAMPSFKTSSYDLYFQRLQFFWKHLRFLLVFSAEQAFLRWRFTQDRAKMKALDTLAKRIVPKANKQACIAYGDWSRRNGIKGHASGPVKGFVEALKRRATVIPMDEYRTSITCSCCHQRLKQARLFTKMKRKEDEVDILQKERPSKKEMKEIVEMAKFKNPKLADKKVVLKCTRNVLRCTNSKCKANFWNRDVNAARNMLELLKSGLKEKHGARRLRAFRRGQ

SEQ ID NO: 102 - protein, 462 aa, Pythium ultimum
WLGIAHYSEAFDRKNQRSQEISALTSERNGLKKATEDNEDALDLVKEDLKRLAAEEKLMIRRMRKYRLFPTAEQQTKLRNFMGTYHWTYNQAVAHFRKTNVYRADVLRDLYVTKTTRKTREYPEEMGSPPDWAFGTPKSFRYNTLRKFQTNVKSAFSNKRNGNISHFRINFKSRKESRFFTIYEDANYATIAYVDGNMRALLSISSLKDIPIRCDPGLEITNEIQITNTNGFWYAVIPHFVRPSNFENEGRCIALGPGLKAFMAGIDLNGNALHIGRGNRDHSKRLKNRGNLAQQEMAKIKNVPGHRSHKQWKAYARVKYAFNSTTAKMKNCVKEMHYQTCSFLTKHYDAIILPIFRTKQMVKTSSSRTHNFNETILSLKHFQFRDLLRAKCELLGKSLVVCFEMYTSQTCGSCGKLHLRLGDNDVFECSHCDHIAGRDVNAPFNILRFVCGGSLAISKVYC

SEQ ID NO: 103 - protein, 237 aa, Pythium ultimum
CGLGLDPGRRDLLVATNQLDGKVSCSSRAYYSGACTNESNQTIRQWQKSRKDVLKAIRNMPTKKTASVERLKEYIDFMIPRLGLLLNFSMVKPFRKLKLRRFIRVQKKLRKMYLQLTEGAGRHMIAGFGDWSNRDIAGLIKKCPSGPVKQFERKLREFCTVGPIDEYRTSKVHADCHTPLVYQYCQRLCRGVVERRLKTYSVLHCPHNGCFGMTVNRDANASRNILHLLQRQVQGTP

SEQ ID NO: 104 - protein, 315 aa, Pythium ultimum
NAVANATWRELFNIKKFETVSHKFAGKILTDGKSVSVVLRKPKCKSIPCNINPADYNVVWGLDPGRRDLFVATNQLGGKVSYSSREYYSDVHINESNQTIRQWQESRKDVLEAIQNMPTKKTASLERLKKYVDFMTPRLDLLLNFSMVKPFRKLKLWRFISAQKKLRKMCLQLTEGAGRRTIIGFGDWSNRDVAGLIKKCPSGPVKRFERKLQEFCTVVPIDEYRTSKVHADCHTPLVYQYCQRLCRDGVERRLKTYSVIHCPHNGCFGMTVNRDANASRNILHLLQRQMQGTSRPQVLYRRGTTKSASVHGCPV

SEQ ID NO: 105 - protein, 226 aa, Mayetiola destructor
IKNTCIFTLLYISYENGEFKYEVKVDPGMKTYLAAVWQDWTDDNHNTNSTAKLFKIGSTEFHRRTKQPDRDEKAAEIVGDLEIRRRLDRENNYPRMPSANGLEWMSYITHNLKFFNETIHTYTKAIYTHLAFDNYSNKQATMDNIVNELTQRQPIMFFIDGAKFSPASPIGNYVRCPGVRKLIMAVKKAAELWNGFGTRTEHFTSVSTRFEIFPPTNEKGSFRNLL

SEQ ID NO: 106 - protein, 470 aa, Mayetiola destructor
RKDEIHGRFMGDERVKHWYNWFDKEKIRKMEKGGKFFHFQIVTNGLGASVLFARVNQQSSNKPDNYMESIRQKLESGHYKRSIGMDPGYKVWISAVIRYLRTGQEFNCDVTSRQFHKFTKKKKREKKAKRLTGDFENRRKADAENRELYTAGIPSPNRRQNWFDYIRWRFKWCNEGFDLYTDIQYARLGLDQHFRTQKVMDRMVNILVGNDAALVCVGSTNFNPRAPIKKHIRCPGTKMILQYLKKKTKVDILLIDEFNTSQVCGHCHSFFDREWQDRHENRGRRFKQCTVANCQIRFPNPIGPTNVIVAKKNHRKIQKERRAFPIVAEHPEGQQEQDPKKSTHQFLKTKYVRHVKSNNWRFGLEAEKKGRNVQLKKPTKNHRKYQPDLQNINDHTNVIVAEQNHRKFQKKIRPYPEGPKPKYVCNVQNNDWGLVTQRGNSKITWNRDTSAARNILYKGKKILMQLIIIC

SEQ ID NO: 107 - protein, 287 aa, Mayetiola destructor
ERYVIKIDYIHKKTICNFFFILLTGRGAKLAERKRLADERKMEESTKATKRKAGKDADEPPAKRRNAPVPTRERDLLQKLKSGEVFGTVIQIDPGVKNTLGCVAIDMQNGHERNLLITSKYYHHLLQTHLRKERKRPIIAHLHAMIRGVHASYANPPTRKGGDIREYLDSVFRLFDMFTEVYQRRVFSRMRFDAHICKQKAVDKISKQIASLNPHQESATLIMFGNSQMSRKSPIKGYVKSPHKNYWVKQFDELERVEVYEVDEYRTTKTCSFCGQILHVTRNIGHR

SEQ ID NO: 108 - protein, 272 aa, Mayetiola destructor
CYAHRSNIPKIYGFQTNSKNYSWQWSSSVCECCVPRFLYHFLCHNRAAKTNKYMKKEQKEAIAEANKVAKAAYDRRPKRPNRFFAGKTTNEVPQEIKDRFTHNYYDVLVGIDPGYRSPAAGVRLHMNEDIEQNFKFSIGKCRSFQKEWERDNKRKKITTHFDRAEKESRKRCEEISGVQPSSRDPNYFRYINHKLQFFKQGCDAYHHLKMKDIMKWKDITHLAKTIIGSHVNTLNKALIFFADAKVFAANSPIKRHVRFSFKHCCGNVWNTS

SEQ ID NO: 109 - protein, 280 aa, Mayetiola destructor
RAIIERENKITRNLIEMQYTTIKGIDRNMKISLACTVMDIQTNDETNLFIHRKCYHHIIGSDSRYQKYHNHTRQLILRCLEIRGDYERNHGELPSNEGRNYSIFIIYKLRTFLERRNYHSAKKISRLRFDHFKRKTKGMSQFCRRIRDLDIRNGRVLVILGASQMSRKSSMKGHQRTPFKVVDWKFLKRCQESKTLNIMNIEPQRCVPFVVLIWIYHYLLIGKRKKKIKNTKSTKRCSHKGAQKLDEASPRRRQLKNNLYCIGVKPTRTVQYSCEHAYST

SEQ ID NO: 110 - protein, 224 aa, Mayetiola destructor
IRERDLLEKLTSGEVFGTVIQIDSGVKNTLGCVAIDMQNGQERNLLITSKYYHHLLQTHLRKERKRSIIAQMYAMIRGVHASYGNPPTRKGGDIREYLDSVFRLFDMFTEVYQRRVFSRMRFNAHICKQKAVDKISKQIASLNPHQESATLITFGNSQMSRKSPIKGYAKSPHKNYWVKRFDELERVEVYEVDEYRTTKTCSFCGQILHVTCNIGHRYVFFELN

SEQ ID NO: 111 - protein, 232 aa, Rhizopus delemar
KVLCTNIMEMRQQSLKKYFLESEFDFRVDQKCNLYYGNLFIAKIRGFSPQPENYSTDSSVKPQLYDAYLQIMLQKKHTSERLNDSEKSKVLELAKEMYRRPLQSNYKKTINTALEKLQLLPFRKLKFSSKLFFNQNDQKLVRSLRVKFSPDAILIFGDWSAPNVKYQEPTKSKGLIRVLKKNGFVVYLINEYKTSSHCATYENELEKFKTAPNPRPYQRKKKPDVLCNGLLR

SEQ ID NO: 112 - protein, 207 aa, Rhizopus delemar
LRVDQKCNLYYGNLFIARIRGFFPQPKNYSTDSSVKSQLYAICLQIMLQQKHISERLDCSEKSKFLGLAKEMYKQSQKSNYKKTIGTALEKLQLLPFRKLKFSSKLFFDQNDQKLIRSLKAKFGQDAVLVFGDRSAPNVKYQEPTRSKGLIRMLKKNGFAVYLINEYKTSSHCPTCENELEKFKTVPSPRRYQRKKKPNELCNGLLR

SEQ ID NO: 113 - protein, 205 aa, Rhizopus delemar
VDQKCNLYYGNLFIAKIRGFFPQPESYSTDSSVKSQLYATYLQIMLQQKHISERLDDNEKSKVLGLAKEIYRRPEQSNYKKTISTALEKLQILPFRKLKFSSKLFFDQNDQKLVHSLKAKFGQVAVLVFGDWSAPNVKYQEPTRGKGLIRMLKKNGFVVYLINEYKTSSHCPTCENELEKFKTVPNPRPYQRKKKSDVLCNGLLR

SEQ ID NO: 114 - protein, 210 aa, Rhizopus delemar
LGSNDNLTKFIPELWGWKYRVALLRSRSEHTAVLQALVRGIDPGVTDIFTAVDSGFSSLNARIRKASIKEYHHICGLNLATQRRMQHQQYNQEDVRFISKSPTLKTPNLINFSKAASIRLKTIKRSPTAIVGITGKRSLLEDDYFILAKYTFRLIKLNFKGYIKKLPMRLPKDRLMILSSTTVKALFMKRNSTVAISKNGSHLRQRQQAS

SEQ ID NO: 115 - protein, 208 aa, Rhizopus delemar
SVTVNLSYTTFFESNGSKDSFNVHQQEKNVLRKFYYSSTRMKRKRRCEIQKRKAYDRVCSAERRSCPPCPSQKSSTRLIMFVGDRGYGYGSRVKNHVRLGGPWKPLKHSLYASVCITNEHNTSQTCVFCFQKTDHPQKVFSKKGAIALKTVNGASVCNNNECILSLSDTSHKARDSVSALAIGISGASRLTSGTTLEVFNPSATTTIR

SEQ ID NO: 116 - protein, 520 aa, Allomyces macrogynus
TESPRAPFVIPRVAPIPDLLHPVMNDRQLKARHGKNHIKHDYERRQEGPGRSSRKRRSVCDRQHRVNRVIKSMGNTIRPPLIMFGTSGANNPSGCTMPVKQLIRRLVHGGTKLMLVNEYFTSRKSAVCGDDTVQYQHSWGCKHCPIYRRALLRDRNAAFKIFRACVRDGFQARDVPAAWSNSSRPPLHDWRQIHSYGAQQQGGAGGGGNNSSGSDDDDEPRMLPLQPPPRISSVRATVNPNKTAGGSSTRRVDHRNGGYFGPHQLAHRAGLQQLERVQLVLHQQEPARPPPGALHDHRRQARPSPDRRSASVSGRRPRPPRATAATQTIRACLSRRSQKRLPRRKPVQLWVLPRPRLPRRRPAHPRPRLLSPRPVRPQARPPRQRKHQQHVGHCQVGLPRTKRLSSCVQAQGNHRQSLASRPSPRLPIKGQLAATVMLAAVATIQSLLDRPDSAGIAALHTAILVGVFNHSRFCFLFVGWCFCSPSFQMLLVEPPFSLCPKKGIARHKALITVAIRLACV

SEQ ID NO: 117 - protein, 229 aa, Allomyces macrogynus
KSDSPAEYAECMFWDLAGHWTRHLTGQSNLTKRLLQFWARDPSLKAYMDGKPTLKTHQMDEILAATRYMLSRMHSIMQCVLCSFVAKMTFQKNNHKQSFLDALDAQLMNPMDASIKLVLIMFGNAGASNPCGCSMPVKQFIRHLVHAGAQVMLVDEYYTSKKCAVCGMDLVQDPDAWGPKHCKGPCHWVISRDCNAAFNIFWVGICDGIVNWDVPVVWKNSGHPLLLAW

SEQ ID NO: 118 - protein, 212 aa, Allomyces macrogynus
SVGCCTSLHKPSFKTLDLDKLRAAAAYLTAWLPFVLPLMLSNFLASHQFRAANADRAFYDRLAARFMDSPDPTRPALVLMGNSGHFSLRGVSAPIRHMVRYLIHAGARVVLLDESWSSKKCSLCESDMPNDRRRWSSKRCRTCKRIRTRDRNARVNLIRIAVRDALDVPFRQHWRDRGHPLCERRPHANGVPIGDDGGLDQGGGGGGGGGAV

SEQ ID NO: 119 - protein, 419 aa, Ectocarpus siliculosus
GHTIPAGFTPTRGLTRELLTILLPTRARPSFMRAHELALRGLLHSNDAWWYKDVLRPFSKEANIKCLVNKENARYASSEHGYLSSLQGSGPDKCPWMIGESFLTDGVQIKLLLVTLEHGRKAFSGSSELNEAGYNKLPRADAQLESLLKEGRGVYNISSLLESTSIREDVIVMSADPGQAKVINVSSATASTWAKQDPGVILKTSTCVFGDDYRRDTLASRSDEYETFRRKDQPYGVAIDRLGNEKKRTSCLATFIKYCRRWCANGPVLFLETLQTGRKFMRFDRFRATQKTLAKIADKYMGHVEDTCRVMLFGKASFRAQKGRASAPRKALIREMASRGVVLMVKEYNTSKKCPGCGEDTVEDKERRIRSCKNFKIGSPEESCRLHRLTPEFEMDRDDVGSTNIGMRGFGQLLGQEWF

SEQ ID NO: 120 - protein, 301 aa, Ectocarpus siliculosus
PGTGSKPTNDSRSSTSPGDSFELDSKSIRMDKKNLVLFGMNLKVSEDLCESETQPEHSRKIGYCFGRWYFIIPETVEAQEPEQDSKKSEEEPRIVGIDPGLRKAFTRVSNHGRIDEIGIKTKGTMEKLRTKSYGILKAIKDSKDDKKKNNLGRACYRVNARAKDLVTDFHFKTIKFLMDNYDVIILGKINVQQLMSMKSQNKTNKDHFRFLSHFLFRQRLLMKTSITPHAVVIQDESYTTQTCVKCGVLKKDVGDAEVYKCSRCNLCMGRDISGASNILLRCASETHQEATRTSGRKRKTT

SEQ ID NO: 121 - protein, 208 aa, Phytophthora lateralis
RRQVTPRTYSVYITCGGKSTTCWTSAVCTRLGSGGLRYVGKQKALATIAKRLVPKVDRQVCVAVGDWHQHGGTKGHPSSPVVGLVAALRKRATVMLMDEFRTSKLCAGCFNALAPTRLWCAAAEELRSNKTVLRCTSSGRLLEPRRERGMQQAHSSQSASERGGQTRGIRSRVNRPQCLLAGKGTHTHTRSIRGQHKCAKHSNGSDQF

SEQ ID NO: 122 - protein, 232 aa, Phytophthora lateralis
RHRPQRDFPPAVRLQYLRTGKFYLCVPRHRNFELSDSSRVCAIDSGVRDFISIYDPDGFVVAVYDAENQIARCFASIDHLQSRKTRIRYAPEKSEGLASEGHQVVIPHLPRGAAARVPGVGDGATPKSPRWPSSRNQQEDGLTWSPYKYRNMLEKKMARAGGRLIVCTEPFTSKTCSLCGRINRGLTSQKVFRCPTCATETRMGQETHSSFNWYDTHHRSMQNALNSSTLPP

SEQ ID NO: 123 - protein, 279 aa, Phytophthora cryptogea
QNNNVEVHCRPHHPRRHATSSVLLSELKAAYSAFNNGKSTGIKAAMCVPIVQAFPQSQTGRACAIDPGVRDFITVYDPKGLTLGITDKKEKIFQRCLAIDRLQSRLSSEGRKRIRYRLRRKSYSSYQRVKRMIKDMHQKVSKWLSVNYDEVLLPTFATSEMTKKQKRISSKTSRAMLTWSHYAFRMMLTDKMERTGGRLIECTEPFTSKTCSRCGRINYNIKKQKTFSCPSCNHSLDRDVNAARNIYLMNEHLLAWTLRSSRWNAYSMVSAYTVSTVYV

SEQ ID NO: 124 - protein, 308 aa, Mucor irregularis
LVFQAQHKSNSRKRNTMTITHIKGYYPRNRNNDHNDSAYNFGLALMEPHFTNRMTEEDKVEAQMLVEKFYDKSLSLKEFEDLSSLILKKLLLIPFRKLRFSTYVNGRKSDQLLVKNMQTKFNQDAILIYGNWSAGNSKYHEPVRGKGIRSLLRKGGFKVLLIDEYKTSTFCPQCKFSPVEKFKKIDNPRKHNRHKMPQVLCHGLLRYKTFIHLTLPELTNSFIRCTNRKCLESNMRLWNRDVVGALNFRHILNELRSNKSRPARFFRSHTISTASSASSSSSSSSSSTTPSKRKGKALPNQPTTKKQK

SEQ ID NO: 125 - protein, 233 aa, Mucor irregularis
LKEFEDLSSLILKKLLLIPFRKLRFSTYVNGRKSDQLLVKNMQTKFNQDAILIYGNWSAGNSKYHEPVRGKGIRSLLKKGGFTVLLIDEYKTSTFCPQCKFSPVEKFKKIDNPRKHNRHKMPQVLCHGLLRYKTFIHLTLPGLTNSFIRCTNRKCLESNMRLWNRDVVGALNFRHILNELRSNKSRPARFVRSHTIFTASSASSSSSSSSSSTTPSKRKGKALPNQPTTKKQK

SEQ ID NO: 126 - protein, 230 aa, Mucor irregularis
VAYVLQYIDRLLLHCSSAIEWGRFNLYQGRQSAADEMVEILIDGGKKYNRERRSIRKRKTKRRANKRSNARERPIIEIPTKYEYIDNAKISSDAKHTSHCRPFKFKPAQFELSSKMPLIVFGDGMFGKDNVKLKGNRCGVTDKLWKALKRREKSGNLVAVTVDEYLTSQICSKCKKRRPVDAGNKGRSTLICLECLTIWQRDVNAARNMLEKAESVWKTGKYPEEFKRKK

SEQ ID NO: 127 - protein, 199 aa, Mucor irregularis
AASLFHLYQFTIPILTNHFTTTKVVENIEKKRQPYIPPKVKINLLILKIDVKTLVQFVGDRGTGVGSALKGFRRYGGKWLEELRSKRSTVCITNEHNTSQLCLFCFQKLTHPKGKNQKPIKGSFLCINPACVSVKNGKAAKSRDALSSLAIGISGLSHCLFGTYMPAFSPSKISQFNTDKFKSLSTAFLNEETVRQQRC

SEQ ID NO: 128 - protein, 215 aa, Mucor irregularis
KTRFSTYVNGRKSDQLLVKNMQTKFNQDAILIYGNWSAGNSKYHEPVRGKGIRSLLRKGGFKVLLIDEYKTSTFCPQCKFSPVEKFKKIDNPRKHNRHKMPQVLCHGLLRYKTFIHLTLPELTSSFIRCTNRKCLESNMRLWNRDVVGALNFRHILNELRSNKSRPARFVRSHTISTASSASSSSSSSSSSSSSTTPSKRKGKALPNQPTTKKQK

SEQ ID NO: 129 - protein, 222 aa, Mucor irregularis
SSESHTLFEYYTRAGFKKTNKRILQFKNDDEAFLRVERGIPSHKTANLTTYAAFIEYLLLNLPALFQFYDDRFTSLRFLNYIGRQRADAEMVNIFVTGGKKYLHKQFKQTGRNQDKRGPRKKRKKREKRSDAKRDKGKGREKTRKHRPLPFRQDNRIPLIALGDAVFPSTMRGTISGVARRLPRLLKKAELEGLLVIVPATEYMTSKVKKRKYTRFLNLTTF

SEQ ID NO: 130 - protein, 266 aa, Rhizomucor miehei
TKGDPVRKMLAVLHANVSILCRKSIELINQCQYLMLRGLTRQQLSFLWASFMIRMKKKHQLLLWPHLKHTKQNIGYDKIHPVSSRQSCRQNHEIAKQGFTFYRQAPVLFAFGMDGMTVTHRKGRLPAMDKKLARYLFKQLSRISHDICRIDEYCSSKTCCICLESGRASLVTVWKNPTGDTIYRITQCQNPACGRMLHRDSNAAHILALNAASYIKYRQRSSVLIRKSRELYIATQAGDNNPYEKWTETSRFMADDVSLSFLGRPI

SEQ ID NO: 131 - protein, 225 aa, Rhizomucor miehei
PKTRARTTIWHHRARDKKRWNVSKDGGRRGTKWTTSRKRARADSRKANHRRQKQRWKQSRQENTPRILVAIGRDGVSSNVRRKNAPSPMGTRPGNALIKQARAKGHMVTSIDEYMTSKVCPPPRCAMHGRRSFSYFDHRPPALSRHINQDALDQNGEEDIIRLTVCDAYGMRFHRDGAAAHCQALIGSSIFQHGERPPQFIRSSRRISTDYFSPFPSDGQCLVPV

SEQ ID NO: 132 - protein, 236 aa, Phytophthora rubi
GAHSQRDGRRLLEAPIRRHRREQVYSGKPGQRCQGCDQGATPHQAAHQGEGGHRHAEQESRRIRVQVKRPSPARSTAERDQRYQSQDHKRSEGLPPQVLQLDRLELQDILAAVVPDVADGAQVRAADGGGRHPGVAQPVQGPPRQEAPYPQLHGARHAGLEPLQLLGAAQVQDGAGRGKMVTCEEEYTSKTCSGCGKLKENLGGSEVYKCVFCGAHMDRDLNGAKNILIKNIEMLF

SEQ ID NO: 133 - protein, 213 aa, Klebsormidium nitens
NRISGAQCWRRSAASSHRRALDPGVRTFLTAYSPSEAYKLGDGCVQRLFSLAITLDRLLAFEKRIPKDHRRKQRTVRLRIIKTRRKIAHLRDEMHYKVADFLTRKAKIILLPTFETSEMVRRFQRRIGSKSVRQMSFLSHYKFKQRLIAKAAGRGVRVLIVSEHYTSKTCGRCGEVKQNLEGARTFKCESCFAVIDRDCNGARNILLRAIRRK

SEQ ID NO: 134 - protein, 590 aa, Podila verticillata
FADESDEPQDPTLSAIESFFLRNEARRSFADFPKARFVPGFVYLTEEGLVHALWATETTKVLLQTILRRVGEEDLYFRKDMASLHPVLEGSAPEEPTALEQASLVHSLVIQPRADGSLDLGPVLETFSTKGRAVDYVQEHKGRLIDALFGRGNHPISLQQELDEKRLRLKGTITCNGLEVKALVYDTQYYRPKAARELRAQGIMAQTEHEFLREVPLDIQDNGAEEDDDDDQEGLEGLDDDDEIDAAFLELDESEQETTGPGGSGGQDQTDPDIGLPGWVDVGMDMMDVDRDGIVAAGGFVGPGDLIQQRLPYDQVLIRDPFMGVMTPQVDEDIVLDESALDIHRRRSSSTPAQQNRLIMNFKQASKLVPNIEVHFDHPEKCPDPDNAILLGMDPGEVNSLTITKLDPRFPNQRHVLKVRRSFLSQPDVRFRNALQDRKAAEGINQLESQIPEFSRATLERHFFYLTSCHHLPGTVQGTWTVWDRILNFYQGSSWYLKKKWEVSKARTACLDYAIKAILRLAGGSEGRKHRTDDRPVVMCLGLGSFNSQSGLPSKHSVLERRLVIKVQMHSSKLFIFFISGTHSAFFSLH

SEQ ID NO: 135 - protein, 279 aa, Phytophthora pisi
LMVGPVPMYMLIIVSLAIAIGINLLINYVVPMFFKIRVIAHDFRDFLLSLGQAITLSTFVVNFMKNTAGRKWHETLRLRFPEYQIAISSLPCLKTADARVFLIRMEQVWLNLDYLLFFGIAHNFRKWRFFSSVEHRVAVDDVAKWLIPEAGSHVCVGFGNWSQSDNIKGGPKPPLRPLEKAMRKRATVVKVHEFRTSKLCSACYQPMKMAVFLDPDDPGPDELDADERPLYYDRSVLRCANKNCKKNVLNRDVNAAVNMQTLLTARLQGLPRPAEFVRQ

SEQ ID NO: 136 - protein, 464 aa, Schizochytrium sp.
VEQLRIERDAEKKRKKLEDVAIKALLELQTESRAAPLAQGKREQVDTPRRSHKRKAEVETNGNETVAGIGKQIRARKIRVYPNKEQSQKLMQWFGTVRFAYNKLAEKFMHVDQNVSLAALRKELKQYEVAHAWFKEVPGEVRDCAVRDMDKARKAHLAKKKKGATAVKGGAKFKFRSKKDRQQSFDVRARDWERVRGMFAGLFGPALKSAEGPLPKHVDATVRVVRDFRGCFYVCIPMSVEIKGDDHAPNPDAHSTVAMDPGVRTFMTPFDADGLVTEWGKRDIERVYRLCRHADKLLGRIKDKTATKQQRRRRHRAWRKMFVRIRHIVGEMHKKLATWLCNNYRVIILPSFDTKQMVLRGTRKITSTTARKMLTWSHFNFRQRLLARAELNTWTNVIVCEEAYTSKTCGACGHLHHKIGGAKTFRCPFPDCSYVADRDVNGARNILIRFMTNYLGGHYAANVF

SEQ ID NO: 137 - protein, 505 aa, Acanthamoeba astronyxis
GHTRGDVCTPSVRAYVRRNAVMGFCRAVKATQAFMEERQKEWELKMHLYKKQCAKMETYERECMACEDGHPQLFVNDPDFIEPDRLPHQQQLQSQTHAPKRQQKTHSVAATPMGGKKRKRAPRSQKSTLPPRPPVDMSRVKPPRGDKPEMKERQVKPPSRNDPTHSFTIDCDSDAGHSISWDASRGCMYIMREEVKLMGSPSARQRQLHRLTQRMPNEQQRTPKPCTIKYENGRYYALVVFAIEPQVRPSVVATMESGEPIKAVALDPGVRTFHGLCDTKGRFGEIGTGQIAHMIRIARRSDKIKSHIDTHLLSADQKWKRGTWRPNRQRQTKQDKKKMKRRRHKARRKVRSLNQRVRDLRNDAHWRTARALCERYDHIIVPKFHSSAASRFLAKSSTRELLHWSHYQFRQRLLHKAEQLGAKVHLVTEQYTSMTCSRCLWVNEAFRNNRSKWFECPRCDYALDRDWNGARNILLMNLEKCVGQLRCQSRRHKERRTTPLLSEQT

SEQ ID NO: 138 - protein, 517 aa, Acanthamoeba astronyxis
VRMQRQWLMVILLKASNGHLYNPSVRSYVRRNAVKEFCRAVKSTQAFMQERQKEWDLKMHFYRKQCAKMEAYERERMACEDDHPHFFTNDQDFIKPDRPHQQKLQSHTQAQKRQKKTHSGAATVVEGKKRKRAPRTQKPTIAPRPPVDMSRVKPPRGDKPQMKERQVKPPSRNDPTHSFTIDCDSDAGHSISWDTTRGCMCILKEEVKLMGSPSARQRQLQRLTQRMPNKQQRTPKPCTIKYENGRYYALVVFAIEPQVRPSVMATIESGEPIKAVALDPGVRTFNGLCDIKGRFGEIGTGQIAHMIKIARRSDKIKSHIDTHLLSADQKWTRGTWRPSRQRQTKQEKKKIKRRRHKARRKVRSLNQRVRDLRNDAHWRTARALCERYDHILVPKFHSRAASRFLAKSSTRELLHWSHYQFRQRLLHKAEQLGAKVHLVTEQYTSMTCSRCLWVNEAFRNNSSKWFECPRCDYALDRDWNGARNILLMNLEKCVGQLRCQSRRQKERRTTPLLSEQT

SEQ ID NO: 139 - protein, 255 aa, Acanthamoeba royreba
QTTLHYPNSQYHLMIQCLTAKVPPQENNNSVSFISLDPGVHTFNTFFNHQGQFGSISDSQVKSIIQVAHRADHLKAHIDTQLPGATGQMKCKRAQAHRRVRQINAKRHDLKADAHWKTAQVLCERYDHVMLPKFNSRAVMQVLGRTTTRQMLCWSHFEFRQRLQHKAQQLGARVHLVSERQSTITCGHCLRIEPSAKWFECHRCGYAIDRDWNGARNVALMNVERSLGKMEPYAIEEGGGRRDAHVLRNDDRDFK

SEQ ID NO: 140 - protein, 200 aa, Acanthamoeba royreba
FGSIGDGQVESIIQVAHRADHLKAHVDTQLAGATGQMKCKRAQACRRVHQINAKCHDLKANAHWKMARVLCERYDHVMLPKFNSRAVMQVLGRTTTRQMLCWSHFEFRQRLQHKAQQLGARVHLVSERQSTITCGHCLHIEPTMRKNSAKWFKCHRCGYAIDHDWNGARNVALMNVERSLGKMEPYAIEEKEEDAVMHMC

SEQ ID NO: 141 - protein, 738 aa, Acanthamoeba quina
QPPACASWPIGATCARAASATRASGSTTAATSSLKSPQSRAPTMDTQSRPRRGHPASASPTPGSPARSSGPTSSAKSPSSDASAPTTRSCPKWLVASTSGARVSAPFWTDASRAWSTRSPCCTETDSLALPRSCWSTCLSATTSGSWWSARAIQLRPPLSTPSIHSASWPTTSSPSPPSLWRDRMASALRRIEEHDAIEQPWRKADQARQASLLRKKARNEAAARKANEMRQTAAAAAAAATTTTMTVAGGEKGKGRVGGSGGGGGRKQKRKGPPDAEGGGATHEPRKGSGGGDGAGGLVAFDGKTRKICVFPTAEQKTLLKRWIGTVRWTYNQCVAAVRRRQCAPTKKALRARFVTESGLREAERIKRAKSGGGGGGDVGISWVFETPHDLRDQAVGQFVTAYKNAVQAHGRGKFDIAFRSTKRLQQETVVIRSRDWNRTRGEYAPIFGNTVLRSSESLPVKMDHEFRVTRTKLGRYYISIPVPLLDAKHPIKQQQPLGGVVGGGDNQAPAVAPHAAAAIDPGVRTPFTVYSPEEARVYELGANDFGRIRRLCHHLDDLVGRTTDRDVRKKRRRRMRRAAARMRRRIRDLVDDLHRRAAKWLCETFETIVYPHYETSNMVVGGSKRHRLHSKTVRAMLTWSHFRFKQHLLHKIREYPGCRVVLVSESYTSKTCGACGRINRGLGKSKLFWCEQCGFRTDRDWNGARNIWLKFLTEWCNDSSHGNDDDDKEQQQQQHH

SEQ ID NO: 142 - protein, 366 aa, Picochlorum sp.
ITITYGKWCLEVCQMRGKKGMGDDATALFPRPKDLIGEVTLPVDFLVLFSRIYPLIDGLQRKRMNLLAGINKRNDQTLIHEDIKDLMQLEKVDGIYYAKCKVVGLDPGKKSAATWVYHDPLKQTKHKKWKGDEGEKTMKEERYDSGSIGGGEWRYLSGQKQYTAKMNKRMTAFCPSWRSLSSTKTVDIERTLAAYRKQVELWPQINNAFFHGSKWFQKQRMRKFCKRQKAMEDVVAKIAGTKNKEEQKKVIIAYGDGDKNGTLRGTAPMMSTKLFKKVSENCRVVVTNEFRTSKLCSCCHGIMSQLRKQFRMKRCLQNDCIRTVWDRDINASINILNLFLHYCYSVKDNGEGERLSPFKRKRGCDE

SEQ ID NO: 143 - protein, 1021 aa, Picochlorum sp.
STASVSLATGTNVGCESHHVNEDFYNYQACMMATADGEMQAYVQDTSPKLGLYRKPSGKQTQYENLVVKVIKPGSLGGYQNHNRETKGQWRGVARSPRLKNLLFDTATMLGHISFEATQAAHYHVYRCLENGIDLGPMDFNGFWYKIFDAIKDLRYGGGLSHIDTPLYDSLREYEENAPLRRGDHHLDGDEPFLGMWDLPGHMYWRHACLKAAAKTKEQNLGIILQTNAYHNLGKVIKVRIAEYFGDKYADNFRSLVSAIAKCIWDAQPLEKVKEGYKRLSDLTQEEIREIACHVIDPIREKFPDETGRKDNSKMIQFVYFVMGEVIEYNRVRSRQRGAQVVKFVNVCVGQQLANDIEREMGDLSKKKFVLFMKHALDIFRQCSGSDTSSVCRDIGIRCSRHVSMNGKYRSHILRRLSERILYQTENSMLKDELVLDQHQTMWIERTAAQLQLPSSLSEFESKKDLFVKYLREYIVPKLRESNLCVAQRDHQNGNNKIPWGRKIVVPSILPLAKKRACHVSIPNDAITSLAKFLAEEDKDIEQKITPMQIILSEAKERKMAIEKEIDERMLQEQTDEEYEMVCQIERNKIASEKQFRAIPTGKIHKYKMRPEETAFSMDRKKRKEEYLSSSEEFKQAEKEWERAKLLYQECCWMALFNFKVKRRQDAHEWLFGGELSTDGVDVSMQYYRIKTDVEVEADQKEKKESGKKALQRKTKRTGKKPAGSGSALTGDKSDDISSRADWRRAKDVLEDDLSNLCVFDPGPSGHVGIRMDRSKFDTLKENRKHGDYDPFETIHLSNHEMRARSGKLKRMKLNAIWSESKPKIRVWNATAPSRKVATTAEILDFCRNTNSQLHDVYGFYSQNCFRRQRFSVYSRTQHMLDMMVEKICGTSERKVQERTVVVFGNAAINSGECRTGRICLGELKRLLRQRCCYIEVDEFRSSQYCCACQTKLEPPPRVGLHKRWKVRRCMNNECERAFWQRDVNAAINLSKFFLWEVNGEDKDKVFRRPCRLDEDDVPDV

SEQ ID NO: 144 - protein, 215 aa, Picochlorum sp.
TCMFTMKPIVCKVIGIDMGKSNVLTAAYRHTCSQRVHMSNVKTSKEDRFKTLSKTNKAWRHYSGQMAYPFLIKKWIKKFVPNLDSRPTTKTTNTETIMESYRFMNNQWENGTDAESGGGLKEAFFSPMRCLCCMEGMKAGCVFRLKCCRNNPCVRTNWNRDTNAAINMFNLLLWKTLYEDRPRTFSRTERKKRNKYVVPSQYIRALICLQRKFYL

SEQ ID NO: 145 - protein, 202 aa, Parasitella parasitica
YICSSVNARRPLRDFYFSNSNAKKRRKLELCRETYYDRLASEERKFSASQRPVMMIGDRGHGYNSTIKGHQKWGGLWKQKRHARYTTTLVTNEHNSSQICLFCFHKLSHPITSQSGKIKRNNGSFICLHPGCPSQFTVRSRDKVSALAIGLAGAAHLLLGATFPCFDPRNTSEKQRLFFKSARCFLNRNRSLGLPVVEGDTQ

SEQ ID NO: 146 - protein, 211 aa, Parasitella parasitica
YIYLAKHADQIHQEILRAPQSAEDDKTNTFKLTARFIDKACLKQPNIHSNHKRVQRRRVTGRIRLKKVCQKHCSRHKTKLNGRSAVTFVGDWSGVSTFVKGHTRRSTKPYYKQSSAPENDHLVVVDEFASTITCNSCFSRNQKQFCRLPSGKIRRVPGAVYCINPQCPRRLNSNATTTNRDRNGAMNIALVGFSSPISEDGHPLPPFSKII

SEQ ID NO: 147 - protein, 214 aa, Parasitella parasitica
LQIQYNMQERKISRSFYFSSAMCRLRRSIELATNRTKDRGAATERRFVKRGSNNALVMGIGNAGTGVGSTIKGYERRGGKWLPKLHTRYAKVAMTDEYMTSQLCLYCYLPIVHAKTSSNKSILGSARCLNPKCEAFKHGRACNNRDVMSATAIGISAMTKFFIQQELPSIYKRQSPVISPTFSTLGHLRNDAPCWLPRLCGLNTFWVSYFTMLS

SEQ ID NO: 148 - protein, 735 aa, Tilletia horrida
HNSLHALFPLLDQWRSPQSTTSMSTSQHTDDISDNESASDANSSPQLHPKQPQPLENDDDRATHKAWLHPCVRGPTDKKDAVISKIRQIVEAMSQAEHIATWLVSFILERELNEPSPIQDSVTVNLYNSHIEMLSDDTGGGRSSSPLYKLFEESLGFALKGHLPDAPSTARGSAHYRRTCRNLIAHHSPEFRQLFPFPISSVVIERATLQAAATRWETAYLNQIQKHLFDTLMFIVNKASNYALARKFRHSPDARLREAAQSRTENVQAYKAWLQGTGSKPDTNDAGIGRVDLLFRQLEPLLRPVIGTHGRRQAQATDETSATLTLQQTIQSQPAKFLRLLLHTLALLGNDNRFKDSRPPLALPVRRSFIPTHQLLDASCMKLFDPSVEYDINNRKQKRTDAMRLSAWNQVFDIDKLPFATRTGEAGKRTDRWTLNASIVTDGYAISVHKRRSKPISAKRTRQRRAKRTRGSASTARAIAAARGESAVPKLTELGDADVYRIADKVVFIDPGRHNLLYCMAVWDRKGDGGMSTLRYTSAQRRHGLGLELFAKRIQQYERSLQPDLAATLQDFRKTTMPSARKFTRQGIATWLKIYSQIFEPMTRIYKHPLYRELKMLRYSRTQREISRLIQAFTAKYGAEAVVIMGDWKSGKVRPNALPGHIRMLFDNFLFRETVSEGSSRHALSNDNGRSVHQSGFRGVSRRRVQDEFFLPRVPRTRSKINGDPIQQTPAAERY

SEQ ID NO: 149 - protein, 270 aa, Sporisorium scitamineum
EKTSSSSSSSQQDPSTNTTRFLSQVTQTNQAASRAPTKATRPRQLNSTQRRYLRKHFRRINSKMRNLVREIYCRTAYFLALSSDVIIVPRMEVHNMVRSRRPSRRTKQELLRWSHGAFLDRLTIKCHDVQFDARYPHKTAAATLLVQPEGYTSKTCSNCGQLHQSLGSSKRFLCPTCCYSADRDHNGAFNMIIKAIRWHSPRRSGTATLDSNAHRQLHAIFQPRLVHLFSTLFRLCFNFVPTLFQLCIDTVPTFSFLCRYLVTTSFFYAI

SEQ ID NO: 150 - protein, 257 aa, Balamuthia mandrillaris
AGVFRYNQAPSSSRVPKVVAIAPGVRTFGTCFVGPEGKAYEWGRNDIGRIYRICHYLDDLQSRWGQPGVKPRQRYRMRRAAARMRERIRNLVDEVHKKMALWLVKKHDLVLLPKFDTSNMVLRRSGRCIPSKTARAMLGWAHYRFRMRLLNKAREYPHCRVEIVDEHYTSKTCGRCGRIHQKLGGKKVFRCPRCRLEADRDIHAARNVLLCFLAHQDIIVAKGRELYGQSPAALGPTPVNASTHCGAFVQDLQNVQV

SEQ ID NO: 151 - protein, 216 aa, Balamuthia mandrillaris
APKERGRHHRLGSRSAHIHDHLQRLRGGHRVGKADINEIGKLCHRLDRMQSKGTKGNHRQRRRLRRAAARLRQRIRNLVDDLHKKLVSWLVRNFSLILLPEFRSQQMVRRGHRRIGSRTARAMLTWSHYRFRQRLLNKAQQFPSCTVCLCDEEYTSKTCGKCGQVHHQLRGNKTFRCPQPECGYQADRDANAARNILIRFFTLQALTTSSSSVRGR

SEQ ID NO: 152 - protein, 604 aa, Balamuthia mandrillaris
DLRTTKKEITTLVFWANEHVSRQNNPSFSHAFEGKVVGWGVGWGVRNGCHGLAIHFGRVHKEGGRATTSATSTATRKRRAENAPAAPQAQKRGRPQAAPAQPFWNQFSSEIGRRLIRPEALCLEEPFACGSGWFTACKHIPNGEKVLEEEEEKKEKEEKEKEKEEEEKNQKGLLGLIEGLVPSRPAVQLTKKGKNGEEKPVVGRVEKIRLYPGSEQKKTLAKWFGTVRWTYNKAVEFHREHQGMPRDEMKEQVRKKFLNNSNFKGENKSLAWVLETPRFIRSDAVDDFFNGVKSSLAAGRGTTGFQMKFRGRKDKSQSLSIQAREWNHNSSIRQLFFGEARIKARDKNYQVPSEVLYAVRLVKDTRLGHYYLCVPQPLKLMGESQAREHRRREAGIIALDPGVRTFMTTYNGCGEVTEWGKADINEIGKLCHRLDRMQSKGTKVNHRQRRRLRRAAARLRQRIRNLVDDLHKKLVSWLVRNFSVILLPEFRSQQMVRRGHRRIGSRTARAMLTWSHYRFRQRLLNKAQQFPSCTVCLCDEEYTSKTCGKCGQVHHQLGGNKTFRCPQPECGYQADRDANAARNILIRFFTLQALTTSCSSVRGR

SEQ ID NO: 153 - protein, 577 aa, Balamuthia mandrillaris
MASCPQCGKKFATSHGLAIHFGRVHKEGGRATTSATSTATRKRRAENAPAAPQARAQKRGRPQAAPAQPFWNQFSSEIGRRLIRPEALCLEEPFACGSGWFTACKHIPNGEKVLEEEEKKKEKEKKEEEEEEKEKEEEEKNQKGLLGLIEGLVPSRPAVQLTKKGKNGEEKPVVGRLEKIRLYPRSEQKKTLAKWFGTVRWTYNKAVEFHREHQGMPRDEMKEQVRKKFLNNSNFNGEDKSLAWVLETPRYIRSDAVDDFFNGVKSSLAAGRGTTGFQMKFRGRKDKSQSLSIQAREWNHNSSIRQLFFGEARIKARDKNYKVPSEVLYAVRLVKDTRLGHYYLCVPQPLKLMGESQAREHRRREAGIIALDPGVRTFMTTYNGCGEVTEWGKADINEIGKLCHRLDRMQSKRTKGNHRQRRRLRRAAARLRQRIRNLVDDLHKKLVSWLVRNFSVILLPEFRSQQMVRRGHRRIGSRTARAMLTWSHYRFRQRLLNKAQQFPSCTVCLCDEEYTSKTCGKCGQVHHQLGGNKTFRCPQPECGYQADRDANAARNILIRFFTLQALTTSSSSSVRGR

SEQ ID NO: 154 - protein, 591 aa, Balamuthia mandrillaris
MASCPQCGKKFATSHGLAIHFGRVHKEGGRATTSATSTATRKRRAENAPAAPQARAQKRGRPQAAPAQPFWNQFSSEIGRRLIRPEALCLEEPFACGSGWFTACKHIPNGEKVLEEEEEKKEREEEEEEEEEEKEKEKEEEEKNQKGLLGLIEGLVPSRPAVQLTKKGKNGEEKPVVGRVEKIRLYPRSEQKKTLAKWFGTVRWTYNKAVEFHREHQGMPRDEMKEQVRKKFLNNSNFNGEDKSLAWVLETPRYIRSDAVDDFFNGVKSSLAAGRGTTGFQMKFRGRKDKSQSLSIQAREWNHNSSIRQLFFGEARIKARDKNYKVPSEVLYAVRLVKDTRLGHYYLCVPQPLKLMGESQAREHRRREAGIIALDPGVRTFMTTYNGCGEVTEWGKADINEIGKLCHRLDRMQSKGTKGNHRQRRRLRRAAARLRQRIRNLVDDLHKKLVSWLVRNFSLILLPEFRSQQMVRRGHRRIGSRTARAMLTWSHYRFRQRLLNKAQQFPSCTVCLCDEEYTSKTCGKCGQVHHQLGGNKTFRCPQPECGRLSLSHILILTKRDARWRNFSARWKTPSMKNKKDIAHSRARTCDP

SEQ ID NO: 155 - protein, 586 aa, Balamuthia mandrillaris
MASCPQCGKKFATSHGLAIHFGRVHKEGGRATTSATSTATRKRRAENAPAAPQAKAQKRGRPQAAPAQPFWNQFSSEIGRRLIRPEALCLEEPFACGSGWFTACKHIPNGEKVLEEEEKKKEKEKKEEEEEEKEEEEEEKEKEKEEEEKNQKGLLGLIEGLVPSRPAVQLTKKGKNGEEKPVVGRVEKIRLYPRSEQKKTLAKWFGTVRWTYNKAVEFHREHQGMPRDEMKEQVRKKFLNNSNFNGEEKSLAWVLETPRYIRSDAVDDFFNGVKSSLAAGRGTTGFQMKFRGRKDKSQSLSIQAREWNHNSSIRQLFFGEARIKARDKNYKVPSEVLYAVRLVKDTRLGHYYLCVPQPLKLMGESQAREHRRREAGIIALDPGVRTFMTTYNGCGEVTEWGKADINEIGKLCHRLDRMQSKGTKVNHRQRRRLRRAAARLRQRIRNLVDDLHKKLVSWLVRNFSLILLPEFRSQQMVRRGHRRIGSRTARAMLTWSHYRFRQRLLNKAKEFPSCTVCLCDEEYTSKTCGKCGQVHHQLGGNKTFRCPQPECGYQADRDANAARNILIRFFTLQALTTSSSSSVRGR

SEQ ID NO: 156 - protein, 681 aa, Balamuthia mandrillaris
ENPPKICTTSPPRSWSSAMASPSVAWPSGTKRARWRPSARQAGTAATRQSTLDSFLASPPQPPNPRPPKRSRPSTAESPVTDNESTSSIRLRVCEKPTRGTRSTATSARASTGSARTLSPFWSRSLLDVSRRLWLPTETASVGSPTSSSSTSSVSAEPVSWCTVRTTRRTTSPSQATSSPRTSSPSLPSLSVDTTVKDDIQLAKETAQARQRGRGGRKKKAPKETESPSGGGGEGEEDQTLFKTRKIRLRPTREQARILNRWFGGARKVWNTTLRELKRGNVGWKLNQMQGVCVVRPSITLDYLEGVPYSIKHEAVKQLHSNHLACETLKDQGHIRRFSVKYKRKKDHRTESIKILGHYIHWWNGFVYPDELHKSKLWQEANKRKPKQKRTRNPHVKHVDPLFDPVADAFEGLELDDRGRLKRTCTLHKDKRQHFWLCVPIPIQQHERAPENQGSIVALDPGVRTFLCGYSPTEGAVREFGRNDFGRIWRLGKHADALQSKIDRSPPSRRKRKLRALLKLRKRITNMVDDFHRKTALFLCRRYDHVIIPTFGVKGMTAIRGRRRRKIGKKTARMLYSWGHYRFRQWLMHKAREWGTRVYVRSEAWTSKTCTWCLRVTHEQKQHNRRERIFECKHRDCGIRLDRDINGARNILLRSLCCAALPDGANGGVLVGKWMGASEAL

SEQ ID NO: 157 - protein, 578 aa, Balamuthia mandrillaris
MASCPQCGKKFATSHGLAIHFGRVHKEGGRATTSATSTATRKRRAENAPAAPQARAQKRGRPQAAPAQPFWNQFSSEIGRRLIRPEALCLEEPFACGSGWFTACKHIPNGEKVLEEEEKKKEKEKKEEEEEEKEKEKEEEEKNQKGLLGLIEGLVPSRPAVQLTKKGKNGEEKPVVGRVEKIRLYPRSEQKKTLAKWFGTVRWTYNKAVEFHCEHQGMPRDEMKEQVRKKFLNNSNFKGENKSLAWVLETPRFIRSDAVDDFFNGVKSSLAAGRGTTGFQMKFRGRKDKSQSLSIQAREWNHNSSIRQLFFGEARIKARDKNYKVPSEVLYAVRLVKDTRLGHYYLCVPQPLKLMGESQAREHRRREAGIIALDPGVRTFMTTYNGCGEVTEWGKADINEIGKLCHRLDRMQSKGTKVNHRQRRRLRRAAARLRQRIRNLVDDLHKKLVSWLVRNFSVILLPEFRSQQMVRRGHRRIGSRTARAMLTWSHYRFRQRLLNKAKEFPSCTVCLCDEEYTSKTCGKCGQVHHQLGGNKTFRCPQPECGYQADRDANAARNILIRFFTLQALTTSSSSVRGR

SEQ ID NO: 158 - protein, 746 aa, Balamuthia mandrillaris
GSTTTSPMKAFVVGRRRETDVCASPVPQEATVSTTSTTSNASSTKRGSKRKRNTSATPALAAVTKGQTLLNRWTISGHSTPATRSSRTSAPASITSGGAFSPFWNACTQAWSPLLWLPTRTASAATVSSCLTSYSAKQARDSWFSVTKTPQRTEPGNSLMTCWPSAITSWLRTTAAVPLSIDASAAKPEGQEGEKKEEEEEEEEEEEEEEEEEEEEEEEEEEEEELTTMTTTTKPKEYKVRKIRLFPTSLQKAVLAKWFGASRWTYNQCLAGVKDGSVKRTMTALRKRYLNQKDVPDLPLWVLETPFDVRDEGMRDLVKAYASNLAKQRKQKKRLKFEVQFRSKKDPQESIVIHSKHWVGPGRFYPSIFKKCLKDEIADREEWKRKQKLLDDFRGRQGGLELMLKWRKGRRMRCAHWIPLQTQRQKGRTPKKKRGKTKRERRGRVADAKPTGLEDELTLRGAEPLPEVLPSDSRLIRTRWGKYYLAIPMPLEGSDNQAPSSSRVPKVVAIDPGVRTFGTCYVGPDGKAYEWGRNDIGRIYRICHYLDDLQSRWGQPGVKARQRYRMRRAAARMRERIRNLVDEVHKKMALWLVKKHDLVLLPKFDTSNMVLRRSGRRIPSKTARAMLGWAHYRFRMRLLNKAREYPHCRVEIVDEHYTSKTCGRCGRIHQKLGGKKVFRCPRCRLEADRDIHAARNVLLCFLAHQDIIVAKGRELYGQSPAALGPTPVNASTHCGAFVQDLQNVQV

SEQ ID NO: 159 - protein, 215 aa, Balamuthia mandrillaris
SLYSLYAVRLVKDTRLGHYYLCVPQPLKLMGESQAREHRRREAGIIALDPGVRTFMTTYNGCGEVTEWGKADINEIGKLCHRLDRMQSKGTKVNPRQRRRLRRAAARLRQRIRNLVDDLHKKLVSWLVRNFSVILLPEFRSQQMVRRGHRRIGSPTARAMLTWSHYCFRQRLLNKAQQFPSCTVCLCDEEYTSKTCGKCGQVHQLGKQDLSVPST

SEQ ID NO: 160 - protein, 355 aa, Balamuthia mandrillaris
WGEWRRSAFIRARNKRRRWPSGSAQYDGPTTRPWSSIVNIKEREEMKEQVRKKFLNNSNFKGEDKSLVWVLVTPRFIRSDAVDDCFNGVKSSLAAGRGTTGFQMKFRGRKDKSQSLSIQAREWNHNSSIRQLFFGEAPIKARDKNYQVPSEVLYAVRQVKDTRLGHYYLCVPQPLKLMGESQAREHRRREAGIIALDPGVRTFMTTYNGCGEVTEWGKADINEIGKLCHHLDRMQSKGTKGNHGQRRRLRRAAARLRQRIRNLVDDLHKKLVSWLVRNFSLILLPEFRSQQMVRRGHRRIGSRTARAMLTWSHYRFRQRLLNKAKQFPSCTVCLCDEEYTSKTCGKCGQVHLRRA

SEQ ID NO: 161 - protein, 282 aa, Balamuthia mandrillaris
PGLACPRLLRRRASRWGKYYLAIPMPLEGSDNQAPSSSRVPKVVAIDPGVRTFGTCYVGPEGKAYEWGRNDIGRIYRICHYLDDLQSRWGQPGVKARQRYRMRRAAARMRERIRNLVDEVHKKMALWLVKKHDLVLLPKFDTSNMVLRRSGRRIPSKTARAMLGWAHYRFRMRLLNKAREYPHCRVEIVDEHYTSKTCGRCGRIHQKLGGKKVFRCPRCRLEADRDIHAARNVLLCFLAHQDIIVAKGRELYGQSPAALGPTPVNASTHCGAFVQDLQNVQV

SEQ ID NO: 162 - protein, 628 aa, Balamuthia mandrillaris
TASWPPRRSPEPSSPKKIKAVYCRVSSHGQREHLKHQIESLREAYPRHKVYSDIGSGINWKRKDFVALLEQVLAGRVEEVVVAHRDRLCRIAYELVEHVFRKCGTRLLVHRPDDEEDDEPEPSNVLAEDLLSLVTVFVCRHHGQRRYTAGQGNSTSAPKRPRRKEKEGSQRDRKSKRRRRRGEEDQTLFKTRKIRLRPTREQARILNRWFGGARKVWNTTLRELKRGNVGWKLNQMQGVCVVRPSITLDYLEGVPYSIKHEAVKQLHSNHLACETLKDQGHIRRFSVKYKRKKDHRTESIKILGHYIHWWNGFVYPDELHKSKLWQEANKRKPKQKRTRNPHVKHVDPLFDPVADAFEGLELDDRGRLKRTCTLHKDKRQHFWLCVPIPIQQHERAPENQGSIVALDPGVRTFLCGYSPTEGAVREFGRNDFGRIWRLGKHADALQSKIDRSPPSRRKRKLRALLKLRKRITNMVDDFHRKTALFLCRRYDHVIIPTFGVKGMTAIRGRRRRKIGKKTARMLYSWGHYRFRQWLMHKAREWGTRVYVRSEAWTSKTCTWCLRVTHEQKQHNRRERIFECKHRDCGIRLDRDINGARNILLRSLCCAALPDGANGGVLVGKWMGASEAL

SEQ ID NO: 163 - protein, 587 aa, Balamuthia mandrillaris
MASCPQCGKKFATSHGLAIHFGRVHKEGGRATTSATSTATRKRRAENAPAAPQARAQKRGRPQAAPAQPFWNQFSSEIGRRLIRPEALCLEEPFACGSGWFTACKHIPNGEKVLEEEEKKKEKEKKEEEEEEKEKEKEKEKEKEKEEEEKNQKGLLGLIEGLVPSRPAVQLTKKGKNGEEKPVVGRVEKIRLYPRSEQKKMLAKWFGTVRWTYNKAVEFHREHQGMPRDEMKEQVRKKFLNNSNFNGEDKSLAWVLETPRYIRSDAVDDFFNGVKTSLAAGRGTTGFQMKFRGRKDKSQSLSIQAREWNHNSSIRQLFFGEARIKARDKNYKVPSEVLYAVRLVKDTRLGHYYLCVPQPLKLMGESQAREHRRREAGIIALDPGVRTFMTTYNGCGEVTEWGKADINEIGKLCHRLDRMQSKGTKVNHRQRRRLRRAAARLRQRIRNLVDDLHKKLVSWLVRNFSVILLPEFRSQQMVRRGHRRIGSRTARAMLTWSHYRFRQRLLNKAKEFPSCTVCICDEEYTSKTCGKCGQVHHQLGGNKTFRCPQPECGYQADRDANAARNILIRFFTLQALTTSSSSSVRGR

SEQ ID NO: 164 - protein, 210 aa, Balamuthia mandrillaris
GALCRSSGERHSTKPLLPLRASAFPCFMGESQAREHRRREAGIIALDPGVRTFMTTYNGCGEVTEWGKADFNEIGKLCHRLDRMQSRGTKVNHRQRRRLRRAAARLRQRVRNLVDDLLNKAKQFPSCTVCLCDEEYTSKTCGKCGQVHHQSGGYQADRGQRRPNTAAPKQPYRPLTEEEEVVSACNVTLTILRRVIYSPPRRAPAFDKNK

SEQ ID NO: 165 - protein, 232 aa, Balamuthia mandrillaris
GRINEAIFGELAAALPIGQKRVGPKLTEDLILAEGLGSTPEPMEPTRVKARRRYRMRLAAARMRERIRNLVDEVHKKMALWLVENHDLVLLPEFATGNMVLKRARRRIGSKTVRAMLGWAHFRFRQRLLNKAREHPRCRVEIVSEAYTSITCGHCGQLRRDLGKKEVFYCPHCHLKAGRDIHAARNILLRYLATHNYYPQTTTTTTSTRADESLPMGRDGLLALGPTPSYVA

SEQ ID NO: 166 - protein, 467 aa, Balamuthia mandrillaris
MASCPQCGKKFATSHGLAIHFGRVHKEGGRATTSATSTATRKRRAENAPAAPQARAQKRGRPQAAPAQPFWNQFSSEIGRRLIRPEALCLEEPFACGSGWFTACKHIPNGEKVLEEEEKKKEKEKKEEEEEEKEKEKEKEKEEEEKNQKGLLGLIEGLVPSRPAVQLTKKGKNGEEKPVVGRVEKIRLYPRSEQKKTLAKWFGTVRWTYNKAVEFHREHQGMPRDEMKEQVRKKFLNNSNFKGENKSQAREHRRREAGIIALDPGVRTFMTTYNGCGEVTEWGKADINEIGKLCHRLDRMQSKGTKVNHRQRRRLRRAAARLRQRIRNLVEDLHKKLVSWLVRTFSVILLPEFRSQQMVRRGHRRIGSRTARAMLTWSHYRFRQRLLNKAKEFPSCTVCLCDEEYTSKTCGKCGQVHHQLGGNKTFRCPQPECGYQADRDANAARNILIRFFTLQALTTSSSSVRGR

SEQ ID NO: 167 - protein, 398 aa, Balamuthia mandrillaris
STTKRSREKGQWPSFNPSRRAQALRLTFAFEAAVPIGSRFYPSIFKKCLKDEIADREEWKRKQKLLDDFRGRQGGLELILKWRKGRRKRCAHWIPLQTQRQKGRTPKKKRGKTKRERRGRVADAKPTGLEDELTLRGAEPLPEVLPSDSRLIRTRWGKYYLAIPMPLEGSDNQAPSSSRVPKVVAIDPGVRTFGTCYVGPEGKAYEWGRNDIGRIYRICHYLDDLQSRWGQPGVKARQRYRMRRAAARMRERIRNLVDEVHKKMALWLVKKHDLVLLPKFDTSNMVLRRSGRRIPSKTARAMLGWAHYRFRMRLLNKAREYPHCRVEIVDEHYTSKTCGRCGRGREEGPVAPVVAWKQTETSMLPGTSFCVSWHIRTSLWRKVGSCTDRVRQHWVLHP

SEQ ID NO: 168 - protein, 218 aa, Balamuthia mandrillaris
APKERGRHHRLGSRSAHIHDHLQRLRGGHRWGKADINEIGKLCHRLDRMQSKGTKGNHRQRRRLRRAAARLRQRIRNLVDDLHKKLVFWLVRNFSVILLPEFRSQQMVRRGHRRIGSRTARAMLTWSHYRFRQRLLNKAQQFPSCTVCLCDEEYTSKTCGKCGQVHHQLGGNKTFRCPQPECGYQADRDANAARNILIRFFTLQALTTSSSSSSVRGR

SEQ ID NO: 169 - protein, 558 aa, Balamuthia mandrillaris
MASCPQCGKKFATAHGLAIHFGRVHKEGGRATTSATSTATRKRRAENAPAAPQARAQKRGRPQAAPAQPLWNQFSSEIGRRLIRPEALCLEEPFACGSGWFTACKHIPNGEKVLEEEEKKKEKEKKEEEEEEKEKEKEKEEEEKNQKGLLGLIEGLVPSRPAVQLTKKGKNGEEKPVVGRVEKIRLYPRSEQKKTLAKWFGTVRWTYNKAVEFHREHKGMPLKEMKEQVREKFLNNGNFNGEDKSLAWVLETPRYIRSDAVDDFFNGVKTSLAAGRTGFKMKFRGRKDKSQSLSIQAREWNHSKSIRQLFFGEARIKARDKNYKVPSEVLYAVRLVKDTRLGHYYLCVPQPLKLMGESQARELRRREAGIIALDPGVRTFMTTYNGCGEVTEWGKADINEIGKLCHRLDRMQSKGTKGNHRQQRRLRRAAARLRQRIRNLVDDLHKKLVFWLVKNFSLILLPEFRSQQMVRRGHRRIGSRTARAMFTWSHYRFRQRLLNKAKQFPSCTVCLCDEEYTSKTCGKCGQVHHQLGGNKTFRCPNPSVATRPIEMPTPPETS

SEQ ID NO: 170 - protein, 391 aa, Phytophthora multivora
LMKKYRPIAVLKSMSKYFRNNKKSRARIRQVHDEVRDSAFRDFKKAVKSSLSLFFTKKAKNEKTTYPDMKFKSKFSPSNTIEIRSRHIKTLDRDGVQLLQFHKTFFGFQKNEGIALQETFPELMASVRLQRLREGEHYIIVPRLREFPQPDCKRSCAIDPGVRNFVTVYDPNGRTLSVKDSRGVLKKKFEAVDEMKSILQKMNNLCKSRHLTQVRTKAKKGINSCKSAEHRLRYRLRRRIRFTSRKATRTVNDMHQKLSSWLASRYQDVLLPSFQTSEMVRRYFLEVASDATPEAAATVQKRKIKSPTARAMMALAQYRFKMLLKYKMERAGGRVIDCEEEYTSKTCSSCGEIKNNLGGSDVFRCSFCHGRYSRDVNAARNIFHKNMGLVP

SEQ ID NO: 171 - protein, 391 aa, Phytophthora multivora
LMKKYRPIAVLKSMSKYFRNNKKSRARIRQVHDEVRDSAFRDFKKAVKSSLSLFFTKKAKNEKTTYPDMKFKSKFSPSNTIEIRSRHIKTLDRDGVQLLQFHKTFFGFQKNEGIALQETFPELMASVRLQRLREGEHYIIVPRLREFPQPDCKRSCAIDPGVRNFVTVYDPNGRTLSVKDSRGVLKKKFEAVDEMKSILQKMNNLCKSRHLTQVRTKAKKGINSCKSAEHRLRYRLRRRIRFTSRKATRTVNDMHQKLSSWLASRYQDVLLPSFETSEMVRRYFLEVASDATPEAAATVQKRKIKSPTARAMMALAHYRFKMLLKYKMERAGGRVIDCEEEYTSKTCSSCGEIKNNLGGSDVFRCSFCHGRYDRDVNAARNIFHKNMGLIP

SEQ ID NO: 172 - protein, 329 aa, Phytophthora multivora
SHPYMRFKSRYAPSNTIEFAARSFTMVHEHRLRFKPTYFGFDRLDGIELRGQMPELTMSVRLQRLREGEYFIVVPQKKAFTRSETTRICAIDPGVRNFVTVYDPEGRAFSVNDFGLTLKTKFEEVDAMKSTLAILDNESKAKHPDKVPTKHKRGHRHSKTKQHRQRYRLRRRIRLTSRKATRVVKDMHHKLASWLSAHYYNVLLPSSQTSEMVRRYLVDVAADATPESTSDEARVTFQKRKIRSPTARAMLAQAHYQFKILLKYKMARVGGRVIDCEEEYTSKTCSNCGAIKEGLGGNSVFRCAACGSAFDRDLNAAKNIFHKNMLLLG

SEQ ID NO: 173 - protein, 473 aa, Phytophthora multivora
APIARHIMDELTDLGVFGDDATKVNSISKLRLYPTKKQKQKLDQMFAANRAVYNKLVGMSKEDLATRLVTRDKKVKMTLRQLGEKYRPIAKLGTMDKYFRNKKGLTRHREVPDEVRDSAYRDFMKAVKASVAGFFAKREKDEKASHPCMRFKSRYAPSNTIEFAARSFTMVHEHRLRFKPTYFGFERLDGIEVRERMPELTMSVRLQRLREGEYFIVVPLKKAFTRSETTRVCAIDPGVRNFVTVYDPEGRAFSVNDSGLALRTKFEAVDAMKSTLAVLDNESKAKHPDKVPTKHKRGHRHSKTKPHRQRYRLRRRIRLTSRKATRVVKDMHHKLTSWLSAHYYNVLLPSFQTSTMVRRYLVDIATDATPESTSDEAQVTSQKRKIRSPTARAMLAQAHYKFKILLKYKMARVGGRVIDCEEEYTSKTCSNCGAIKEGLGGNRVFRCSACGSAFDRDLNAAKNIFHKNMPLLG

SEQ ID NO: 174 - protein, 274 aa, Phytophthora taxon totara
GADPGYRDMFMACTDATNTEQHSDEFMSYPSSKIYSNSGYNKSNRYIRRKMNRNADVKRVFQSMPSAETASLYKLRLYMYYAVPKMEKLFLFFTRSNIRNMRFRRKMLSDKNLAIACRELADPPEQRTLVVFGDLNISNKGGVIKKNKPGPVMRLQRKLREFCDVMVVNEYLTSKIHHDCKNPARMENQKVKRRYRRDRKLHTEGVHKVFHCLKRKNGCGASVNRDVNGSKNILAVGLFQLLNGVDSRPERLQRPDHFNKKDAEGDQDVKGRTT

SEQ ID NO: 175 - protein, 203 aa, Phytophthora agathidicida
DTGVVYAMPSFKTASYDTYFRRLQFFWMHLRFLLAFSAEQAFRRWRFTQGRAKMTALNTFAKRLVPIASKQVCIAYGDWSRRDGIKGHATGPVKWFADALKQRATVISVDEYRASMTCSCCHQRRKQARLFTQIKRKADEVDIRTKERPSKKEVKEIEEMQMFKNPKLPNKKVVLKRARNVLRCTNRRCKATFWNRDVNTARN

SEQ ID NO: 176 - protein, 292 aa, Phytophthora agathidicida
VAGDRWFSEHHGGWYAVIPSQVDEINSATALDPGVRCFLTGTDMEGNICEIAPGTQEKLDRFRKRIADAQRVISRFKSRRKHRYRNYRTYVRAKREFACATACQNNVIKDLHRKACYYLVNRYDTIILPKFSTSELLRSSKAQNHKFNEHLLSLKHFQFRELLRTKCVRPGTALIICSEMYTSKTRERCNSLHLTLGSNPVFKCPHCEPTASRNANAAYNILRFVCAGSLEIKQEGAGGGRTIAARPQCGSWRGGGHSSAVKLKSCLSDLDLESSLRWYMCWKSLKALYAFY

SEQ ID NO: 177 - protein, 275 aa, Phytophthora agathidicida
RMQTPHAVIQILQGTVKSFTVLPTKKGFGVSHMKMDSTGLRELMLRCGLNPPGIHQRNRVRGQFWQRFFCIDKVETENRKFANEIGTDGSAVSIRVRKPEYEAITQPKAPAMAMFDARWGLDPGRCNLFVATNQNGDTVSCTAAEFCEDARYTKSCQKIRRWTKDRDDIRAAQQAIPTMKTASVDGFRRYINIKTAHMDLLMTFQRRKPFRRHRLRRYIYKKRKLQKLCRTLVLPGQRVAVGFGDCSNYDPTGIIKGHPNVPAKEFERELAETRG

SEQ ID NO: 178 - protein, 604 aa, Aurantiochytrium sp.
GLLARPRQAAPRPIGRDPIGCQRARDRASFAQDDAAQQVQRLHVRARIASPALGRAAWLLQQATGEVLSPLRARECHARRRYTAEISSKLWSVSNTDMRELPHNEWPKSLHDMGCGSWFTTCAYRAIWRLPSQVPLWQVVDDVEQLQIEKQWQLRIYGMPVQQVVTPEEARERSERNRRLGKRKRKSDADRRQAKKRKAEDLEEGTTSTDAVETADLLLRTRRIEVFPTPEQKSTFRRWLGVVRFAYNKLVEKFPRVESGVDKTDMRHELKQYTEAHPWFAAVPHDVRDTAVTDLHKARMAHFAKLRIDTNSVREDATFKFKTKKARQQSFEVRKGDWSRQTGMFAGLFGPHLRSSEGLLPEKVHATVRVIKDHAGRFFVAMPTKVEPKGGEHGPAPRLHSTVSMDPGVRTFMTTFDADGLATEWGKDDVERIIRLCHAADELKSRIQEAQNKDNRRNRYRAWLKIYQHMRNLVKELHKKLAAWLCANNRVIIIPPFATREMMGDLGRETARKMLHWSHHSFREYLIQQAEKNSWIKVIVCSEAYTTKTCGACGHLHRTIGSNKLFRCPRPECFYEADRDINGARNILLRYMTNYLGHFGTYVL

SEQ ID NO: 179 - protein, 250 aa, Aurantiochytrium sp.
PTTSAPSRPPRSSTKAATRSRGPSSRPRGALPAGRPHPVQAHQEERQRDRPSNVAPISARALAHQEQAHRVPTQRSWRFGSARTSTAASSFPNSRRLRMMINRITRKINHGQDCASDVKSKARQFDWCIVVVCDEAEACTSKTCDECGHINNNFCCPQCHHHHADRDLHAARGILLRYVHNQGAVSLRVWVRAELVIRSCIHTRHFAARLLRMATSASAAEKRSPSWRGEAPVDLQMERMMPAGRVKARM

SEQ ID NO: 180 - protein, 206 aa, Aurantiochytrium sp.
TRRLPTSSAPAGRAASSSARRRLPGIIRKQPTSTASPRPSGCASRTTTSCGRCTEAASFSRSSSRRVWHAGALSMSSCIGSPGADRSRSAWAIGRQPRACAPWRYIRRHAIKRGYDVTLVNESYTSRRSCSCKGFDLQPARDQENQELHGLRTCQKCGSTWSRDTIGAINILDAFYTWTIPGRPRPEHLTMHGVAPPPASPLFELH

SEQ ID NO: 181 - protein, 661 aa, Aurantiochytrium sp.
RRQRSAHSQAASLVCCSAALSGSQMTAVVATTVAEGTAVRPDQPTDFNAVGALASSAVHEADPPDPPAESAEGSGTIDAAQTDPHAVEALPETTASTRDVEDAAATDVADSIETLTPQQVAREAITSAFDSIEEFAMGTFFATSRTLARVSAKIARDFAVNWLALMLGNVDWLTLRLGTDPGNPDWPTPETMDLPNEVLQASALSVAVSRALDRAEKAMLSAATTIATTLRTNDEINAARVKVAEAREAVAEARAAAEAEGFRDLQKLEGDGPWETHSTDTAQGDGVMEMADVDEALEMAGAAQGDEAMETADVAHGEGATAAKPLSRGKDWVLGRIFRTNGYELHILFEKNAPRRQGRLVKISEGDKCINQDYDPEYEWENATPVPGTAPRPLPGFVKPTPRLRHHFAAADVGVHNVVTAVSPRDCETNFHGQPLMEVRNYSLKKFNFHSKRKAVNKKVARIKKVGGQDLKQREAELAADHPKTANQEQLQRAINVRRKHYEKIYEYYGSHQLLRLKTTARMAEQRTIDELCHWITWGGTKPLGWGDCSKTTGIRGAPPSGPVRRIRRHARKKGYDITLVNEAYTSKRACCCRGANLKPARRNGKSIHGVRLCPTCGSPWDRDVSAGINIFEIYFYHTIWGRGRPSHLQPAPTNTDDPVA

SEQ ID NO: 182 - protein, 760 aa, Aurantiochytrium sp.
PRRHGLPVHRGLCSRQVWDRAQRSVQVPHQLHHVAQARRAQEPAQEPRGKDHSRKRAEHHRHRTGALHREGIDAQVPLHDAPRDQTRQRQSSGWQEVQALHADPDSLDRRQVHPGRRADPSKSVDAEAESGEVREGWERRGMGGTARKRQDPAELVHSLPSENREKSETLWRGADWEVARTMRTNGFEFHFLFERKTTRVGGFRPTKNEFITHDTAYDPAYEWTNFKNMPIERERFAAADIGVHNLVCAVSPRDGTTNRNGQPEMEIRNYSRKSFNHHSKRNAVNKKARRIKKLNGNVQVSEADLALAHAKTTRDEDLQRAIRTRLKHYDTLWKAYSSRNFMKLKAAARIAEQKTIDRLVHYITGGGTKPLGWGDCSRTTGIKGTSPGGPMRRIRRHAIKRGYDITLVQEQYSSKRACCCRGTDLNPVKINGKPVHGLRTCARERPREDNWAASACGSSQAPRAQSSSARTSSARSARDCGRCLRRALRARQQMVADMQDLIDREDLDGIRTAVQANPRLKKPSRLYWVHDQPHDQPMLLYAVKRNALKVVELFLELGPQLFRERDEEGRTPLIVACSAGHKDIAQFLLERGANPDLRTTKGATALIEASLLGRTETVQLLLERGALVYLQTNYGSTALKVACLDESAEIVQRLLEYGALVDLQCKDGYTPLMQACHENHSEVARMLLEHGAQVDLQAKEGCTALLLACLYGSAEIVQLLLERGAKAVLQADDGYSALMINLQKWPQQDCTASAGAGRQG

SEQ ID NO: 183 - protein, 258 aa, Gonapodya prolifera
GDLSPTKPCLAGEQNNPNAKQTVAQFESTLPSKKTSSLGKFKIYLKAIGPEFENLLDFYDADFFHQLRFRSYMRAQKQHQEIIRDLFAKFTSDNPHNFQQKLSKIHVHFGNTRFGVATRGYAASHHKKFRETMKKMKDVIACIGQSGHNKSVTANHNDKILFKRVPFQCDEVEEYHTSALCSSCHRFLVPKVVTNNVGSNTKQKALCPWGFKFCPYECITWNRDHNVVQNILFVYMYKQATGHRPPGYRPPPKSERSW

SEQ ID NO: 184 - protein, 245 aa, Gonapodya prolifera
YVFLRDFTWFLQWNDPLVEFDTDLTGDIHARWRWRTWSGKQLEVDRAARYALPWFLFSLIRQVSPCPSSFIAGLGPLHRQRSLAKRDLHIAWGSANVNRIQCIPGKSEPAKRIMMRLQPLLKVLRPTHESYTSSGCHSCILDALPGLPRQLPKVVYPTIPNTRPRDEGWTATIQPWELLKCGACGVIWNRDRVRALNIRLIYIHQHRNGGSGLGCSGGPFLLRVYEIVRVVGTLSQVYCSLLAPG

SEQ ID NO: 185 - protein, 636 aa, Gonapodya prolifera
IMKGKKKQDKTETTRSRPDVAARKLRNKTMKDSVIKMSFNSFCKVEAKTLEWKSVLMDLNKTVFEAYILANVHVIRLCKSGKTLPKFNQDLCYKFLSAVSEASTKSDKIKDDELRLSFETYKSWRPDGYQAASSEHLSAGWQNNISLQMATNIKNMVKNHFYPKFLKYLKTKHKLNGKEGYNLLKEIMDPKYKGNSKQVKKYKELIPPARGRIDSNPELALPILYKFNKYLELLTEDKWPVGRNGLPREPRKSSLLPLKQGFKISHMKMCSSSLRGLLLRSGVKGIHDKDIWIKEGHADTWWRQLFNITKVEKGQRTFANEIVIDGKAVSITVKTPDPEKTDPITGKTKKKAQRDVEEKSKQVVPSYEEVSKNPIWGLDPGRRDLFCAIKNKGESVHCSTAQYREESFFKKSNQKHATWTRSKPDIVQMYAEMPCKRTVLLKQLEVYSRYALDKLDKLLKFSSEKPYRQLKFKKYVFAQKTLAKFAKKLASTPDTIVGFGDWLNQDSGIIKKCPSGPVLKFKAELKKHCKVYGVDEFWTSKLHSLCHEELEHHVSHKHIQRVNKETGSKETKFAKVTLHSVLYCTNNSCKGITMNRDINAAQNILDRFVEMLKREEREPCFCRGNQDKTCRLSLPV

SEQ ID NO: 186 - protein, 201 aa, Gonapodya prolifera
IEKCSSIKLYLMFFHLVHNRNPCTKLMEQDPKITYINKAMPTGKTVDKPKLEEHVLFVLCYLMKMLKFLEAKTLEVVSQNCLYCCFLAPLIKQWYSLHSPIHPTQALILFHAGLAVLTTLVQKFFGKHWPSECIVAWGSAVFNQLSGRHHMSPNQLICKAFVNASMTVILVDKFRMSRICSQCHHAFTKESGTKQKLYSIW

SEQ ID NO: 187 - protein, 282 aa, Gonapodya prolifera
PLMKTQKGKFHTRKTISLDFQRVLKNAYAVDFEVGFGEYYHSTGMTTNQLRREARLKDTNMDQILSSKPSTKTSKQPQINLFLDWYQLHASNVIDFYQSNNQEFARLRWRQYIKKQQYDIKICKRIASLNGFQSWRDGKDNLVIAWGSANVNRFQRISGNSGPSLRIKKTLKSFVRLIRTTAEAYTSSGCHCCALKEINSPERVIQKLYHPTVLNNRKDRTSDLIKPWKLLACPECGVYWNRDRCGAMNIRLIFLYMNSHRGERPWMFKKGVFKKDIDILQP

SEQ ID NO: 188 - protein, 759 aa, Gonapodya prolifera
QFSKSEFLKKLFSGFNILICPQSETQNMLQPLSSKMSLDLALPPLETTPSKEHSFISDSMEESDSMTLTTSEELLASASTSTTMTKKRKRGSSTPESLPLTKRKTSKDKLTTSNSNIQPSESSQTLPVDSTGKEKDLKPWWTQFSTEMSRQLWLPTETDCVDLDMSLLNPSLKSLTQKSWFRVKATKKEEAIPITSLPKTFLQLQTSLSQKITDSEQLKKGESASKTITKQQEMEFLQTQITTMEEQKNLTLQEIQKLQTFKKKVSTLKGQLTRSDKQANIIGTRRYKLKGFKSFWDQQKQEPHFFWDDMCSFKDLYRAAYNASVAYYNARELPEKEKFDALEEKKYQDSLQKIREWKNKNKSKRKKKDKKKKDTTKTKKQTGPKRYRKKIYPKKGIKKQELVEEFRKMDIYSGPKWDKIRSAFGCELLDYACKQFCEAVSACIELRKLGHQKDFDMKFKSKKAKKETFTIRSRMWGNSGNYKFGEGVYITKKTNLGQKREKILLKDLLTHDVTISYINGSFFANIQVDGERSVLDVENQHVQLSASYDPGVRSFMTIYSPQGYSIQWGANDHKRSLRLFTAQCKLTRLARKPPSSTNTVKHRTRRHLKQTAAKIRERIRGLVDECHRKLIHFVTNTFLNHNIPVFKTKNMLQGKLNRKTKNCMSMWRHYTFRKRLMDKGKMKGCIVNVCTEEFTSQHCTGCGYRSKTSAKWKKCPNCGLEIDRDESGSRNVCLMQITNTYNEITMSQVPQDSASVQCS

SEQ ID NO: 189 - protein, 459 aa, Gonapodya prolifera
DPGQTSINIHQLGHALFTEGICHGMTFLVSPPSPSTPDNFLSATPISSFSSMKKCWKCFLPLHQYILHTLVDMPPVESRPKPYSLCPIGDFQRKSILLDQTGVKDILRTIKINEENIRVLFHVSQYETENKFFRGTVTTNGNQNSIHLLKHFVVRDLPNYDVAEGTPAFIPTPFESNTIVLGMDPNRPGDCFAGGPTHEQGVHPSYKFNISTKEYYHLSGRNSATKRLNTFRVEQGIQTLENQLITAKTRDPAVLLVQRLDQIATIGGQLVLLYHQSPGVKDKFRTYIGKERALHRMAKRGSCLGGREDKGKDWIGVRKSTSRQRKCIRHKFREKKKDIALVVGDLSAPDNAFMKGSTMPLKRLCHLLSKHQYVRALVSENEDRTSIECNQCYENGCPTFMPNDAADYRRKECSRCRVWWNRDVNAALNIRSVLLYRQRNGGERPVNIIRGYQGHMDVE

SEQ ID NO: 190 - protein, 231 aa, Gonapodya prolifera
LENSLPTAKTTDVANALQRLDAIAQHGKQLIDLYTMSPSRRQRWKVRNGKNRTLHRFARRVAVLGQRTVKGDDLPAVKHPMNLHGKRERRRMTRRKTIPPIVVMVGDLSVIENANVSGMSMPLKQLVKILQQNQYVTALIHVEEDRTSLECNKCFHAGTPSMMGNGRGAWYRRKKCDRCGVCWNRDVNAALNIRGVGLYQQEHGQRPVNFVRGFRAHQPPSTSENLARATA

SEQ ID NO: 191 - protein, 245 aa, Parhyale hawaiensis
KTQNIKNAVNRENGQDLHKHETASATPSPSVSVPHHAIGLDPGLVNILSCVEYDTRVHNITRKLHMSAQQYFAESWMTDHREASEEAKTSNKKYKKALEDISSSVVTKNVHEAYVRELYENFRSLWAEKVKKKWRMWKVKIYSRKRRCVSNFLNKLLDGDGNEDIPGKSLLAFGDTTFAGTGRGEHFLSSFRLFKEALQERATNSLKNPPSMTMKFSTVNENYTSKLCNRCCRPLNLIERDFFRR

SEQ ID NO: 192 - protein, 220 aa, Parhyale hawaiensis
QNKEVEKGLEVGVVTTHGWCRRLCLVQQTDFGSRRLVTIAATVKKNKTQLSENGVSDGGQRQRRQQKKRVIGIDPGRVNIVSCIEYANTDKKTGTRKLKMTAKQYYTECGYVAQRKLTERLQTEHEEYKKAMEDLSSVENPRKNIDNYIRKLYENYETFWNVKSAKEWRNTKIKTYGKKRKCIAKFCNRLFSGDGDDDIYVAFGSAKFASTGKLVYLVRQ

SEQ ID NO: 193 - protein, 312 aa, Parhyale hawaiensis
ISKNDVNRETEQGLHEHETDEATPSPSVPVPHRVIEIDPGRVSILSCVDYDTRVHKITRKLRMSAKLYYAESWMTDHRKASEEAKTKNKKYKIALEDISSSVVTQNFHEAYVRELFENFQSLWAEKVKKKWCKWKVYSRKRRCILNFVDKLHDGDRTEDNPGECLVAFGDATFASTGRGEHFSNPFGLFKKTLQERATNNLKKPPSKLKFSTVNENYTSKVCNRCCQPLVTALCSDTPMFRHPYVPTPLCYDTPMLRHPYVTTPLCYDTPMLRHLYVTTPLCYDTPMLRHPYVPTPLCSDTPMLRHPYVRLG

SEQ ID NO: 194 - protein, 232 aa, Parhyale hawaiensis
KTKQGKKRQEKEKEVDRMVEYINGNDFKNAVPVIAFGNAKFACTSRGEHFSSSARVFRKKLEEKYIQLNCMEKFIEVNENYSSKVCHRCFKPLQKVERYLSNSSSNMNEVQDGESEDTSLPKIRRRKRRLENLDIRRCQTLKSVLSSSTGVCCANGGCFFDRDFNAATNIAKKNFERPLARRSDRAPTEYAFTMVQCYSRSVARCFGSRVTLTCVANYFQPCCTRGGKEVAR

SEQ ID NO: 195 - protein, 239 aa, Parhyale hawaiensis
QEAKTNNMEYKKALEGISSPVVNKNVHEAYVRELFENFQSLWAEKVKKKWRKWKVKVYSRKPRCISSFVNKLMDGDRYEDSPGECLVAFGDATFARTGRGEHFSSPFGLFKKALQERATNSLKNPLSMTLKFSTVNENYTSQVCHRCCQPLNLIENDFSVVDGKVIMMKKKRKKQSCHRDDTTTTYSSVERKRQAMRDTKVVFQSLYSYGESPPALNQRMASSLAPLGVLPRSRLQRRR

SEQ ID NO: 196 - protein, 504 aa, Cystobasidium pallidum
DYDPTFLSWPAGRIDRAIRSAVLDVTQLCNWFNTYHLPLLSKSTAQITGSIGWLDEAGCFEHNTEGRNLLQTSKGQSQLRVAQWWTDAMQEYQTNWSTTMGPQAFGSERLKMFDLLFKRCIPNAELWAGSFSTDGFNLRILSIDPTRFVYNKSIEKKLPSIDFKRAGMNCYDFVTALFDGVKQSATTVETFGSVSHKLLGMQANPSEVVSSGSFASRTLRSKTVDFVQDLPAQRTRKGLPVDWTRLDGRNYQQVRQNLQKWADNQGDGHAIIAGVDLGIAFSQAIHVNRPAKPYECLTGSRAGVPKTTSSNSSFSKTFVVSPHALHEITRRLIRRKQSLRAQLCSSFLPCSPSKDPDQILRVSNMLDTSLKSGKHYCEASFRSLQCKRRFFDRIAVQFRELAWPELARGAGNPVRDSKDVGKLSPLVIVVGDGCELGGGSRGFKVHGADSATLGLRELVKRLLQWRLPVKVLVVDEAYTSQVCPDPNCKTSTSNEEAIQGLRSL

SEQ ID NO: 197 - protein, 820 aa, Meira nashicola
NLTIILSILISLIAVKEAYDAYLSNRRKQIGNPDHQFKLFFKSFDKFYGLISFTSQSWRQGGLCRTIFLPGPIKSTKGEYIESIDIDTSLIREGKRWKLIYRKDLNKRQDSLTKYIGYKEFFFIDIQRNKDTPLGYSLIELIWISKIWKLEERSDDDRIMVHLPPIKSIIHGDAKDTAFIRFTALSAKRITFSKFEQVVIRQRVQISISQSETISILLVYLYSQDNIQHALLIKGKKGVWTERCDRILDGRGKAIPLTPKRRSTFYHLYNIWEKEQNESVSIFARRYILEEEVSQISSTLKRITALQHLEKVKILEKENSSLLINKRIDFLYKNLVIIGIESQCNTPARYTLNDLELGIEEDIRIAEAPRQNIQSEQRQEFLASIIDPDLIPENGDDEQEEEVEILSEENQYSSAFIGIAPEAPSISQTTLLGIQTQADISRIHSEVVVRPALQRLEEIRSLEDLEVVEEETPIDPDLSTTSSMVAQLIDSLLQNRSRQQSIYSFFHQQAPDLIIPTSSGSDSISNYRPELTPLQLDATALVQSIYPQTQIPPTTQEDIVIPLPEEIGVFIEDAENQSFEEVQIRICAIDPGIRTFATIIDPIRCKGFRWGEQDFQRLVIIRKKISRIQSELSMPLKNSKKRAKQEVIFRLWQKHNNLVRDLHIRLSKWLNENYDVVFLPKLDVARMVRKKGRFNPPPPPRITTVPTQAEQIAEIQRRREERKKGRKINKQTAASMHALAHSKFYNRLQETMGFLPTITEEFTSQGCSSCGTRKTNLGSAKVYNCPNPLCQLRADRDLNGAKNILQKIIIEVEKLGTVPS

SEQ ID NO: 198 - protein, 365 aa, Pilasporangium apinafurcum
HPSIECRFNIRQNKKNCSFEKQHNQKSNQLRGVLVFEHCDKMTSTSDGIEKEITKKRKVRQKQSVYTTVKTGWRNFCKYKRMAEKIDEAVRVCSRIACEASMLASIHVLRLLEAGEELPPLDNNFFNRCSSAIANLAGSGEVHSDLETSLDLYRTQHPSVYEPTEKKSYMTQMLVMIAQHARQNFQVSNRLTFYSRLCKWIRLQIRLHNSDYFEKHQDKIIKSAVSMLGRASTQTQHSLFGQMLTYGNASFTSSAKGNIAVPATTLRKKIGSRCHVVDVGEFRTSKLCCACHKKMKGFVLDEKIHSDGLYGVQHCKKSECHRILWDRGINAAINILRLFIDQVKKKRRPEAFTRKENELVLEIKN

SEQ ID NO: 199 - protein, 220 aa, Pilasporangium apinafurcum
EYSYLAGMKKHTFWHDNLKKREHEYGRIILEMPSFKTTSYEQYMGNLKYVWRYLDFLVSFRARHPFHKWRFFQFGFSRKTLVHLAKRLVPTPSPHVCIGLGDWSQQDFVKDHAHGPVKRFTRELVKCATILQIDEYCTSQRCSKCYQQLEETPFPTKKTDGSTDIKFSHQVLRCNNSECRITWERDVNASKNILTLAMCLLHGLSRPQELRRGEKNVGRE

SEQ ID NO: 200 - protein, 210 aa, Pilasporangium apinafurcum
SKDRFYRECGYHGRTKLTKEWIGAEPDIKTFNESVPSTKVANLVSYLKRVRFCLVYLDCLFGVYSSTRMKRLRWSTYIRRQQTYEKVVKNLTGGNKRTVIAYGDASFTSSAKGNVNVPTTTLEKKVGSRCRVVDVNEFRMNKLCCACHKRMKGFVLDGKTVSDGLYGVRHCKNSECHRTLWNRDINQVKKKRRLEAFTRKKNELVLEIKT

SEQ ID NO: 201 - protein, 285 aa, Pilasporangium apinafurcum
ALHFDRRYVSLTISRPKLLAREQKETFSLEDWIFGLDPERKKIFTAVVYKEESMATLQKPKGENVKHEVIHWSKGRFYRECGYHRRTKLTKEWIGAEPDIKTFNESVPSTKVANLVSYLKRVRFCLVYLDCLFGVYSSTRMKRLRWSTYIRRQQTYEKVVKNLTGGNKRTVIAYGDASFTSSAKGNVNVPTTTLEKKVGSRCRVVDVNEFRMNKLCCACHKRMKGFVLDRKVVSDGLYGVRHCKNSECHRTLWDRDINAAINILRLFIDQVKKKKRLEAFTRGKG

SEQ ID NO: 202 - protein, 361 aa, Pilasporangium apinafurcum
SDGVWGRTLPPDPGLPYYKTVKTSLASVLKTSEKQLMISHAATTVNRIVIRSLLFLRLYLMHHKGIPPVVNAKLVDTVFKTPCQQKARGRLPSATAKALRDKLTAFYKQYFEPLLLIGDELLFYTHLNAALDYASVQAVIIFETNIKQHFVEYVEAYVNTAWQKDYLVKRIRVTRKLLVNSKATEFYEGRLYRKMRLNNFYNIHKAEQRPVQRFKEIFGTLNAVVMGIGDWEQKNHRKFKEPTKGKGFRTLSRKGGYSVYLVDEFKTSCQCSHCQAHGAKCEKFRVRLDPNTKKTGEDRQLRLVHGLLLCQQCHRLWNRDANSSINIARPTRQALERRGQAVYLSRQARLPPADSAVMSTA

SEQ ID NO: 203 - protein, 200 aa, Pilasporangium apinafurcum
ADAEFDIKTFNEKVPSAKVANLVSYLKRVRFCLVYLDRLLDVYSSRRMKRLRWSTYICRQQTYEKVVKNLTDGNKRTVIAYGDASFASSAKDDIAVPTTTLRKQIDSRCRVVDVDEYKTSKLCCACHKKMKGFVLDGKIVSDGLYGVRHCKNSECHRTLWDRDINAVINILRLFIDQVRKKRRLEAFTRKENELVLEIKN

SEQ ID NO: 204 - protein, 269 aa, Pilasporangium apinafurcum
RWTTKALRDRLTAFYKQHFEPLLPIGDEPLSYTHLSIVLDYASVQAVTVFEANIKQHFVEHTEAYVNTVWQKKCLVEHIRATRKLLVNSKVTEFYEGNLYCKMRLNNFYNIRKSEQRLVQRFKEIFDTLNEVVVGIGDWEQKKYRKFKEPTKEKGFMTLLRKAGYSVYLAGEFKTRCPCSHCQAEDVKCEKFRIRLDSNTKKADEGRQLRLVRGLLLCQQCHRLWNRGTNYSINIAQLTRQALEGRRRLEYLSRQRRLPPADSAVTSTA

SEQ ID NO: 205 - protein, 395 aa, Pilasporangium apinafurcum
SKASKKSNQLRGVLVFEHCDKMASMSDGIEENTTKKRRARPDFAERKVRQKQIVYTTVKTGWRKFCKDKQMTEKIDEAVRVCSRIACEASVHVLRLLEAGEELPPLDNNFFNRCSSAIANLAGNRKVTNSELETSLDLYRTQHLSVYEPTEKKPYMSQMLVMIAQQVRQNFQVSNRLTFYSWLCKWMHLQIRLHNSDCFEKHQGKIIKSAVSLLAHTSAQTQYSLFGQILAYGNASFTSSAKGNIAVPTTTLEKKIGSRCRVADVDEFRTSKLCCVCHKKMKGFVLDGKVVSDGLYGVRHCKNSECHRTLWDRDINAAINILRLFIDQVKKKGDSRRSQGKRMNWYLKLKNEVINDLTAMIPETTNECSNMNQESNKATLVGNSGDIICKSREKQ

SEQ ID NO: 206 - protein, 350 aa, Pilasporangium apinafurcum
SKASKKSNQLRGVLVFECCDKMASMSDGIEENTTKKRRARPDFAERKVRQKQIVYTTVKTGWRKFCKDKQMTEKIDEAVRVCSRIACEASVHVLRLLEAGEELPPLDNNFFNRYSSAIANLVGSGDVHSDLETSLDLYRTQHPSDYEPTEKKAYMSQMLVMIAHHARQNFQVSNRLTFYSRLCKWMHLQIRLHNSDYFEKHQGKIIKSTVSLLVRASTQTQYSLFGQMLAYGNASFTSSAKGNIAVPTTTLRKKIGSRCRVVDMDEFGTNKLCCACHKKMKGFVLDGKVVSDGLYGVRHCKNSECHRTLWDRDINTTINILRLFIDQVKKKRRLEAFTRKKNELVLEIKN

SEQ ID NO: 207 - protein, 372 aa, Pilasporangium apinafurcum
SDGIWRQAPLPDLNLPYYRTVKISLASVLKTLEKQPVISRAAATVNHIVIRSLLFLRLYLMHRKDTPPVVNAELVDTVFKTVCQQKAIGRSPSATAKALQDKLTAFYKQHFEPLLPIGDQPLSYIHLNTILDCASVQAVTVFKTYIMQHFVEYVEAYVNMVEQNYRVERIRATRKLLVNSKTTEFYEGRLYNKVTGFYEGGLYRKMRLNSFYNIRKSERRLVQRFKRILGTPDKVVIDIDDWDQKKHRKFKEPTKGKGFRTLLKKADCSLYLVDEFKTSCQCSHCQAEGAKCEKFCVRLGSNTKKADEDRQLRLVHDLLLCQQCHRLWNRDANSSINIARLTRQALERRGRLEYLNLQTRLPSADSAVMSTA

SEQ ID NO: 208 - protein, 312 aa, Pilasporangium apinafurcum
CTYFNIGLVTKVQRKEFGHFILTDGMSVSVTISRLKLPAREQKEGFSHEDRIIGLDSGRKKVFTAVVYKEESMATLQKPKGENVKHEVIHWSKDRFYREWGYHRRTKLTKEWIDAEPDIKTFNKNVPSAKVVNLVSYLKRVRFCLVYLDRLLDMYSSKKMKKVRWSTYIRRQQTYEKVVKNLTGGNKRTVIAYGDASFTSSAKGNIAVPTTTLRKKIGSRYRVVDVDEYMTSKLCCACQKKMKGFVLDGKVVSDGLYGVRHCKNSECHRTLWDRDINAAINILRPFIDQVKKKRKLEAFTRKENGLVLEIKN

SEQ ID NO: 209 - protein, 227 aa, Pilasporangium apinafurcum
NMKSSTGLRVVSIECGYHRRTKLTKEWIDAEPDIKTFNENVPSIKVANLVSYLKRVRFCLVYLDCLLDVYSSRKTKRLRWSTYIRRQQTYEKVVKSLICGDKRTVIAYGDVRFTNSAKGNIAVPTTTLRKKIGSRCRVVDVDEFRTSKLCCACHKKMKGFVLDGKVVSDGLYGVRHCKNSECHRTLRGRDINTAINILRLFIDQVKKKKRLKAFTRKENELVLEIKN

SEQ ID NO: 210 - protein, 307 aa, Pilasporangium apinafurcum
ALHFDRRYVSLTISRPKLPAREQKEIFSLEDQIIGLEPGRKMIFTTVVYKGESMATLQKPKGENVKHEVIHWSKDRFYRECGYHRRTKLTKEWIDAESDIKTFNENAPSAKVANLVSYLERVRFCLMHLDHLLDMYSSRRMKRLRWLTYICRQQTYEKIVKSLTGGDKRTVIAYGDASFTSSGKGNIAVPTTTLRKKIGSRCRIVDVDEFGTSRLCCACHKKMKEFVLDGKVVSDDLYGVQHCKNSEYHRTLWDRDINAAINILRLFIDQVKKKRRLRALTRKENELVLEIKNRGDKRPHCYDSGNG

SEQ ID NO: 211 - protein, 346 aa, Pilasporangium apinafurcum
NKNEIWETFFRTNMKVFKARDYWFNHMISIDGVARSILLIRRDLHDKNTPKKKLVVARERYVDDLTVDEAQQLSERCVVGIDPNMSDLLFCTNEDVSKQHRYTQNQRRQETKAKKYAQIMLNDKMHSLVEGRTIVEWESDLSVYDRKTVNSDKFKAFIKAKLLLNSKVTKFYEGGLYRKTRLNNFYNIHKSEQRLVQHFKEIFGTPDKIVVGIGDWEQKKHRKFKEPTKGKGFRTLLRKAGYSVYFVDEFKTSCQCSHSQAESAKCEKFRVRLDPNTKKADEDRQLRLVHDLLLCQQCYRMWNRDVNSSINIARPTRQALMGRERPEYPNCQIQLPPAHSAVASAA

SEQ ID NO: 212 - protein, 200 aa, Pilasporangium apinafurcum
IDAEPDIKTFNENVPLAKVANLVSYLKRVRFCLVYLDRLLDVYSSKKMKKLRWSTYIRRQQAYEKVVKNLTGGNKRTVIAYGDANFTSSAKGNIAISTTTLRKKIGSRCRVVDVDEFRTSKLCCVCHKKMKGFVLDGKVVIDGLYGVRYCKNSECHRALWDRNINGSINILRLFINQVKKKRRLEAFTRKENELVLEIKN

SEQ ID NO: 213 - protein, 259 aa, Pilasporangium apinafurcum
RYVSWYGNLPSKASHKRAKKEIFSLEDRIISLDPGRKKIFTAVVYKDESMATLQKPKGENVKHEVIHWSKDHFYRECGYHRRTKLTKEWIDAEPDTKTFKGNVPSTKVASLVYYLERMRFCLVYLNRLLDVCSSRRMKRLRWSTYVRRQQTYEKVVKNLTGGNKRTVITYGDANFTSSAKGNIALPTTTLRKKIGSRCRVVDVDEFRTSKLCCACHKKMKEFVLDGKAVSDGLYGVQHCKNSECHPTLWDRDIKPQSTF

SEQ ID NO: 214 - protein, 252 aa, Pilasporangium apinafurcum
QSPVQSFPRERKKETFSLEDRIIGLDPRRKKIFSAVVYKEESMATLQKPKGENMKHEVIHWSKDRFYRAYDYHRRTKLTKEWIDAEPDIKTFNEKIPSAKVANLVSYLKRVRFYLVYLDRLLDMYSSRRMKRLRWPTYIRRQQTYAKVVKNLIGGNKRTVIAYGDASFISSAKGNIAVPTTTLRKKIGSRCRVADVNEFRTSKLCCACRKEMKGYVPDEEIGGKGLYNVRHCKNSECRRTLWAVTSTPQSTF

SEQ ID NO: 215 - protein, 386 aa, Pilasporangium apinafurcum
MLRTRKGKANRQPHLLLPVMYKFLHFIKDFNTKNTGNPEYRELRSFSLLPFKSGFTCQHFKMCNRGLRALLRRADLFVLPEGEKWNEVVGYWWEELFKISKFETKNRKFAGQIMTDGKSVSITLRKPKKAQHETPFKPQIEQYEEFRGLDPGRRDLFVAMNQKGETMSRFTKEYCGDAGFKRANKKIKQWQSLNAKVLEAIRNMPTKKTCSLEGLKKYVVFMIPKLDYLLKFHIKKPFRKLKFKRYWSMQRELQQLCQQLTMKAGKRTIVGFGDWSNQDIGRFIKKCPSGPVKKLEHELRRHCVMISIDEHRSSKVHLHSSVDERIDFEEHACLSDQFSDRKCRDGVVRRCKVHSVLYCTKLNGVCGMIMNRDKNASKNTVTKRLK

SEQ ID NO: 216 - protein, 200 aa, Pilasporangium apinafurcum
QTDSTRACATDPGIRSFITLYDPHGMTLSVDDAKDAMFNHCLLIDRLQSQLSQEESKRKRHRMKKRVYRLFQRMKAMMSDPHHKVSKWLSDNYHEVLLPTFGTSELTSKQKRISSKTSRKMLMWSHYKFKKLLSYKMERSGGCVIDCGEHYTAKTCSQCGRINHAIKYQKVFDCSHYKLVLDRDINAARNIFLKNEHLFS

SEQ ID NO: 217 - protein, 331 aa, Pilasporangium apinafurcum
RHFKPIFIEINTTFLKELAKALDDPVELYADKAELWRTYFNIGLVTKDKRKEFEHFILTNDMSVSTISRPKLPTREKKERFSLEDRIIGLDPGRKKIFTAVVYKDESMATLQKPKGENVKHEVIHWSKGRFYRECGYHRRTKLTKEWIDAEPDIKTFNENAPSAKVANLVYYLERVRFCLVYLDCLLGFYVSKKMKRLRWSTYIHRQQTYEKVVKSLTGGNKRTVIAYGDASFTSSAKGNIAVPTTTLEKKIGSRCCIADLNEFRTSKLCCACHKEMKGYVPDEEIGGKGIYNVRHCKNSECHRTLWDCDINAAINMLRLFIDKMKKKRIL

SEQ ID NO: 218 - protein, 404 aa, Pilasporangium apinafurcum
MQELSDRVRNEIGLLLLDLNKSPKRHMPFLRTMLIDIQAHVDDGMKGCRVWSLLPQKQFRPIFIKINTTVLKHLAKALGDPVELYADEAELWRTYFNIGILTKGQRKEFEHFISTDGMSVSVTISRPKLSTREKKEIFSLEDRIIGLDPGKKKIFTAVVYRDESMATLQKPKGENVKHEVIHWSKGRFYRECGYHRRTKLTKKWVDVEPDIKTFNENVPSAKVPDLASYLKRVRFCLLYLDRLLGSYLSKKMKRLPWSTYIRRQQTYEKVVKNLTGGNKRTVIAYGDASFTSSAKGNIAVPTTTLRKKIGSRCRVVAVDEFRTSILCCACHKKMKGYVPDEEIGGKGLYGVRHCKNSECHRTLRDRDINTAINILRLFIDQVKKKRKLESFTRKKNELVLEIKN

SEQ ID NO: 219 - protein, 238 aa, Pilasporangium apinafurcum
NLVADRRRTVVLHSPEHYTRLCFRASGDRLQDLHHAALCRVCKDICHMVGQNYRVERIRATRKLLVNSKATEFYEGRLYNKVTGLYEGGLYRKMRLNSFYNIRKSERRLVQRFKRILGTPEKVVIDIDDWEQKKHRKFKEPTKGKGFRTLLRKAGYSVYLVDEFKTNCQCSHCQAEGAKYEKFRVKLDLNTKKPDEDRQFRFVHGLLLYQQRHRLWNRDVNSSISIARLTRQALEGRG

SEQ ID NO: 220 - protein, 225 aa, Pilasporangium apinafurcum
KEFEHFISADGMSVGVTNSRPKLPAREKKETFSLEDRIIDLDPRRKKIFTAVVYNEESMATLQKPKGENIKHEVIHWSKGRFYRECGYHRRTKLTKEWIGAEPDIKTFKGNVPSAKVANLVSYLKRVRFCLVYLDHLLDVYSSRRMKRLRWSTYIRRQQTYEKVVKNLTGGNKRTVIAYGDASFTSSGKGNIDVPTTTLRKKIGFRCRVVDVDEFRTSKLCCACH

SEQ ID NO: 221 - protein, 206 aa, Pilasporangium apinafurcum
EKNKDMTASPKNYVRDTVVGIDPGMQSLCTAIRVQEVDVEEKKAKCNGRIPKQSQAKESKEKRRKKRKKRRKRVSKHRHGIQQISAREHRHFAEVKKHTLWYEKLKQREHEYARIIREMPSFKTASYDQYMTSVKYVWRHLDFLVSFCASHPFRKWRFLQSRFSQKTFAHLATRATVLQINEYRTSQRCSECYQQVEETPFPTKKT

SEQ ID NO: 222 - protein, 275 aa, Pilasporangium apinafurcum
CGSHPSKASHERKKEAFSLEDRIIGLDPGRKKIFTAVVYKDESMTMLQNPKGENVKHEVIHWSKGCFYRECVYHRRTKLTKEWIDAEPDIKTFNENVPSAKVANLVSYLKRVRFCLVYLDRLLDVYSSRRMKRLPWSTYIHRQQTYEKVVKSPTGGDKRTVIAYGDAIFTSSAKGNIAVPTTTLRKQIGSRCRVADVDEFRTSKLCCACHKKMKGFILDGKVVSDGLYGVRHCKNSECHRTLWDRDINAAINILRLFIDEEKKKRRLKPFTRGKG

SEQ ID NO: 223 - protein, 200 aa, Pilasporangium apinafurcum
IDAEPNIKAFNEKVSSAKVANLVSYLKRVRFCLVYFDRLLDVYSSKKMKRIRWSTYIHRQQTYEKVVKNLTGGNKQTVIAYGDASFTSSAKGNIAVPTTTLRKKIGSRCRVVDVDEFRTNKLCCACHKKMKRFVLDEKIHSDGLYGVRHCKNSECYRTLWDRDINAAINILRLFIDQVKKKKRLEAFTRKKNELVLEIKN

SEQ ID NO: 224 - protein, 243 aa, Pilasporangium apinafurcum
CDNLSSKASHEREKREAFSLEDRVISLDPGRKKIFTAVVYKEKSMATLQKSKGENVKHEVIHWSKGRFYRECGYHRRTKLTKEWIDAEPDIKTFNRNVPSTKVASLVYYLERMRFCLVYLDRLLDVYSSRKMKRLRWSTYIRRQQTYEKVIKNLTDGNKRTIIAYGDASFTSSAKGNIAVPTTTLRKQIGFRCRVADVDEFRTSNLCCACYKKIKGFVLDGKVVSDGLYGVRHCKNSECHHTL

SEQ ID NO: 225 - protein, 312 aa, Pilasporangium apinafurcum
RTYFNISLVTKVQRKEFEHFISTDGMSVGVTISRPKVPVREKKERFSLEDWIIGLDPGRKKIFTAVVYKDESMATLQKPKGENVKHEVIHWSKGRFYRDCGYHRRTKLTKEWIDAEPDIKTFNENAPSAKVASLASYLKRVRFCLVYSDRLLDVYSSRRMKRLRWSTYIRRQQTYEKVVKSLTDGNKRTVIAYGDASFTSSAKGNIAVPTTTLEKKISSRCRVADVNEFRTSKLCCACQKKMEGFILDGKVVGDGLYGVRHCKNSEYHRTLRDRDINAAINILRLFIDQVKKKRRLEAFTRKENELVLEIKN

SEQ ID NO: 226 - protein, 241 aa, Pilasporangium apinafurcum
RVHLQRTNGKRSRGHQLLDMYAITQISTREYRHLAGFNRVHAWNEGIKQHEAAYGALMHGMLSFKTASFSRYFGRLKFVWTHINWLIDFCSRHAFRKWCFYQYVYKAKALNHVAERIVPVASKNTLVGFGNWSCRDGIKGHGIGPVKALKKKLAKRTTVRSVDDFRTSKRCFHCHAELSKVVFPKMVNGVPDGTIESRPVLHYESSECKTFWDRDVNASLNIMRVTTELFKNRARPEYLQR

SEQ ID NO: 227 - protein, 219 aa, Pilasporangium apinafurcum
NMKSSTGLRVVSIECGYHRRTKLTKEWIDAEPDIKTFNENVPSTKVPDLASYLKRVRFCLVYLDRLLNVYSLKKMKRLRWSTYIRRQQTYEKVVKNLTGSDKRTVIAYGDANFVSSAKDGIAVPATTLRKKIGSRCSVVDVDKFRTSKLRCACHKKMKELVLDGKIVSDDLYGVRYCKNSECHRTLWDCDSNAAINILRLFIDEVKKKRRLKAFTRGKG

SEQ ID NO: 228 - protein, 316 aa, Pilasporangium apinafurcum
QSPVQSFLAREQKEGFSLEDRIIGLDPGRKKIFIAVVYKDESMATLQKPKGENVKHEVIYWSKSRFYRECGYHRRTKLTKEWIDAEPDIKTFNENVPSAKVPDLVSYLEQMRFCLVYLDRLLDVYSSRRMKRLRWSTYIRRQQTYEKVVKSLTGDDKRTIIAYGDASFASSGKGNIAVPTTTLRKKIGSRCRVVDVDEFRTSKLCCVCHKKMKGFVLDGKIVGKSLYNVRHCKNSECHRTLWDRDINVAINILRLFINQVKKKRRLEAFTRKRTNWYSKSKTGVIKVLTAMILETDECSLYSPHVLYHAWYITPRE

SEQ ID NO: 229 - protein, 218 aa, Pilasporangium apinafurcum
YIGQQFASSCCDHCSVRFSSCHLTLIHCDETPTFFSKLIQFCTISIAFIQVACRSKTVIVFFICHIHLAKPVILTRKPDKRITSKSYFQYNQLQVCLCNQYGNFFLLVCHSTIRHHGVKALKKELAKRTIVRSVDEFRTSKRCFHCHAELSKVVFPKMANGVPDGTIESRSVLHCESSECKTFWDRDMNASLNIMRVTTEFFNNRARPEYLQRESSES

SEQ ID NO: 230 - protein, 262 aa, Pilasporangium apinafurcum
SLLPQKQFKPIFIKINTTVLKKLAKALDDPVELYADKAELWRTYFNIGLVTKDQRKEFEHFISTDGMSVGMTISCPKLPAKEKKETFSLEDRIISLDPERKKIFTAVVYRDESMATLQKSKGENVKHEVIHWSKGRFYREFGYHRRTKLTKEWIDAGPDIKTFNEKVSSAKVANLVSYLKRVRFCLVYSSRRMKRLRWSTCIRRQQTYEKVVKNLTGGNKRTVIAYGDASFTSSAKGNIVVPTTTLRKKIGSRCRVVLATRR

SEQ ID NO: 231 - protein, 302 aa, Pilasporangium apinafurcum
IIHQRKEFEHFISTDGMSVSVTISRPKLPAREKKTFSLEDRIIGLDPGRKKIFTAVVYKEESMATLQKPKGEDVKHEVIHWSKGRFYRKCGYHRRTKLTKEWIDAESDIKTFNENVSSAKIANFASYLERVRFCLVYLDRLLGFYLSKKMKRLRWSTYIRRQQTYEKIVKNLTGGDKRTVIAYGDASFTSSAKGNIAVPTTILRKKIGFRCRVADVDEYKTSKLCCACHKKMKGFVLDEKIVSDGLYGVRHCKNSECHRTLWDRDIHAAINILRLFIDQVKEKRRLKAFTRKENELVLEIKN

SEQ ID NO: 232 - protein, 302 aa, Pilasporangium apinafurcum
IIHQRKEFEHFISTDGMSVSVTISRPKLPAREKKTFSLEDRIIGLDPGRKKIFTAVVYKEESMATLQKPKGEDVKHEVIHWSKGRFYRKCGYHRRTKLTKEWIDAESDIKTFNENVSSAKIANFASYLERVRFCLVYLDRLLDVYSSKKMKRLRWSTYICRQQTCEKVVKNLTDGNKRTVIAYEDASFTSSAKGNIAVPTTTLEKKIGFRCRVADVDEYKTSKLCCACHKKMKGFVLDEKIVSDGLYGVRHCKNSECHHTLWDHDINAAIKILRLFIDQVKEKRRLESFTRKENELVLEIKN

SEQ ID NO: 233 - protein, 263 aa, Pilasporangium apinafurcum
LLVQPHDQHRWGRSQHPADQTRSVWKEYPKKKLVVARERYVDDLAPDEAQQLSKRSVVGIDPNMSDLLFCVNEDASKRYRYTQNQRREETKAKKYAQIMLNDKRHSLVEARTIVEWKSDLSVYDRKTVNSDKFKAFIKAKLLVNSKVTEFYEGRLYRKMRLNNFYNIHKSEQRLMQRFKEIFGTPDKVVVGIGDWKQKKDRKFKEPTKGKGFKTLLRKAGYSVYFVDEFKTSCQCSHSQAEVAKCEKFRDRLDPNTKKADEDR

SEQ ID NO: 234 - protein, 354 aa, Pilasporangium apinafurcum
SKAPKKSNQLQGVLVFEHCDKMTSTSNGIEENTTKKRRTRPGFAERKVRQKQSVYTTVKTGWRKFCKDKQMAEKIDEAVRLCSRIACEASMVASVHVLRLLEAGEELPPLDNNFFNRCSSAIANLTGSGKVHSDLETSLDLYRIQHPSVYEPTEKKSYMTQMLVMIAQQARQNFQVSNRLAFYSRLCKWMCLQIRLHNNDYFEKHQDKIIKSAVSLLIHASIQTRYSLFGQMLAYGNASFTSSAKGNIAVPTTTLRKKIGSRCRVVDVDEFRTSKLCCASHKKMKGFVLDGKIVGDGLYGVRYCKNSECHRTLWDRDIHAAINILRLFIDEVKKKRRLEAFTRKENELVLDIKN

SEQ ID NO: 235 - protein, 343 aa, Pilasporangium apinafurcum
FNIGLVTKVQRKEFEHFISIDSMSVGVTISRSKLPEREQKETFSLEDWIIGLDPRRKKIFTAVVYKEESMTTLQKPKGENVKHEVIHWSNGRCYRECGYHRRTKLTKEWIDAEPDIKTFNENVPSAKVANLVSYLKRTRFCLVYLDRLLDVYSSRRMKRLRWSIYIHRQQTYEKIVKNLTDGNKRTIIAYGDANFTSSAKGNIAVPTMTLRKKIGSRCRVVDVDEFRTSKLCCACHKKMKEFVLDGKIVSDGLYSVRHCKNNECHHTLWDRDINAEIDVLRVFIDQVKKKKRLEAFTRKKMNWYSKSKTEVINDLIAMVPETDECSLYSPGVLYHTWYRTPGE

SEQ ID NO: 236 - protein, 224 aa, Pilasporangium apinafurcum
TSNQQYNVQQISTRGCRHLTGMNKCTFWHENLKKREHEYERIIREMPSFKTVSYGQYMANVKYVWRHLDLLVSFCAMHPFRKWYFLQLRCSQKTLANLAKRLVPTPSPQICVAVGDWSPVDSVKGHTHGPVKRFIHELAKRATVLQINKYCTSQRCSECYQQLEETTFPTKKADGSADINFSHQVLRCNNSECRITWEQDVNASKNILTLAICLLHGLPRLPEL

SEQ ID NO: 237 - protein, 337 aa, Pilasporangium apinafurcum
KSNTGIQSDGVRRQAPPPPPDPSLPYYKMVKTSLASVLKMPEKQPVISQAATMVNHIVIRSLLFLRLYLIHHKDTPPIVNVELVDTVFKTICQRKARGRLPSSTAKALRDKSNVFYKQHFEPLLPIGDQPLSYTYLNTVLDYASVQVVTIFETSIKQHFVEYVETYVNTVWQKDYLVERIRATRKLLMNTKATEFYEGRLYNKVTGLYEGRLYRKMGLNNFYNIRKSEQRLVQRFKEIFGTLNEIVVGIGDWEQKKHRKFKERTKGKGFRTLLRKAGYSVYFVDEFKTSCQYSYCQPEGAKCEKFRVKLDPNTKKTNEDRRLRLVHGLLLCQQCHRL

SEQ ID NO: 238 - protein, 277 aa, Pilasporangium apinafurcum
STTAEQAKCGGHWSNMSDLLFCVNEDTSKRYRYTQNQRRQGTKVKKYAHIMLNNKRHSSVEGRTIVGWESGLSVYDRKTVDSDKFKAFIKAKLLVNNKVNEFYEGELYRKMRLNNFYNIHKPEQRLVQRFKEIFCTSDKVVMGIGDWEQKKHRKFKEPTKRKGFRTLLRKAGYSVYLVDEFKTSCQCYHCQAENAKCEKFRVRLDLNTKKANEDRQLRLVHGLLLYQQYHRLWNRDVNSSINIDCLTRQALKGRERPEYLSHQTRLLPVDSAVTSTA

SEQ ID NO: 239 - protein, 345 aa, Pilasporangium apinafurcum
SLLSQKHFKPIFIKINTTVLKHLAKTLSDPVELYADKAELWRMYFNIGLVTKVQRKEFVHFISTDGMSVSVTISRPKLPTREQKEIFSLEDWIIGLDSERKKIFTALVYKEESMATLQKPKGENVKHEVIHWSKDRFYRECSYHRRTKLTKEWIDAEPDIKTFNEKVSSAKVANLVSYLERVRFCLVYLDHLLDVYSSRRMKRLRWSTYIHRQQTYEKVVKSLTGDDKRTVIAYGDTSFTSSAKDNIAFPTTTLRKKIGSRCRVIDVDEYKTSKLCCACHKKMKGFVLDGKIVSGGLYGVQHCKNSECHCTLWDRDINAAINILRLFIDEVKERRRLEAFTRGKG

SEQ ID NO: 240 - protein, 244 aa, Pilasporangium apinafurcum
IIHQRKEFEHFISTDGMSVSVTISRPKLPTREQKEIFSLEDWIIGLDSERKKIFTALVYKEESMATLQKPKGENVKHEVIHWSKDRFYRECSYHRRTKLTKEWIDAEPDIKTFNEKVSSAKVANLVSYLERVRFCLVYLDHLLDVYSSRRMKRLRWSTYIHRQQTYEKVVKSLTGDDKRTVIAYGDTSFTSSAKDNIAFPTTTLRKQIGFGCRVVDVDEFRTSKLCCACHKKMKGFVLDRKSYQ

SEQ ID NO: 241 - protein, 408 aa, Pilasporangium apinafurcum
RHINMMWQKNYLVERIKANRRTKREREAAIRKLCVTLRQLKNDLLNVGSEPFQSHPFYYSWVRQQKSLVLPAKTRYEKDLLYYDLKCKPQDYWPGMLRMIEVIKQTRKKVRNFCPLRTSVIPRHITLDTTTLIHLLFTKENGTKSKLLTEGELVRKKKIWKMFFRTNMKVFKTRDYWFNHMIDTDEIACSILLVRRDLYGKNIPKKKLVVARERYVDDLTADEAQQLSKQSVVGIDPNRSDLLFCVDEDVSKRYRYTQNQRRQKTKVKKYAQIMLNNKRHSSVKGCTIVEWELDLSAHNRKTVDSDKFKTFIKAKLMVNNKVTEFYASRLYRKMRLNSFYNIRKSEQRLVQRFKEIFDTPDEVAVGIGDWKQKKYRKFKEPTKDKGFKTLLRKAGYSVYLVDEFKTSC

SEQ ID NO: 242 - protein, 345 aa, Pilasporangium apinafurcum
SLLPQKQFRPIFIKINTTVLKHLAKALSDPIELYADNAELWRRYFDMDLVIIAQRKKFEHFILTDGISVGVTISRPKLPTREKKEIFSLEDRIIGLDPGRKKIFTAVVYKEESMAMLQKPKGENVKNEVIHWSKGRFYRQCGYHRRTKLTKEWIDAEPDIKIFNENVPSAKVANLVSYLKRVRFCLVYFDRLLGLYLSKKTKRLPWSTYIRRQQTHAKVSKNLTDGDKRTVIAYGDASFTSSAKGNIAVPTTTLRKKIGSRCRVVDVDEYKTSKLCCACHKKMKGFVLDGKIVSGGLYGVRHCKNSECHHTLWDRDINAAINILRLFIDEVKKKRRLKPFTRGKG

SEQ ID NO: 243 - protein, 350 aa, Pilasporangium apinafurcum
LTTFVANQLRFLTAQQCKPIKGLPFYKLAKALSDPVELYADKAELWRTYFNIGLVTKVQRKEFEHFISTDGMSVSVTISRLKLPAREQKEGFSHEDRIIGLDPGRKKIFTTVVYKEESMATLQKPKGENVKHEVIHWSKGRFYRECGYHRRTKLTKEWIDAEPDIKIFNENVPSAKGVNLVSYLRRVRFCLVYLDRLLGFYLSKKMKRLRWSTYIRRQQTYEKVVKNLTDGNKRTIIAYGDASFTSSAKGNIAVPTTTLRKKIGSSCRVADVDEFRTRMLCCACHKKMKGFVLDGKIVGDGLYDVRRCKNSECHHTLWDRDINAAINILRLFIDEVKKKRRLKPFTRGKG

SEQ ID NO: 244 - protein, 380 aa, Pilasporangium apinafurcum
LTIYSRLCKWMRLQIRLHNSDYFENHQDKIIKSAVSLLVRASTQTQHSLSNLISAYSRFKKYPIPTEEIVWIQELSDRVRNEIEPLPLDLNKSPERHMPFLRTMLKDIQAHVDNGMRGCRVWSLLPQKQFKLIFIKINTTVLKHLAKALGDPVELYADEAELWRTYFNIGLVVIAQRKELVHFISTDGMSVSVTIFCPKLPTREQKEAFSHEDRIIGLDPGRKKIFTAVVYKEESMATLQKPKGENVKHEVIHWSKGHFYRECGYHRRTKLIKEWIDAEPDIKAFNENVPSAKIANLVSYLKQVRFCLVYLDRLLDVYLSKKMKRLRWSTYIRRQQTYEKVVKNLTGGNKRTVIAYGDASFTSSAKGNIAISTKANWFQM

SEQ ID NO: 245 - protein, 285 aa, Pilasporangium apinafurcum
FFRFRKKKRVAATRKRSSRRRKKRLLRRKRCKLAEPVTRRVHLRRTNGKRSRGHQLLDMYAITQISTREYRHLAGFNKVRAWNEGIKQHEVAYGALMHGMPSFKTASSSRYFERLKFVWAHINWLIDFCSHHAFRKWRFYQYVYKAKALSHVAERIVPVASKNTLVGFGNWSCRDGIKGHGTGPVKALKKELAKRATVRSVDEFRTSKRCFHCYAELSKVVFPKMVNGVPDGTIESPSVLHCESSECKTFWDRDVNASLNIMRVTTELSNNRARPEYLQRESSES

SEQ ID NO: 246 - protein, 237 aa, Pilasporangium apinafurcum
ADAEFDIKTFNEKVPSAKVANLVSYLKRVRFCLVYLDRLLDVYSSRRMKRLRWSTYIRRQQTYEKVVKNLTDGNKRTIIAYGDASFASSAKDDIAVPTTTLRKQIDSRCRVVDVDEFRASKLCCACHKEMKGYVPDEEIVSDGLYGVRHCKNSECHRTLWDRDINAAINILRLFMDQVKKKRRLEAFTRKKNESVLEIKTEVIKVLIVIFPGTDECSLYSPTCSVPRVVENMWSKCY

SEQ ID NO: 247 - protein, 295 aa, Pilasporangium apinafurcum
LTSKSRKDNSTSIEIQPQSLEYVEGQLRFFPRYFSFSKNGWIKIKGQLPALKYSVRLQQTREDRYYLCIPQVKEFKQTNSIRTCAIDSGIRSFITLYDPHGMMLSVDDAKDAMFNRCLLIDRLKSRLSQENSKRKRCHKRERVYRLFQRMKAMMSDAHHKVSKWLSDNYHEVLLPTFGTSELTSKQKRISSKVSRKMLMWSHYKFKKLLSYKMERSGGRMFDCGEHYTTKTCSHCGRINHTIEHQKVFQCPHCKFVLDRNVNTPRNIFLKNEHLLSWTHQVQVSETPTPRSSSLS

SEQ ID NO: 248 - protein, 295 aa, Pilasporangium apinafurcum
LTSKSRKDNSTSIEIQPQSLEYVEGQLRFFPRYFSFSKNGWIKIKGQLPALKYSVRLQQTREDRYYLCIPQVKEFKQTNSIRTCAIDSGIRSFITLYDPHGMMLSVDDAKDAMFNRCLLIDRLKSRLSQENSKRKRCHMRERVYRLFQRMKVMMSDAHHKVSKWLSDNYHEVLLPTFGTSELTSKQKRISSKVSRKMLMWSHYKFKKLLSYKMERSGGRMIDCGEHYTTKTCSHCGRINHTIEHQKVFQCPHCKFVLDRNVNTPRNIFLKNEHLLSWTHQVQVSETPTPRSSSLS

SEQ ID NO: 249 - protein, 212 aa, Pilasporangium apinafurcum
ALHLDRRYVSWYGNLPSKASHKRAKKEILSLEDWIISLDPGRKKIFTAVVYKDESMATLQKPKGENVKHEVIHWSKGRFYRECGYHRRTKLTKKWVDVEPDIKTFNENVPSAKIPDLASYLKRVRFYLLYLDRLLNVYSSRRMKRLRWSNYIRRQQTYKKVVKNLTGGDERTVIAYGDPSFTSSAKGNIAVPTTTLGKEIGSRCRVVLVTRR

SEQ ID NO: 250 - protein, 213 aa, Pilasporangium apinafurcum
HFVEYVEAYVNMVWQKHYLVKRIRATRKLLVSSKATGFYEGRLYRKMRLNNFYSIRKSEQRLLQRFKEIFGTPDKVVVDIGDWKQKKHHKLKEPIKGKGFRALLRKADYSVYLVDELKTSCQCSHYQVEGAKYEKFRIRLDPNTKKRDEDRQLRPVHGLLLCQQCHRLWNRDVDSSINITRLTRQALEGRGRLEYLSHQTLLPPVNSAVTSTA

SEQ ID NO: 251 - protein, 265 aa, Pilasporangium apinafurcum
RHFKPIFIKINTTVLKEIAKALSDPVELYADKAELWRTYFNISLVTEGQRKEFEHFILTDGMSVSVTISRTKLPMKEKKETFSLEDRIIGLDSGRKKIFTAVVYKEESMATLQKPKGENVKHEVIHWSKDRFYRACDYHRRTKLTKEWIDAEPDIKTFNENIPSAKVANLVSYLERVRFCLVYLDRLLDVYSSKKMKRLQWSTYTRRQQTYEKVVKSLTGGNKRTVIAYGDASFTSSAKGNIAAPTTTLRKKIGSRCRVVLVTRR

SEQ ID NO: 252 - protein, 210 aa, Pilasporangium apinafurcum
LCSRIACEAYMLASIHVLRLLEAGEELPPLDNNFFNRCSSVIANLTGNRKVTNPELETSLDLYRTQHLSVYEPTEKKSYMSQMLVMIAQQARQNFQVSNRLTFYSRLCKWMRLQIRLHNSDYFEKHQGKIIKSAISLLVRASTQTQHSLFGQMLAYGNASFTSSAKGNIAFPTTTLRKKIGSRCRVANVDEFRTTKLCCACHKKMKGVRP

SEQ ID NO: 253 - protein, 293 aa, Pilasporangium apinafurcum
ALYLDRQYVSVTISRPKLPAREKKETFSLEDRIIGFDPGRKKIFTAVVYKEERMATLQKPKGENVKHEVIHWSNDRFYRECGYHRRTKLTKEWIDAGPDIKTFNGKVPSAKVANLVSYLRRVRFCLVYLDRLLDVYSSRRIKRLRWSTYIRRQQVYEKVVKNLTGGDKRTVIAYGDASFTSSGKGNIAIPTTTLRKQIGLRCRVVDVDEFRTSKLCCVCHKKMKGFVLHGKVVSDGLYGVQHCKNSECHRTLWNRDINAAIKILRLFIDQVKKKKRLKAFTRNENELVLEIKN

SEQ ID NO: 254 - protein, 387 aa, Pilasporangium apinafurcum
IEVFTTSHSSSHPLSVASTLFAKIERTAALRNSIIKGTEKSNQLRGVLVSERCDKMASTSNSIEEKTTKKRRARLGFAKRKVRQKQSVYTTVKTGWRKFCKDKRMAEKIDEAVVLCSRIACEASMLASVHVLRLLEAGEKLPPLDNNFFNRCTSAIDNLADSREVHSDLKTSRNIYMAQHLSVYESTEKKSYMSQMLVMIAQLARQNLQVSNRLTFYSRLCNWMRLQIRLHNSDYFEKHQGKIIKSAVSLLVRASTQTHSLSGQMLACGNASFTSSAKTNIAVPTTTLRKKIGSRCRVADVDEFRTSKLCCACHKKMKGFVLDEEIGSDGLYGMRHCKSSECHRTLWDRDINTAINILRLFIDEVMKKKGLEAFMRKENELVLEIKN

SEQ ID NO: 255 - protein, 275 aa, Pilasporangium apinafurcum
MPSWWTRYSRWFVSRRLQVDCLRPSAIAKALRGNLTVFYKQYFKPLLPIGDEPLSYTHLNTVLDYASVQAVTVFEANIKQHFVKYVEAYVSMVWQKDYLVERIRATRKLLVNSKVTEFYEGRLYRKMRLNYFYNIRKSEQRLLQHFKEIFGTPDEVVVSIGDWEQKKYRKFKEPAKGKGFRTLLRKVGYLVYLVGEFKTSCQCPYCQTEGAKCEKFRVRLYPNTKKTGEDRQLRLVHSLLLCQQCHRLWNQDANYSINIARLTREALEGRGDQSI

SEQ ID NO: 256 - protein, 346 aa, Pilasporangium apinafurcum
NKNEIWETFFRTNMKVFKARDYWFNHMISIDGVARSILLIRRDLHDKNTPKKKLVVARERYVDDLTVDEAQQLSERCVVGIDPNMSDLLFCTNEDVSKQHRYTQNQRRQETKAKKYAQIMLNDKMHSLVEGRTIVEWESDLSVYDRKTVNSDKFKAFIKAKLLLNSKVTKFYEGGLYRKMRLNNFYNIHKSEQRLVQHFKEIFGTPDKIVVGIGDWEQKKHRKFKEPTKGKGFRTLLRKAGYSVYFVDEFKTSCQCSHSQAESAKCEKFRVRLDPNTKKADEDRQLRLVHGLLLCQQCYRMWNRDVNSSINIARLTRQGLVGRERPEYLSLQTRLLSADSAVTSIA

SEQ ID NO: 257 - protein, 247 aa, Pilasporangium apinafurcum
SKLFHIKNFETKNRKFAGEIVADGKAVSIVLRKPKVKVVAQEPKLEDYDVIWGLDPGRRDLFVATNQNDQKISCSSKEYCEDAKFKHSGKKIKYWQEKNKMVLKAIRNMPTKKTATLQSFKVYIEYLIPYLDLLLDFNMVKPFRNLKFKRYIFMQKKLCELCLRLTEEAGRRTIVGFGDWSNQDIGGFIKKSPAGPVKRFEKQLRRYCTVISIDEYNTSKVHAECRKKKLYNQCIRVTLLLAYTVVQ

SEQ ID NO: 258 - protein, 235 aa, Pilasporangium apinafurcum
KSKGENVKHEVIHWSKGRFYRECGYHRRTTLAKEWIDAESDIKTFNENVPSAKIVNLVSYLRRVRFCLVYLDRLLDVYSSRRMKRLRWSTYIRRQQTYKKVVKNLTDGNKRTVIAYGDASFTSSAKGNIAVPTTTLRKKIGFRCRVVDVDDFRTSKLCCACHKKMKGFLLDGKIVSDGLYGVRHCKNSECHHTLWDRDINAAINILRLFIDEVKKKRRLKGFTRKENELVLEIKK

SEQ ID NO: 259 - protein, 338 aa, Pilasporangium apinafurcum
IEVFTTSRPSTHLLSVASTFAKTKRTAALRNSIIKKSNQLRGVLVFEHCDKMASTSNSIEEKTTKKRRARPDFAKRKVRQKQSVYSTVKTGWRKFCKDNRRAEKIDETVRLCSRIACEASMLPSVHVLRLLEAGEELPPLDNKFFNRCTSAIANLVDSGEVHSDLKTSLDLCRTQHPSVYEPTEKKSYMSQMLIMIAQHARQNFQVSNRLTFYSRLCKWMRLQIRLHNSDCFEKRQGKIIKSAVSLLAHTSAQTQYSLFGQILAYGNASFTSSAKGNIAVPTTTLEKKIGSRCRVVGVDEYKTSKLCCACHKNLKGFVLDEEIGSKGLYGVRHCKNSE

SEQ ID NO: 260 - protein, 238 aa, Pilasporangium apinafurcum
DLFSTILLSKKECKSMTVHVRKDRHWFRSQRQQARNFITLYDPHGMRSSVDDTKNAMFNRCLLIDRLQSQLSQENSMRKRHRIRKRVYRLFQWMKAMMLDAHHKVSKWLSDNYHEVFFPAFDTPELTSKQKRISSKVSRSILTWSHYKLKKLLSYKMERSGGRVIDCGEYYTTKTCSHCGRNHTIEYQKVLQCPHCKFILDRNVNATRNIFLKNEDLLFWTHRIELSETPTPRSSSFS

SEQ ID NO: 261 - protein, 270 aa, Pilasporangium apinafurcum
KAQAHVDDGMKGCQVWSLLPQKQFKPIFIKINTTVLKHLAKALSDPVELYVDKAELWRTYFNIGLVTKHQRKEFEHFISTDDMSVSVTISRPKLPAREQKEIFPLEYWIIGLDSGRKKIFTAVVYKEESMATLQKLKGENVKHEVIHWSKSRFYRECGYHRRTKLAKEWINAEPDIKAFNENVPSAKVPDLASYLRRVRFCLVYLDRLLDVYSSRRMKRLRWSTYIRRQQTYEKVVKNLTGGDKRTVIAYGDASFTSSAKGNIAVPTTAV

SEQ ID NO: 262 - protein, 251 aa, Pilasporangium apinafurcum
KINVFSVTSSDKPKSHPTSKEFQVMRDELWEKGFHIRKFETMNRKFGYQITINGYSASSLQQRPTKKKDMMVPPGNYVPDTVVGIDPAMWSLCTAIHVQEVGVEEEKAEYNERKPKQNQAKERKKRRKHGVRRERPSNQQYDIQQISTREHRHLAGMNKYTFWHGKLTKRKQEYARIIRATPSFKTVSYDQYMINVKYVWRHLDFLMSFCAMHPFRKWRSLQFRFSWKTLAHLTKRLVPISNSQVCIAVGD

SEQ ID NO: 263 - protein, 282 aa, Pilasporangium apinafurcum
LLEPGKELPSLDNNLFNRCTSAIANLAGSGKVHSDLETSLDLYRTWHPSVYEPTEKKSYMTQMLVMIAQHARQNFQVSNRLTFCSRLCKWMCLQIRLHNSDYFEKHQGKIIKSNVSLLVRASTQTQDSLFGQMLAYGNASFTSSAKGNIAVPTTILRKKIGSRCRVVDVDEFRTSMLCCACHKKMKGFVLNGKIVSDGLYGVRHCKNSECHRTLWDRDINAAINILRLFIDQVKEKRRLEAFTRKENELVLEVKTEVIKVLTVMIPGTDGCNYFLIVPCMVQ

SEQ ID NO: 264 - protein, 210 aa, Pilasporangium apinafurcum
LPSISLVSLLPSHDIDFSRKRWPSIDPLPKLERYLVSILKPLEDENFQIWLTPELSQAVAGTECGCEILNRLGQGMDIISSLLDNYHEVLLPTFGTSELTSKQKRISSKVPRKMIAWSHYKFKKLLSYKMERSGGCVIDCGEHYTTKPYSQYGRINHTIEHQNIFQHPHCKLVFDRDVNAARDIFLKNEHLLSWTHRLQMSETPTLQCLV

SEQ ID NO: 265 - protein, 427 aa, Pilasporangium apinafurcum
LIQLDAAYSRFKKYPIHTEEIVWMQELLNRVRNEIELPPSKLKSSPECYIPFLHTMLKDIQAHVDDRMNDCRVWSLLSQKQFRPIFIKINTTVLKELAKALDDPVELYADKAELWRTYFNIGLVTKVQRKEFEHFISTDRMSVSVTISRPKLPAREKKEAFSLEDRIIGLDLGRKKIFTAVVYKEESMATLQKPKGENVKHEVIHWSKGRFYKECGYHRRTKLTKEWIGAEPDVKTFNESVPSTKVANLVSYLKRVRFCLVYLDRLLGVYSSRRMKRLRWSTYIRRQQTYEKVVKNLTGGNKQTVIAYGDAGFTSSAKGNIAVPTTTLRKKIGFRCHVVDVDEFRTSKLCCACHKKMKGFVLDEKILSDGLYGMQHCKKSGCHRTLWDRDINAEIDVLRVFIDQVKKKKRLEAFTRKENELVLEIKN

SEQ ID NO: 266 - protein, 207 aa, Pilasporangium apinafurcum
TFTEPSTLHFMNQQKKKSHMSQMLVMITQHARQNFQVSNRLTFYSWLCKWMHLQIRLHNSDCFEKHQGKIIKSAVSLLAHTSAQTQYSLFGQMLACGNASFTSSAKGNIAVPTTTLRKKIGSRCRVADVDEFRTSMLCCACHKKMKGFVLDGKVVSDGLYGVRHSKNSECHHTLWDRDINAAINILRLFIDEVKEKRRLEAFTRGNG

SEQ ID NO: 267 - protein, 280 aa, Pilasporangium apinafurcum
HRDIVGWSLRTSPPPPLPDPNLPYYKTVKTSLASVLKTPENQPVIGQAAVTVSCIGIRSLLFLRLYSMYHKDTPPVVNSELVDTMFKMVCQRKARGRPPSVTAKALRDKLTMFYKQHFESLLPIGDETLSYTHLNTVLDYASVQAATVFETNIKQHFVEYVEAYVNTVWQKDYLVECIKATRKLLVNRKVTEFYENKLYRKMRLNSFYNIRKSEQRLVQRFKEIFGTLNEVVVGIGDWEQKKYCKFKEPTKGKGFRTLLRKAGYSVCLVDELKTSCQCSH

SEQ ID NO: 268 - protein, 354 aa, Pilasporangium apinafurcum
SKASKKSNQLRGVLVFEHCDKMTSTSDGTKENTTKKRRARLDFAEWKVRQKQSVYTTVKTGWRKFCKDKRIAKKIDEAVRVCSRIACEASMLASVHVLRLLEAGEELPPLDNNFFNRCTSAIANLAGSGEVHSDLETSRNIYMVQRPSVYEPTEKQFYMSQMLVMIAQQARQNFQVSNRLAFYSRLCKWMRLQIRLHNSDYFEKHQGKIIKSAVLLLVRASTQTQYSLFGQMLAYGNASFTSSAKGNIAVPTTTLRKKIGSRCCVVDLDEFRTSKLCCACHKKMKGFVLDERIVSDGLYGVQHCKNSECHRTLWDRDITAAINILRLFIDQVKKKRRLELFTRKENELVLKIKN

SEQ ID NO: 269 - protein, 257 aa, Pilasporangium apinafurcum
IQRRKKIFTAVVYKEESMATLQKPKGENVKHEVIHWSKGRFCRECGYHRRTKLTKEWIDAEPDIKTFNEKVSSAKVGSLASYLRRVRFCLVYLDRLLDVYLSKKMKRLRWSTYIRRQQTYEKVVKSLIDGNKRTVIAYGDASFTSSAKGNIAIPTTTLRKKIGLRCRVVDVDELRTSKLCCACHKEMKGYVPDEEIVSDDLYGVQHCKNNECHHTLWDRDINTAINMLRLFIDQVKEKKRLEASTRKENELVFEIKN

SEQ ID NO: 270 - protein, 274 aa, Pilasporangium apinafurcum
VCSRIACEASMLASVHVLRLLEAGEELPSLDNNFFNRCTSAIANSAGSGEVHSDLKTSLDLYRTQHSSVYEPTEKQSYMSQMLVMIAQQARQNFQVSNRLAFYSRLCKWMRLQIRLHNSDYFEKHQDKIIKSAVSLLVRASTQTQYSLFGQMLAYGNASFTSSAKDDIAVPTTTLRKKIGSRCRVADVDEFRTSKLCCACHKEIKGYVPDEEIVSDGLYGVRHCKNNECHHTLWDRDINAAINILRLFIDQVKEKKRLEAFARKENELVLEIKN

SEQ ID NO: 271 - protein, 237 aa, Pilasporangium apinafurcum
NSSQERIMQRQSIDHVSSKKILLAFSQGILVRHIKSLKSRNLFQNSNIWFDCREHEKDGFIFVSASKRVCTDCQEVIDPGVCNFITIYDSQWLTLSVNDSKDKDKIFMRCLLIDRLKSKLTNKKSKRKYYRIRRLIVRLYNRIKAMISDMHYSVSKWLSDNYNQVLLPTSATSEMAWKQKRISSKTSRAMLTLSHYKFKKMLDYKMERSGGRVIGCKEDYTSKTCSCCGRINYSIQA

SEQ ID NO: 272 - protein, 229 aa, Pilasporangium apinafurcum
RTYFNIGLVTKGQRKEFVHFISTDGMSVGVAISRPKLPTREKKETFSLEDRIIGLNSERKKIFTAVVYKDESMATLQKPKGENVKHEVIHWSKCRFYRECGYHRRTKLTKEWIDAEPDIKTFNENVPSAKVASLVSYLKRVRFCLVYLDHLLDVYSSRRIKRLRWLTYISRQQAYEKVVKNLTGGDKRTVIAYGDASFTSSARGNIAVPTMTLRKKVGSRCRVVLVTRR

SEQ ID NO: 273 - protein, 224 aa, Pilasporangium apinafurcum
NQVKESKQKRRKKRKKKRKRRRKRASNQQYGIQQISTREYRHLARMNKCTFWHENLKKREHEYGRIIRDIPSFKTASYEQYMTNIKYVWRYFDFLVSFCASHPFCKWRFLQSRFSRKTLAHMAKRLVSTASPQVCIGLGDWSQQGFVKDHAHGLVKRFTCELAKHVTVLQIDEYRTSQRCSKCYQQLEETGFSIKRLMEAQASSFPTKFFAATTASAESRGNEM

SEQ ID NO: 274 - protein, 222 aa, Pilasporangium apinafurcum
NRRKKRKKKRKRRHKRGIRRKRASNQQYDIQQISTREYRHLARMNKCTFWHENLKKREHEYGRIIRDIPSFKTASYEQYMTNIKYVWRHFDFLVSFCASHPFCKWRFLQSRFSRKTLAHMAKRLVSTTSPQVCIGLGDWSQQGFVKDHAHGLVKRFTRELAKHVTVLQIDEYRTSQRCSKCYQQLEETPFSIKRLMEAQASSFPTKFFAATTASAESRGNEM

SEQ ID NO: 275 - protein, 246 aa, Pilasporangium apinafurcum
RLCAIDPGVRNFITIYDPQGLTLSVNDPKDKYKIFMRCLLIDRLKLMSMNEKSKRKRYRIKRLIVRLYNRMKAMISDMHHKVSKRLSDNYNQFLFPTFATSKMTSKQKRISSKVSRAMLTFSHYKFKKILEYKMERLGGRVIECKEYYTSKICSCCERINHSIQVQREVLCSSCNLAVDRDINAVKNIFLKNECLFLGQSGPSIGAVFLEISACPSTCQTQVDQLEDKQQEPLFDTLVSLDNFSIS

SEQ ID NO: 276 - protein, 337 aa, Pilasporangium apinafurcum
SLLPQKQFRPIFIKISATVLKHLAKALGDPVELYVDKAELWRTYFNIDLVIIAQRKEFEHFISPNGMSVGVTISRSKLPAREQKEVFSLEDRIISLDPERKKIFTAVVYRDESMATLQKPKGENVKHKVIHWSKGRFYRECSYHRRTKLTKEWIDAEPDVKTFNEKVPSAKVANLVSYLKRVRFCLVYSSRRMKRLRCSIYIRRQQTYEKVVKNLTGGDKRTVIAYGDASFTSSAKGNIAVPTTTLRKKIGSRCRVVDVDEYKTSKLCCVCHKKMKGFVLDGRIVSDSLYGVRHCKNSECHCTLWDRDINAVINILRLFTDQMKKKRRLEAFTRCKG

SEQ ID NO: 277 - protein, 258 aa, Pilasporangium apinafurcum
NQAKESKKKWRKERKKKRKRRHKHGVQRKRSSNQECNVQQISTREYRYLAGINKYTFWHKKVKKREHKYGRIIREMPSFKMASNNQYMTNVKYMWRHLDFLVTFYATHPFRKWCFLQSRFSRKTLAHLTKRLVPIPSLQVCVALGDWSRQNLINGHVHEPVKWFTRELATHMTLLQNNKYRTSQRCSECYQQLEETPFLTKKADGSADVKFSRQVLHCNSSECRIIWERDVNASKRILVLVMCFLHRLPRSFELRRLE

SEQ ID NO: 278 - protein, 200 aa, Pilasporangium apinafurcum
IDAEPDTKTFNENVPLTKVANLVSYLKRVRFCLVYLDRLLDVYSSRRMKRLRWSTYIRRQQTYEKVVKSLIGGNKRTVIAYGDASFTSSAKGNINVLIITLRKKIGFRCSAVDVDEFRTSKLCCACHKEMKGFVLDGKIVSAGLYGMRHCKNNECHRILWDSDINAPINILRLFIDQVKKKRRLEAFTRKKNELVLEIKN

SEQ ID NO: 279 - protein, 681 aa, Pilasporangium apinafurcum
LVERNGWTTEYVQHKTISFFLIFQSAMSGKRQRTDEEKEEQEKREYFSVVCKLFRVYTNTLLVEEIQNTCRVLKQVQLEAWHVANIHLLRCLKEDVELPELDEMFFYHCCAGVLKAENKLLRCPDPTLTTTLEIYRNKRKSISGYQRPHMTHAGASLLELGAQMSTNAKVMIAEHFGKRLLRYVSFYYNKSYKEAQKIVRSCYRMEGSFTQDEIKVREWLGCIPYKSTIKQNLTYFIEKLYEMLTWMEICQEMEPNIKGCRVFSLLPYSNSYAAAHIKINASTLHGICARIFNGKNRGANPLRIPISKRALVDKRYFQINKDELLRRAFKVSQFETRTRKFAHQITTNGYDVSVLLRRLKSDIELERGKQEKNNIEIKENESVLPDDYNPEVVIGIDPGMRTMCTAVIEGNISFRPRSRCKLTKKIRRIRVRRKKRRKRHKRRPARERRKHRERMIKSGRRICEVSTKEYRHLAGMNKARYWHEGLKTRNEDYTSVVRGIPSYKTASYDIYLERLGYFWKHVNFLLKFCEEKDFLKWRFFQACMKKKALRTLAKRIVPVPSSQVCIAYGDWSRRDGIPGHAPSPVKGFKRELQKRATVISMDEYCTSKLCSGCHQSLQKASYRYVGDNNEIVEKKNRYVLRCINSDCKATFWNRDVNAALNILSLLKTKLLNWSRPTEFCR

SEQ ID NO: 280 - protein, 271 aa, Pilasporangium apinafurcum
RTYFNIGLVTKVQRKEFEHFISTDGMSVSVTISRPKLPMREQKETFSLEDQIIILDPGRKKIFTTVVYKGESMATLQNPKGENVKHEVIHWSKSRSYRACDYHRRTKLTKEWIDAEPDIKIFNENVPSAKVANLVSYLRRVRFCLVYLDRLLDVYSSRRMKRIRWSTYIRRQQTYEKVVKNLTCGDKRTVIAYGDASFTSSAKGNIAVSTTTLRKKIGSRCRVVDVDEYKTSKLCCVCHKKMKGFVLDGKIVSDGLYGVRHCKNSECHRTL

SEQ ID NO: 281 - protein, 504 aa, Pilasporangium apinafurcum
WKWHVNSRSRGLWLPSKIDLNMDSSHKCVKNIASKSWFTLTNNFMKTTTKTWKQENAKKTSSLVLTSLLSEEMEGRQKCSEDSDLRPPKSIRRKRNKPSPNSTVKVRLDPTKEQKQLLRKMFGTHRAIYNKIVELSRDDCYKLSLKELNAKYLPIAQKHSLAKYLPEYDLNAPSVAMISTYRDFVKALDSSKARFESQKDKEKKTSFPQLRFKSRKDNSTSIEIHPQYIEFSEGQLRFCSRYFGFSKNEGVKIKGRLPALEYSIRLQRTREDRYYICIPRVKELEQTDSIGICAIDPGVCSFITLYDPHGMALNVDNAKDAMFNRCLLVNRLQSQLSQEESKRKCRHIRERIYRLFQRMKAMMSDAHHKVSKWLSDNHHEVLLPTFGTSELTSKQKQISSKTSRKMLTWSHYKFKKLLSYNTETSGGRVVDCEEHYTTKTCSQCGEINHTIEHQKVFQCPHCKFVLDRDVNAARNIFLANEHLLSWTHQVQVSETPTPRSSSLS

SEQ ID NO: 282 - protein, 302 aa, Pilasporangium apinafurcum
SVYTTVKTGWQKFCKDKRIAKKIDEAVRLCSRIACEVSMLGSVHVLRLLEAGEELSPLDNNFFNRCTSAIANLAGSGEVHSDLETSQNIYMAQHPSVYEPTEKKPCMSQMLVMIAQQVRQNFQVSNRLTFYSRLCKWMRLQIRLHNSYYFEKHQGKIIKSAVSLLAHTSAQTQYSLFGQILAYGNASFTSSAKGNINVLIITLRKKIGSRCRVADVDEFRMSKLCCAYHKKMKGFVLDGKLVGKGLYNVRHCKNNECHRTLWDRDINAAINILRLFIDEVKKKRRLEAFTRKRNELVLEIKN

SEQ ID NO: 283 - protein, 207 aa, Pilasporangium apinafurcum
QRPTKEKDENMIIPPDNYVLDTVVGIDPGTRSLCTAIHVREVDVEEKKAKCNGRIPKQSQAKESKQKRRKKRKKKRKRRHKHGVRCKQASNQRYNVQQISTREYRDLARMNKCTFWRENLKKREHEYGRIIRKMTSFTTASYEQYMTNIKYVWRHLDFLVSFCASHPFRKWRFLQFRFSRKTLTHLTKRLVPTPSPQVCIALGNWNQ

SEQ ID NO: 284 - protein, 253 aa, Pilasporangium apinafurcum
SRSTQVHHAIRPRRQGDPNKELVRRFQLINTYKRELSLMENAIESATCKKSVCNCKRFCKTRTRTAKKQARQRIRTRKRQRYRLRRKIRFLLRKVSRMVNDMHQKLSRWLSDNYHEVLLPRFQTKKMSARYVREEVEDATPRNLWEPEEMLTVRGRKRKISSPATRMMLAQSHYQFRMLLTQKMERTGGHLEEVCERYTSISCSRCGKINKRLGESETFKCKKCTFDHDRDVSAAKNIFHKNIGGSILREHFA

SEQ ID NO: 285 - protein, 437 aa, Pilasporangium apinafurcum
QKRLVLPAKIRYEKDLLYYDLQCKPQDYWPAMLRMTEMIKQANKKVRNFCSLRTSIIPRHITLDTTTLVTLLFTKENGTKSKLLTKGELVRNKNEIWKTFFRTNMKMFKADDYRFNHMISTDGAACSILLIRRDLYGMNTPKKKLVVARKWHVDDLAADEVQQLSKRNVVGIDPNMSDLLFCVDEDASKRYRYNQNQRRQETKAKKYAQIMLNDKGHSSVESRTIVGWESNLSAYDRKTVDSNRFKAFIKAKLLVNNKVTGFYEGELYRKMRLNSFYNIRKSEQRLVQHFKEIFGTPDEVVVDIGDWGQKKHRKFKEPTKGKGFRTLLREAGYSVYLVDKFKTSCQCSYCQAEGAKCEKFRVRLDPKTKKTDEDRQLQLVHGLLLCQQCYRLWNRDVNSSINTARLTRQVLEGRGRPEYLSRQIRLSPVDSAVTSTT

SEQ ID NO: 286 - protein, 329 aa, Pilasporangium apinafurcum
WRSRSTRRSPRTRPTSTRTYFNIGLVTKGQRKEFGHFISADGMSVDVTISRPKLPARERKEAFSLEDRIISLDPGRKKIFTVVVYKEESMAMLQNPKRENVKHEVIHWFKGRFYRECGYHRRTKLTKEWIDAEPDIETFNEKVSSAKVANLVSYLKRVRFCLVYLDRLLNAYSLKKMKRLRWSTYIRRQQTYEKVVKNLTGSDKRTVIAYGDASFTSSAKGNIVVPTTTLRKKIGSRCRVADVNEFRTSKLCCACRKEMKGYVPDEEIGGKGLYNVRHCKNSESHRTLWYRDINATINMLRLFIDQVKKTRRLEAFTRKKNELVLEIKN

SEQ ID NO: 287 - protein, 308 aa, Pilasporangium apinafurcum
NEIVGEMWGDLFNIEKFKTDNRTFAGEISTDGKAVSILLRKPKREEVIPKKLNAEDYDVMWGLDPDRRDFFVTTNRDFKKISCSTKEYYEDARFTKSNQTIRLWQEKREDMLYAIRNMSTKKTASLKQLKKYIEFMIPKMDMLLVFSADKPFRDLKFQRYIFMQKKLRKLCSKLVKKNKRTVIGFGDWSNQDVGGFIKKSSAGPVKRFERMLKQYCTVVSIDEHKTSKIHSACYESLLVNQNSKRKCKDGKERTLKVHSVLHCKNNGCRGMTVNKDDNASQNILQLLKDQLEGRSRHLVFCRDRRRRT

SEQ ID NO: 288 - protein, 229 aa, Pilasporangium apinafurcum
KTKTKTVPPGNYVPDTVVGIDLGTRSLCTAVRVREVDVEEKKTKCNGRKPKQNQVKESKQKRRKEGKKKRKRKCKRASNQRCDIQQIPTREYRHFAGMNKCMFWHENLGQREYEYRRIVWEMPSFKTASYEQYMTNVKCVWRHLNFLVSFYVSHPFRKWRFLQSRFSWKTLAHLPKRLVPTPSPQFCIALGDWSQQDFIKGQTVLQIDEYYMSQHAPSATSSLRIHHSR

SEQ ID NO: 289 - protein, 288 aa, Pilasporangium apinafurcum
SRTRFSVAKMIQRDYYQQRVLFFRCYLWCLSDCPALRFNADERCKSHIHILHVRYRQQLHRSLIRYLFYPTRDLVTSQVGFFLRNEWPKRAKRKRKQSFPLTLEITKPRCRLIVASLRHFFKPRKRKWEGLSRLYFCMCNCKEYLILFVHKDDPNENKQDKMLVLFSLTINYLAYEFVTASRHRFQSKDMTGSHYKSKTLLKYKMERTEGKMIECEEHYTTKTCSHCRRINHTMKHQKVFQCPHCKFVLDRDVNAARNIFLKNGHLLSWIHRVQVSKMPTPQLAILDY

SEQ ID NO: 290 - protein, 376 aa, Pilasporangium apinafurcum
NLHSRTMLATLVRDSDYFEKHQDKIIKSAVSLLVHASTQTQHSLSNLIPAYSRFKKYPIPNEEIVWMQELSDRVRNEIEPSPSKLKSSPECHIPFLRTMLKDIQAHVDDGMKGCRVWSLLPQKHFKPIFIKINITVLKELAKTLGDPVELYADEAELWRTYFNIGLVIIAQRKELVHFISTDGMSVGVPTSRPKLPTREQKEAFSHEDRIIGLDSGRKKIFTAVVYKEESMATLQKPKGENVKHEVIHWSKGHFYRECGYHRRTKLIKEWIDAEPDIKAFNENVPSAKIANLVSYLKQVRFCLVYLDRLLDVYLSKKMLQWSTYIRRQQAYEKVVKNLTGGNKRTVIAYGDASFTSSAKGNIAISTKANWFQVSFC

SEQ ID NO: 291 - protein, 221 aa, Pilasporangium apinafurcum
SKGRFYRECGYHRRTKLTKEWIYAEPDIKTFNENVPSAKVANLVSYLKRVRFCLVYLDRLLDVYSSRRTKRIRWPTYIHRQQAYAKIVKNLTGGDKRTAIAYGDVSFTSSAKDDIAVPTTTLGKQIGSRCHVVDVDEFRTSKLCCACHKRMKGFVLDEKILSDGLYGMQHCKKSECHRTLWDRDINAAINILRLFIDQVKKKKRLEAFTRKENELILEIKN

SEQ ID NO: 292 - protein, 302 aa, Pilasporangium apinafurcum
WYLLIITFPILSLGSTLVCGRSTLPFVCEKLLWKKKKARCNGRILKQSQVKESKQERRKKRKKKRKKRHKRGIRCKRASNQRYNVQQISTRKYRYLAGMNKCTFWHENLKKKEHEYGRIIREMPSFKTASYEQYMTNIKYVWRHFDFLVSFCASHPFCKWRFLQSRFSRKTLAHMAKWLVPIPSPQVCIGLGDWSQQDFAKGHVYGPAKRFTRELTKRTTVLQIDECYQQLEETPFRTKKADGSASVIFSRQVLCCNNSECRITWERDVNGSKDILTLAICLLHRLPRPPELRRGERNVGRE

SEQ ID NO: 293 - protein, 354 aa, Pilasporangium apinafurcum
SKAPKKSNQLRGVPVFEQCDKMASTNDGIKENITKKRRVRPGFAEWKVRQKQSVYTTVKTRWRKFCKDKRMVEKIDEAVRLCSRIACEASMLASVHVLRLLEAGEELPPLDNDFFNRCSSTIANLAGNGEIHSDLETSLDLYRTQHPSVYEPTEKKSYMSQMLVMIAQLARQSFQVSNRLTFCSRLCKWMRLQIRLHNSDYFEKHQDKIIKNVVSLLVRASAQTQHRLFGQMLAYGNASFTSSAKGNINALIMTLGKKIGSRCRVVDVDEFRTSMLCCACHKKMKGFVLDERIVSDSLYGVRHCKNSEYHRTLWDRDINAAINILRLFIDEVMKKRRLKTFTRKENELVFEIKK

SEQ ID NO: 294 - protein, 354 aa, Pilasporangium apinafurcum
SKAPKKSNQLRGVPVFEQCDKMASTNDGIKENITKKRRVRPGFAEWKVRQKQSVYTTVKTRWRKFCKDKRMVEKIDEAVRLCSRIACEASMLASVHVLRLLEGGEELPPLDNDFFNRCSSTIANLAGNREVHSDLETSLDLYRTQHPSVYEPTEKKSYMTQMLVMIAQLARQSFQVSNRLTFCSRLCKWIRLQIRLHNSDYFEKHQDKIIKSAVSLLVRASAQTQHRLFGQMLAYGNASFTISAKGNINALIMTLRKKIGSRCRVADVDEFRTSKLCCACHKRMKGFVLDGKTVSDGLYGVRHCKNSECHRTLWDRDINTAINILRLFIDQVKEKRRLKAFTRKKNELVFEIKK

SEQ ID NO: 295 - protein, 308 aa, Pilasporangium apinafurcum
SLRTNVIPRHITLDMPTLVHLLFTKENGSKSKLLTKGELVRNKDEIWKTFSRTNMKVFKAGDYRFTHMIDTDGVACSTLLIRCDLYGKKTPKKKLVVVRERYVDDLTVDEAQQLSERRVVGIDSNMCGLLFCIDKDASKRYCYTQNQCRQETKAKEYAQIMLNNKKHSSVEDRTIMEWKSDLSAYDRKTVNSDKFKAFIKAKLLVNNKVTGFYEGRLYHKMRLNNFYNILKSEQRLVQRFKEIFGTPNEVVVGIDGWEQKKRRKFKDPIKGKGFRTLLRKPDYSMYFMDEFKTSCQCSHNQAEGAKCE

SEQ ID NO: 296 - protein, 223 aa, Pilasporangium apinafurcum
ALHLDRRYVSWCGNLPSKASHEREKRKAFSLEDRIIDLDPGRKKIFTAVVYKEESMATLQKPKGENIKHEVIHWSKDRFYRAYDYHRRTTLTKEWIDAEPDIKTFNENVPSAKVPDLASYLERVRFCLLYLDRLLGFYLSKKMKRLRWSTYIRRQQTYEKVVKNLTGSNKETVIAYGDASFTSSAKGNIAVPTTTLRKQIGSRCSAVDVDEFRTYCVVLVTRR

SEQ ID NO: 297 - protein, 645 aa, Chlamydomonas asymmetrica
GGPYNMNECGCAELVEARDDALDECGNADPTLVAVSGETDVDLTPVVVKMSLRSTCANVQLRKCLNAIVRDANRMFGEGYLFANFHVRRLISSGMPAPVINRSFYYRCLLAVSINKARVTTLGDDIKISRDKFDALRSRPAKKVDATKYGQLLADMSISMATMATNHLLMNAARRLRAWLRFKHLRLKSYHRKITDAVLVRPQEALVEVFGSHDSNPKYHDAVSIARTLRGLSTLPGRHIRFASQVHHLLPLYHFIMVELEHLLMSATSTKRQAAIRRRMFTLLPEKSGYAVSHIPISSSFFMRILKGITRMEEFPGDGRSEDHTAYWRKYFNINAFETPERMFGDRIVTDGHAVGFLLRRNVSRKDAGDDTPLQVIQQAYRESAAVSVVGVDPGFKNTVTIARRGGQCASYTSARYYHEAKVFSSMRKVNRWNKETQDLTDVADDIVSVTHPIAIARYLKNLPRLVAHRMQGGYRQQRFLRFAYKKKAVKAIADFIAPPSACATHLVCFGDWNGGHASPISRKTSGPMKDVKRALRSRDDVLFMTVDEFRTSQTCHYTWSKMQSMVASSIRKRRNGEIVQRRGKVHGVLHCQNSVAVPQPLETTWNRDVNASKNILMLGLFQVLGYARPVAFSRPVRRMRRQQQ

SEQ ID NO: 298 - protein, 796 aa, Chlamydomonas asymmetrica
PWTMAHIIVERAKAKQFFAAEYIPTIRKAVQQHHVVTSYATLLVKAFYLKDVLPLWNACRERNIAFPTIAIDSDLLGDAFTIVRGKSVQTRKKRVTLTVPIVDPRQPATSSNQTSSDQPSASTQGGKATKRKTRTAKSARKKLQDVERSKVDTDRVVRWCRARLRKLWIDDFADPKTKAAPGLVPKDLLSLSHAFEYAADQLAAAYEANVVVHFEAYVARFAKESMLLIPSPTLPCIPKRRSKRHALKATRRSVVNNEVNKAVQDLLLNRLGDAAKCRVPEFTIWVASHRDRMLPSQPGRFETIQSHLEARPWDFLPHMVWMAAAVEDLPVHEACRRRRLLQPLVVRKSLVPGHIVLDTTALLHVLFEDANAIARFKADYAVLYDVEMVNLTNKASLAASFATLTGRHGVTKDDEAKHAQRIWEYTCRLDPATNKHATRFLQQSRDLERVRTLFRFGRMVRTDGYNVSVMMTTAPDTLGRKRVARAANALVLPSLNTNTWERVRTELASSPGDQVDLASCDPGKTAVLTMVDGSGKSLVYTYARRERECRFKQHRERLQTASRFRVLSGLVLTWNDVSAPNGVRTLSSPSLDAVQTQFLARFSAKSCKFDTFMAYVEARRLVEAHMRQFYEAAFHRHNKYSGYLAKRHSEDRLVDRIRNTFGGSATAPKAVNIAWGNWGLAPNSLGGSPSSPGIGLRRRIHSRLRRDERPQGVHLSGGTLTVYEGGTSSACNACGGRVSPGRDSNRRITRRVLCCKECGTRWPRDILGALNILACAESLLTCGHRPDFLVHPLDDA

SEQ ID NO: 299 - protein, 506 aa, Chlamydomonas asymmetrica
RHENTQKDQLWGLIKNPLYPCSKIHNDDFKDIVEFRELLGMIDTIICDKQTKEKKLRRSFEFCLKHLSEDLSAFNTKTWTLYCWIVKYKNTLEDAKKCSLLPVSSIGRKFAYIDHKIAINLIKKPLREKMLKESEGHDGSELQKIFGLAPQLFNKRRLKIRNRLRSKEFKRYKKCKKGGSFLSRKKLLNDKWKCLGGGCLSKRSIVRSISTDGVGLRLCLETIPGRSSLNYDVFQVTKDTFKVAGDTGRVRMITTIDSNGDVKMITRKAYYNHLRTKKTAKFIEDQMQNTPWGEANNAFASSGGLKNVSVSTWMNALNVLGNNVETIKNYQLFPKDQAFRKMKSLRHKKAFFDQNLKRIIRPDKTSQENILIGLGDGDFACTGKGEQAVPTTGLGILLRRIIKVLQLSRRVRIVILNEYNTTKVCHRCGSIMEKIITSKGEECLRYRLCKCCDKTNGMRRHRDVNSCKNHMKLLECDVHGLERPRGLEIPEWFWNKKTPSWVAPIC

SEQ ID NO: 300 - protein, 490 aa, Chlamydomonas asymmetrica
LSQRYQDDSNMYTRAAKRYIVNLKNSFAMNFESRLKTFLRQYQKVHDFSVDQRSVMYYKICGYTLPKDLKKVVMTPLLEEMIKEQRRMLDLNDTSKITKSKLKNTMFYQNILKQWVFFNRFYERHGFKLFGIVPIAKIKSSFVSIDNEGLFGICKECGLLRDVSRADFLESSDKYWTKIFNMRKITKTIKNPSKQFSNVIETDGISMCAHFKSLRTLPNNEKCLETVLDPKKTTLGIDPGRVNIYTVVEVTPEGKILYYTLTHNQYYSEAGIFKARKQSNTWSENIQKTLEALSTVSIKGVNFQQHLEFLKVYFQTLDYLKKEYTKPKWARQRLRLYGGKKKVFEKFWKKVIGDRDRESLQVAYGSAKFAPGGKGEISVPTSRAFKECASRLLTKAVDEFRTTKVDNRTYNVLKGIKYKGKLSSKKFLRGLQWCESTILAKEGKFVNRDVNAAMNIRMLGLALERPRIFKRDPSNTKLVMVLGKKIKNHK

SEQ ID NO: 301 - protein, 204 aa, Chlamydomonas sphaeroides
RLGCGSDWGCGLGHGSACGSGCVLSCHGLGTCWAAGAASPVQDLLAYYFDPRQSKKRLKVYIRKQRGLHREAVRLTGGRPKDEVVVDWGCGSAGWNSAIRRQGQLPRKEFVRLLYELYVRHVVIINECRTSQVRRLGGRWRVQCMPAGKGACGACSKPHGACAAPALRPRSATTAGAASCLRGCYLGRGVRMACKSAKAAARHE

SEQ ID NO: 302 - protein, 231 aa, Chlamydomonas sphaeroides
GARRAGPQARAANDRGRAAGKQAWPSLPTCPPFPALGLPPAPLTRYGCGTCSAAGACWACWTSWSTFSTPPPRKKRLEVYIRKQRVLHREAVRLTGGRPKGEVVVGLGCGSAGWNSAISRQGQPPHKESVRLLRERYSRHVVINNECRTSQVRRVLGGRWREKCMSARKGACSRSNGVCVRGPCPTPPVYNNCGCGQLPARMLPGARRAHGMQICQSCGTTWSKFRGFMGG

SEQ ID NO: 303 - protein, 495 aa, Tilletia indica
SGVGRRVAASATQLVAYSATTFSSTTDSSPRQPPGLEDVAFSATELHQRRLQQQVRQNRPIRASAVVRMQQGRTRTAEDETTRTRKVRIYPTTHQKARLREAVGTYRWVFNQAIAFIKDDSSNADQAILREALIRADAYVGNVDKFPLRLPYDARDTAVAEAVEAYTVSARRCAEGQIAGFNLKFKRKRMGHGVLPIRKAAWHEGGRLWPRAFGREFGALRGAEPLPDHLTADTVITCKNHKWFLHVPYIVQAPKKPEVGPRVCAIGGSLSCVPVSPCFALSVTNTIHIRLILAHTDPGVRTFATVYDPNSASVWKWGHGDITRIFRLSRHVDRLVALARQARCRRRYRLRRAANRLRGKIYNLIRDVHTRLAAFLVRSYDIILLPELNPHGMSRRGRRRINSRTVRQLMSWAHGRFRSRLKDKVSYVAVPEHYTSQTCSECGWRNRRLGGPQTFPARLADFARTGTATQPKTFSCASFTTRHSRITTKTKDSIE

SEQ ID NO: 304 - protein, 306 aa, Tilletia indica
RLYSASEWLGGRSGRQNSELRAEVPEKEGVLLLLPNSDTGYVTGKWDGGCLKIPKFGLGPGQHQTKIQTGIDVPSLEHDGACIKQENGLWFLLWQKDMGKKRCGLLQHVGQRCVSSTPAFGHLPPFTLYDLLRGTAAKFGDGDHKRLFRLGTHLDELISRSTQASAKKRYRMRRTANRLRARIRHLVDELHWKLRSYLKQSFDTVLLPKFNAHQMSRRGQRRIGRTTVRAMMTWVHGRFRSRLNEAMEVVEVVEDWTSKVCSTCGTVNHRLGGSEFHRCPECLTVSDRDVNAANNISLHWKYDFLN

SEQ ID NO: 305 - protein, 224 aa, Tilletia indica
VFYQQLWRFVSILTLFSSQPDPGVRTFATLFDPLVGIAIKVGEGANARIFRLGLHLDNLLSRMAASNAKQRYRMRKAANRLRKRIKDLTTDLHKKLASFLRANYDTVFIPTFNAHEMSRRGKRRIGRRTIRQMMSLAHGRFRSWLGWKMKTVEIKEDWTSKTCSTCGRVNYRLGGSDTHRCPSCGTHSDRDVNAAKNIFIHSLFDLRRSLTTTGNGLNTAVVHL

SEQ ID NO: 306 - protein, 217 aa, Tilletia indica
WLKTLTTFYQSTDPGIRTFATVYDPLRQKAFQWGTGRDVKVLFDVALKIDNLLGKLHAPDIRHRARYRMKRAVNRYRMRLRHLVMEIHKKFALWLSKNYDTVLLPSLSAHGISARGRRKIRKSTVRQMFSWAHGKFRDRLSNKISFVEIKEHYTSRTCSQCGADNPRLGGKSVFRCPSPACGLEADRDVNAAKNIFLKWLHDFHQDASFACKLRRRQ

SEQ ID NO: 307 - protein, 221 aa, Tilletia indica
LFCYRSRCADVRHHLRRASRVRFPVRRRRQVPPIPPGLMPGQFDLQVGSTGRPGESQIPDATGSKLPECNNPKLGRRSISAVCKFAQKNYYTVLLPTLNAHQMSRRGQRRIGRRTVRAMMTWAHGRFRSRLKEAMEVVEVEENCTSKVCSKCGTVNCRLGGSKIHRCPGYHTISDRDINAAKNIFLHWKYDFLKSSPRNLDQCSAKSHIYESYIHIYIYMT

SEQ ID NO: 308 - protein, 226 aa, Tilletia indica
WGMHQAGERVMVPPLAEGHGGRKDAGSCSTWARDVCHRPRRSTFATIYDPLRGTAAKFGDGDHKRLFRLGTHLDDLISRSTQASAKKRYRMRRAANRLRARIRHLIDELHWKLRSYLKRGFDTVLLPKFNAHQMSRRGQRRIGRNTVRAMMTWAHGRFRSRLNEAMEVVEVVEDWTSKVCSTCGTVNHRLGGSEIHRCPGCLTVSDRDVNAAKNIFLHWKYDFLSL

SEQ ID NO: 309 - protein, 622 aa, Nothophytophthora sp.
MEWNTPPRGAGGSSRSRPDMSRRAARNQLTRFTVIKTTLHSFCKESADRLIEPLNAALLAMNKATTEAYILANLHVLRLCVEGLHAHLQFPTVDQLFFDRCLSAVSTGCRERKACEDAQLQQTIELYKSWRPIGYEPADTSYLSSGWMSATAQMMAVNTNNALLQNFVPRFQKYLRLEYRLTKAEARDMVNRIIADSYDGRANRNVIMEYRAEVPRPFSATLEKPHLLIPLMFTFLKSFEAHHPVDVTSENADPKIVKLLRLYTLLPHKSGFCLSYCKINTTGLRGLLLRAKAADRTADDVPPQTTWGADEGRVANEHWRELFNISTFETSTRKFAGEISTDGKAVSILMRRNDSPTGLSSHQRASSPVDSVDSVDYERWGLDPGRKDLFVATNQSGERARCSSKQFYEDARYTHSNKKVKVWQEKNHRVHDVIRNMPSMKTIQLHALESYVRFLLPQLDLLFSFYSAKRFRNLRFKRHIFKAKKLHDICIQLTAVSKANTAVGFGDWSNRDAVGLIKRSPSGPVQGLKRQLRRYCRVIDIDEYRTSKIHSEPSCHRLLTNQVSLMRLEDGSVRKKRVYKVLHCKFSGCGMTVNRDANASENMLMLLEAHLGGRDRPAVFCR

SEQ ID NO: 310 - protein, 281 aa, Nothophytophthora sp.
SQGGESAVDVAGGSESADVLAEGPHADVTWSGGAPYASDTGDKRHESTVFGDAERQTPDATFNKRHIANTTTTHSNYWHEKLQKAPSGLRAAASCDPGIQDASSTHYLQRLEFVWTNMSYMIAFSAAISSRKWRFTLARFKKRTLSALAKRLVPTADDDVCVALGDWSQQGGFEGHRHSPVKDFAHEPQRRATVLSIDEFRTIKLCCECYVILQKVKFKVENDSGVIEPRDCRNVLRCSDRACNLVWERDVNAAKNMLQLGLLRIHGELRPQALTRGHTIG

SEQ ID NO: 311 - protein, 628 aa, Nothophytophthora sp.
PRLSYASASLVELANAMVVNAANHITIHFNRRLSRCLELSFQLGRREMRVMLARLQREQCEFTVAENEVLDWLQEHPNEDNTKGIPGHPTEANIKKYPVHFLGKMYDMLMLLEETVASKDRTPRGCKLFSILPVSTSFVPSYITINTTILYNMGKRILKQKGVDVFNLFKRTDTKGAKVYATTGEFQAMRHRIWPEFLRVDRHTSKKKDPELGILRRKFEYQVQTNGYSAAVLTSIPAKVSRNPSVEYKPHTVIGTDPGKRSLYTAFCKPTDDQQHRRAIQHRQQVARHQRRAAARQLQRTARYQHQTARQQQRAAARQQHRAPPNHFPVCPMLNYCKMCTGPKPRRGKRRRRGGWQRKRRRPRGRPTRGCNVVGWCAICARYRRPTTRKHGVRRRRASNAGCHIQQTTSREYHHLARTPHSNYWHENCKRRHPDYARRLRATPSFKTASSTHYLQRLEFVWSNMSYMLAFCAATSFRKWRFTLARSKKRALSALAKRLVPTADDDVCIALGNWSQQGGIKGHRHSPVKSFARDLQRRATVLSVDEFRTSKLCSECFGTLQKVTFKVENDSGVIEPRDCRNVLRCSDRACNLVWERDVNAAKNMLQLGLLRIYGELRPQSLTRGHIIG

SEQ ID NO: 312 - protein, 201 aa, Nothophytophthora sp.
RLAGGRSAGRRIVDINRTRRSTRSTLWSTGTMPERGRSRSGSRLSRSTKCGTPASSVQCLLSRRRVTNDVYRERLKFLWLHLRFLFSANADKIFRFLQSQVRMNSLDALVRRIMHKTSQLVCIVYDDWRNQGRIMGHRTIPVKRIKETFKKRSTVLAVNEYYTSQLRSRYHRRLEWVRLVYTKRRHGRPEGKPKCLALCPR

SEQ ID NO: 313 - protein, 297 aa, Nothophytophthora sp.
TTAKCALGQGQGGESAVDVAGGSESVDVLAEGPHADVTWSGGAPYARDTGDQRHESTAFGDAERPTPDATFNKRHLANTTTSRVPPPPPHSNYWHENCKRRHPDYARRLRATPSFKTASSTHYLQRLEFVWSNMSYMLAFCAATSFRKWRFTLARSKKRALSALAKRLVPTADDDVCIALGNWSQQGGIKEHRYSPVKGFAHELQRRATVLSIDEFRTSKLCSECYGILQKGKFKVENDSGVIELHDCRSVLHCSDRACKLVWERDVNAVKNMLQLGLLRIHGELRPQALTRGHNIG

SEQ ID NO: 314 - protein, 272 aa, Nothophytophthora sp.
KARSVTRLTAISATSRSSSKSRKRDGRFFTFCEDANAAKITYRDGKSRAMLSITKTKNISLQCDPGLEISNEIQITNTNGLWYAVIPRFVRPSNYVNRGRTVALDLGVKAFMTGVDLDGNALHVGRETREHLDRYRTRIVEAQQEMALIKNFKGHRSGRQWRAFAKAKRAFNCATDKLNNFVKDMHYQTCAFLTKRYDTIILPIFSSMDMVKKSASRKHTFNSLLLGLKQYQFRKLVQAKCEIMGKSLISCSEMYSSQTCGRCSRLHLKRGS

SEQ ID NO: 315 - protein, 575 aa, Cladosiphon okamuranus
FLFLLSSFEYFELKYFYSSQRRCMSPPQRSLQNTISPNLHSDDGGSLDRSNSSQQRGITFGISNPVSENLQRIPETRSITVESHPQSRRTTSKGKRKRQESSSRITKSSKTLGRDSTSREKDSLTWWTKSSKEVSGKLLSRIGTDSVDLPSISWNGSVDDQIANSWFKARSSNLPIKNSQKISWPLFTSSLANLTVKDVTRARKIRIRPTSDQIKILRKWMEDYRKTWNMALKLVKDQKRKVSLDLKKDVVTRRSTHGPELVDLKSSPTVIRKGAVNDLVKANKSAWALYKARLKESKSNWRKNPFEIKYKSRKSNTGSFPVDQVYVKKIDTESFSLFSEPKFKMVLRAKNVPDITKDCRITCVFDRWYLIVPETSKSVKRNIGEEPKVVGIDPGLRTAFSCLGTDGSILEIGSDTDERLDKINEKIESIKTRMKTDTSKRGRLKKAWHRQLMRAKHLSDELHWKTINFLTSKYDVIVLGKLNVKSLIMKNNKKNKKMLSFLSFYKFRQRLEEKAQSRGNFVVVQNEAGTTQGCPRCGYKKLDVGSSKIYKCDRCSFVGDRDIKAALCMIIKSCS

SEQ ID NO: 316 - protein, 222 aa, Cladosiphon okamuranus
QKEILEASSCVFGDNYRRDTLASRSDEYEAFRRRSGPYGEAIEALNKEKKRTSCFATFLRYCRSWCTNGPALLNETLQKSRKLLRFGRHRATQSALAKIADKYMGRVGGACRVMLFGKASFRAQKGRASAPRKAMIREMASRGVVLMVSEHNTSKKCPGCLGDTVEDKERRTRSCTNFKDGHPEESCRLHPLTPEFEMDRDNVGSTNIGMRGFGLLLGQEWF

SEQ ID NO: 317 - protein, 666 aa, Cladosiphon okamuranus
CSPTNMSQAATPHVSSGCMQTPSEDGTGLALSSASGSTAATGCTISQSSRGTRQAEGSHRRKRQKKEPTPSTAESPPPSKKKTCNAKPKVFRHPTLGFRYFLTQGPGSTSSGRGSKGFFKKSCADISENLWYPTETDCAELLSTSSNGYVTSTKLNSWFTTKIRRDPMRRSSWRTSWRLPTFLVPDSMESDRISRGNTVQKSAKNVLIMKLLVVQLRILAVCKEHNAQVSTAVVQSVRERMETIREYGDTTGKLSKTQQKQLDTLGTALDKYNAGSFHGDDSISDLICYQDKLTDEITKRFVTTEAHLKRSKRVGVRHIDPKSKSKLREYMRASRKIFNKALDCHNKGINGEALRQKCVRSSNLSDDLKQIPEHIRQKAFDKYRSSQASCDELGGHLAFISRNKDQQWVGLQKRDCKIEGRTLKVFGKVELELKETVDQGEPDCDLEITEHRGIFYVAIQSNLQYHKPLEIDIRSSRFCALDMGERTFGTLYDPDGTIAFLGTDANERVKKRLRVIHKLRNGLKTKLASWKRTRVLRAVRRASAKLKNLIKEMHNRIATWLVTNYEVVLIGKLGVGVMRSKRRGKRVLQALSHYSFRQTLLQKASVYQKDVRVVSEAYTTKQCNRCGFINWTIGSNETFSCKNCKVVCHRDVHSGRGIFIRSLGRD

SEQ ID NO: 318 - protein, 779 aa, Cladosiphon okamuranus
PRYEIKQKTFDANDPATKLTKYSDRFIAIMVLPSSRVKKKKKKAASPPDVPDFLQTIERLYPTACRTKDGKLPRKYKGTYCCQLFSRVRLGQDVSQRLRTRTVSVGFRTATTDAKRDVFQEKVDQAVHHLSHERVLASLFANFVFLERLREGSALPEPNRSFFKSCLSSCVISRGGGSLNADFERFTERTGLKRIDPPKNLNLDQQREYEAGCMATSTSTRAELHTEPRRISITKWFLRGRISRGEMGHKKYAYRLYSLASTIVKEFEATPDGEQNLRDRVLAVDPAAQTGPIITFARREKEFSDQVCGDKTSAPKIKHLSWMFNTYVADARRRYDEALSRAHARFPGEDKERRKERYEFMVGELGEDADYPPPKDAAVLPICSTRSVFIHIDMKTLKFWGLLASNDAWWFRDVLRPFSKEANIKCLRNKENTKYASSQQGYLSSLLESGPDKCPWMVGESFLTDGVQVKLLLLTLNHTRTTFSGSSELNEAGYNKLPRADVPLETLLSQGRGVYNISSVTPSASVPDGLVVMSADPGQAKVVNVCSATSDVWAKKDPGNILPTSTCVFGDDYRRDTLASLSDEYESFRRKNRAYGEAIDNLGGEKKRTSCLATFIRYCKSWFTNGQALLNETLQKGRKLLRFGRHRATQSTLAKIADKYMGKVGAACRVMLFGKASFRAQKGKASAPRKAMIREMASRGLVLMVREHNTSKKCPGCLGDTVEDKERRTRSCRNFLIGNPEESCRLHSLTQEFQMDRDDVGSTNIGMRGFGILLGQDWF

SEQ ID NO: 319 - protein, 605 aa, Cladosiphon okamuranus
VMSRHRSSQKSTESPKLPQGDGESRGSCDQCEHQEDTTDTCLMTSSRSGTAQLTEERSHIVESARQNRRMTCADKSSPSKKRTRNTRSSKTSDQASTSKGKVFCEWLTPFSKDMSKKLLSRTGIDCVDSLSTFSNGYAGGGIHESWFKTKSYALPNKSSQKISWPSSMCFPSSFTEAGDTGTKARKIRLKPVNGQEKVLRKWMTSARQTYNEALRLVKAKKAKANLLLSKLVVTARDTDKNSRLESMKLAPADVRKSATRDLVKNFASARAAYTARLRKVKSGKARIKKRRKSGQFKGRRRYKKRKPFEVKFKSRRLTSDSIELEKKSISFQDNTVCFFGSTKKHKLRVDMSEAFSDEPGAHKPSQSCRLAYCFGRWYIIVPEKVQIKKECADASMEPRIIGIDPGLRTAFTCSSNFGDVLEVGINTRYRFQREHGKKTSIAKKMRDATCVKKKTKLRKAWYRCQARAKHLAADLHWKTIKYLLDRYDVVVIGKIGVQSLVSKTGQSASNKRMFSYLSHYSFRQRLKYKAALLNKVVVEQDESYTSQACLRCGHLKKDLGDAKTYVCKECGLVIDRDVSSGFNIMVRCASEHHVTETTVLGKRKS

SEQ ID NO: 320 - protein, 729 aa, Byssochlamys sp.
KGRESSQNDSQGKKANSEQLRSSDYWFESDYDFFQSLLSGESSKTIGLQKNLASNTFASTSGAAATFSGTAMPTLETVAPSSATGVSNASASVSASNGRIMSIKTTVKDIWKAPYVKPLHDLVDLTNKVVTHTFALSKFIFLKEITSDANFDLGNHINKNFFVEVFLSLLLRQSRDGSVTGKSKLTDAVQNYRKLIGKHKDHYFQHAKYTPAKLTNAQQIALYECVKIQTAYVNNIRAHFGNRLLMVLNKLFKKTEKTENLRQKMKTQGYSDDDINKAIREQITTPCTLFKLSISKGVIHNDTQLDNESRLKLEDFLSTYPKSYRFEKDSIYYDVVSRPQNHFKAFFKLASICESLKSDCFVCFPLRTSFIPMYMTIDSKIVNFHILKNKKVSSDKLDIWNQVVYLQKKVLRRQGTISFEGTIQTDGVGVSVVKQNFPTSRKQAGNKRRKDIDTDENKVEYIEKLTSSQHAEIKGKCVLMDPNRRDLFYCMKETSSTERKQILRYTQSSRSKLSRHFRKLQKNLKPEDVRFAEEMTSKKKSKSVDLPSYIEYIKVRAEYEDVLTEYYGNETKTNVRNFYPDTINDFFITTTHDLYWGRLFVARFTGTFPKNNTDNEDELFKLQNFITHLQILLNQAHVKKRLPKTTITHISRFAEEALIWSFGCQDQAAIVQKLKVVKNFTSSQLQTLNLLPFRKMRFSSKLDSRQNEESLVKGLKEKFGSDCVLVLGN

SEQ ID NO: 321 - protein, 214 aa, Byssochlamys sp.
RERYVRYKVNVAFIKGPLSVDRGFSFFVCTNANKFIQLKFKSYTNKQKGTQEIAKRLFDNSKKYGKTSTVGAKSQNPNKSKHVPLPPADFPSSSQRKRIIAFGSGSLLSMKGKRAAPTKRITEEIKRKCKQSNVGTEFVSVDEYLTSQICNKCKSKQLNNFSVSGPKRRVHSVLKCESCGTVWNRDVNSALNMYMVSLFTNQNTIMKVLPPSKG

SEQ ID NO: 322 - protein, 557 aa, Erythrobasidium hasegawianum
VEAQLTQINAKISCQAIDPSFCHFGMTKIYYVLSNPAHIVASLTSWLNDHWNKSPSIVRSVSTLQCFNLARGRCGLEVNTNWMTRCERWTQEFMRSVSSPNKDDFPKARLEVFDILFKRVLPKYQIYAGSFKTDGIRVNITAMDISKAKLPKNLESDCAVKKIDVPKEWTVPDFFKAAVTLYQKSFSNLQGHLERTSIAEPSTAFKKKGKWWPWTFERIFGSNRRGVLRKGMMQDRPLTILSDFREESTRRGIPTDMLVLRPDTVEVIEEKMKELLTACEQDTSGDWLSDLRILGLDTGIVCPSAMAINDPINGTSSTLLTRRGALENIRRSGTRFKQDLLQRPGTNKLEGRAGQLAKAMLESSHEWSNDSYMNNRRRKAWVEQYYQQLRRHLFPPDRPRVPILFSLGDSSGFSRGSGSTKRQQIDYSHSIFRDIRKKCIDNGLPILFVVVGEAYSSQVCPDVSCTLNIPQVDSEEVKLARARSVYRHTASGSALTIHYRLFHPFHRGCLDQCLRVLQCEKCKKVYHRDTAAAINIAFIAWHMLRFGEHPWRKGDDD

SEQ ID NO: 323 - protein, 453 aa, Porphyra umbilicalis
EMRPCSKRQRTRRRLSRPRQTRRCTQRLYGVQCWATMGYMPRASNSERRRTSARRRRYCARQSEWRLRQPQLHPLRPRSSARPARRCRRQTVCECCVPSSGVRPRPGDRARARPPAGATLVVSEGAYRKSTCASMTQPAETAAAAAWAATRPDVSCESLTAGCSLTVASWGAWVVAATTRIARTYTDAYQSAYGAAVTWGRRKARLHALIQRNWYAAKLAHRMTSTFLRHTVVGTKAVLAVGRCRPRAGSVDPVRRMAKHVHLVYVDEHNTSQTCAEFGHVLFNTYVSPDSQLDLTLLKATRIYAQRASASAAKRASPLRNGRRARRGVTIGSRSGPRDDAAAQRAKEHAGTVRTEVLQAIAAHGKCAFGTDPLVLWGVKLCTSVANPATYVGRDTNAARNMSKIAIKSIQGRSVYPKIRGYTISRAPPRDDPVQAVRHAAAIEAGSYKAGYG

SEQ ID NO: 324 - protein, 674 aa, Porphyra umbilicalis
ALVGPTAATPAAQASLPPLEHAPTEPAAALDPSSPPDPPKPPRYTQPSYGDACLTPVQRQEVARKRGPSGPDGRRSLLTRLRALTHAADNDGGVQPWRLPNYVCVWMGEAALFKASTDAAADAGAKAEAAANAETAWHALSVGDQRHAARVWHSAARTAKQTAAVARNAKRAAAAAAAAAPTELPQHGVPGTPLPSADRLRVLCAALRRAATTTRPRARAPPAGATLVVSKGAYREATGAGMTRRAEAAAAAAWAATNPDVSRESLTAGCSLKVASWRAWLVAATARIARTYTDAYQAAYGAAVTSGRRKARLNALIQRNRYAAKLAHRMTGGLLRRTVDGTKAVLAIRRCRPRAGSVDLVRRMAKHVHLVYVDEHNTSQTCAECGHGFCNTYVSPDSPVDLTPLKAASSYAHRASASAAKRASPLRGGRRARRGVTTGSRSGPRDGAAAQRAKEHAEAVRTKVLQAIAAHGKWAFGTDPLALWGVKLCTNVACPATYVGRDTNAARNVSKIAIRSMQGRSIYPHIRGYTVSRAPHQENPVQATRHAAAIEAGTYEAGYRWTRCSPTSWERWRRSVVTNPAVAEAGMTSAVAEAGTAPTAVPVAAPRVRVEALGVVADGAHDAAAASASGDLATSNVGQMAAASPAPAVGHSHSSSSRLQRVIVDCSPGSSRGV

SEQ ID NO: 325 - protein, 772 aa, Porphyra umbilicalis
TRWPCDSGHCTLTRCCAMPRPCASAPTSRRPTRHRPSRHVHRVRARQRRAAPQALAVHGGSIPPQTAEGLVVQALLRRAGIIRASTLVGPTVVSDGVGVHFTIRHPATAASTAAARQARRRAASDGRGEGGPTETASVRTQLDRMAFAPDAVKALVFVGWDPGVASVVAAYCPGAVPFALSTAPHLHACRAYRALRVAANALARAAMAATAAAACHVRPSGRLLPTVDTLRATVAQIVRAAKATAAGLPVGGGDAVCGTTKKRGRGALGASTGAEGSPPKQSRGALVGPTAATPAAQASLPPFEHAPTEPAAALDRPPPPDPPKRPRYTQPAYGDSSLTPVPRKEVARKRETSGPDGRRPLLTRLRALAHAAVNDGGVQPWRLPNHVCVRMGEAALFKASTDAAADVGAKVEAAANAEAAWYALSVGDQRHAARVWHSAARTAKRAAAAARNSQRVAAAAAAAAPTEPPHHGLPGTPLPSSDRLRVLCAALRRAATTTRPRARAPPAGATLVVSKGAYREAMGAGMTRRAEAAAAAAWAATNPDVSRESLTAGCSLKVALWGAWLVAASARIARTYTDAYQAAYGVAAKSGRRKARLHALIQRNRNAAKLAHRMTGEFLRRTVDGTKAVQAIGRCRPRAGSVVLVRRMAKHVHVVYVDEHNTSQTCAACGHGLCNTYVSPDSPVDLTPLKAASSYAHRASASAAKRASPLRGGRRARRGVTTGSRSGPRDGGAAQRAKEHADAVRTKVLQAIAAHGKWALGTDPLAMWGVKL

SEQ ID NO: 326 - protein, 568 aa, Porphyra umbilicalis
MGEAALFKASTDAAADAGAKAEAAANAEAAWYALSVGDHRHASRVCHSAARTAKQAAAAARNAKRAAAAAAAAAPTEPPQHGAPGTPLPSADRLRVLCATLRRAATTTRPRARAPPAGATLVVSKGAYREATGAGMTRRAEAAAAAAWAATIPDVSHESMTAGCSFKVASWGAWLVAATARIGRAYTDAYQAAYGAAATYGQRKARLRAVIQRNRYAAVMARRWTGGLLRRTVDGTKAVLAIGRCLPRAGSVDLVRRMAKHVHLVYVDEHITSQTCAECGHGLCNTYVSADSPVDLKPLKAASTYAHRASASAAKRASPLRGGRRARRGVATGSRSGPRDGAAVQRAKEHAEAVRTKVLQAIAAHGRWAFGTDPLALWGVKLCTNVACPATYVGRDTNAARNMSKIAIKSMQGQSIYPHIRGYTVSRAPPQEDLVQATWHAAAIEAGTYEAGYGWTRCSPTSWERWRRPVVTDPAVVEAGTTPAVAEAETAPTAVPVAAPTVRVEALGVVADGAHDAAAASTSGDLATSNVGQMAAASPAPAVGHSHSSSSRLERVIVDCSPGSSRGV

SEQ ID NO: 327 - protein, 692 aa, Porphyra umbilicalis
RGEPDDQKARPWSARCVDRGGGISPKADSYRPGWPAGGHARGTSVFAAFGARTDGADRRGGPPPPKRRRYKQPAFGDEWLTPMQRQEVARKRGTSAPGRRRAILTRMRATAHATINGGNVQPWHLSNHVCVWVGEAALFKEAAHATAAVKAKTEAAAHAEAAWRAVSVDIGAHAACLVQRAAQDKRQTAAALRTAERVAAAAAAAAPAAPPQLGAPGTSLPSADRLRVLCAALKRAAAAGRRRRVCVPPTGATLVVSKGAYREATGAGMTRRAEASAVAVWAAAHPGVPRESLAAGCSLKVTTWGAWVVAATVRIARTYTDAYQAAYGAAATYGQRKARLHALIQRNRYAAVLARRLTGGLLRRTVDGTKAVLAIGRCRPRAGSVDLVRRMAKHVHLVYVDEHNTSLTCAECGHGLCNTYVSPDSPVDLTPLKAASSYAHRASASAAKRASPLRGGRRARRGVTTGSRSGPRDGAAAQRAKEHAEAVRTKVLQAIAAHGKWAFGTDPLALWGVKLCTNVACPASYVGRDTNAARNMCKIAIKSMQGRSIYPHIRGYTVSRAPPQEDPVQAVRHAAAIDAGTYEAGYGWTRCSPASWEPWRRPVVADAPAAEAGTAPTAVPVAAPTVRVEALGVVADGAHDAAAASASGDLATSNVGQMAAASPAPAIGHSHSSPSRLERVIVDCSPGSSRGV

SEQ ID NO: 328 - protein, 640 aa, Porphyra umbilicalis
RGVRDDQKARPWRARRVDRGGGISPKAESYSSGGGPAGGHTGGTGVCAAFGGRTDAAGCCAAPPPPPDPAKRPRYTQPQYGDEWLTPAQRKEIARKRGTSGPDGRRPLLTRLRALAHAAVNDGGVQPWRLPNHVCMWMGEAALFKASTDAAANAGAKAEAAANAETAWHALSVGDHRHAARVWHSAARTSKQAAAAARNAKRAAAAAAAGAPTESPQPGVPGTPLPSADRLRVLCAALRRAATTTRPRARAPPAGATLVVSKGAYREATGACMTRRAEAAAAAAWAATNPDVSRESLTAGCSLKVALWGAWLVAATTRIARTYTDAYQAAYGAAATYDQRKARLHALIQRTRYAAVLARRLTGGLLRRTVDGTKAVLAIGRCRPRAGSVDLVRHMAKHVHLVYVDEHNTSQTCAECGHGLCNTYVSPDSPVDLTPLKAASSYAHRASVSAAKRASPLRGGRRARRGVTTGSRSGPRDGAAAQRAKEHAEAVRTKVLQAIAAHGKWAFGTDPLALWGVKLCTNVACPATYVGRDTNAARNMSKIAIKSMQGRSIYPHIRGYTVSRAPPQEDPVQATRHAAAIEAGTYEAGYGWMRCSPTSWERWRRPVVADAPVAEAGTTPGSRRPGRPPRPCQWRRQRCG

SEQ ID NO: 329 - protein, 704 aa, Porphyra umbilicalis
RGVRDDQKARPWRARRVDRGGGVSPKSESWSFGGPDGGHTGGAGVIAAFGARTDGAGRCAGPPPPPDPPKRPRYTQPAYGDAWLTPVQRQEVARMRGTSGPDGRRPLLTRLRALAHAAVNDGGVQPWRLPNHVCVRMGEAALFKASTDAAANAGAKAEAAANAEAAWHVLSVGDQRHAARVWHSAARTAKRAAAAARNATRAAAAAAAAAPTELPQHGVPGTPLPSADRLRVLCATLRRAATTTRPRARAPPAGATRVISKGAYREATCAGMTRRAEAAAAAAWAATSPDVSRESLTAGCSLKVASWGAWLVAATARIARTYTDAYQAAYGAAATSGRRKARLHALIQRNRYAAKLAHRMTGGLLRRTVDGTKAVLAIGRCRPRAGSVDLVRRMAKHVHFVYVDEQNTSQTCAECGHGLCNTYVSPDSPVDLTPLKAASSYAHRASASAAKRASPLRGGRRARRGVTTGSRSDPPDGAAAQRAKEHAEAVRTKMLQAIAAHGKWAFGTDPLALWGVKLCTNVACPATYVGRDTNAARNMSKIAIKSMQGRSIYPHIRGYTVSRAPPQEDPVQATRHAAAIEVGTYEAGYGWTRCSPTSWQRWRRPVVADAPVAEAGTTPAVAEAGTAPTAVPVAAPTVRVEALGVVADRAHDAAAASASGDLATSNVGQMAAASPAPAVGHSHSSSSRLERVIVDCSPGSSRGV

SEQ ID NO: 330 - protein, 319 aa, Porphyra umbilicalis
TATIPDVSRESLTAGCSLKVSSWGAWLIAATARIARTYTDAFQAAYGAAATYRQRKARLHALIQRNRYAAVLARRLTGCLLRRTVDGTKAVLAIGRFRPRAGSVDLVPRMAKHVHLVYVDEHNTSQTCAECGHGFCNTYVSPDSPVDLTPLKAKSSYAYRASASAANRASPLRGGRRARRGVTTGSRSGPRDGAAAHCAKEHAEAVRTKVLQAIAAHGKWAFGAAPLALWGVKLCTNVACPASYVGQDTNAARNMSEIAIKSMQCRSIYPHMWGYTVSRAPPQEDPVQAMRHAAAIEAGTYEAGYGWTRCSPTSWERWR

SEQ ID NO: 331 - protein, 373 aa, Porphyra umbilicalis
SAWVVAATARIARTYTDAYQFAYVAAVSYGRRKARLHALIQRNLYAAMLTHHIKGGLLRRTVDGTKAVVAICRCRLRAGSVDLMRRMAKHVHVVYVDEHNTSQTCAKCGHGLCNTYVSPDSPLDLTPLKAATSYSHRASASAAKRASPLHDGRRARRGVTTGSRSGPHDGAAAQRAKEHEEAERTNVLQAIAAHGKWAFGTDPLALWGVKLRIKVACPATYVGRDTNAARNMSKIAIRSMQGRSVYLHIRGYTVSRAPPQDDPVQAVRHAAAIEAGIYEAGYGWTRYLATSWEAWRRPIVTDAPVAEAGTAPTAVSVAAPTVRVEALGVVADGVHDAAAASASGDLATINVGQMAAVSPAPAVGHSHSSSSRL

SEQ ID NO: 332 - protein, 358 aa, Porphyra umbilicalis
RPGAPSKSLRGARGWWRPLRASPAPTQTPIRRRTGRPRRRAGERRAYTPSSSATGTRQVGPPLDGWAPAAHGGRHQGGAGHWAVRPRAGSVDLVRRMAKHVHLVYVDEHNTSQTCAECGHGLCNTYVSPDSPVDLTPLKAASSYAHRASASAAKRASPLRGGRRARRGVTTGSRSGPRDGAAAQRAKEHAEAVRTKVLQAIAAHGKWAFGTDPLALWGVKLCTNVACPATYVGRDTNAARNMSKIAIKSMQGRSIYPHIRGYTVSRAPPQEDPVQATRHAAAIEAGTYEAGYGWTRCSPTSWERWRRPVVHPVADRPGGRGGRDGPHGRASGGANGAGRGAGCGGRRGARRSCCVGKR

SEQ ID NO: 333 - protein, 696 aa, Porphyra umbilicalis
RGVRDDQKARPWRARRVDRGGGISPKAESYSSGGGPAGGHICGTGVCAALGGRTDAAGCCAAPPPPPDPPKRPRYTQPAYGDEWLTHAQRKEVARQRGTSGPDGRRPLLTRLRALAHAAVNDGGVQPWRLPNHVCVWMGEAALFKASTDAAANAGAKAEAAANAETAWHALSVGGHRHAARVWHIAARTAKRAAAATRKAKRAAAAAAAGAPTEPPQPGVPGTPLPSTDRLRVLCAALRRAATTTRPRARAPPAGATLVVSKGAYREATGAGMTRRAEAAAVAAWAATNPDVSRGSLTAGCSLKVASWGAWLVVATARIARTYTDAYQAAYGAAATSGRRKARLHALIQRNRYAAKLARRMTGGLLRRTVDGTKAVLAIGRCRPRAGSVDLVRRMAKHVHLVYVDEHNTSQTCAECGHGLCNTYVSPDSPVDLTPLKAASSCAHRASASAAKRASPLRGGRRARRGVTTGSRSGPRDGAAAQRAKEHAEAVRTKVLQAIAAHGKWAFGTDPLALWGVKLCTNVACPATYVGRDTNAARNMSKIAIKSMRGRSIYPHIRGYTVSRAPPQEDPVQATRHAAAIDAGTYEAGYGWTRCSPTSWERWRRPVVADAPVAEAGTAPTAVPVAAPAVRVEALGVVADGAHDAAAASASGDLATSNVGQMAAASPAPAVGRSHSSSSRLERVIVDCSPGSSRGV

SEQ ID NO: 334 - protein, 331 aa, Porphyra umbilicalis
FVGLVVGTLCWGELGGGDLCGEVHAPFWEVRRGPRALRTEARGCAPRSGCTTTCPGAAWGTLGGWTRPRTSAIVKQRTHLTTPTSHAHPAQPVRGKLAHHMTGGLLRGTVDGTKAVLAICRCRPRAGSVDFVRRMAKDVHLVYVDEHNTSQTCAECSHGLCNTYLSPESPVDLTPLQADSTYAQRASASTAKRASPLGDGRRARRGVTTGNRSVPRDGAAAQRAKEHAEAVQTNVLRAIAAHGMWAFGTDSLALWGVKLCTNVAFPATYVGRDTNAASNMSKIAIKSMQGRSIYPHIRGFTVSRAPPQPDPVQAVRHAAVIEADTYEAGYG

SEQ ID NO: 335 - protein, 692 aa, Porphyra umbilicalis
RGEADDQKARPWRARRVDRGGGISPKADSYRSGGPAGGHARGTSVFAAFGARTDGADRRGGPPPPKRRRYKQPAFGDEWLTPIQRQEVARKRGTSAPGRRRAILTRMRATAHATINGGNVQPWHLSNHVCVWVGEAALFKEAAHATAAVKAKTEAAAHAEAAWRAVSVDSGAHAACLVQRAAQDKRQTAAALRTAERVAAAAAAAAPAAPPQLGAPGTSLPSADRLRVLCAALKRAAAAAGRRRVRVPPTGATLVVSKGAYREATGAGMTRRAEAAAVAAWAAAHPGVPRESLTAGCSLKVTTWGAWVVAATARIARTYTDAYQAAYGAAATERRRKARLHALIQRNRYAAVLARRLTGGLLRRTVDGTKAVLAIGRCRPRAGSVDLVRRMAKHVHLVYVDEHNTSLTCAECGHGLCNTYVSPDSPVDLTPLKAASSYAHRASASAAKRASPLRGGRRARRGVTTGSRSGPRDGAAAQRAKEHAEAVRTKVLQAIAAHGKRAFGTDPLALWGVKLCTNVACPASYVGRDTNAARNMSKIAIKSMRGRSIFPHIRGYTVSRAPPQEDPVQAVRHAAAIDAGTYEAGYGWTRCSPTSWEPWRRPVVADAPVAEAGTAPTAVPVAAPTVRVEALGVVAYGANDAAAASASGDLATSNVGQMAAASPAPAVGHSHSSPSRLERVIVDCSPGSSRGV

SEQ ID NO: 336 - protein, 700 aa, Porphyra umbilicalis
SSGASGQEARAGCRRSAVWGRQASFKAGPLCPRRVDNRVATALPVGKCAPATNGADRRGGSPPPKRRWYKQPAFGDEWLTPIQRQEVARKRGTSAPGRRRAILTRMRATAHATINGGNVQPWHLSNHVCVWMGKAALFKKTAHTTAAVKAKTDAAAHAEAAWRSVSVDSGAHAACVVQRAAQDKRQTAAALRTVERVAAAAAAAAPAAPPQLGAPGTSLPSADRLRVLCAALKRAAAAGGRRRVRVPPTGATLVVSKGAYREATGAGMTRRAEAAAVAAWAAAHPGVPRESLTAGCSLKVTTWGAWVVAATARIARTYTDAYQAAYRAAATYGKRKARLHALIQRNRYAAVLARRLTGGLLRRTVDGTKAVLAIGRCRPRAGSVDLVRRMAKHVHLLYVDEHNTSQTFAECGHGLCNTYVSPDSPVDLTPLKAASSYAHRASASAAKRASPLRGGRRARRGVTTGSRSGPRDGAAAQRAKEHAEAVRTKVLQAIAAHGKWAFGTDPLALWGVKLCTNVACPATYVGRDTNAARNMSKIAIRSMQGRSVYPHIRGYTVSRTPPQDDPVQAVRHTAAIEAGTYEAGYGWTRCSPTSCERWRRPVVTDPAVVEAGTTPAVAEAGTAPTAVPVAAPTVRVEALGVVADGAHDAAAASASGDLATSNVGQMAAASPAPAFGHSHSSSSRLERKFVDCSPGSSRGV

SEQ ID NO: 337 - protein, 696 aa, Porphyra umbilicalis
RGVRDDRKARPWRARRVDRGGGISPKAESYSSGGGPAGGHTGGTGVCAAFGGRTDAAGCCAAPPPPPDPPKRPRYTQPAYGDEWLTPAQRKEVARKRGTSGPDGRRPLLTRLRALAHAAVNDGGVQPWRLPNHVCVWMGEAALFKASTDAAANAGAKADAAANAETAWHALSVGGHRHAARVWHSAARTAKRAAAATRNAKRAAAAAAAGAPTEPPQPGVPGTPLPSTDRLRVLCAALRRAATTTRPRARAPPAGATLVVSKGAYREATGAGMTRRAEAAAVAAWAATNPDVSRGSLTAGCSLKVASWGAWLVAATARIARTYTDAYQAAYGAAATSGRRKARLHALIQRNRYAAKLARRMTGGLLRRTVDGTKAVLAIGRCRPRAGSVDLVRRMAKHVHLVYVDEHNTSQTCAECGHGLCNTYVSPDSPVDLTPLKAASSCAHRASASAAKRASPLRGGRRARRGVTTGSRSGPRDGAAAQRAKEHAEAVRTKVLQAIAAHGKWAFGTDPLALWGVKLCTNVACPATYVGRDTNAARNMSKIAIKSMRGRSIYPHIRGYTVSRAPPQEDPVQATRHAAAIDAGTYEAGYGWTRCSPTSWERWRRPVVADAPVAEAGTAPTAVPVAAPTVRVEALGVVADGAHDAAAASASGDLATSNVGQMAAASPAPAVGRSHSSSSRLERVIVDCSPRSSRGV

SEQ ID NO: 338 - protein, 567 aa, Porphyra umbilicalis
LCRQIPDRPFQFVGCVFDRAPHCVALKSLESNQISAMAEPPTTVGDQRHAARVWHSAARTAKRAAAASCHAKRAAAAAAAAAPTEPPRPGAPVTSLPSAARLRVLCAALRRAAATRGPRARAPPTRATLVVFQGAYREATGASMTQRAEAAAAATWAATNPYVSREALTARCSPKVASWGAWLVAATARIARTYTDAYQSAYGAVAMEGQQKMRLHALIQRNRYAAMLAHIMTGGLLRRTVNGTKAVVDIGRCRPRAGSVNLVRRMAKHVHVVYVDEHNTSQTCAECGHGLCNTYVSPDSSFDLTPLKAESTYAQRASASAAKRASPLCGGRRARRGVTAGSRSVPRDGAAAERAKEHVEALRTKVLQAIAAHGKWAFGTDQLALWGVKLCTNFVCPATYVERDTNAARNMSKIAIKSIQGRSVYFHIRGYTVPRAPPQDDPLQAAQHADVIEAGTYEACYGCMRCSPTSCERWPRPVVTDLPVAEAGTARTAVAVAAPTERVEALGVVSDGAHDAAAALASGDLATMNVGQMAASSPAPVVGHSHSSSSRLERVILDCSPGSSRGV

SEQ ID NO: 339 - protein, 701 aa, Porphyra umbilicalis
RGEADDQKARPWSARCVDRGGGISPKADSYRSGGPAGGHARGTSAFAAFGARTDGADRRGGPPPPKRRRYKQPAFGDEWLTPIQRQEVACKRGTSAPGRRRAILTRMRATAHATINGGNAQPWHLSNHVCVWVGEAALFKEAAHATAAVTAKTEAAAHAEAAWRAVSVDSGAHAACVVQRAAQDKRQTAAASRTAERVAAAAAAAAPAAPPQLGAPGTSLPSADRLRVLCAALKRAAAAGGRRRVRVPPTGATLVVSKGAYREATGAGMTRRAEAAAVAAWAAAHPGVPRESLTAGCSLKVTTWGAWVVAATARIARTYTDAYQAAYGAAATEGRRKARLHALIQRNRSAAVLARRLTGGLLRRTVDGSKAVLAIGRCRPRAGSVDLVRRMAKHVHLVYVDEHNTSLTCAECGHGLCNTYVSPESPVDLTPLKAASSYAHRASVSAAKRASPLRGGRRARRGVTTGSRSGPRDGAAAQRAKEHAEAVRTKVLQAIAAYGKWAFGTDPLALWGVKLCTNVACPATYVGRDTNAARNMSKIAIKSMQGGSIYPHIRGYTVSRAPPQEDPVQAVRHAAAIDAGTYEAGYGWTRCSPTSWERWRRPVVTDPAVAEAGMTPAVAEAGTAPTAVPVAAPTVRVEALGVVADGAHDAAAASASGDLATSNVGQMAATSPATAVGRSHSSSSRLERVIVDCSPGSSRGV

SEQ ID NO: 340 - protein, 641 aa, Porphyra umbilicalis
TAPPPPPPDPPKRPRYTQPQYGDEWLTPAQRKEVARKRGTSGPDGRRPLLTRMRALAHAAVNDGGVQPWRLPNHVCVWMGEPALFKALTDAAANAGAKAEAAANAETAWHALSVGGHRHAARVWHSAARTAKQTAAALRRAERLAAAAAAAAPTEPPQPGAPGTPLPSADRLRVLCAALRPAATTTRPRARAPPAGTTLVVSKGAYREATGAGMTRRAEAAAVAAWAATIPDVSRESLTAGCSLKVASWGAWLVAATARIARTYTDAYQAAYGAAATSGRRKARLHALIQRNRYAAKLAHRMTGGLLRRTVDGTKAVLAIGRCRPRAGSVDLVRRMAKHVHLVYVDEHNTSQTCAECGHGLCNTYVSPDSPVDLTPLKAASSYAHRASVSAAKRASPLRGGRRARRGVTTGSRSGPRDVAAAQRAKEHAEAVRTKVLQAIAAHGKWAFGTNPLALWAVKLCTNVAFPATYVGRDTNAARNMSKIAIKSMQGRSIYPHIRGYTVSRAPPQEDPVQATRHAAAIEAGTYEAGYGWTRCSPTSWERWRRPVVADAPVAEAGTTPAVAEAGTAPTAVPVAASTVRVEALGVVADGAHDAAAASASGNLATSNVGQMAAASPAPAVGHSHSSSSRLERVIVDCSPG

SEQ ID NO: 341 - protein, 533 aa, Porphyra umbilicalis
VADARAAERGRPQAGDERPRRPAAAADAPARARTRRRQRRRRPTVGLPNHVCVWMGEAALFKASTDAAANAGAKAEAAANAETAWHALSVGGHRHAARVWHSAVRTAKQTAAAARNAKRAAAAAAAAAPTEPPQPGAPGTPLPSTDRLRVLCRPPARGHDHETARARSAGGGDSGRLQRRVPRGDGRRYDEACRGGSGGGVGGGTPRRAARVTDGRVLPQSRFVGRVAGGGHCAHRPHLHRRLSGGVRGGRDVGPAKGAPTRPHPAQPVRGKVGPPHDGWAPAAHGGRHQGGAGDWAVQARAGSVDLVRRMAKHVHLVYVDEHNTSQTCAECGHGLCNTYVSPDSPVDLTPLKAASSYAHRASASAAKRASPLRGGRRARRGVTTGSRSGPRDGAAAQRAKEHAEAVRTKVLQAIAAHGKWAFGTDPLALWGVKLCTNVACPATYVGRDTNAARNMSKIAIKSMQGRASTPTSGGTPCHARHPRKTLYRRCGTRLRSTRVPTRPATGGRGVHPRRGSVGADLSSPTRRSRRPG

SEQ ID NO: 342 - protein, 702 aa, Porphyra umbilicalis
RGVRDDPKARPWRARRVDRGGGISPKAESYSSGGGPAGGTGVCAASGGRTDAAGCCAAPPPPPDPPKRPRYTQPQYGDEWLTPAQRKEVARKRGTSGPDGRRPLLTRLRALAHAAVNDGGVQPWRLPTHVCVWMGEAALFKASTDAAADAGAKAEAAAIAEAAWYALWVGDQRHAARVCHSAARTAKRAAAAARNAKRAAAAAAAAAPAAPPQLGAPGTSLPSADRLRVLCAALKRAAAAGGRRRVCVPPTGATLVVSKGTYREATGAGMTRRAEAAAVAVWAAAHPGVSRESLTAGCSLKVTTWGAWVVAATARIARTYTDAYQAAYGAAATYGQRKARLHALIQRNRYAAVLARRLTGGLLRRTVDGTKAVLAIGRCRPRAGSVHLVRRMAKHVHLVYVDEHNTSQTCAECGHGLCNTYVSPDSPVDLTPLNAASSYAHRASASAAKRASPLRGGRRARRGVTTGSRSGPRDGAAAQRAKEHAEAVRTNVLQAIAAHGKWAFGTDPLALWGVKLCTNIACPATYVGRDTNAARNMSKVAIKSMQGRSIYPHIRGYTVSRAPPQEDPVQAVRHAAAIDAGTYEAGYAWTRCSPTSWERWRRPVVTDPAVAEAGMTPAVAEAGTAPTAVPVAAPTVRVEALGVVADGAHDAAAASASGDLATSNVGQMAAASPAPAMGHSHSSPSRLERVIVDCSPGSSRGV

SEQ ID NO: 343 - protein, 504 aa, Porphyra umbilicalis
RAAAAAAAGAPTEPPQPGVPGTPLPSTDRLRVLCAALRRAATTTRPRARAPPAGATLVVSKGAYREATGAGMTRRAEAAAVAAWAATNPDVSRGSLTAGCSLKVASWGAWLVAATARIARTYTDAYQAAYGAAATSGRRKARLHALIQRNRYAAKLARRMTGGLLRRTVDGTKAVLAIGRCRPRAGSVDLVRRMAKHVHLVYVDEHNTSQTCAECGHGLCNTYVSPDSPVDLTPLKAASSCAHRASASAAKRASPLRGGRRARRGVTTGSRSGPRDGAAAQRAKEHAEAVRTKVLQAIAAHSKWAFGTDPLALWGVKLCTNVACPATYVGRDTNAARNMSKIAIKSMQGRRIYPHIRGYTVSRAPPQEDPVQATRHAAAIDAGTYEAGYGWTRCSPTSWERWRRPVVTDPAVAEAGTTPAVAEAGTAPTAVPVAAPTVRLEALGVVADGAHDAAAASASGDLATSNVGQMAAASPAPAVGRSHSSSSRLERVIVDCSPGSSRGV

SEQ ID NO: 344 - protein, 959 aa, Porphyra umbilicalis
TRWPCDSGRCTSTRCCSTPRPCASAPTLRRPTRHPAEPPRAPRTRVSAARCSASVWRPTGGPSHQRRPTVWSCRRCSAARASSAPRRSLAPPSCRTASACTLRYDAPPLPRRRRPHGGRAAGRPVTAAGGGVRPRRRACGRSSTAWRLRPTLSRRSSLSGGTRASRPSSLPTAPAQCLLRSQRHRNCTRTGRTGRCGLRPTRSRGWPWPRPQLQSATCGAAVGYCRPSTRCVQRWPRLFVRPRPPRRTYPSAAVTRCAGRPKSAAVARSARRPGRRVSPKAESYSSGGGLAGGHAGGTGVCAAFGGRTDAAGCCAALPPPPDPPKRPRYTQPAYGDEWLTPVQRQEVARKRGTSGPDGRRPLLTRLRALAQAAVNDGGVQPWRLPNHVCVWMGEAALFKASTDAAANAGAKAEAAANAETAWHALSIGGHRHAARVWHSAARTAKQAAAALRRAERVAAAAAAAAPTEPPQPGAPGTPLPSADRLRVLCAALRRAATTTRPRARAPPAGATLVVSKGAYREATGAGMTRRAEAAAVAAWAATNPDVSRESLTAGCSLKVASWGAWLVAATARIARTYTDAYQAAYGAAATSSRRKARLHALIQRNRYAAVLARRLTGGLLRRTVDGTKAVLAIGRCRPRAGSVDLVRRMAKHVHLVYVDEHNTSQTCAECGHGLCNAYVSPDSPVDLTPLKAASCYAHRASASAAKRASPLRGGRRARRGVTFGSRSGPRDGAAAQRAKEHAEAVRTKVLQAIAAHGKWALGTDALALWGVKLCTNIACPATYVGRDTNAARNMSEIALKSMQGPSIYPHIRGYAVSRAPPQEDPVQAVRHAAAIDAGTYEAGYGWTRCSPTSWERWRRPVVTDPAVAEAGMTPAVAEAGTAPTAVPVAAPTVRLEALGVVADGAHDAAAASASGDLATSNVGQMAAARPAPAAGRSHSSSSRLERVIVDCSPGSSRGV

SEQ ID NO: 345 - protein, 704 aa, Porphyra umbilicalis
RGVRDDQKARPWRARRVDRGGGISPKAESWSFAGPDGGHTGGAGVFAAFGARTDGAGRCAGSPPPPDPPKRLRYTQPAYGDAWLTPVQRQEVARKRGTSGPDCWRPLLTRLRALARAAVNDGSVQPWRLPNHVCVWMGEAALFKASTDAAADAGAKAEAAANAEAAWYALSVGDERHAARVWHSAARTAKQAAAAARNTKRAAAAAAAAAPTEPPQHCVPGTRLPSADRLRVLCAALRRAATITRPRVRTPPAGATLVVSKGAYRKATGAGMTRRAEAAAAAAWAATNPDVSRESLTAGCSLKVASWGAWLVAATVRIARTYTDAYQAAYGAAATYGQRKAWLHALIQRNRYAAVRARRLTGGLLRRTVDGTKAVLAIGRCRPRAGSVDLVRRMAKHVHLVYVDEHNTSQTCAECGHGLCNTYVSPDSPVELTPLKAASTYAHRASASAAKRASPLRSGRRVRRGVTTGSRSGPRDGAAAQRAKEHAEAVRTKVLQAIAAYGKWAFGTDPLALWGVKLCTNVACPATYVGRDTNAARNMSKIAINSMQGRSIYPDIRGYTVSRAPPEEDPVQATRHAAAIEASTYEAGYGWTRCSPTSWERWRRPVVTDPAVVEAGTTPAVAETGTAPTAVRVGAPTVPVEALGVVADGAHDAAAASASGDLATSNVGQMAAASPAPAVGHSHSSSSRLERVIVDCSPGSSRGV

SEQ ID NO: 346 - protein, 885 aa, Porphyra umbilicalis
TRWPCDSGRYTFTRCCTMPRPCASAPASRRPTRHLAESLRAPGTRASAARCSASAWRSTGVQSHQRRPTVWSCRRCSAARASSAPRRSLAPPSCRTASACTLRYDTPPLQRRQRPLGGRAAGRPVTVAGGGSDRDGERADAARPHGVCARRCQGAGVCRVGPGRRVHRRCLLPRAVPFALSPAPHLHAYRAYRALRVAADALARAAMAATAAAECHVRRSGRFLPTVDTLRATVARIVRSAKATAANLPVGGGDAVCGTTKKRGRGALGASTGAEGSPPKQSRTALVGGPPAATPAAQASVPPLEDAPTQPAAGCPPPPPPDPPKRPRYTQPQYGDEWLTPAQRKEVARKRGTSGPDGRRPLLTRLRALAHAAVNDGGVQPWRLPNHVCVWMGEAALFKASTDAAADAGAKAEAAANAEAAWYALSVRDQRHAARLCHSAARTAKRAAAAARNAKRAAAAAAAAAPAAPPQLGAPGTSLPSADRLRVLCAALKRAAPPGRRRVCVPPTGATLVVSKGAYREATGAGMTRRAEAAAVAVWAAAHPGVPRESLTAGCSLKVPTWGAWVVAATARIARTYTDAYQAAYGAAATYGQRKARLHALIQRNRYAAVLARRLTGGLLRRTVDGTKAVLAIGRCRPRAGSVDLVRRMAKHVHLVYVDEHNTSQTCAECGHGLCNTYVSPDSPVDLTPLKAASSYAHRASASAAKRASPLRGGRRARRGVTTGSRSGPRDGAAAQRAKEHAEAVRTMVLQAIAAHGKWAFGTDPLALWGVKLCTNVACPASYVGRDTNAARNMSKIAIKSMRVGASSPTSGGTPCHARHPRKTMYRRCGTRLRSTRVPTRPATGGRGVHPRRGSPGADLSSPTRRSQRRGRPPRPCQWRRQRCG

SEQ ID NO: 347 - protein, 812 aa, Porphyra umbilicalis
RSRGGGSDRDGERADAARPHGVCARRCQGACLCRVGPGRRVHRRCLLPRRSAVCALTGTAPARVPGVSGAAGCGRRARAGGHGRDRSCRVPRAAQRSVPADRRHAACNGGPDCSCGQGHRGGPTHRRRCRGVRDDQKARPWRARRVDRGGGISPKAESYSSGGGPAGGHAGGTGVCAAFGGRTDAAGCCAAPPPPPDPPKRPRYTQPQYGDEWLTPAQRKEVARKRGTSGPDGRRPLLTRLRALAHAAVNDGGVQPWRLPNHVCVWMGEAALFKASTDAAADAGAKAEAAANAETAWHALSVGGHRHAARVWHSAARTAKQTAAALRRAERVAAAAAAAAPTEPPQPGAPGTPLPSADRLRVLCAALRRAATTTRPRARAPPAGATLVVSKGAYREATGAGMTRSAEAAAAAAWAATNPDVSRESLTAGCSLKVASWGAWLVAATARIARTYTDAYQAAYGAAATSGRRKARLHALIQRNRYAAKLARRMTGGLLRSTVDCTKAVLAIGRCRPRAGSVDLVRRMAKHVHLVYVDEHNTSQTCAECGHGLCNTYVSPDSPVDLTPLKAASSFTHRASASAAKRASPLRGGRRARRGVTTGSRSGPRDGAAAQRAKEHAEAVRTKVLQAIAAHGKWAFGTDPLALWGVKLCTNIACPATYVGRDTNAARNMSKIAIKSMQGQSIYPHIRGYTVSRAPPQEDPEQAVRHAAAIEAGTYEAGYGWTRCSPTSWERWRRPVVTDPAVAEAGTAPTAVPVAAPTVRVEALGVVADGAHDAAAASASGDLATSNVGQMAAASPAPAAGHSHSSSSRLAG

SEQ ID NO: 348 - protein, 701 aa, Porphyra umbilicalis
RGEADDQKARPWSARCVDRGGGISPKADSYTSGGPAGGHARGTSVFAAFGARTDGADRRGGPPPPKRRRYKQPAFGDEWLTPIQRQEVARKRGTSAPGRRRAILTRMRATAHAKINGGNVRPWHLSNHVCVWVGEAALFKEAAHATAAVKAKTEAAAHAEAAWRAVSVDSGAHAACVVQRAAQDKRQTAAAWRTAERVAAAAAAAAHAAPAQLGAPGTSLPSADRLRVLCAALKRAAAAGGRRRVRVPPTGATLVVSKGAYREATGAGMTRRAEAAAVAVWAAAHPGVPRESLTAGCSLKVTTWGAWVVAATVRIARTYTDTYQAAYGAAATYGQRKARLHALIQRNRYAAVLARRLTGGLLRRTVDGTKAVLAIGRCRPRAGSVDLVRRMAKHVHLVYVDEHNTSLTCAECGHGLCNTYVSPDSPVDLTPLKAASSYAHRASASAAKRASPLRGSRRARRGVTTGSRSGPRDGAAAQRAKEHAEAVRTKVLQAIAAHGKWAFGTDPLALWGVKLCTNVACPATYVGRDTDAARNMSKIAIKSMQGRIIYPHIRGYTVSRAPPQEDPVQATRHAAAIEAGTYEAGYGWTRCSPTSWESWRRPVVADAPVAEAGTTPAVAEAGTAPTAVPVAAPTVRVKALGVVADRAHDAAAASASGDLATSNVGQMAAASPAPAVGRSQSSSSRLERVVVDCSPGSTRGV

SEQ ID NO: 349 - protein, 766 aa, Porphyra umbilicalis
RSRGGGPTETASVRTQLDRMAFAPDAVKALSLSGGTRASRPSSLPTAPAQCRLRSHRHRTCTRTGRIGRCGLRPTRSRGRPWPRPQLQSATCGAAVGYCRPSTRCVQRWPRLFVRPRPPRRAYPSAAVTRCAGRPKSAAVARSARRPGRRDLPQSRVVQLWWGARRRPRRRHRRLCRLWRTHRRSRLLRCPPPPPRPAQAAAVHAATYGDEWLTPAQRKEVARKRGTSGPDGRRPLLTRLRALAHAAVNDGGVQPWRLPNHVCVWMGEAALFKASTDAAADAGAKAEAAANAEAAWHALSVGGHRHAARVWHSAARTAKQAAAAARNAKRAAAAAAAGAPTEPPQPGVPGTPLPSADRLRVLCAALRRAATTTRPRARARRRGDAGRLQGRVPRGDGRRYDQARRGGSGGGVGGDQPRRVARVTDGRVLPQSRFVGRVGGGGHCAHRPHLHRRLSGGVRGGRDVRSTQGAATRPHPAQPVRGSWPPLDGWAPAAHGGRHQGGAGIGRCRPRAGSVDLVRRMAKHVHLVYVDEHNTSQTCAECGHGLCNTYVSPDSPVDLTPLKAASSYAHRASASAAKRASPLRGGRRARRGVTTGSRSGPRDGAAAQRAKEHAEAVRTKVLQAIAAHGKWAFGTDPLALWGVKLCTNVACPATYVGRDTNAARNMSKIAIKSMQGRSIYPHIRGYTVSRAPPQEDPVQATRHAAAIEAGSYEAGYGWTRCSPTSWERWRRPVVTDRRSWRPGRPRRSRRPGRPPRPCQWRRQRCG

SEQ ID NO: 350 - protein, 692 aa, Porphyra umbilicalis
RGEADDQKARPWRARRVDRGGGISPKADSYRSGGPAGGHARGTSVFAAFGARTDGDDRRGGPPPPKRRRYKQPAFGDEWLTPVQRQEVARKRGTSAPGRRRAILTRMRATAHATINGGNVQPWHLSNHVCVWVGEAALFKEAAHATAAVKAKTEAAAHAEAAWRAVSVDSGAHAACVVQRAAQDKRQTAAALRTAERVAAAAAAAAPAAPPQLGAPGTSLPSADRLRVLCAALKHAAAAGGRRRVRVPPTGATLVVSKGAYREATGAGMTRRAEAAAVAVWAAAHPGVSRESLTAGCSLKVTTWGAWVVAATVRIARTYTAAYQAAYGAAATEGRRKARLHALIQRNRYAAVLARCLTGGLLRRTVGGTKAVLAIGRCRPRAGSVDLVRRMAKHVHLVYVDEHNTSQTCAECGHGLCNTYVSPDSPVDLTPLKAASSYAHRASVSAAKRASPLRGGRRARRGVTTGSRSGPRDGVAAQRAKEHAEAVRTKVLQAIAAHGKWAFGTDPLALWGVKLCTNVACPASYVGRDTNAARNMSKIAIKSMQGRSIYPHLRGYTVSRAPPQEDPVQAVRHAAAIDAGTYEAGYGWTRCSPTSWEPWRRPVVADAPVAEAGTAPTAVPVAAPTVRVEALGVVADGAHDAAAASASGDLATSNVGQMAAASPAPAAGHSHSSSSRLARVIVDCSPGSSRGV

SEQ ID NO: 351 - protein, 579 aa, Porphyra umbilicalis
PWRLLNHVCVWMGEAALFKASTFAASNACAKAEAVANSETAWHAPSVGGQRHATRVWHSALRTATQAAAAARSAKRAAAAAAAGAPTEPPQPGAPGTPLPSADRLPVFCAALRRAAATKGPRARAPPAGEALIVSKGAYREATGAGMTQRAEAAAAASWAAIEPVVPRESLTAGCSLNVASWGAWLVAATARIARTYTDAYQSAYWVAATSGRRQARLHALIQRNRYAAKLAHRMTGGLLRRTVDGTKAVLAIVRFMPRAGSVDLVRRMAKHVHLVYVDEHNTSQTCAECGHGLCNTYVSLDSPVDLTPLKVARTYAHRVSASAAKRASPLRGGRRARHGVTTGSPSGPRDGAATQRAKEHAESVRTMVLQAIAAHGKWAFGTDLLALWGVKLWTNVACPASYVGRDTNAARNMSKVAIKSMQGRSIYPHIRGYPVSRAPPQEDPVLATRHAAAIEAGTYEAGYLWTRCSPTSWERWRRPVVTNPAVAEAGTTPAVAEAGTAPTAVPVAAPTVRVESLGVVADGAHDAAAASASGDLATSNVGQMAAASPSQAVGRSHSSSSRFERVIVDCSPGSSRGV

SEQ ID NO: 352 - protein, 205 aa, Trebouxia sp.
TERPRQTPHEKLSCICSRWRHVSGVKYRSAKTDTWLQSDKALDSALRDTPTAKVPTAATFLQHVKHRLHHLPAALQHFDALRHKKLRWQTHIKHRQAYTVISRGIYRNDSSTVVAYGDASFSSSCCKGNPSTSTVSLRRKIGQCCRVSETDEFHTMLCCGCRIKMDGMPLPPAGKTSCQSCSQAADYKPTRTSCKHDCQHSLSLA

SEQ ID NO: 353 - protein, 321 aa, Trebouxia sp.
HKCVLVFAALTETNAYPSYDALYFCTLCTSSTLQCCACRYDTLTCSKSRWQEESGHRHRQKQTASWMQADPDLIGIFEQMPSAKVASTAALGQHILYRLRHLSIVLDHFCAPECQMLRWATFRKRQAAMAKLCNYITDKDSNTVVGYGDAAFNSSAPTSSLQRRLRSLCHVYDVDEFRTSRLCCACHQPMIGMPSAASGQAHKSQLSAQCFVACTHGQTPFRCPSSTCVALYYTVLACLHVSTVRLVFLSDRAFEMLADNEKCRRQRGYGVRLCSNTECNRMIWNRDVNASINILNLLMSCMRGDSKPVAFLRTGNLDPGG

SEQ ID NO: 354 - protein, 234 aa, Trebouxia sp.
LQDVDSSITAFTTALHSDHAKQHKHEQHIRKPEKFSSSSRRQRRWQEVSGCREHKAKADKWLLSAPAVQQALLATPTPKVANVQAYCTPIRWKVQHETLVSEYFGKPCHRKLRRKHKIRRQAALQSACNTISQSKRSTIVAYGDAKFSSVSKGLAPTPTTALRRQLGKTCKVCDVDEFRTSMLCCNCHCAMSGMPEHKQPRFRGSLGPPDGKLQAQNAPCADEVLEHTLLQLPS

SEQ ID NO: 355 - protein, 245 aa, Trebouxia sp.
SAEHRIPAVHRLRAEADACVCMGKQVIHSVGDFCAPEYQMLRWATFRKRQSAMAKLCNNITDKDSNTMVGYGDAAFNSSAPTSSLRRRPRSLCHFYDVDESRTSRLCCACHQPMIGMPSAVSSKAHKSQLSAQCLVACAHGQTPFRRPSSICVALYYTVLACLHLSTVRLVFLSDRAFEMLADNEKRRRQRDYGVRLCNNTECNRMIWNRDVNGSINILSLLLSRMRGDSKPVAFLRAGNLDPGG

SEQ ID NO: 356 - protein, 208 aa, Rhizophlyctis rosea
QWRDGWRKRLAEEAGDNTNVSKVTSQITTPKTVVVDVYLEHLRTTFRHVDFLKKYHSKEPRWNFFKYRREQKALCEVVRRVKGDDGVGKQKSQIVVAFGNGKFGNSGRKGSRGAPVERFKKHLRRHVTLVVVDEYRTSRACSKCWLKDCWGETGDNNSTDSQRLCLALSLVDVDDDDDEDIALEEVEGPPDEEEDDDDTATTQGQKQW

SEQ ID NO: 357 - protein, 610 aa, Phytophthora plurivora
AVRAGTVFSVCRTATQESQASRSGGSQKKKNKTIDFFVMKETLRDFCKPEATGLAWDECIQEVNQAVAEAYLLANLYVLRQLQSGRPLCKIDAEDLYQPCLSLVTSVPRREKYKKFLRTQATKDRRNKWEVSGKVEKLKDVPVVTSSFTEDGFQHWISTQKTKNQDLEEAADEFCKMRRDRPRPSTEHLNQGWFQSAAKQMATNAKNGVVRNFAKRLRSYVLEKYEVTKVVGHEIVNGVFAQTFESVPARVADPVIVELREKIPRTKEGKISWAPQDLLPMFYEFLLYIEKCNKKSKGKPDYVEKRTFSILPTKRGFESSYCKVDSTGLRSLLLRSPSVRRDIAVVYEGNVWTLEKSLADRAAWIELSSLWWRRLFHVDKLEKPGVPSFHREITTDGYGVGVHMNRPTRGKKEKKKGKDGKTVTTKSKNVSNALGFPLSKTPKSTTEEYDVIWGIDPGRMDVITATNQHGKTVRFRTSDFYRASGYTRSNRKTKYRIDKSPRTRELLKNAPSKKTSSVELFCNAIEFWFEHGRTLLSFFMDPFFRKLKFHRYTLRTARLLRTSGCEGYQNNSRVRRLRHGWRGRDQAKCARTREDVRAQACPLLRGRGGR

SEQ ID NO: 358 - protein, 708 aa, Phytophthora plurivora
EAEIAKARAKGGRQAHEEILILNSFSNLPQAPQSPSNKSSRPDSLLCKPRACHAMGRKRKKIDDYPDEWDIVEETQDRDDVPPPNETVAGSEIDSDTDALSQLAPEDLYRLKQTTKNTHSSVICKLTRIYHVPELIEEIKRICVVMRQVQLEGWHLANLHVLRCLKGDEDLPELDQMFFYRCCAASLANVAARDRRTSQPKHPCLHRTCLEYWSGRERVVSYAADSLVFGNGMINEMAKLMNIIAGNMITIHFRRRLRQYIRFRYAPEGTIELKYKDTKRIVDSCYRVKLVPELDEDEKLTGRMVKSRTTWDKTDDPVEKSLREWLEIVTWQWQIQNNSAHFVHKLHDMLSWMETFVNDHPTTRGARLYSLLPVATSYQATYVKLNATTLHGLFARILKEPKVKEFLNNELNIVPTVEQTSDSQRPFSRKTFQTHRSEILRKVFDVEGFETKNRKFVDEVETNSYGPSITIIRPLTTTSVFVVKKKASNKKRKKDDGTAVATAKEPKRKKAKTPEEIAEVDSFAKELFKLNPGYFPDVLMGIDPGMRSLVTVASVGRRREGHHPQRPQSKEKVTDISTRKYRHLARINDFQFWNENLKKREPWYAGVIHAMPSFKAASYDTYFQRLRFFWMHLGFLLAFSAEQAFLQWRFTRDHAKMRAQDMLVKLIVPIASKQVCIAYGDWSRRDGIKGHATGPVNTIVVHPPKTLQ

SEQ ID NO: 359 - protein, 274 aa, Bifiguratus adelaidae
RTSTKEYYDLAGHNIATKRREMWRHSADSTTTKIIDDIPSLKTSDVRSLTSAIQYRMTHFSVIVGYYDQGRRFNVLKLKSYKGKQKALAEISRRLTHGSSKYGQVPLPCHSHMTNPITPTRPKWTPSPACYRASDGKNRHYVIAYGSASWGNLPGKRPGPSKTFLQKLRDICRMPHCRVSLCMIDEYNTSKVCPRCHTKSVDNVKQKNTSGGHSNERIHAVLRCHNCDTVWNRDEMAARNMAYIFRYMALHNNQRPEPFKRLSVEERGANLPPG

SEQ ID NO: 360 - protein, 493 aa, Bifiguratus adelaidae
TYLPFARFIFLHELEKKSDFPLNEWVKKEFFAEVFLSLVDSKQTSKASLATRAYRSLIGQYRSSYLNTTSFEPIHLTYAQQIALYQATTIHTAYLNNVKLRFGQQLRRIVNRLLNLKERKQSLKDELEHKNYNSENIKQTIEDTIIKPAREFKTSIANRKVDRATINQNLTTIYVKFKPILEAYSPEYKFDKDNIYYDCKANPEMHFNAFFQMALFCEKMAIKSFQCFPLRRSWIPGYMQIDTTILCQHILLLGRTRPKDKMTAWRQVVDLDSKPFKAQGTDRSLKFRGTIHTDGVGVTVLKQNCDTVKGGSGQRRNKMKVKDNEPYIHKIQRQELDATEGRCVFMDPGRRDLLYAMHENSTPEAPLTYRYTRNQKAKETRSGRFKRLREKLKKQFADVQKAENALALHTQSSIDPEAYRLYLGKRTEASSTMVAHYQDLMSTHTSQHPIFRKLRLSAYINKMQADDRLARSIRQKFGNDAVLIMDDWSAPNT

SEQ ID NO: 361 - protein, 315 aa, Dunaliella salina
MCMCARARTHTHTHTHTHTHTHTHTHTHTHTHTQGSDPKHHVVIGVGASKMPPAPHGLQKFVAPTQLWKALIRALLRGVGHSWLHLRLMMSLNEFRTTLCCSKCGTETVAPIVADFATHKPRESKRLRECPHCKKWYLEQQQGEGMMEEAAAGEQQQGEGMMEEAAAGEQQQGEGLGDEAEAGELQQGEGMMEEVAAGEQQQGEGMGDEEEAGEQQQQGEGVGEEEEEEQPMPSEQGSTEWGGIDVEEEEGEECGVEGEVQAAVLGERRARVHKPQPAYRMHRDMNAAWNLWEVCIAEYAGNPRPRYLTRAHNAA

SEQ ID NO: 362 - protein, 233 aa, Dunaliella salina
KRHVVIGVGASKMPPAPHGLQKFVAPTQLWKALIRALLRGVGHSWLHLRLVTSLNEFRTTLCCSKCGTETVAPIVADFATHKPRESKRLRECPHCKKWYLEQQQGEGMMEEAAAGEQQQGEGMGDEEEAGEQQQQGEGVGEEEEEEEQPMPSEQGSTEWGGIDVEEEEGEECGVEGEVQAAVLGERRARVHKPQPAYRMHRDMNAAWNLWEVCIAEYAGNPRPRYLTRAHNAA

SEQ ID NO: 363 - protein, 423 aa, Dunaliella salina
KDDLCGYLLRSIALAFAKSNTKETLSSQSWFSLKQWKSSDLQKEKVRGKTKIKDIDKEKKEKKRGNSLRKSKKPPANYSKKIKLQPKKEDAQTFNQWFGCCRLTYNWALSCIKKKPKEYKMTDIVWLRKRFINKCNIPKDRQYLLGTPKEIRDSALSDLAQAYKTNFAVRKKDPSHTFDIEFRKKKDNQSITLGYQNGIKLWDTQQQEMKMYPTYLQNKINFHIRKNRSLPEKLENDCKLTKDKLGRYYLIIVYHRVACDDQTGKKGNEWCSIDPGVRTMLTIYSSSNGLAYKVGENDMTRIFRLCKCLDKLISRMNNIKRKFRRKKYNIRERIKNLVTEVHCKAVRLLVTNFNNVIIPPFNVSQMTKRSNRKINSKSVRGMLCWRHFAFRQRLLQTAQRYNVNVFVRGEEYTSKTCTPTKLA

SEQ ID NO: 364 - protein, 569 aa, Notospermus geniculatus
KIERADKNSFFNMSKRKHPSISDRLKPTTIWDFVKKELASTNSHRYTTPEVKKREICSHPAVQRHHVKIYLRLNCPNVTCEEISVAKKMKHDQDEDVDEIHLSTMSVGLKPTKHQRGVLDKMIMTANHAYNWCLWLYNNDMCVKQNTVTDKNGVTKIYSNPNIMELNKVVTCQNKENIPNQYFPSRKSDSDPLYFADNNDWFFEKTSSQVKLCAVKEFVGSFKGCRKKAKTMRYKTLDPTFGGSFGVQRSYIKRSKTNPMELAIMSVLLANDAGQRSNIKTNCSSEMMPFQPWMTKKGTEKSYGPYLPHDCKIVKQIRSGKFVLQIPCDPKHVRKRLPENVGRVTSIDPGIRSFATGFNATQGLAWNFLKAEDRKKYMNEGLFEKRYTDMCRNLEDCVKKLKNKMPGSKAYGRKMKWKDSIVLGMRKLFARARNKMNGIHSHLCRTLLCENSVVVVGDLNTKEIVKKGRRDENNTRVHLAKSTKKTVSLLSHARFRQRLLCRATGTDRHVIIQCEKYTSKTCSNCDHLHPKLGGNKTFKCPSCKITLDRDLNGAINILRKGLNIFHDNN

SEQ ID NO: 365 - protein, 497 aa, Notospermus geniculatus
ITPSIPHPEMKRQIPVLTLWEAAHVKGHSTMWKWWNSTRRRDLNVRDGTLGLDLTDFASSEKKKSDDKKVMTMFSVGLKPTKIQKRVLEEMLRSSNTAFNMCSYLVEQKGVKPSQIDLQKFVCKAKARDVDDSYRVPGDDWLYREGGNPHTTIRLTSCKMWCANYKSAKTWQKKRNKTGEPIELRRRNQIDPYTDSFQVQKMYVRFLSDEDMKYASDKCEFQRRYIRLLPQAFGVLKNPKERFLKLKKNTAKLPPIEHDVTVSKLPGGRFVLRIPCEANHTRTATRVPGTENAMCGIDPGGRTFATVFDETSRAAWQVGLVEDKQHLIRPLMVKIDDQRRRLSLAKSRSQTQSEKDVGRRMAKLHYKMANVVNTIHATLASHLVTNYGLVSLGDIAVRRIVLKDKPGNAKLSKKAKRDLLCWRHSAFRKRLLHRALGTKCNVIVQDESCTSKTCGRCGVKNEKLGCSETFKCTECDYEVHRDLNGARNILRKTLNLF

SEQ ID NO: 366 - protein, 298 aa, Coemansia reversa
LFVASTRTTRRHGGFKLRRYSLHQKLRLSVYINQQQADARLVRNMYEKFGADPVLVIGNWSALNVRFHALIRGVGLRDMLRAHLFKVYLIDEYCTMVTCPLCYHQLEKFCWLVKPRPWQRRNYLRILCHGLLRCTSERCSEDVVASIERNAKKHKSNVDSVVNPVPTLKTKARAKARTKAKAKRRPKKTLRDNPIENMPNHIWNRDLAAVINMRAILHSLRDDNVIPRAFQRGNNNALAALQPRHLRTSTSSVSAIPNPGSASTSTASQFFSHQRICLLNVSDCWHKCYICICDCRPK

SEQ ID NO: 367 - protein, 237 aa, Coemansia reversa
WGYERQCQNDQLQRHYQQMRDQNQMEAEHQLPDNERHHLQQQPQQKYENGKQRCQMQKAWRKQWQQELQDQHRQHQKEEFECRLLPRRHPWSAQPLHRKLQKSAYIDCQRMDANVACGLRQKFGLNPTLVLGNWSAGIVCYHAPIPGKGLRQMLIKQGFRVLHIDEFKTSTWCPYCGEGQLQKFLDIKNPRPHRRDERPVIKSHAVLRCNNVKCIGRVVNSTTGQSCPRIINRDLAA

SEQ ID NO: 368 - protein, 200 aa, Apophysomyces variabilis
QRYIEQILFGEEIIKKSKRIQDIYTQKAYATVASNERNFLNGSGKKTNMLLMMTGSAETGVCSPIRGHYRRGGKKLREQHLQQTSVGIINEFRYFQLCPYGYQVLSHPNKKKDGYIKKNFGTVICTNSECISVKKGYGSCGRGQNAALNIALAGTSALFSNHHEPFPEFNPKKASKYLLDNNLLASLMSIPEGCGVDARA

SEQ ID NO: 369 - protein, 201 aa, Apophysomyces variabilis
RITTKHYDRYREYLRQVKTNENGLRLWKFYSNRSVRRRIWDNVISQRSCLDKACYLITNQARRTFDMNHEMDDNRRHVDEPRLVYAFGLDGMSRKSRRGGLAPMDHKIANALYRKINQKNRNKDRQHADVCSRIDEYLTSKVCCRCSKEGQDRGVDFLRRPPTASVQDRARLENGQEKVLRVVQCANCDCTFHRDGNAADN

SEQ ID NO: 370 - protein, 200 aa, Apophysomyces variabilis
QRYIEQILFGEEIIKKSKRIQDIYTQKAYATVASNERNFLNGSGKKTNMSLMMTGSAETGVCSPIRGHYRCGGKKLREQHLQQTSVGITNEFRSSQLCPFCYQVLSHPNKKKNGYIKKNFGTVISTNSECISVKKGYGSRDRDQNAALNIAVAGTSALFSNHHEPFPEFNPKKASKYLLDNNLLASLMSIPEGCGVGARA

SEQ ID NO: 371 - protein, 298 aa, Prototheca stagnorum
GAGGGRLLAARYPAVRGGARPLHPGGLCPRREWWRSATRCEPGASGPRRPAPCRLPLPRFRDGGDGTAAAGGTVHERSDERVRPRGFTDPPGPPRGDRLPLLRRGPPQRGRRRGKRRGAPPTARELSRDERDVPRRVDAGSRVGGRSPPARPRAERAPSSPLAGPGRRAARRPGQTGDASFDHASRGRAATPSGHWVAERMRRAHGLDVLDVREFNTSQVCSRCRAPRRIRPVAGAASPHFVRRCAYTSCRTRVVGRDANAARNIAFLAGELLAGRGRPAPFSSPLPNSTGRTAAEEG

SEQ ID NO: 372 - protein, 204 aa, Prototheca stagnorum
SGGGGEEEGSGRPGWPGAPPRGTRRPAPRRRRGPTSSGARRRCAPGRSGRPPPPPRAPGVTARTTIATLVRSAGRAKAEVLVAFGDPSFDRASRGRAATPGGRRVAEPVRAAHGLDVLYVRERNTSLACSRCRTPRRLEPVEGAVSPRFVRRRANTSCRTGACDRDVNAARDVASLAGGAPGGLGAPRTIFLATAPAPREGGPR

SEQ ID NO: 373 - protein, 280 aa, Prototheca stagnorum
PLSLPPLPGRLGWEGLWRSSVTPGSPLLSTAVCEETRKPEFDPGDFPRPPGHRTGVWCPSAAVVRPLERGRCRGEGFGAPPACQELPREERAVPAPRSRRGPASSGARRRRAFGRSGRSRPPSQAPGAAARATIATLVRSPGHAKAEVLVAFGDPSFDRASRGRAATPRGRRLVERMRRARGLDVLYVRERNTSLACSRCRAPRRLEPVEGAASPRFVRGCANTSCQTRVLGRDANAARNIASLGGELLAGGGAPRHFPRHRPRSTGRTAATEGYPVPGR

SEQ ID NO: 374 - protein, 202 aa, Tetrabaena socialis
SSGVSHTTCSGPIASLDLTSTSSPSLQARTNAKGLNSECGTTWELRLYGGKKRVLAKFSSTRSLVEIGGRPPAQSSSVTEPPSSLQAERESCPSRVFKACRARFPTHLVDEFRSTKVYHADDSILQGVAERRWKGDRMKTVRGLLWCGSTNETKSKFVNRDFNGAMNIRRCFLSEERPAILDRSKCQGRLQFIRTGRVIRMK

SEQ ID NO: 375 - protein, 260 aa, Prototheca cutis
LCDYAGFSFGALLDVTCSYKWRKDAFDVYIMRYMAMDKSIKDVIACTGHQPSRIVVFMGNASFRHNSPDHPPSLGWRRWAKRMREAHGLLVIEVDEFRTSQARAGGLCTCGGVLWVPGWMGVGSGLGEQVPGEVGAGQVHACSDTQCRRAAGHADPKRTTPQICSACEAHMRLGGCSTARNKYAILKCDRCGVVWNRDVNAARNIRHLGEALVLTGKRPPPFDRKTKASPPAHPLPPGRSTWYDFITKILRWLWPAEQHH

SEQ ID NO: 376 - protein, 219 aa, Prototheca cutis
GCKWELSLRDYAGFSFGALLDVTCSYKWRKAAFDVYMMRYMAMDKSIKDVIACTGHQPSRLVVFMGNASFRQNSPGHPPSLGWRRWAKRMREAHGLLVTEVDEFRTSQARAGVVAHVWGCLVGAGLDGCGQWAWRAGAWGGWSRAGACTRAQCRWAAGHADPKRATRQICSACEAHTRLGGCSTARNTYTILKCQSCGVVWNRDVNAARNIHHLGRDWS

SEQ ID NO: 377 - protein, 261 aa, Prototheca cutis
LCDYAGFSFGALLDVTCSYKWRKAAFDVYMMRYMAMDKSIKDVIACTGHQPSRIAVFMGNASFRHNSPGHPPSLGWRRWAKRMREAHGLLVTEVDEFRTSQARAGVVAHVWGCLVGAGLDGCGQWAGRAGAWGGWSGQAHVRTQCPGAAGHADPKRATPHICSACEAHAHLGGCGTARNTYAVLECHSCGVVWNRDVNAARNIRHLGERLVLTGKRPPPFDRKTELGAPLFAAHPPSPRRSTWYDFITKILRWLWPAEQHH

SEQ ID NO: 378 - protein, 260 aa, Prototheca cutis
LCGYAGFSFGALLDVTCSYKWRKGAFDVYMMRYMAMDESIKDVIACTGHQPSRLVVFMGNASFRHNSPGHPASLGWRRWAKRMREAHGLLVIEVDEFRTSQAHAGGVAHVWGCLVGAGLDGCGQWAGRADAEGGWSSARAHTCTDTQCPRAASHADPKRATPQICSACDAHAHLGGCSTARNQYAILKCQSCGVVWNRDVNAARNIRHLGERLVLTGKGPPPFDRKTKLPPIARPAPGRSVWYDLITRIRRRPCATEQHH

SEQ ID NO: 379 - protein, 671 aa, Aurantiochytrium sp.
TLCSMYYIVGTFFLGGSYDTTGCGRDLNRKQNQIVSSKTKTRVGGVAQCQMSDTTSPLESPHSGSDCTEIQYETTPTTTKSEVTEQKADIDEYVSRTLTTTRTLLGKRKLSDVDYVMQESVAKRRKTTSPDKSLGSKKTSPITKSCKTSGRASTSKGAVFVPFWNSQCVENSKKSWLPIETVSVDSHSTCSSGLSLPKEGQFELSIQMDKKTMEDRKMNSSKTSSQSSPSSGVVSTVNEAADEEESDLRSMKVKLRPTLRQRKIFAKIHHALRALWNLALEHIKKGNVGTHFAEMKKYFLGPTRNALNREVEKERKLDDEIESIPYHMRGDTLRRLGAAYKSAFSNKKAGNVKKFEMRFQSRRDKRGFGVIPVQKCMFDKNNAFDDNFIFMMKRYRWKVDGDSDTKPFGPLRYKRQGSKKRNRKLPKIEKDCKIVYEEPGRWYLIIPYQKKREKLKPAPFKDATLDPGARDFQTLYSNDAKLCATLNVLPRTTGSEKRGNFKSYSMLDLSKRIDQIRSSRGWDEKTGSRIHRKKTYKHKEQMLWAKMKNKRKDTHDKIIRFLLDNFQEIRVGKIGVKSILESPKLHRTAKRKIQLLSHCRFRDKLIQDHGHVRNTLAVPEEYTSKTCTRCGYVKRNLGGNKRYNCDRCGLSIDRDINGARNIYIKSISCTK

SEQ ID NO: 380 - protein, 265 aa, Aurantiochytrium sp.
KNIGGSWMLTTKLNHLDHSIQTSRFEKAKSKAPQDLKGLQNRSRRSWSLVPDHSISEKRERLKPAPFKDATLDSGARDFQILCSNNAKLCATLNVLPRTTSSEIRGNFKSYNMLDLAKRIDQIRSSRDGDGKTRSRIHRKKTYKRKEQMLWAKMKNKVKDTHNKIIRFLLDNFQEIRVGKKGVKSILQSHKLHPTAKRKIQMLSHCRFRDELIQNHGHVRNTLAVPEEYTSKTCTRCGYVKRNLGGNKRYKCDRCGLSVDRDIIS

SEQ ID NO: 381 - protein, 674 aa, Aurantiochytrium sp.
LEQLQQTYYIVGTFFLGGSYDTTGCGSDLNRKQNQLVSSKTKTQVGGIAQCQMSETTSLLGSPLRGSDCTEIRYETTTLTPTKSEVTEQKVDTGEYVSRTLTVARALLGKRKLSDVDYVMQESVAKRRKTTSPDKSLGSKKASPITKSSKTLDRASTSKGAVFVPFWNSQCKENSKKLWLPTETVSVDSHSTCSSGLSLPKEGQFELSIQMDKKTMEDRKLNSSKTSSQSSPSSGVVSTVNEAADEEESDLRSMKVKLRPTLRQRRIFAKIHHALRALWNLALEHIKKGNVGTHFAEVKKYFIGPTRNALNREVEKERKLDDEIESIPYHMRGDTLRRLGAAYKSAFSNKKAGNVKKFEMRFQSRRDKRGFGVIPAQKCMFDKNNAFDDNFIFMMKRYRWKVDGDSDTKPFGPLRYKRQGSKKRNRKLPKIEKDCKIVYEEPGRWYLIIPYQKKREKLKPAPFKDATLDPGARDFQTLYSNDAKLCATLNVLPRTTGSEKRENFKSYSMLDLSKRIDQIRSSRNWDEKTGSRIHRKKTYKRKEQILRAKMKNKLKDTHDKIIRFLLDNFQEIRIGKLGVKSILESPKLHRTAKRKIQLLSHCRFRDKLIQDHGHVRNTLAVPEEYTSKTCTRCGYVKRNLGGNKRYNCDHCGLSIDRDINGARNIYIKSISCTK

SEQ ID NO: 382 - protein, 644 aa, Aurantiochytrium sp.
FVSLVESDAIASLMSSSSSGFRVPTPETDSASYTHGSLPRSSVATSNDRSLSSVEHTPITASSGIPDLPPISVGKACKPFWTSLSTEVSRKLSSCTRTGLRVLDTPSWSRSLRNLGLGSWFTASAATCAQPTPTTCSLSRRSLWQVITDVEQLRIARDAAKRQRKLEEKVKKTLEELDALAASDDAEATREKLEKKVTRAQGELQAIAAYRQQYEWSMMSREDKVPSGENEPNKNKRKASVLDDDEIEIDESKTIRARKIRVYPTKEQEQKLLRWFGTMRFAYNKLVEKFRHVEHEVSKTTMRHELSQYAKAHDWFQEVPYEVRDSAVRDMDKARQAHFAKKKKGETEVSEKAKFKFRTKKARQQSFEVRARDWNRKSGKYAGLFGPALRAAEGILPTEVEATVRIVRDFHGCFYVCIPMSVEIKGDDQAPETGFHSTVAMDPGVRCFMTTFDADGLVTEWGKSDIQRIYRLCRHADRLQTKIENASNKQQRRRRHRAWRKIFVRIRRLVKEMHRKLASWLCNNYRVVILPTFDTNQMVLRGSRKITSATARKLLTWSHYSFRQHLLEHAELNSWTKVFITGEAYTTKTCGQCGRLHTGIGRDKTFRCPHANCSYVADRDINGARNILIRFMTTYMGRYAASVF

SEQ ID NO: 383 - protein, 679 aa, Aurantiochytrium sp.
TVTLNIKNIYEVCFRCIMLSVYSISVKYDTAGCGSDLNRKQNQIVSSKTETRFGGVARCQMSDTTYPLESPHSGSGCTEIQYETTLTTTKSEVIEQKVDTGEYVSRTSTTTRTLLCKRKLSDVDYVMQESVAKRRKTTPPDKSLGSKKTSPITKSSKTLDRVSTSKGAVFVPFWNSQCKENSKKLWLPTETVYVDSHSTCSSGLSLPKEAQFELSIQMDKKTMEDRKMNLSKTSSQSSPSLDVVSTVNEAVDEEESDLRSMKVKLRPTLRQRKIFAKIHHALRALWNLALEHIKKGNVGTHFAEMKKYFLGPTRNALNREVEKERKLDDEIESIPYHMRGDTLRRLGAAYKSAFSNKKAGNVKKFEMRFQSRRDKRGFGVIPVRKETFSKTAFDDNFIFMMKQYRWKVDGDSNTKPFGPLRYKRQGSKKRNRKLPNIEKDCKIVYEEPGRWYLIIPYQKKREKLKPAPFKDATLDPGARDFQTLYSNDAKLCATLNVLPRTTGSEKRGNFKSYSMLDLAKRIDKIRSSLDGNEKTKSRNRKKNYKRKEQMLWAKMKNKSKDTHNKIIRFLLDNFQELRIGKIGVKSILKSPKLHPTAKRMIQMLSHCRFRDKLIQDHGHVRNTLAVPEEYTSKTCTRCGDVKHNLGGNKRYDCGHCGLSIGRDINGARNIYIKSISCTK

SEQ ID NO: 384 - protein, 618 aa, Aurantiochytrium sp.
FVYLVASDATVFLMSSSSSDCPRISPNAGSVSSTHEFHRRNNISISSDRSPSSVSLTRNIASLRTLDLPSISAAKARKPFWTSLSNAISQKLSSCTKTDVHVLDIPSWSTSLLKLARNSWFTVKATMCDPPTTNSQTMFSPTLVFLWQAIMNVEQLRIERSAELKRIKLEEEVVRALLELASDDETARERRERQAMAGEDRILSKKKSKMKRKTEDVESENAVPPTSRIRARKIRVYPNERQQQKLMQWFGVVRFAYNKLVAKYRNVECGVSLDLLRAELKQYEEKHDWFKDVPCEIRDCAARDMDKARKAHFAKKNKGVTNTSERASFKFKTKSARQQSFEVRSRDWSRKSGKFAGLFGPHLRSAEGELPETVNATVRVVRDFRGCFYVCIPEQVEIKEEEHAPSPSCHSTVAMDPGVRCFMTTFDADGLVTEWGNGDIERVYRLCRHADKLQGFIDKAKNKQQRNRRKRAWRKIFERIRRLVKELHRKFASWLCSNYRVVLIPKFDTQQMVLRGTRKITSKTARKMLTWSHFAFREHLIQHAELNTWTKVIVCDEAYTTKTCGRCGHIHNKIGGAKTFRCPSTSCSYVANRDINGARNILIRYMTNYMGHQAVSVS

SEQ ID NO: 385 - protein, 578 aa, Aurantiochytrium sp.
NNISISSDRSPSSVSLTRNIASLRTLDLPSISAAKARKPFWTSLSNAISQKLSSCTKTDVHVLDIPSWSTSLLKLARNSWFTVKATMCDPPTTNSQTMFSPSLVFLWQAIMDIEQLRIERGAELKRIKLEKEVVRALLELASDDETARERRERQAMAGEDRILSKKKSKMKRKTKDVESENAVPPTSRIRARKIRVYPNERQRQKLMQWFGVVRFAYNKLVAKYRNVERDVSLSLLRAELEQYEEKHDWFKDVPCEIRDCAVRDMDKARKAHFAKKNKGVTNTSERASFKFRTKSARQQSFEVRSRDWSRKSGKFAGLFGPHLRSAEGELPETVNATVRVVRDFRGCFYVCIPEQVEIKEEEHAPSPSCHSTVAMDPGVRCFMTTFDADGLVTEWGNGDIERVYRLCRHADKLQGFIDKAKNKQQRSRRKRAWRKIFERIRRLVKELHRKFASWLCSNYRVVLIPKFDTQQMVLRGTRKITSKTARKMLTWSHFAFRDHLIQHAELNTWTKVIVCDEAYTTKTCGRCGHIHNKIGGAKTFRCPSTSCSYVADRDINGARNILIRYMTNYMGHQAVSVS

SEQ ID NO: 386 - protein, 647 aa, Aurantiochytrium sp.
FVSLVECDAIASLMSSSSSGFRVPTPETDSASYTHGSLPRSSVATSNDRSLSSVEHTPITASSGIPDLPPISVGKACKPFWTSLSTEVSRKLSSCTRTGLRVLDTPSWSRSLRNLGLGSWFTASAATCAQPTLNSPTTCSLSRRSLWQVITDVEQLRIARDAAKRQRKLEEKVKKTLEELDALAASDDAEATREKLEKKVTRAQGELQAIAAYRQQYEWSMMSREDKVPSGENELNKNKRKASTLDDDEIEIDESKTIRARKIRVYPTKEQEQKLLRWFGTMRFAYNKLVEKFRHVEHEVSKTTMRHELSQYAKAHDWFQEVPHEVRDSAVRDMDKARQAHFAKKKKGETEVSEKAKFKFRTKKARQQSFEVRARDWNRKSGKYAGLFGPALRAAEGILPTEVEATVRIVRDFHGCFYVCIPMSVEIKGDDQAPETGFHSTVAMDPGVRCFMTTFDADGLVTEWGKSDIQRIYRLCRHADRLQTKIENASNKQQRRRRHRAWRKIFVRIRRLVKEMHRKLASWLCNNYRVVILPTFDTNQMVLRGSRKITSATARKLLTWSHYSFRQHLLEHAELNSWTKVFITGEAYTTKTCGQCGRLHTGIGRDKTFRCPHANCSYVADRDINGARNILIRFMTTYMGRYAASVF

SEQ ID NO: 387 - protein, 360 aa, Eudorina sp.
ARAVGRLQLWRRHPRARACGGGGGGASAAGAGGGGGGGGGGSAGAAGQTWVVAPAPPLPRVGSATVAPDRPREDPKGEFAGAGRLHLRASTARWVIDRKTIMVHAQVLEQTGQQLAGGRPKENVIVAWGNTNTGYGGIVSRQGRGPNRALLRLLVDKYAHLVVYVDEYYTSQASMEGDRVLGSTVPHSTCLLGNLFDVVQVCAKCGRRSLDNGQRCLQVVFPFGGSRAHVVQVCQHCGTVWVSQVWGAESGLVCRVRFWAGLERRFSFVLATPAMQGRDANSAMNMRHVAMEMLQGKARPAALRPGGGGDAGPGGGGGGPTPGPAAGPGGGGHVRSGGGGKGHVEEESAEPPKKRSRRAG

SEQ ID NO: 388 - protein, 555 aa, Raphidocelis subcapitata
GGWLVGNAFPWVEATSRERLQRAEEEVGTAELSVGYAARRLQSAIFDAAFCVGTAQAAAQGPRPGTAPPPAAPPACKAAEGLCRRLRAAAGRAQKLRFSLAPTPHFKTNYIDITNAGACCLHYEFSRLPRARPANFTPATRVTHPKHERDAAAQAAWRELFKPAALQRPKSTFAGGVSTDGVSLCVRVLRRPLPWDPPPRSRASARAVRAAANAQALQRAQAEIAKLMRLHPSPLPHATDIAAWDTLFLKWGVRFVAADPGIRHFATTIALGGPFAPGTLSPEPLDGIPRGEGGETKRSGPGGPWHGAHSWRANSRQHHNACAFDDYKRWRAGHLRRADPADRAAVAAVPSAKTASAPDFFSYCRAAVAAFEPGMKLYATLAHRRWAVRVQRAKERQLHRVAQSLIFGHPTVSGRWTACRPSPRPKLTIIAWGAASIGAGSPISRAYIPPVRALEALLRRHYRTDVIFLLIDEYKTSQVCPFCWEIRPELFTLMGPKQGPKSRSTAVLACPGCMHSHLNRDASASMAIAARGIGQIAPKAPRGGLDSFERERKAP

SEQ ID NO: 389 - protein, 802 aa, Raphidocelis subcapitata
HAPSHPVICSTHPDTPVKHPTHPAQADKWQRWLPGRGCTFAGFFSTDGEVIHLHHVVEERDPVAVEWKTAYKEKMEQALGAHRRHPPPGAVVAAKRAARAAARAAREAAVRKASLSQHAACLEAIQHCIPQGADPRAGNAFALDFGWARPSATAPYMQFAAIDPGLHYSIVATNAANGPEGQRTGFFRLNSKEWGHGCGFARDARQRERRVEAAPEFRSAESALPSPETTDLHQLILRNAWAAHLVDFAKERIYGSRRARRSRKRVRTVLRPRMTHRVAQVVMWNSTAITGKWGGTWLRWLTLPGGQPPPRPWRAFVAFGAGSLGRGSRISRKWVFPSKEMAVKVNAMYTERGVGPGPVGSIVGWHRRNEFRSSQVHSRLGCWRLKLADFSVLTHTEAGPVLEHSYDLKTCTHLGCGAPNGARRPIDRDKNAARCICAVALCDYLGQELPEVFQQHPPHHPPHHIQPHHPPPAAPPHHPQPPAAPPHPPPPPAAPPHHPPPPLQPPAPPPPGGRFWGAVWGGGFGGRFWGAVWGVEGGCVCSGARLVLGWGGGEGFACRRVRKRLKAHTRARAPADSSLRSPLAASSRRPASGEASPAARAGRSRSAWWRLGGGMVSRVCGACVCGGLFLRRRLGCAPCRAGCRAALLKAFFASRAAARPPPPPPHLPRRGGVGLRIRRPATCPPAAALCVGAGQRTALLLQLPVALGLSELNHVLLAPAARARGVDAALHARAHVLSSRRAPGRGRRGAPRGSGEWWGAAAAPRRRSRNALRAGGGSRRGGTEAAIGRAHRAASGLKSVTR

SEQ ID NO: 390 - protein, 632 aa, Raphidocelis subcapitata
SGLTDCAWGNTRAPKRQNPIRSHQPTPVTKYHTPPPPRPQELFDRASETLAALEHRIARATAKATEGRQGATLALLDVAYAVAERSGAAGQGNLPAKAAQNAEAAPSAALAKRLRTLQQGMRSSTRQASRLSFSLAPLTGFKTVFLQIDNTTMSHLHFDLCSHRTPFPPLAGLPRCGARITRDPIPPRAEAAWRAFFPGLAAAFSLDRNDPDFESGAFAGHVATDGVSFHVLIKAKRSAAAADTDGVEAAAAAAAEAAAEAAPAQRRPAARRRAADAERYKMLAEKLQECGVGGHDFEPYQNLLPQSLAGLSRFGELLLSLGIRICTVDPGVTDWITAFSFSPFKRRDSADKPPTPPHQPMGQWLGEHVFVESAAGFRDATGQAAAARRAQRRLRGQDPTDRARVRNCTPSGRVGSLRAFSLHCRRKLAAFDAGRRLYGGIQQRQERLRKRIVRTRHFHRLAQMLAWGETSVRGVWNRVRRTVLNKPTLSIIGWGDSSAGAGSAISRKGLGPSRDFERFVRAHYPRIFFIRVPEHFTSRTCTACFKQRPAWSKRSKGPKGPNFCIGGRPVHKLLVCKGHAPQLVVDRDVSASYAIMAVLLHHVFAGGAPEWQQRCPRRTRKKRKRPARSTTA

SEQ ID NO: 391 - protein, 273 aa, Raphidocelis subcapitata
TQPSPHKAKLRVAGLITSAPPWHRAHSWRANSRQHRNACAFDAYKRWRAGHLRRADPADRAAVAAVPTARTAHAPDFFSYCRAAVAAFEPGMRLYATLAHRRWAVRVQRAKHKQLHRLAQSLICGKPTVSGRWRARRTTQPRPGLTIIAWGAASIGAGSPVPRAYIPPVRQLETLLRRHYRSDVIFLLIDEYKTSQVCPFCWEIRPDLFTLMGPKEGPKSRCTAVLACPGCMHSHINRDASASMAIAARSIGQLAPDARRGGLDSFERKSKAP

SEQ ID NO: 392 - protein, 199 aa, Raphidocelis subcapitata
GSPAWVCLSAFTLHCRRKLAGFDAGRRLYGSKRAREARLRKRILRIRQMHRLAQTLAWGSTSVTSKRWKSARRPVPNKPPFSIIAWGAASVGAGGPISRKGMGPSRDFERFVRSHYGELGVFFLRIDEFCTSKVCTACWQTNHADFVVGGRPTHKLQVCKDHAPQLVVDRDVSASIAIMVALLERLLAGGAPAWNRRPS

SEQ ID NO: 393 - protein, 298 aa, Phytophthora nicotianae
LFNVTELETRTRKFGNRDTTDGYAASVLLEREMPTTEPTDTNTAPRKRRKTSKNRLTNVVEKDALDLARDKLPEGYTPDIFIGIDPDVRILVTAASTGYLPQQRQGRQCKHRHRRRRFRKKDSRKCIAKNQHGHGQRVIGVSTAEYYHLAKLNKKRVWDLNLRKTEPAYVLILKEMPSFNTSQLTTFMDRLQYFVKHVGFLVSYSTKTSFRKWRFLTTSSKMRALTAITKRLVPIRSAQVCIAFGDWSCQDGLCGNPSAPVQALKKELEQRATVCPWTSFAPVSCAPAATSTSFQLGY

SEQ ID NO: 394 - protein, 204 aa, Phytophthora nicotianae
FRISIREYRHLAGFNKFREWNECLTKLNQEYQRGIDDMPSFKMASFKKYLECLDYFWRHANFLREFCAEHPFLKRKCVRKRMARVTVDAIAKRIVRTKTCGVAYGDWSKRNGIRGHAYSPVKGLRQALQKRTMVVSMDEFMTSKLCSHCHQTLSSVQYLVDTKLVKRKKRKGTVLIRNRPEVQIEEKKCYGVLRCDHEGCGACY

SEQ ID NO: 395 - protein, 299 aa, Phytophthora nicotianae
TSFPELRFKSKKDNSSSIEFRARGFKSMDGIVEFTPRYFGFSKNEGFYIKEKMPELQFSVRLQRIRDEKFYLCIPRSKIFEKTTSTRTCAIFPGVRSFITMYDPDGLTLGVDDANEYIFRRCLTIDRLISRRTKETNKRKRYRMQKRLTKSFNQVKAIIADMHHKVSGWLSTNYKQVLLPSFQTSDMTSKQKRISSKTSRAMPTWSHYNFKMMLAYKMERSGGRIVECEEHYTTKTCSCCGKINYSITSQKVFEYNHCELVVDRDVNAARNIFLKNEELLTWAPTQVPGDAYSEFVRYA

SEQ ID NO: 396 - protein, 282 aa, Phytophthora nicotianae
PLQRLLGNHYTTLVTAASTGYLPQQRHGRQRKRRHRRRRFRKKYSRKRIAKNQHGQRVIGVSTAEYYHLAKLNKKRVWDLNLRKTEPAYALILKEMPSFKTSQLTTFMDRLQYFVEHVGFLVSFSAKTSFRKWRFLTTSSKMQALTAIARRLVPIRSAQVCIAFGDWSCQGGLRGNPRAPVQALKKELERRATVLPVDKFRTSKLCSGCHKRLLSARLLTKVKDRETEKTSIVLKKNRNVLCCKNSRCKAHFWNRDVNAARKILELLQCRLSGLGRLAAFKR

SEQ ID NO: 397 - protein, 223 aa, Phytophthora nicotianae
GGSLSDVRLLSSKRIVSFKPQVQAPHRQVASRPRTAPEHSNEKDFIGRKVLQLHQVWFQHDHELLSLFMDPFIRKLKFRRYTLRTAQLDRACFALAGARRTNAVVGFGHCGMAGEGLIKRSVAGPVKAFACKLARSWCWTNSGQAKSTSTVKQRTTLRINASCASGRDGVVRKVPVHKVLHCLRKHGGCGKSVDRDVNAAKNILSILQNQLTGISEWPLRLRR

SEQ ID NO: 398 - protein, 203 aa, Diversispora epigaea
SRSSNPFVMYSPTKGITEVGKNDAQRLFRLCLHADKLSSTRDKLKSSISKRKKKQAKRIDKAISRIFRRIKNLRNELHKKTINHLVKNYDVVIIPEFNVSNMVRREIRKINSKTVRRMLTWSHYSFRQRLKHKAEEIGMKMIIQNEAYTSKTCSACGNIQNIGGRKVYKCKGCNVVMDRDVNGAGYSFVRCLMEPYACIRMHM

SEQ ID NO: 399 - protein, 223 aa, Gigaspora rosea
TRSIAIASSHILEKPMSGSFPGFMNDKRSRKTYKRFVAINPGVRTPFTTYSLSEGTCEIGKNDSQRLIRLAYHADKLNSKRDKLINSSLKRKKKKGIRIDKAITRIFQKIKNLKNELHKKTINYLVKNYDVIIPEFGVSNMVKRKKRKINSKVVRCMLTWSHYMFKQRLKSKAEETGVEIIIQDEAYTSKTCSWCDNIQNIGGRKIYKYKNCKLIIDRDVNRD

SEQ ID NO: 400 - protein, 211 aa, Caulochytrium protostelioides
RSSDRIPPGDDTNQTKNLLAKSLDHNCIIGNDPGRTNILYMVMVEPKGRVVSWRLSRRLYYVKAGMKAAQKQSETWQRHLKESLLRLSEVSIKGAALAAHHRFLEVWLATYEPLWVEFMKPRWAHQRLRLLSGKQDVFAKVINRVANEATEMAPVVAEVVIAYGASKFALAARGGLPFQRLGYPRRASSGSAPSWSRSSGRPRCMPRRVRS

SEQ ID NO: 401 - protein, 258 aa, Caulochytrium protostelioides
PQYYAEADIRAAQKQSVTWQRDFQEPLQQLSAVSSKGTALAAHHQFLEARLATPEPLWIEYLKPRWARQRLRRYGGKQRMFAQFLNRVAKGEATEMKPVVAEVMISNGASRFTPGGKGKIVIPTACAYQGCAQRRRIVLVDGFQSTQRHAETNRNLTKAHIWTTAVVPRSRASRAGAHPTAPMEVDRVLPIGVYAQPNGALKPGQRRREGTVVRGLLWCEPTNGKFVNRDLNAAVNIRRCLAIPVIPKALCCHPGPVS

SEQ ID NO: 402 - protein, 203 aa, Caulochytrium protostelioides
FASGGKIEISVPTARAYKACAQRFRTVLVDEFRTTQVHAETNEILTKVKSRDPTQVPIARASRASVAQTAPAAVNPVRMRGASARSTAPTRVNPPRRARAGASAAEPTPASPARKTLVYAQMNVVLKPGERRRQGTTVRGLLWYEATHGKLVNRDLNAAMNIRRRLALPARPIALCNSGQTRLQPVVGKVTPNRMRVCFGRDP

SEQ ID NO: 403 - protein, 373 aa, Caulochytrium protostelioides
SYGCGFDPRIGLFVLPALSIYGHGGTQRPGHQLEADPKAGLRESHPNAVRDVTAPFERVDAAARGDELRRHRARRAPPLSGGVARHLRAAVGRVPETAPGMPAPAAAQQQAVRVCPVLEPRRRGGATAMKPVVAEVVVAYGASMFAPGGKDEISVPTARAYKACSHRFRTVLADEFRTTHEHAETNEILTKVKPQDPTKMPITPASRTSAPVTAPAAVNPVCSSGASARSTAPTRVNPPRNARAGASPAKPTPATPVRETRVFAQTNVVLKSGQHRRQGTVVRGLLWYEATDGNEAIHSKLVNRDLHVALNIRRYLALPERPEALCRIPGQTPLQSKVGKIIRYSTECAPASRGTPRVPFRGPGVRLDSIYPI

SEQ ID NO: 404 - protein, 526 aa, Caulochytrium protostelioides
DGNGDGDGYGRRGRVHTGPTQGATREATAMVTAAVTVAVTMSATATTTGTAAAIDREPDGVHATVLMSHRRSDRSARPRLVRDRPPPSAGAVRAAGYRAPYGLPRRHHPTEWVRSRTHRGPSALGGALRRPKSDGPLSPDGLWIRADQYCIIGNDPGRTNIIYMTMVGPKGHVVSWKLSGKQYYVEAGMNAVQKQSETWQRGLKEPLHRLFKVSSKGTALDAHHRFLEVWLATYQPLWVESQKPRWARLRLRLYSGKQRVFARFMNPSSTEVAPVVAEVVVAYGASKFALGGKGEISVPTACAYQACAQRFGTVLVDELRTTQVHAETDDLLTKVKPRDSKKVPISRASRAGAPRPNRNGSTRLVRRVRVPNRPRRRPRPSTQFAGLERPLLRRRRRGSTHPAMLVRVLPRPSRRPSTGSAISGGTVIRGLLWYNATSGNETTNSKRVSRDLNAALNIRRYVALPGRPKALYRNPEQTRLPTKVGELIRRWTKMRTAVGGPWGAPLRAWCACWDAEGGPVYSYGIY

SEQ ID NO: 405 - protein, 320 aa, Caulochytrium protostelioides
ILRSHPCMSRRSCHVAPCRPKGQVVSWKRTRKQYDVEAGMQAVQKRSETWQRHLKEPLQWLAAVSIKGTALAEHHRFLEAWLATYEPLWAEYLKPRWARQCLRLYSGKQRVFAKFMNRVAEGAATEMKPVVAEVVVAYGTSKFAPAGKGEIAVPTPRAYEACAQQFRTIVVYEFRTTQVHAETNEILTKVKPRDPKKVPISPAPQAGARSTAPTAVNPVCKTRVYAQTNVVLKPGQRRRQGTVGRGLLWWDATHGKFVNRDLNVALNIRRCLALPDRSIALCRGPEQDPLRPEVGKLIRQRAECRLPVWGRPLGASRSMV

SEQ ID NO: 406 - protein, 279 aa, Caulochytrium protostelioides
PDQSELLSAAHAGRRGRHQARPLRARLLSGLPVAGRQTAYAAPPRRYEYICCRRNQLQSQSVQSLPFQFRDAGQEVRARLSGGQRPDGPAVYLAIICDIRQRVFAKFMYRVTKEMAPVVAEVVIAYGAAKFAPGGKGDISVPTARAYKACAQRFRTILVDEFRTTEVHLETEDLLTKVNTLDPMQVSTARASRASVPVTAPAAVNTICMRGASARSTARRRRGSTRPAMLAGVLPPPSRRPSTQSARPGQALARPRQRESTCPAGRARVLPRPSRRQPP

SEQ ID NO: 407 - protein, 316 aa, Caulochytrium protostelioides
PRGAPALSPSTANVVESGDKATQKQIEAWHRGLKELLQRLSEVSSKGTALAAHHRFLEVWFATYDPLWAEFLKPRWARQRLKLYSGKQRVFAQLLNGVAERAAMEKMPVMAYGTSKFAPGGEGEIAVSTARAYRACAQQSRTVLVDESRTTQVHAETNEILTTVKPRDPTQMPISGASGASVAQTAPAAVNPVCRSGASARSAAPTRVNPPRQARAGTSPAEPTPATPARKTRVYAQTHGVLKPGPHWRQGTVIRGLLWYKAANGNEAAHIKFVNRDLNAALNIRCCLALPDRPIALCRISRKTRLESKIGKVIRH

SEQ ID NO: 408 - protein, 201 aa, Caulochytrium protostelioides
RFLEVWLVTYEPLWAQFLELRWACWRLLLHNGNQRLFAQLLNRVAKGAAKEMDLVVAEVVIAYGASKSAPGGKGEIAVPMARTYKVCAQRFRTVLFDELWTTRVHAETNQILTKVKPPAPEKVPISGASRDGAPRPRLRPSARPAGLGRVLPPRQGRPTRGKHRKKHSQRCLDDASRFKLGPALAQLRRTHIGRGQRPDVM

SEQ ID NO: 409 - protein, 228 aa, Caulochytrium protostelioides
FLKPRWAHQRLRWYSGNQRVLAKFMNRVAKEAATEMAPVIAEVVVAYGASKFAPGGKGEIAVPTARAHKVRDQRFRATLVDEFRTTQVHAETNDLLTKVKPRDPTQVPAARAGNTRTGARSTAPTWVNPPRDVRAGASPAKPTPATPVGKTRVDAQTNVVLNSGQRRRQGIVVRRWLWYSSTDGKFANRDLNAALNIRRCLVLPARPEALCRNGEDPLQPRDGKLIRS

SEQ ID NO: 410 - protein, 328 aa, Caulochytrium protostelioides
RAQAQETWHFWYAGRRMPQAERMRPTPCRLSRLPSKQSSWLAARISTASLGTTNIPFMAMEGSNGKVVSWELSRKQYYVKADIKATPKQSETLREPLQGLSEISIKGTELAAHHRFLEVWLATYEPLWAELACSGMQRVFAQFLYRVTKGAATEMEPVVAEVVIAYGASKFAPEGKGGISVSPARAYKAYAQRFRAILINEFRTTPVHAETNEILTKVQPRDPMKMPISRASRAGAPPTEPTAIDPVRSTRGYAQMHVGRKPGQRRRQRTVVRGLLWFDSTNGKFVNRDLYAASNIRCYLTSLTIPIALFRNPGQAPLQPKVGKPIGH

SEQ ID NO: 411 - protein, 249 aa, Caulochytrium protostelioides
TEYLKPRWARQRLKLYSGKQRVFAQFLNSVAERAAMEKMPMVIAYDTSKFAPGGEGEIAVSTARAYRACAQQSRTVLIDESRTTHVHAETNEILTTVKPRDPTQMPISRASRASVAQTAPAAVNPVCRSGARARSAAPTRVNPPRRARAGTSPAEPTPATPARKTRVYAQTHGVLKPGPHWRQGTVIRGLLWYKAANGNEAAHSKFVNRDLNAALNIRCCLALPDRPIALCRIPGKTRLESKIGKVIRH

SEQ ID NO: 412 - protein, 215 aa, Caulochytrium protostelioides
GAAAEMAPVIAEVVVAYGASKFAPGGKGEIAVPTARAHKVRAQRFRATLVDEFRTTQVHAQTNDLLTKVKPRDAMQVPAARTSRTGVAQTASTAANPTGNTRTGARSTAPTWVNPPRNARAGASPAKPTPATPVGKIRVDAQTNVVLSSGQRRRQGIVVRRWLWYSSTDGKFVNRDLNAALNIRRCLALPARPEALCRNHGQTPLQSKVGKVVRH

SEQ ID NO: 413 - protein, 212 aa, Caulochytrium protostelioides
VWLATYEPLWAESLKPRWARQRLRLYSGKQRVFAKFINRATKGAAAAMEPVAAEVVVAYGAYKFAPGCQGEISVPADRLYKACAQRFHIVLVDGFRTTRVHAETDNILTKDDLLTKVKTRDPTKVPIARASRTSVSQSAPAAVNSVRASRSGARLTAPTRVNPPRRARAGASPAEPTPATPVRKIRVYAQTHVVLKPGQQRRQGIVVRGLLW

SEQ ID NO: 414 - protein, 254 aa, Caulochytrium protostelioides
DSRRAIAVRSILATSSSRHAMLTLPGCAAQRYWSDQRDLGTSAFAAIQKQELAQLLNRIAEGAVTEMKPVVVAYGASKFAPGGKGDIPVSAARAYKACAQRFGTVLVDELRTTQMHAGTKDLLVKVRHRDPTKVPISPASWTGARSTEPTRVNPARNTRTNAYLAAPTAVNRVRKTRVFAQTNMVLKPGQRRCQEIVVRGLLWYKAPHSKFVTRDLNAAWNIRRCLALLTRPEALCCHPEPTRWQPKVGKLIRH

SEQ ID NO: 415 - protein, 250 aa, Zygotorulaspora florentina
EYQSYFADRNNSPPILLNSEHTRGGKPKAPTKLGEKTTRLVLEMHKTDALILCKNYQNSFIPKLNLHKYTGLNRKLKSSMATMAHCAFHDRVSVELQQFAGARVIEAREEWASKTCPNCRNIKQFISGVPKTYYCSECLFKFDRDFDAVRSIILEYLPSIQSSGGTSSPPTPGPSPCALACIASPSWIISLHRLNIFVDASGSPGALVSVPHNKAAGKSTSPVRHEINSSPAVYALATTTYFPGGTSAGI

SEQ ID NO: 416 - protein, 214 aa, Torulaspora franciscae
SCNASEPLPEELPGDSRLQGTRSNKYYLVVPMAGEEIARKGPAEKFIFIDPGVRTFLTGYDSSQTVVEIGTGAVVRIEKLKRRRRQLQSKLSKLRKHKKRQNHRKALHRLDGRISHIVQDMHKKSAESYENVFIPKLNYHHCTKLTRKSRSSMATPLGGSTRDLQRTNVRRGQDPPLAIKRSHIYLGMMSFAALKSLSKTEAHFMQVYTLAQPR

SEQ ID NO: 417 - protein, 234 aa, Torulaspora franciscae
TGHQIDEGRQPPWTLLPSPAHLPTAFFLRATCRIKVSRQAAYAAHCFLPVELEPPAVKITCGIAVEQHRLDEKISHIVQDMHKKLALFLCKSYHNIFLPNSNYHECSKLTRKSRSSMSTLAHSSSHDRLTMKAEQFDGASVHEVEEDFTSKTCSSCGNLKDDLGSAKVYSCIKCSSVFNRDFNAAMNIMLKYICEHLMASGGSSTSSAPSGGMVDSPRWVPAPSWILPGEGSWS

SEQ ID NO: 418 - protein, 538 aa, Lipomyces mesembrius
LTCCIDKSQAPPCPGAVGVQNTPNTKIVPKPFWNEDSGRISRTLWLPSINLIEREWTGKLVTEGWGTCVRRSVPDQPITDSLLASTAECGMDDKNERAEKRRKTDKDQQKEQAEKARRFRVYPTTEQKAILRNWIGTARWTYNRCLDAVEKKEVAKNKKELRAAFLNKQAIDSMGQPWVLETPYDIRNAAMDDLLKAYDSAHARYQKDKKVFKIMHRSRRKSCQESIVIHHKHWSRASGKYAFLRKMKSTEPLPHDLKYDSRLVYQRTTGHYYLCVPMPLQVLEGPSSGRLISLDPGVRTFLTGYTPDGEVVELGKMDISHIYRLCHWLDELHSKYSAKDISRAKRWRMKKAAGKLRRRIQNLVSDMHCRIAKYLCSTFNLVLLPSFPVQQMVTRKGGPRRITSKTARAMASWSHYRFQQRLLDKVREYTSCKVVLVSEEYTSKTCGRCGKLNDVGCSKKYACKECLFECDRDVNGARNILVRCMTVDRTVDKYLHRNHERVDDPLLLQQPPPLLRAATFVARIEARSFSGFPELHDP

SEQ ID NO: 419 - protein, 275 aa, Lipomyces mesembrius
EYCRPCQALEVPHWKCRTGKYAFLRRIKCQEELPETLAHDSRLVADWRTGQFHLCIPGAVKVVEGPAKVPRVVSLDPGVRTFMTGYTPDGAVFELGKGDIGHIYRMCHRLDALHSRLSRKGLDHRKKYWLTRAAAVIRRRIRNLVDDLHKRAAKYLCSSYNLVVLPTFPTQQMVGKAHRRIGSKTARAMATWSHYRFQKRLLDKARVHPSCRVVLVSEAHTSKTCGACGHLNNVGGRKEFRCAHCGYVCDRDINGARNILVRYCTKLATGESVTD

SEQ ID NO: 420 - protein, 219 aa, Lipomyces mesembrius
IVASMSAQRPPHSRLPKQHRSLSTLIIRANLLELFTSFGHYKDERPLRWKTYCREQKALHRICMRIKGSKRARKEDVVVAYGDGQFGSTMRGKRAAPVKKLRKHLRRYATVVAVDEHRTSRVCSKHNQQQTERTGLADEEDEGGGTPPDVVHIRGQRNADGAKGPSLHPVLYCNKCHTVWNRDVNAARNIAWIFWWMRVHSGQRPPGFRLGRVDVAGCG

SEQ ID NO: 421 - protein, 271 aa, Lipomyces mesembrius
AWVILYQSVSVLTSYVWSMPSFGDDHGRDFSISSASWHDASYHNSARQVSLKLKREALDGGVDVASVATTIPTSKTAQVAQYLDHARVSLAAFPVLFEHYKDERPLRWKTYCREQKALHSICLRVKGNKRAKKEDVVVAHGDGRFGSTMGGKRAAPVKKLRKHLRRYATVVPVDEFRTSRVCSRHNGEHRERTGLGEEEDEGGGARAPLELVHIRAQRDANGAAGASHHSLYCHKCHTVWNRDVNAARNIGWIFWWMRVHGGGRPPRFGIG

SEQ ID NO: 422 - protein, 662 aa, Lipomyces mesembrius
WRRKSGSAQPIGSVRKWLKSFWSVLSPFPSFKVTRAIVGAIYSWLHKSIMREGALDAQPCLAGKSEEEIRTLFFEHVKAKPNERKKGSRSRSHRAVDLFTTDKHRNAWNEIWNEMFTRFARHILTVLIPFESRNAATGGEDDAGEVVDVEDISASKAKGRDFIACRRAEWLFAILKRLEELQKRAKKRFESEEKASCKQQQQQQQQQQQQQQKRKRHAPVLKMHNLFPLTGNVPGHIQCTEQLLLHAYKAYLKEHGTEREKQQQVVLSDWMKLFGPPPEFWKLKQEEGEVSGETTCRVQLRNKFMTDGISVSLTETTAVLKKTRPKLKTKTKFVPIAAKIRMPYVDKEMIEDLMHHHNVRMVLFADPGLGRMVTGKFLPIERIRDAITRQQQAAAAAATQVDGSEYKQVGFRELFDAPDARNLTKGDAKLSWRQQRKQATGIDFRITAKERAYMCKTKKHQQLRQRLQQEDTGRREEEGRREGDGRPCLFGKEPSLKSTSSDAFTEYLDFMCAANRLHDIFSFYRQPVFRHLRMDSYSAQQRWWVYVQDKMYRVLNDHKIRLQIPRYRRPYAYDDPKHLRANQTPLRLVAKGEQPERRQLKMRTNSRPNRYRKYAPPLTLQHHIQMEVQVTAGFSSCLEMVRFVTICVVMCPLRLRSASFKN

SEQ ID NO: 423 - protein, 270 aa, Lipomyces mesembrius
TCVILYQSVSVLTSYVRSMPSFGDDHGRDVSISSASWHDDAYHNSARQVSLNLKREALDGGVDVASVATTIPTSKTAQVAQYLDHARVSLAAFPVLFEHYKDERPLRWKTYCREQKALHSICLRVKGNKRAKKEDVVVAHGDGRFGSTMGGKRAAPVKKLRKHLRRYATVVPVDEFRTSRVCSRHNGEHRERTGLGEEEDEGGGARAPLELVHIRAQRDANGAAGTSLHSVLYCHKCHTVWNRDVNAARNIGGYFGGCGCMVEGDRHGSG

SEQ ID NO: 424 - protein, 528 aa, Lipomyces sp.
RGIFHSRNNILGLRCETAPPDACSVLHNSPSVPASNPRLLQSLLPLSLDKYRRLSLNLLTLASSSSQSTVSFFVFSIFPTMQQAISQTTSTGNGLPSDPNSRKKFWTEVTRGLSQEWPLVSGTSVSGSSRSVESHSWFSIEVHPQTQSRAPNSRKSFLPSLITSEEQQSAAGDKQQEGEKLRVRKICLFPTNSQKETLRQWFGAQRYIYNKCVALVQGGMKPTQKELRAVLLNSKTNQLNDNEKWLEQYEYDLKDEAIRDFMKNYKSNMAKYKKSKKPFTLKSRSKYAPTQSLSVLKKKWNHKLGFYSSIFSPSNMAAAEQLPKRLATDSRLLRTQSGKYFLITPSRARKHNGNGTTPGDFVFIDPGVRTFLTCYDSNENVVEVGKAAVVRVSKLLHRRRKLQSRLVPLRDHKKRQNLRRAYIRLGERINHLVEDMHKKAAAFLCANYDRVFLPKLNYHKCQKLNRKSKACMVTLGHCAFFDRTTMKAELFERTQVVEVEEQWTSKTCSCCGWVNHNLGRSKVFECKT

SEQ ID NO: 425 - protein, 272 aa, Lipomyces sp.
VVSCFQSVSLLTSYVRSMPSFGDDHRREFSISSASWHDAAYHNSARQVSLRLKREALDRGVDIDSTATTLPTSKTAQVARYLDHARASLAAFPVLFEHYKGERPMRWKTYCREQKALHSVCMRIKGNKRAKKEDVVVAYGDGRFGSTMKGKRAVPVKKLRKHLRRYVTVVPVDEFRTIRECSTHNGEHRERTGLAEEKDEGGGTRQTTPDLVRIHAQRDTNGAKGPSLHSVLYCHKCHTVWNRDVNAARNIAWVFWWMRVHGGGRPPGFGRR

SEQ ID NO: 426 - protein, 204 aa, Lipomyces sp.
TVASMSRQWPPHSHDHARASLAAFPVLFEHYKDERPSRWKTYCREQKALHDICMHIKGSKRAKKEHVVVAYGDGRFGSTMHGKRAAPVKKLRKHLRRYATVVPVNEFRTSRTCSAHNEEQRERMGLGEQEDEGGGTSKRAPDLVHIRAQRHANGAAGPSLHAVVYCHKCHTVWNRDVNAARNIGWIFWWMRVHGGERPPGFGRD

SEQ ID NO: 427 - protein, 515 aa, Lipomyces sp.
NAQQFLYVFTSPLIIKISHRCCYCCYYCCFPSYLYRLEQISFNSSLHTMPELTENQLHPQPFWDANSTRISAQLWLPPSSIPADEWKAIGRGWGTCRTWSSDIEVRHELQIPMNVVEDGPAQGLVAEQGEPALKTRKYRLYPTASEKEILVKWIEAARWTFNKCLRAIKDEGAMKSKKALRARAINDDALESLKVTWLKDTPYDIRDAAMDDLLKAIKAGVARYKKDKKVFKIRYRSRRYSFQQSIVIPRKHWQRRSGKYAFLRQMKSAEKLPNEPPHDSRLVRERQTGYFYLCVPRPLEVVDTAGAEDVPQVVSLDPGVRTFLTGYTPSGDILELGKADIGHIYRLCYRLDGLQSRWSEATVRKNKRQMQRAAALIRRRIKSLVDDLHCRTVHYLCSSYNLVILPKFQTQQMVQNGHRKIRTKTARAMLTLRHFCFQQRLLDKAREYPQCRVVLVSEAHTSKTCGRCGRLNDVGGDKVYRCSPCGFVCDRDVNGARTILVRYCTKIARGESVTD

SEQ ID NO: 428 - protein, 511 aa, Lipomyces arxii
PSCYLDKPQAHCPCGAVDDQNTPNTKIVPKPFWNEDSCRISRTLWLPSLNLIEREWNGEIVTEGWGTCVRLSAPDQPITDSLLASAAESGTDDKNERAGKRRKTDKEQAEKARCFRVYPTTEQKAILRNWFGTARWTYNRCLDAVEKNEVAKNKKDLRAAFLNKEAIDGMGKSWVLETPYDIRDAAMEDLLKAYDSAHARYKNDKKVFKIKHRSRRKCCQESIVLHHKHWSRTRGKYAFLHKMKSAEPLPHDLKYDSRLVYQRTTGHYYLCVPMPLQVLEGPSSGRLISLDPGVRTFLTGYTPDGEVVELGKNDIGHIYRLCHWLDELHSKYSAKDITRAKRWRMKKAAGKLRRRIQNVVSDMHCRIAKYLCSTFNLVVLPSFPVQQMVTRKGGQRRIRSKTARAMATWSHYKFQQRLLDKAREYKSCKVVLVSEECGTCGKLNDVRGSKKYACKECRFECDRDVNGARNILVRWMTVDRTVDKYLHRNVDRVDGPYCNPPALESRHTFTW

SEQ ID NO: 429 - protein, 225 aa, Lipomyces arxii
HRTSKCCSSCGEEMEKAVLAKRPQETRQAQSKGCLKRAVRKATLAARFEAKHGLPDPPPAAAPPPPRADATLPVVRDDGRRRQPPRVDGDAYVARTRFRRGDAFPSPSDAGEYDRSQLLTPSGLKYCSNCNRLWCRDKNATHNFFSRMVFLLAQSTGVVAHAVAESRQDGPGYLCRQVRQEQDDVPAPKSKRVAKRKRDDRAVDVTTLAGKRQQVMHTQAANECV

SEQ ID NO: 430 - protein, 280 aa, Lipomyces arxii
CGGPTVSLCHTLAVCFCSDMVCVRTMPTFGNDRRCDFSVSSASWHDSAYHNCARKMSLSLKRQALDRGIDVHSMATTIPTFKTAQAAQYLHHARVSLSAFPILFEHYKKERPLRWKTYCREQKALHSICLRVKGHKKAKKEDVVVAYGAGQFGSTMKGKRAAPVKKLRKFLQRYVTVVPVDEYRTSRVCSKHNEEHRERTGLGEEEDEGGGTISVAEADLIHIRAQRNANGDKGPSLHPVLFCNKCHTVWNRDVNAARNIAWIFWWLRVHNGGRPPWFRR

SEQ ID NO: 431 - protein, 1113 aa, Brevipalpus yothersi
LFTIISLVLTINMSDNSPSKKKVKIIDSNELNARSNVPVSHSSNTSNLSSRTSFHPDVCSWLCPEVFYFFQPTNYTNGNDSNLPPSSSSSSFGNNTVPALEPIHHDYSGLEIHPPYSSSPETNFVTCPCNSNSLQTSTQSARRTDTSRTNNLAPQVENNNHQILPTKRTKSSSGPNKRQRIHRTIAQSVNFDQTIENAPRNDTFGTNYGHNCEQSTSTIIHEPNLGLITDSDGGARISNNIRNPPSSSDKKNKESPTSTSSLSPSSSSSLSTPISSEGKVSTKQDGGERPKRQRKSNKKQSSSCPTSSSPTTPKRNGGKGCGKGEKVDKKDDNKNKKNTEPEEKDILLYDTITCSIKQFIKKSKISKQMFKKMNEQCLILSDLFVEAARYFQYWLEKRLDPPANCTPEQRANHDPWTSYFSRTDELDAAIIEQNDRINFDYMFNSLTDPKLRRKLEFKLDEDYKQLRTSHNIPLYTILENKLSQQLLYIIDLFAQNFDNNLTLHMKRRVMKVLTFENEKQKMGISRKDIGKTVTYLFSEANDDAEGSNQFTPNESLVNFFTREFKLTDERLQQLKNFEENRFKFVPLLYLIRQYYIKNNVKHPPAISPQASYGRKHLRYDRRSFLELIQPLIPNKEKRPKCITKVHVKEAKPFWNKFTNFDKFETKKRKFNYSFTTDGVKCCLSMVQWQVRKDGSVPDEPPNDPKEKRQTKKSSTLPIWRKFRPGSSGGGGDDGIVGDKIPIDGFSHIVGLDPGMKISFGGSCWSKRFVPNEHEPDGPNKIAERETPIKISSAAYHQKCRVNFNLAKNRRMKNVKNEPKRKLYEETKELYDRTQYDKPDKSDSIEDFLTHFRELQEFHSRRVFAKQKFTRYIVRTRSINWMCKELVDKEIFGKNVNNTIPEEKWKALIFIGGCNNFYSGMKGYRGVPLNDIVDRLKRNWSNKCVVIDNVDEYNTSKKCSQCWKDVKMPPPKRWSQEDEKEVAKKIPKRKRKRRRIKKKRKKRVEEPPDQPAQPAQPVQLAQPAGNSKRRQRLRGHRYVVCQNKECPRYHCATWNRDVNAGRNIATCGLAEYRGEERPEPFRRDGRSKPHNEVPSNAVNDMVPARSPWISHVLP

SEQ ID NO: 432 - protein, 254 aa, Pseudoperonospora humuli
EEEEGSFGLDMRTSATPKRCNKCDIVQVTSKEYRQMAGLKRFTAYNEGLKKLHHKYKKIFAEMPLIATQSTAVLLEQYRVPATIQRIAVASRVEAFWKRMARMAVDAIAKFAASTVRQGDVRSARDWSKCNGIKGHAPSPVKRLKQALHKLCDGGLNGRVHDEQAVTGYCRLFDALPLRTTRSFQKRGRTRAVDPQQKLKQCFGVLRGECAKSSTKYWDRDVKAAINMLPLLKSDLDDEGCIQTFRRAEKRVEA

SEQ ID NO: 433 - protein, 306 aa, Acaulopage tetraceros
FAHYVSTDGVRLSVHMEKPFTPPAVPLDDWGYDAQGQYHQVNTQGMIVGGSDPGRITFHTTTKALMGVEPMQGNIKSCENVHLRELNFATKHTVKKNGWTDREDDGHFREMLTAMPTPCCYTSEAYNQHLNHFLHLRDYFIDFYAEMRWRRYRFKARIRRQQAYHIICKQIIGDDPANTIVAYGGGRFDHASRGNPPTPNKHLFKELKRRCTTILVNEHLTSQICSRCHGVEPLPPGVAGPLPQPQRLLDTRYWQLKQCNTIGCMRLWNRDVNAARNIRHVFLYANEHNGEHPPGFRRVAQAPQGQ

SEQ ID NO: 434 - protein, 776 aa, Nannochloris sp. RS
LIIMGKKKRKRTSKGLFQSKKFKRVDVAKKKSDDRFYSTHTIKCTLGRFCKYKTIQKEIEQCTYWLSRLQIHSHHVMSLWLMRNQGRIPLGDKKEHKSKSLQGFYNKIMRHLANHLQGRKERKDVDAQIRDLCGEYCDKVGLEANWPSGISMGWKSKVIEQLARQSATIHSTHLETNLDIFAVRYLRFLIRSDPEFSAICDLSKKAHGKVFSAICDAFWERKKVTVVAKRRPTTLEMFPIKHDIWKTAQQLVTRLMTLVPKQTSLSKKSEIMYQILTELEPFAADLQQKWLNGEVGKRTFGKSKWTFDLCPQLEWRPKHIQISTTALSKLIKDLAKTHTHFKTIMSGLSEVDDDDICSYEKKYQVWNSIFNLKRVLRGKHLTDHRKLRFGCFMSTDGVSAAAAIQQRKSKDICKAINIGDEIQFIKAKVSLLFCGQWAINCLARAPPKGLIKPMNIREFQIPSHLFVFFYPWLKTLEAKKEKLLKDIKTRNDQTLIHKSVKDIVSKDEDGVYYCDTTVIGLDPGKKSAATWVYHNPKHQRKHQKWKGDEGEHSLVEERYKNGSLGGGEWRFLSGQKQYTSKMNKRMTSFCPQWRNLSSTKTVDSAKLLKAYQEQMALWDKLEKAFFNKDKWYQKERMRKFCRHQKAMEDVVARIAGTKNKEEQKKVVVAYGDGDKNGTLRGTAPIMSSKLFKKVSQSCCVVVINEHKTSKLCSCCHEEMKQFQKQFRMKRCINSECIRSVWDRDINASVNILNLFLELCHSADEDGKGQRLEAFRR

SEQ ID NO: 435 - protein, 238 aa, Haematococcus sp.
TSQESFSSSNYYEKSKVKYSQRLTNRWNIMTKELTDKIQKDGAKTASTDKLLVWLKSYLASLSTLLYHRMKKGYRKMRFLRYTMKQRYVQEVVNVIAPNDQHVVVGFGDWSGGSQSPISRKHCGPIEEIKKELRRRKNVWMRMVDEHGTSKTDSNTLQPLKNMKAFTTVVRIVQGKKERKTFRNSKVHKVLHCQNNGSEQVVARPQTTWNRDVNASRNILKLLQLEVAGLPRPTPFCR

SEQ ID NO: 436 - protein, 273 aa, Chloroidium sp.
LTSPVQENLLFKCAWKLAAHPGQLEWFQRFCALDASFHQKTKRTVHKIQTSTLLCRCKELIKKLRQKARVVLVDEDNTSRRCSSAFDSTDYAGCDQPLQRFSYSWLPHGHADRKTERPYPLKVCQHCSVVSSPACSGSAKSFDLMLLFYLIVRAPGRKSPATAFPQHSALGDLSPGRAKFPPPKEDCSAHHRWGIASEVGPPLSFSHQKSTSARKFSGCALQVWNRETNAARNMLRCVLAKAERKPRPAVLQEAWAAACRSALAEEMAELEGD

SEQ ID NO: 437 - protein, 697 aa, Chloroidium sp.
SGVILECTVFRSVKNTSAFKSQNFVIQQLYVMLCTLNHPAKPPARIKQTPEEVIEDRCLAGARILFGGPMRLEAVNRNEQKKVMDITVVKTTWNRFCRDEGRALAVESVLKDMNRTVCEAYLLANLHVIRICKANKPLPAIDQSFFYNCLKGVSVGNRQKSDIKDPDLKDTADLYASLRPAGYQAPRSDHLAAGLHQNASQQMAINAKNYISMTFYKRLTRYLRHRYQLDGREAYKKIDDIYALQYDGDDAIVKKYRTKIPRRPTVGNLEGTPELYLPMLFEILKYCEKHNPFENGDGQYDSRVKQVRLFTLLPTKQGFECSNVKICGTGLFNILKRQGLEWTEDEFDDAKEEWWRALFRISDFETRNRKFANEILTDGVSVSIVMRRLKPEDQVQREAEIARKRKEDRENPVKKKRGRKKDQPTKKRDHDHDIDLDSYEQVLGLDPGRSFMFVTADGQGKHMQCSTKEFYHDAKYTEGNRKVRKWIDRDSRVSDAICNMPSPKTAEQAKLQAYIEYLLPRLDNLLTFFQQKKFRSQKFKRYIYSKRKLRELGLKLTAGKKTLVGFGDWSNNDTAGVIKRCPAGPVKRFEKELKKFCRVIPIDEYCTSKKCNRCRSEQYNEKKIVNGKDGRTYQVKVHSVLHCHNNGCKGMTVNRDENASKNIRDLLVIAARKESRPACFCRSARSNDPIITVPVCA

SEQ ID NO: 438 - protein, 407 aa, Chloromonas sp.
EGVVGPVLEVVLRVHGPELTQCWSGRKRPDRSTRSTRPPGADGNQTFSDCATGCYRPGKEPRSSSKHVLQCLCNWVSLLDYYEASYFAGQYMTVKDWLSRVPSARDGTVVSKLEQIRNLSNAMYVDIPVVYPAMGDHPTCSIPRRGILGYYLHSSYRQRRLGVYERAMEGTARTLTRGAPRQNTLVFYGNKSCGAGGCISRWLGGAPHKAFRQVLNRHAMVVAVEEHLTSQFCSGCVGASIADQLRAAGMAPQPERRRAATLPPPRGLRQIRQCKAHKVKGGEVRREQHALQGHEVPFVRHGVAAGCQCSAEHNARGLVDPQGAAGVCRSADNDTTVMTLLQPTETVGCWYRVPCDCGQGRLKFLTSCQFVSIEPESQNISHALGQRAANMQVAVKYKFRPGEVCEY

SEQ ID NO: 439 - protein, 268 aa, Chloromonas sp.
GTRSVGPATQTQHGSQHEGMGVHHPLVTLPQRATQVWSIRRMMAYVRYVAWALGRNGILDQYHEPPREWRTGDALNKPHSAAGPAQQTCPASSKRGYRHRRLRVNIQRDRELDAIVNHVTRDCGGQRQDTVCYWGNWHGTVGGPISRQMGGPPVQQLKRRMDCRVLTIETDEHKTSTYCARCIDAYALLAGVPRLPASTRKGAAPAVPQPSNPPQQLLKLRTCNQRLEKCSHCKVVMHHDAVGSANIHHVGRCQARDKPRPVPLQRTS

SEQ ID NO: 440 - protein, 324 aa, Chloromonas sp.
LSERTRPSRGRSAHQEARYWEYGSWAFWKFFMPAVRAASLGHVHHRMVFFSQSLDSYLLFGSTVSSVDMEREDLLMCLLRLPGGCKHFFPFVSVFLLRLLLTGDRGCRKRPFARFAQVKELLSSMPPVRDFGVASKLVRSRYISDALYVSRPVAFGAFAGRSIMVSGILGYYISSNYRQRTLGVYEQRQRAMEGLAHSLTRGAPRESTLIFYGNKSCGGGGCITSWMGGGPHKAFRQVLNRHAMVVTVDEHLTSQFCSGCVGASIAGDLQAAGLQPQPERRRQTATAPPHRGHQIVQQRNEDKLSGLTKFGGRIVKASYKVRAC

SEQ ID NO: 441 - protein, 655 aa, Chlamydomonas sp.
RTTAEAPTMEPGSSTDLAALKKRKRPDVGQKFKQRKEFKETVVKCSLRSGLIGSGEQKDKFVKAIEARVVALSHRVVLGTRALGLLVRRIFDGVQDLQRFELDIDITDQTFLRQLLLGTSGCHKANPRITNLFQAHPELLYDVQNRHASDRNVYSDAARALSVNISNHFKVNLVKVVKKAVYQCAPGTRDEHVEILFRICGWNRKPSEPSKQPSKKPKMTPQAVSLTVEQLAFVETCRGVLGLADGKQIDGRWLKLKTNLPNMLKFFMHTLRLLEALPNAKLINILPLCCRKCHFITIDTSSLHGIARDADLISQGCTMDAFCEFGTSQWDSMLMTDKFQPHGGYFTGTVDTDGVSICIHYKRPCKESSTSPSDKRSVQRPTQEELQAHRVIGIDPGRTNILFAAEVSPSGSVKTWRLTRSQYYREAGIVAAKLQTERWHAQSIRKELQVMSTVTSKGSTVEHFLAFLTVDLAMGVAIWTEHLKRRWAQQRFRLHGGKKRVVDRFFNQIEKAGASVGDDRPIMMAYGASKVAPGGKGEVSVPTSRVFRECSRRYPTHLVDEFRTTRVYHADDSVILEKVAVKKVMGSGALETVAVRGLLWCCSTKQSGGKFINRDLNGALNILRCLMLPQRPVIMDRGKCRGERLNDRIGKFLTK

SEQ ID NO: 442 - protein, 372 aa, Phocoena phocoena
KVKVVKVVKINKAYKFRIYPNENQIEIIEKSFGCSRFIYNHFLNQRNEIYKNEKKCMKYTEQQNQLPSMKKEFIWLKEVDSTSLQMSLRNLDTAFKNFFQGRTDKPKFKSKRDNYKSYTSNYVNNNIDIKKHKIKLPKLKWIKAKVHRYVEGRIINTVVSKTPSGKYFVSICVETEVESLEKATQNIGIDLGLSHFAIFSNGKKIENPKYLKKSLERLVKEQKKLSSKQKGSNTFHKQRIKIAKMHEKITNQRLDFIHKLSKRIISENQVIVLEDLAVKDMMKNDRLAQSIFDVSWYKFVTMLQYKAKWCGRKLYKIDRWYPSSKTCSECGYIMENMPLQIRKWECPKCGSIHDRDINASKNILKQGLLGIA

SEQ ID NO: 443 - protein, 456 aa, Nannochloropsis oceanica
RKPFLSLGESDRLRTQPSHVVSMLPYYEIVHPSHARKFDWFKVIACVPQKRTEAHKVPKASQKRCNFPIHSLKFCQDAVSVKEMWDETFQVGNLRNQRVFHNRVSTDGVSVSVFFHVAKERLKREKAERVRVEKEDEEKEMLERQQGQENLQPVRERRIVAIDPGRVNLVTALDSQTGKIKTLTCRAYYEKGRINECKRKFNSWEDALGDINAAFSRTTMKSCCPDLRSAYRELIVRHYHRLWDARCEKKRARAHMAVYAGKQKVLDVFFAGLTGPGQAKPIIAYGAGIFPHTGKGEVSVPVKRVLRVCERYYRTVYVPEHLTTKVHLDCGQRLNPIARRTEGEGGEGGGGGEGGGGGGGGEGGGGGEGGGGGGGGGGGGGGGGEGGGGRGPGRGGGHGRAIRGLYWCNTCEQFVSRDGNGARNILRVYRRMVRGEARPHDLRFGQPRQDMRTLYV

SEQ ID NO: 444 - protein, 275 aa, Nannochloropsis oceanica
NQSIGWGRYKRHYVDVLRAGFGQKPRCIRCGINWRASPDFTNPYFGWRYSAGVLEKTRARAHMAVYAGKQKVLDGFSAGSTRPGQAKPIIAYGARVFPHTGKGEVSVPVKRVHRVCEKHYRTVYVPEHLTTKVHLDCGQRLNPIARGAGGEQGKGKEEEGKEEDEVDEEEEEEEEEAAEEEEKEEKDEEMEGEKDSKVRKLEEKRKWEGGICGSQCNISTSTNTSSRRRGRKKREKNLGCRSSSSRPDAADHTGGSRRGTSPGSCRRRRRRRGKG

SEQ ID NO: 445 - protein, 887 aa, Nannochloropsis oceanica
GTGGSSEAGSKLCHRLLHSWVGGSTRPSVERGIPRGHRGGVQDKFTNYPIIHRSPGDYQCITMAAQLYVTNIAASTWTSFVGRQLDYMRFWLREHGFESPYVSAKRVQCLINGWIGPRTDIQAGAGGGGGGGGGGGGGGGRGGMAGGGGAGGGGPMGQIPDDVQAFINKKRRLLRLEGSARLVVNEKTPVEGLLLPYLYHILYQYHQKHLAVRAVQEGTRDNPGLQAEHGGNPGYRAFTIAPICSIKRHFMTLDTRALGDLLKNVVRRRPTAMTKEAWSEACPDWLKRLGGMGTKKFCQDAVSVKEMWDETFQVGNLRNQRVFHNRVSTDGVSVSVFFHVAKERLKREKAERVRVEKEDEEKEMLERQQGQENLQPVRERRIVAIDPGRVNLVTALDSQTGKIKTLTRRAYYEKGRINECKRKFSSWEDALGDINAAFSRTTMKSCCPDLRGAHRELIVRHYHRLWDARCEKKRARAHMAVCAGKQKVLDVFFAGLTGPGQAKPIIAYGAGIFPHTGKGEVSVPVKRVLRVCERYYRTVYVPEHLTTKVHLDCGQRLNPIARRTEGEGGGEGGGGGEGGGGGGGGGGGGGGGEGGGGGGEGGGGGGGGGGGREGGGKGGGRGGGGRRRTRAAEAAAAAQRRLTIQMALAEARARAAAGGGRGGGRDSRIDTGRDPGRVGVGGVGAAGAATGGGGERMRGIPTILSLPGEQAARALATIGRIRAALAGGMKKGKRKIVRARRRGGRGGGEGGGGGGGGGGREGGEGGGGGGEGGGGGGGGGGGGGGGGGEGGRGGGRGGGGGREGGRGGGRGGGGGGGGGGGGGEGGRGGGRGGGGGREGGRGGGRGGGGGREGGRGGGGGGGGGGCGGGGGGGGGGGGGGGGGGGGG

SEQ ID NO: 446 - protein, 241 aa, Nannochloropsis oceanica
QSLTAPCLKSPDRHDTSMTVHFIVTKKGKDRQQKRFVRSRKSRSRTEAHALSRSIQVMSLDQRIDPPILRVISSRRRYDSVRLRVQCRNKFDTTWIDRDNSWAFVRLRLFRAMAEFTFLEKVSQQAVSLLMLSIPPSSRYFPRVKVVTFLGLRVNCRLMLTPIIAYGAASFHHTGRGESNVPVKRVYGACHKHYKIMLVNEHLTTKVHHVCGQRLNPIASRAAGGAQEEGAAIRHTTSCGE

SEQ ID NO: 447 - protein, 707 aa, Nannochloropsis oceanica
WGFLSGLQAEHGGNPGYRAFTIAPICSIERHFMTLDTRALGDLLKNVVRRRPTAMTEEAWSEACPDWLKRLGGMDTKKFCQDAVSVKEMWDETFQVGNLRNQRVFHNRVSTDGVSVSVFFHVAKERLKREKAERVRVEKEDEEKEMLERQQGQENLQPVRERRIVAIDPGRVNLVTALDSQTGKIKTLTRRAYYEKGRINECKRKFSSWEDALGDINAAFSRTTMKSCCPDLRGAHRELIVRHYHRLWDARCEKKRARAHMAVYAGKQKVLDVFYAGLTGPGQAKPIIAYGAGIFPHTGKGEVSVPVERVLRVCERYYRTVYVPEHLTTKVHLDCGQRLNPIARRTEGEGGEGGGGGEGGGGGGGGEGGGGREGGGGEGGGGGGEGGGRGGGGEGGGGGGGEGGGRGGGGEGGGGGGGEGGGGGGGGGGGKGGGGGGGEGGGGGGGEGGEGGGGEGGGGGGGRGGGRRGGGGRGGGGRRGKRTRAAEAAAAAQRRLTIQVARAEARARAAAGRGGGGGRDSRMDTGGDPGRVGVGGVGAAGAATGGGGEGMRGIPTILSLPGEQAARALATIGRIRAALAGGMEKGKRKIVRARRRGGRGGGEGGGGGGGGRRRRWWRRRRRGRRRWWRRRRRWWRRRRRRRRRRRRWWRRRWRRRRRRRGRRRRRRGQRSRRRRRRTRRRRRRRRRRRRRRRRRRHRRRRGWRRRN

SEQ ID NO: 448 - protein, 662 aa, Schizochytrium sp.
VRKWGGQGTAKLQTLQVEQTSNTNQQSSFTGSLGSQQAPFGAGPMADACAARASPEASASTPATMLSASLIAVPPAASNAALDVPLSTPECPRPSKRRTSNARLAISSAPTQMLPPSTKTSVAGSISNAKACAPYWTPVTAAESAKLWSCTATDLRESQSTSWNTFSKDKMSNSWYTAKMHMPETQTPSPKTSSESSPSLWHRITENEQRKIDGDDAARKKRARTKARKTIKKEYNLVRTRKVRVYPTKDQRTQLLKWFGVTRRAYNIGVAFHRDMAKGEKEAIKLHQEACIKKDRKTKQVLVDEDGNPQTYGALYGEKKAVRSKEKHDAPEWVLEVPQAIRDSGILDFFKALNSGRAKNEELAVQKKVHEQSFYKFRTKRDESQIFEVNARIWNTEKSKTTNFLKEFRTRKEKFPSQIKNAMRVQMNRLGHVYFCFLREEKKRPMDQAPKAHHSAIALDPGVRSFQTMYDADGRAIEWGTGKDFRTIFYLCRRVDKIQSRIDKAQENKKKTAYDFNTPLKRAFYRAQLKIKNKITEIHRKLALWLCENYRVILLPKFETSKMSRRMERRISKKSVRMMCRWSHFGFRQALIHKAEMFPWCKLVLCQESYTSKTCNECGTLHHKLGASKVFQCPNLKCNHVADRDVHAARGILLRYLSKDMI

SEQ ID NO: 449 - protein, 653 aa, Schizochytrium sp.
VIDKKWRLGKKMGSRGTVKLQTLQVEQTSNTNQQSSFTGSLGSQQAPFGAGPMADACAARASPEESASTPATMLSASLIAVPPAASNATLDVPLSTPECPRPSKRRTSNARLAISSAPTQMLPPSTKTSVVGSISNAKACAPYWTPATAEESAKLWLCTATDLRESQSTSWNTFSKEKMSNSWYTAKMHMPETQTPSPKTSSELSLSLWHRITENEQRKIDGDDAARKKRTRTKARKTTKKEYDLVRARKVRVYPTKDQRTQLLKWFGVTRRAYNTGVAFHRDVAKGEEEAIKLHQEACIKKDSKTKQVLVDEDGNPQTYGALYGEKKAVRSKERNGAPEWVLEVPQAIRDSGILDFFKAINSGRAKNEELAVQKKVHEQSFYKFRTKRDESQIFEVNARTWNLKKSKTSDFLKKFRTRKEKFPDQISNAMRVQMNRLGHVYFCFLREEKKRPMDQAPKAYHGVIALDPGVRSFQTMYDADGRAIEWGTGKDFRTIFYLCRRVDKIQSRIDKAQENNKKTASSDKDNFNTPLKRAFYRAQLKIKNKTTEIHRKLALWLCENYRVILLPKFETSKMSRKMERRISKKSVRMMCRWCHFGFRQALVHKAEMFPWCKLVFFAKRVTLQKHAMSAVPSTINSAHPRFSNALIPSATM

SEQ ID NO: 450 - protein, 682 aa, Schizochytrium sp.
VRKWGGRGTVKLQTLQVEQTSNTNQQSSFTGSLGSQQAPFGAGPMADACAARASPEESASTPATMLSASLISVPPAASNATLDVPLSTPECPRPSKRRTSNARLAISSAPTQMLPPSTKTSVVGSISNAKACAPYWTPATAEESAKLWSCTATDLRESQSTSWNTFSKEKMSNSWYTAKMHMPETQTPSPKTSSELSPSLWHRITENEQRKIDGDDAARKKRTRTKARKTTKKEYDLVRARKVRVYPTKDQCTQLLKWFGVTRRACNTGVAFHRDVAKGEEEAIKLHQEACIKKDSKTKQVLVDEDGNPKTHGALYGEKKAVRSKERNGAPEWVLEVPQAIRDSGILDFFKAINSGRAKNEELAVQKKVHEQSFYKFRTKRDESQIFEVNARTWNLKKSKTSGFLKKIRTRKEKLPDQISNAMRVQMNRLGHVYFCFLREEKKRPMDQAPKAHHGVIALDPGVRSFQTMYDADGRAIEWGTGKDFRTIFYLCRRVDKIQSRIDKAQENNKKTASSDKDNFNTPLKRAFYRAQLKIKNKTTEIHRKLALWLCENYRVILLPKFETSKMSRKMERRISKKSVRMMCRWCHFGFRQALVHKAEMFPWCKLVLCQESYTSKTCNECGTLHHKLGASKVFQCPNPKCNHVADRDVHAARGILLRYLSKDMILKKNHFIESRVSLTSS

SEQ ID NO: 451 - protein, 665 aa, Schizochytrium sp.
NPNNSYIILFLFLLSSSSLSDYLSTLHSSGYSAIGSLGSQQAPFGAGPTADACASRASPEASASMPATMLSASLIAVPPAASNAALDVPLSTPECPRSSKRRTSNARLAISSAPTQMLPPSTKTSVAGSISNAKVCAPYWTPVTAAESAKLWSCTATDLRESQSTSWNTFSKDKMSNSWYTAKMHMPETQTPSPKTSSESSPSLWHRITENEQRKIDGDDAARKKRARTKARKTIKKEYNLVRARKVRVYPNKDQRTQLLKWFGVTRRAYNIGVAFHRDMAKGEKEAIKLHQEACIKKDRKTKQDLVDEDGNPQTHSALYGEKKVVRSKESNGAPKWVREVPQAIRDSGILDFFKAINSGRAKNEELAVQKKVHEQSFYKFRTKRDESQIFEVNARTWNAKKSKTSNFLKEFRTRKEEFPDQISNAMRVQMNRLGHVYFCFLREEKKRPMDQAPKAHHGVIALDPGVRSFQTMYDADGRAIEWGTGKDFRTIFYLCRRVDKIQSSIDKKKTASSDKDNFNTPLKRAFYRAQLKIKNKITEIHRKLALWLCENYRVILLPKFETSKMSRRMERRISKKSIRMMCRWSHFGFRQALIHKAEMFPWCKLVLCQESYTSKTCNECGTLHHNLGASKIFQCPNPKCNHVADRDVHAARGILLRYLSKDMI

SEQ ID NO: 452 - protein, 254 aa, Schizochytrium sp.
STRLEQKDLKNCSFLEKLPYTQEKFPDQVSNAMRVQMNRLGHVYFCFLHEEEMCPMDQAPTAHHSVIALNPDVRSFRTIYDADGRAIDWGTGKDFRTIFYLCRRTDKIQNRIDKAQENKKATSEGNDNFNTPLKRAFYRAQLKIKNKITEIHPKLALWLCENYRVILLPEYETSKMSKKMERRISKRSVRMMCRWRHFSFRQALIFLKAKLFPWCKLALCQESYTSKTCNEWGTLHHKSVHPRFSNALISSATT

SEQ ID NO: 453 - protein, 632 aa, Schizochytrium sp.
NPNNSYIILFLFLLSSSSLSDYLSTLHSSGYSAIGSLGSQQAPFGAGPTADACASRASPEASASMPATMLSASLIAVPPAASNAALDVPLSTPECPRSSKRRTSNARLAISSAPTQMLPPSTKTSVAGSISNAKVCAPYWTPVTAAESAKLWSCTATDLRESQSTSWNTFSKDKMSNSWYTAKMHMPETQTPSPKTSSESSPSLWHRITENEQRKIDGDDAARKKRARTKARKTIKKEYNLVRTRKVRVYPTKDQRTQLLKWFGVTRRAYNIGVAFHRDMAKGEEEAIRLHQEACIKKDRKTKQVLVDEDGNPKTHGALGGELKAVRYKEKNAAPKWVLEVPQAIRDSGILDFFKAINSGRAKNEELAVQKKVHEQSFYKFRTKRDESQIFEVNARTWNAKKSKTSNFLKEFRIRKEKFPDQISNAMRVQMNRLGHVYFCFLREEKKRPMDQAPKAHHGVIALDPGVRSFQTMYDADGRAIEWGTGKDFRTIFYLCRRVDKIQSSIDKKKTASSDKDNFNTPLKRAFYRAQLKIKNKITEIHRKLALWLCENYRVILLPKFETSKMSRRMERRISKKSIRMMCRWSHFGFRQALIHKAEMFPWCKLVLCQESYTSKTCNECGRNKDSVRLVY

SEQ ID NO: 454 - protein, 661 aa, Schizochytrium sp.
IRKWGGRGTDKLQTLQVEQTSNTNQQSSFTGSLGSQQAPFGAGPTADACASRASPEASASMPATMLSASLIAVPPAASNAALDVPLSTPECPRSSKRRTSNARLAISSASTQMLPPSTKTSVAGSISNAKVCAPYWTPVTAAESAKLWSCTATDLRESQSTSWNTFSKEKMSNSWYTAKMHMPETQTPSPKTSSESSPSLWHRITENEQRKIDGDDAARKKRARTKARKTIKKEYNLVRARKVRVYPTKDQRTQLLKWFGVTRRAYNIGVAFHRDMAKGEEEAIKLHQEACIKKDPKTKQDLVDEDGNPQTYGALYGEKKAVRSKERNGAPEWVLEVPQAIRDSGILDFFKAINSGRAKNEELAVQKKVHERSFYKFRSKRDESQIFEVNARTWNAKKSKTSDFLKKFRTRKEKFPDQISNAMRVQMNRLGHVYFCFLREEKKRPMDQAPKAHHGVIALDPGVRSFQTMYDADGRAIEWGTGKDFRTIFYLCRRVDKIQSSIDKKKTASSDKDNFNTPLKRAFYRAQLKIKNKITEIHRKLALWLCENYRVILLPKFETSKMSRRMERRISKKSVRMMCRWSHFGFRQALIHKAEMFPWCKLVLCQESYTSKTCNECGTLHHNLGASKIFQCPNPKCNHVADRDVHAARGILLRYLSKDMI

SEQ ID NO: 455 - protein, 286 aa, Schizochytrium sp.
KFRTKRDESQIFEVNARTWNAKKSKTSNFLKEFRIRKEKFPDQISNAMRVQMNRLGHVYFCFLREEKKRPMDQAPKAHHGVIALDPGVRSFQTMYDADGRAIEWGTGKDFRTIFYLCRRVDKIQSSIDKKKTASSDKDNFNTPLKRAFYRAQLKIKNKITEIHRKLALWLCENYRVILLPKFETSKMSRRMERRISKKSVRMMCRWSHFGFRQALIHKAEMFPWCKLVLCQESYTSKTCNECGTLHHNLGASKIFQCPNPKCNHVADRDVHAARGILLRYLSKDMI

SEQ ID NO: 456 - protein, 662 aa, Schizochytrium sp.
VRKWGGQGTAKLQTLQVEQTSNTNQQSSFTGSLGSQQAPFGAGPMADACAARASPEASASTPATMLSASLIAVPPAASNAALDVPLSTPECPRPSKRRTSNARLAISSAPTQMLPPSTKTSVAGSISNAKACAPYWTPVTAAESAKLWSCTATDLRESQSTSWNTFSKEKMSKSWYTAKMHMPETQTPSPKTSSESSPSLWHRITENEQRKIDGDDAARKKRARTKARKTIKKEYDLVRAKKVRVYPTKDQRTQLLKWFGVTRRAYNTGVAFHRDVAKGDEEAIKLHQEACIKKDSKTKQVLVDEDGNPQTYGALYGEKKAVRSKERHDAPEWVLEVPQAIRDSGILDFFKALNSGRAKNEELAVQKKVHEQSFYKFRTKRDESQIFEVNARIWNTEKSKTTSFLKEFRTRKEKFPSQIKNAMRVQMNRLGHVYFCFLREEEKRPMDQAPKAHHSVIALDPGVRSFQTMYDADGRAIEWGTGKDFRTIFYLCRRVDKIQSRIDKAQENKKKTAYDFNTPLKRAFYRAQLKIKNKITEIHRKLALWLCENYRVILLPKFETSKMSRRMERRISKKSVRMMCRWSHFGFRQALIHKAEMFPWCKLVLCQESYTSKTCNECGTLHHKLGASKVFQCPNLKCNHVADRDVHAARGILLRYLSKDMI

SEQ ID NO: 457 - protein, 662 aa, Schizochytrium sp.
VRKWGGQGTAKLQTLQVEQTSNTNQQSSFTGSLGSQQAPFGAGPMADACAARASPEASASTPATMLSASLIAVPPAASNAALDVPLSTPECPRPSKRRTSNARLAISSAPTQMLPPSTKTSVAGSISNAKACAPYWTPVTAAESAKLWSCTATDLRESQSTSWNTFSKEKMSNSWYTAKMHMPETQTPSPKTSSESSPSLWHRITENEQRKIDGDDAARKKRARTKARKTIKKEYDLVRAKKVRVYPTKDQRTQLLKWFGVTRRAYNTGVAFHRDVAKGEEEAIKLHQEACIKKDSKTKQVLVDEDGNPQTYGALYGEKKAVRSKERHDAPEWVLEVPQAIRDSGILDFFKALNSGRAKNEELAVQKKVHEQSFYKFRTKRDESQIFEVNARIWNTEKSKTTSFLKEFRTRKEKFPSQIKNAMRVQMNRLGHVYFCFLREEEKRPMDQAPKAHHSVIALDPGVRSFQTMYDADGRAIEWGTGKDFRTIFYLCRRVDKIQSRIDKAQENKKKTAYDFNTPLKRAFYRAQLKIKNKITEIHRKLALWLCENYRVILLPKFETSKMSRRMERRISKKSVRMMCRWSHFGFRQALIHKAEMFPWCKLVLCQESYTSKTCNECGTLHHKLGASKVFQCPNLKCNHVADRDVHAARGILLRYLSKDMI

SEQ ID NO: 458 - protein, 665 aa, Schizochytrium sp.
NPNNSYIILFLFLLSSSSLSDYLSTLHSSGYSAIGSLGSQQAPFGAGPTADACASRASPEASASMPATMLSASLIAVPPAASNAALDVPLSTPECPRSSKRRTSNARLAISSAPTQMLPPSTKTSVAGSISNAKVCAPYWTPVTAAESAKLWSCTATDLRESQSTSWNTFSKDKMSNSWYTAKMHMPETQTPSPKTSSESSPSLWHRITENEQRKIDGDDAARKKRARTKARKTIKKEYNLVRARKVRVYPTKDQRTQLLKWFGVTRRAYNIGVAFHRDMAKGEKEAIKLHQEMCIIKDPKTKQVLVDEDGNPKTHGALGGELKAVRYKEKNPTLTWVLDVPQAIRDSGIRDFFKALNSGRAKNEELAAQKKVHEQSFYKFRTKRDESQIFEVNARTWNAKKSKTSNFLKEFRMRKEKFPDQISNAMRVQMNRLGHVYFCFLREEKKRPMDQAPKAHHGVIALDPGVRSFQTMYDADGRAIEWGTGKDFRTIFYLCRRVDKIQSSIDKKKTASSDKDNFNTPLKRAFYRAQLKIKNKITEIHRKLALWLCENYRVILLPKFETSKMSRRMERRISKKSVRMMCRWSHFGFRQALIHKAEMFPWCKLVLCQESYTSKTCNECGTLHHNLGASKIFQCPNPKCNHVADRDVHAARGILLRYLSKDMI

SEQ ID NO: 459 - protein, 661 aa, Schizochytrium sp.
VRKWGGRGTDKLQTLQVEQTSNTNQQSSFTGSLGSQQAPFGAGPTADACASRASPEASASMPATMLSASLIAVPPAASNAALDVPLSTPECPRSSKRRTSNARLAISSAPTQMLPPSTKTSVAGSISNAKVCAPYWTPVTAAESAKLWSCTATDLRESQSTSWNTFSKDKMSNSWYTAKMHMPETQTPSPKTSSESSPSLWHRITENEQRKIDGDDAARKKRARTKARKTTKKEYDLVRARKVRVYPTKDQRTQLLKWFGVTRRAYNTGVAFHRDMAKGEEEAIKLHQEACIKKDRKTKQVLVDEDGNPKTHRALGGELNAVRYKERHDPPKWVVEVPQAIRDSGIRDFFKALNSGRAKNEELAAQKKVHEQSFYKFRTKRDESQIFEVNARTWNAKKSKTSNFLKEFRMRKEKFPDQISNAMRVQMNRLGHVYFCFLREEKKRPMDQAPKGHHGVIALDPGVRSFQTMYDADGRAIEWGTGKDFRTIFYLCRRVDKIQSSIDKKKTASSDKDNFNTPLKRAFYRAQLKIKNKITEIHRKLALWLCENYRVILLPKFETSKMSRRMERRISKKSVRMMCRWRHFGFRQALIHKAEMFPWCKLVLCQESYTSKTCNECGTLHHNLGASKIFQCPNPKCNHVADRDVHAARGILLRYLSKDMI

SEQ ID NO: 460 - protein, 662 aa, Schizochytrium sp.
VRKWGGQGTAKLQTLQVEQTSNTNQQSSFTGSLGSQQAPFGAGPMADACAARASPEASASTPATMLSASLIAVPPAASNAALDVPLSTPECPRPSKRRTSNARLAISSAPTQMLPPSTKTSVAGSISNAKACAPYWTPVTAAESAKLWSCTATDLRESQSTSWNTFSKEKMSKSWYTAKMHMPETQTPSPKTSSELSPSLWHRITENEQRKIDGDDAARKKRARTKARKTTKKEYDLVRARKVRVYPTKDQRTQLLKWFGVTRRAYNTGVAFHRDVAKGEEEAIKLHQEACIKKDSKTKQVLVDGDGNPQTYGALYGEKKAVRSKERHDAPEWVLEVPQAIRDSGILDFFKALNSGRAKNEELAVQKKVHEQSFYKFRTKRDESQIFEVNARIWNTEKSKTTSFLKKFRTHKEKFPSQIKNAMRVQMNRLGHVYFCFLREEEKRPMDQAPKAHHSVIALDPGVRSFQTMYDADGRAIEWGTGKDFRTIFYLCRRVDKIQSRIDKAQENKKKTAYDFNTPLKRAFYRAQLKIKNKITEIHRKLALWLCENYRVILLPKFETSKMSRRMERRISKKSVRMMCRWSHFGFRQALIHKAEMFPWCKLVLCQESYTSKTCNECGTLHHKLGASKVFQCPNPKCNHVADRDVHAARGILLRYLSKDMI

SEQ ID NO: 461 - protein, 662 aa, Schizochytrium sp.
VRKWGGQGTAKLQTLQVEQTSNTNQQSSFTGSLGSQQAPFGAGPMADACAARASPEASASTPATMLGASLIAVPPAASNAALDVPLSTPECPRPSKRRTSNARLAISSAPTQMLPPSTKTSVAGSISNAKACAPYWTPVTAAESAKLWSCTATDLRESQSTSWNTFSKEKMSNSWYTAKMHMPETQTPSPKTSSESSPSLWHRITENEQRKIDGDDAARKKRARTKARKTIKKEYDLVRAKKVRVYPTKDQRTQLLKWFGVTRRAYNTGVAFHRDVAKGEEEAIKLHQEACIKKDSKTKQVLVDEDGNPQTYGALYGEKKAVRSKERHDAPEWVLEVPQAIRDSGILDFFKALNSGRAKNEELAVQKKVHEQSFYKFRTKRDESQIFEVNARIWNTEKSKTTSFLKEFRTRKEKFPSQIKNAMRVQMNRLGHVYFCFLREEEKRPMDQAPKAHHSVIALDPGVRSFQTMYDADGRAIEWGTGKDFRTIFYLCRRVDKIQSRIDKAQENKKKTAYDFNTPLKRAFYRAQLKIKNKITEIHRKLALWLCENYRVILLPKFETSKMSRRMERRISKKSVRMMCRWSHFGFRQALIHKAEMFPWCKLVLCQESYTSKTCNECGTLHHKLGASKVFQCPNPKCNHVADRDVHAARGILLRYLSKDMI

SEQ ID NO: 462 - protein, 290 aa, Schizochytrium sp.
ATFYKFRTKRDESQIFEVNARTWNLKKSKTSNFLKEFRTRKEEFPDQISNAMRVQMNRLGHVYFCFLREEKKRPMDQAPKAHHGVIALDPGVRSFQTMYDADGRAIEWGTGKDFRTIFYLCRRVDKIQSSIDKKKTASSDKDNFNTPLKRAFYRAQLKIKNKITEIHRKLALWLCENYRVILLPKFETSKMSRRMERRISKKSIRMMCRWSHFGFRQALIHKAEMFPWCKLVLCQESYTSKTCNECGTLHHNLGASKIFQCPNPKCNHVADRDIHAARGILLRYLSKDMI

SEQ ID NO: 463 - protein, 615 aa, Schizochytrium sp.
KNLQITSLIVQSVQPATMLSASLIAVPPAASNAALDVPLSTPECPRPSKRRTSNARLAISSAPTQMLPPSTKTSVAGSISNAKACAPYWTPVTAAESAKLWSCTATDLRESQSTSWNTFSKEKMSKSWYTAKMHMPETQTPSPKTSSESSPSLWHRITENEQRKIDGDDAARKKRARTKARKTIKKEYDLVRAKKVRVYPTKDQRTQLLKWFGVTRRAYNTGVAFHRDVAKGEEEAIKLHQEACIKKDSKTKQVLVDEDGNPQTYGALYGEKKAVRSKERHDAPEWVLEVPQAIRDSGILDFFKALNSGRAKNEELAVQKKVHEQSFYKFRTKRDESQIFEVNARTWNAKKSKTSNFLKEFRTRKEKFPSQIKNAMRVQMNRLGHVYFCFLREEEKRPMDQAPKAHHSVIALDPGVRSFQTMYDADGRAIEWGTGKDFRTIFYLCRRVDKIQSRIDKAQENKKKTAYDFNTPLKRAFYRAQLKIKNKITEIHRKLALWLCENYRVILLPKFETSKMSRRMERRISKKSVRMMCRWSHFGFRQALIHKAEMFPWCKLVLCQESYTSKTCNECGTLHHKLGASKVFQCPNPKCNHVADRDVHAARGILLRYLSKDMI

SEQ ID NO: 464 - protein, 661 aa, Schizochytrium sp.
IRKWGGRGTDKLQTLQVEQTSNTNQQSSFTGSLGSRQAPFGAGPMADACASRASPEASASMPATMLSASLIAVPPAASNAALDVPLSTPECPRSSKRRTSNARLAISSAPTQMLPPSTKTSVAGSISNAKVCAPYWTPVTAAESAKLWSCTATDLRESQSTSWNTFSKEKMSNSWYTAKMHMPETQTPSPKTSSESSPSLWHRITENEQRKIDGDDAARKKRARTKARKTIKKEYNLVRARKVRVYPTKDQRTQLLKWFGVTRRAYNIGVAFHRDMAKGEKEAIKLHQEACIKKDRKTKQVLVDEDGNPKTHMALGGELNAVRYKERHDPPKWVVEVPQAIRDSGIRDFFKALNSGRAKNEELAVQKKVHERSFYKFRTKRDESQIFEVNARTWNAKKSKTSNFLKEFRIRKEKFPDQISNAMRVQMNRLGHVYFCFLREEKKRPMDQAPKAHHGVIALDPGVRSFQTMYDADGRAIEWGTGKDFRTIFYLCRRVDKIQSSIDKKKTASSDKDNFNTPLKRAFYRAQLKIKNKITEIHRKLALWLCENYRVILLPKFETSKMSRRMERRISKKSIRMMCRWSHFGFRQALIHKAEMFPWCKLVLCQESYTSKTCNECGTLHHNLGASKIFQCPNPKCNHVADRDVHAARGILLRYLSKDMI

SEQ ID NO: 465 - protein, 236 aa, Schizochytrium sp.
IALGMSTSSSYKKKKSVHWIRRPMRTTVSLPLIQAYVHFKRCMTLMVVPLNGAQRKILEPYSISAAALKIQSRIDKAQENNKKTASSDKDNFNTPLKRALYRAQLKVKNKTTEIHRKLALWLCENYRVILLPKFETSKMSRKMERRISKKSVRMMCRWRHFRFRQTLIHKAEMFPWCKLVLYQESYTSNECGALHHKLGASKVFQCPNSKCKHVADRDVYAAKGILLRYLSKEMIF

SEQ ID NO: 466 - protein, 661 aa, Schizochytrium sp.
VRKWGGQGTAKLQTLQVEQSSNTNQQSSFTGSLGSQQAPFGAGPMADACASRASPEASASMPVTMLSASLIAVPSAASNAALDVPLSTPECPRPSKRRTSNARLAISSAPTQMLPPSTKTSVVGSISNAKACAPYWTPVTAAESAKLWSCTATDLRESQSTSWNTFSKEKMSNSWYTAKMHIPETQTPSPKTFSELSPSLWHRITENEQRKIDGDDAARKKRARMKARKTSKKEYDLVRARKVRVYPTKDQRTQLLKWFGVTRRAYNTGVAFHRDVAKGEKEAIKLHQEACIKKDSKTKQVLVDEDGNPQTYGTLYGEKKAVRSKERNGAPEWVLEVPQAIRDSGILDFFKAINLGRAKNEELAVQKKVHEQSFYKFRTKRDESQIFEVNARTWNLKKSKTSDFLKKFRTRKEKFPDQISNAMRVQMNRLGHVYFCFLREEKKRPMDQAPKAHHGVIALDPGVRSFQTMYDADGRAIEWGTGKDFRTIFYLCRRVDKIQSSIDKKKTASSDKDNFNTPLKRAFYRAQLKIKNKITEIHRKLALWLCENYRVVLLPKFETSKMSRRMERRISKKSVRMMCRWSHFGFRQALIHKAEMFPWCKLVLCQESYTSKTCNECGTLHHNLGASKIFQCPNPKCNHVADRDVHAARGILLRYLSKDMI

SEQ ID NO: 467 - protein, 665 aa, Schizochytrium sp.
NPNNSYIILFLFLLSSSSLSDYLSTLHSSGYSAIGSLGSQQAPFGAGPTADACASRASPEASASMSATMLSASLIAVPPAASNAALDVPLSTPECPQSSKRRTSNARLAISSAPTQMLPPSTKTSVAGSISNAKVCAPYWTPVTAAESAKLWSCTATNLRESQSTSWNTFSKDKMSNSWYTAKMHMPETQTPSPKTSSESSPSLWHRITENEQRKIDGDDAARKKRARTKARKTIKKEYNLVRTRKVRVYPTKDQRTQLLKWFGVTRRAYNIGVAFHRDMAKGEKEAIRLHQEACIKKDRKTKQVLVDEDGNPKTHGALGGELKAVRYKEKNAAPKWVLEVPQAIRDSGILDFFKAINSGRAKNEELAVQKKVHEQSFYKFRTKRDESQIFEVNARTWNLKKSKTSNFLKEFRTRKEEFPDQISNAMRVQMNRLGHVYFCFLREEKKRPMDQAPKAHHGVIALDPGVRSFQTMYDADGRAIEWGTGKDFRTIFYLCRRVDKIQSSIDKKKTASSDKDNFNTPLKRAFYRAQLKIKNKITEIHRKLALWLCENYRVILLPKFETSKMSRRMERRISKKSIRMMCRWSHFGFRQALIHKAEMFPWCKLVLCQESYTSKTCNECGTLHHNLGASKIFQCPNPKCNHVADRDVHAARGILLRYLSKDMI

SEQ ID NO: 468 - protein, 662 aa, Schizochytrium sp.
VRKWGGQGTAKLQTLQVEQTSNTNQQSSFTGSLGSQQAPFGAGPMADACAARASPEASASTPATMLSASLIAVPPAASNAALDVPLSTPECPRPSKRRTSNARLAISSAPTQMLPPSTKTSVAGSISNAKACAPYWTPVTAAESAKLWSCTATDLRESQSTSWNTFSKEKMSKSWYTAKMHMPETQTPSPKTSSESSPSLWHRITENEQRKIDGDDAARKKRARTKARKTIKKEYDLVRAKKVRVYPTKDQRTQLLKWFGVTRRAYNTGVAFHRDVAKGEKEAIKLHQEACIKKDSKTKQVLVDEDGNPQTYGALYGEKKAVRSKERHDAPEWVLEVPQVIRDSGILDFFKALNSGRAKNEELAVQKKVHEQSFYKFRTKRDESQIFEVNARIWNTEKSKTTSFLKEFRTHKEKFPSQIKNAMRVQMNRLGHVYFCFLREEEKRPMDQAPKAHHSVIALDPGVRSFQTMYDADGRAIEWGTGKDFRTIFYLCRRVDKIQSRIDKAQENKKKTAYDFNTPLKRAFYRAQLKIKNKITEIHRKLALWLCENYRVILLPKFETSKMSRRMERRISKKSVRMMCRWSHFGFRQALIHKAEMFPWCKLVLCQESYTSKTCNECGTLHHKLGASKVFQCPNLKCNHVADRDVHAARGILLRYLSKDMI

SEQ ID NO: 469 - protein, 262 aa, Globisporangium splendens
EFETERADSLDCLGGTADLQDQLFQRAHRAAQDAVETFGFLVEFPTNLLFESGVLFQKRFGQMALRNIAARLVLTLNPQVCVALGDWSDPKHIRGNAHGPVKGRFKELAKWATVELVDECCASQRCSSCLQVLEKRNFQTTKEDCVVAYKPSYAVLRCPNPQCRTTWDRDVNAAINMYQLCKRIVFGLPRTAELSWQHALVAKRGPRGFQTRPHGRRSVSETHCPLKWQLRVIALLSNEPNQLTNGSARNRNLATRLLLRND

SEQ ID NO: 470 - protein, 202 aa, Globisporangium splendens
RTCKWLVRLHRRYLGYCSVHYFTCFRSLVNLENETGVRRQLVEQFTFHSLRVATRVHRHLTGVNKARLWLENLKKREPKYVTTATPNPKVRLATGKTRNIYGGTRTVLPVQRLSHELAKRATVVLIDEFCTSTRCLQSLKSRKVLTTQEDGTITHKSSCAVLRCTNSNCRITWDRDVNTAINISQLATRMVFEFPRPPELSR

SEQ ID NO: 471 - protein, 608 aa, Stentor roeselii
SYFDQNGFEGCVTERFNSDKMTNILTYLAREISTNYLNNIKLHFIKYVERFVNVLYGKRSDPARQVSFNQNAARAAKHAILSLGSVPAIVQPHIRFILPQRPFLKDSIKYDLECNPQDYLRCMVYMMKYVESQREKIYSVFPLRTQLSPGYITLDTNSLLTLLGTRQNGYCQTNFRHKGGIKSNKEDIWAAFFETSKACFKKRGYSFNHMIDTDGFACSIIFSKVKNPFEPPQDDLYIESVCRKKLIEKRLVSVDPGVNSPLTFISRRPEKRKKNRESEESDQKEEYKESEESEEREESGESEERKESEESEKSEERKKSEKIDFFDEIEQKYLSLKRTIYPEQRDDCRLIEESEESEEGEESEEEKNSSAKANRKRENYTTFRYTMKQRIHETKRLIYEKRRDDEKSNTRFYGRTVKQWEATLSSHDSKTLNRNSFMQYLIAKNEVNKVLLDFYAKDLFRKLKWYAYINKQRSEAKLIKGFKQKFGGPDEVFVGFGDWEAAAHMRFKHPVKGKGYRTLFKRAGYNICLVDEFKTSSYCSNCQNGDQDSKMSNARDEDGNSIHSLLICKKCRILWNRDINGAINILKCLEMKKAGKKRPKFLRRQSSP

SEQ ID NO: 472 - protein, 1077 aa, Pseudokeronopsis carnea
MEKEVNSINKSQRNQKMRLKLAANEEMRTAIVRVKSDKQLPKLFAMIYDYKHFENMLLILLKQNYDLAQQEKSENDFSLLSSYQVMRAVIRNTNGGKHKELADYIKKKYKDNQLMQSLIAVGQNLKVHNLAMIINRVKGNFKSFFSHLKQNHQEAKPPRPKKLSKVKRFSVPLDVNSWTLKRKDKIGINLSGKMFYLHLKHNKIEEVITSIANIQSVSLQLSNNNIYLYISYRYCKREACEIRAKAAAIDLGINNLAAVFIKDQNSKSLIVSGSAFKHYNSCFNRLLSKINNTIDSLQNDLKKQDDVKVEKRLHFLQRFRSSLHEKRKRYFYDQFHKISTRILEYLQLHGVTQLYSSTNLASLKNNGECKQRKSSKQNFIQIPIIQFLKYLQYKSPDYGIYFYDVDEKYTSKTSSLSANILDVQEKSQSQSISTNDLLGSRVKRGLFRDRVTKQYVNADLNAAVNILKIGIGKNFTINKKLFFKLCNPLKVKSDRNLFCLNKTIPIRIKHPSDGCNVVSLQIFIGLIQRSIEVTIRYVFRIYNGNSMNRIVLHQFANVINCMVFLSSDNVFSHQICNFYLCHRYVPNNSVQLAINKLNIARVYQQTICHNKFSRVKNSSGISLKQNNKTLYAKYKKIQRSFVTMLVVISVNTIPQTVLKIYTRCVASPYQLKCKEKNMKWLCILVLVSMCYAQMDTEIYLFDFKNENGAYKLTNGKNITQRDGYDNQPYFSRDGKYVYYSSIHRENNSDIYRYNLEDQTTQQITTTPEAEYSPTILDEHNNFSTVRVEKDNTQRIWKFTQGKPQLIAEHIDQIGYHCWLDSTTIGIFRIEKMMNLKIISTKTKQMKHVANNIGRALILDPSDNKLLYLSKENPKEFTILKLLDVENIAVQQVAKTIGQGEDFTCTTKGEIVMADTNKVYVYQKGNWNLIFDGKDKFSGVFNRIVLNISNSKICIVYQSKQQFTQKKRTDFVSTLFILSQFLAYFFTFGSDSTVKSSSFSLSSSSISKSNEKGVNNEKLILPLNKSSKDVSSPWNKLLCNAGAYVIVVERSLNTPCIAELLDCIWILCGASNTTTSWN

SEQ ID NO: 473 - protein, 621 aa, Pseudokeronopsis carnea
KNYQNLYQVARQNEQQFLTKIGQCALQVKYQSKCVLLRMQKQWYSMKDQQKNLKKQQWKTFCQFQRCIAQRYMDGDHMSEEKKEKKIKNGQVLAFPIVIENREVAEKLRETLAYVQEKANEYLIFAHENKLYDVFDEDDKKYSYKVLEPIFCKLSKENKIPSRINRGVLEIVGRTMRQTRDRKRLFDLLVKLSKDPKQWTDKLLAKNGLYEKLHYVQNIKEQVINYKRKHKKLPKDFYELQQPPKIKKQILTYAPDDGQAIRVSIDKDKAKLQFKIIEKNNNNIKWKWLETKINLPGFLQEKQVTSPDLRLDCVHGEWLPVLDFKVTLKKPKQQKTTNFITIDWGTRKLITICVFNKKAQQISQPFFLHCSSIQKKLERIREDIDKWKSKRDRLKHKDSLFKKCNREIAKRWRKIRAIDREIAHLAANMIVFIAKYYNCSDVYCEDLRSLKSRDKSRKINRLTNNTVRQAIYNLVDYKARLCGISLREPVHPAGTSSLCPKCSHKGLHYKASDRQQKPRKSNPWFHCPSCHFSADRDYVSCLNIARKVLFGNNLKKCTKTVVYKKTRLPDALFRQDASTTTHCVGRIHYLKGWIHSVSFSSKVVQKSFNSFKGTIFGILRV

SEQ ID NO: 474 - protein, 234 aa, Synchytrium endobioticum
FVQLRDVCTNLHHRLNQVRLLKHPHVQQIMADIPSACTSQHQDYIHRPQYLVRHLETLVGYHDKAKSSRWNRYKRKQRALHEIYMSIRGSGTKDDTVVIWGNGNFTSLGREQGAPTKALKRHARRYTQIITYDEYMTSQRCSHCAQRGVPEAVADDPRLSGYARAQGKSGHVLMAKRSRANRYVLFAESIGLGLKCSRYGIETTMQPGTSCTASCMNAPLLSTLVRSSAYTSVC

SEQ ID NO: 475 - protein, 403 aa, Synchytrium endobioticum
HSVSICFYLLTYSCFSFPEPCLTSYSCRSFQKTVREVAGVDAKATRAATRVAFMKNPSKGRLLDEVFLLPPEMLAKSRYVLDDSPRRYVRTPSFKTNGLVLSLLWIDTTSKPPPPDRKVEDAINLPNIFHNKTLRSTHKDAWVIAIDPGATCIAGAVAFDPNHPDQRRNLAVTTKSLAEPERRYRNWLEADKPEAICTAERECTKSDQETWPVFLERFVRSYDIARAYYSTKRYKRKRWDADKAKRGELDRVLEGIVKMVGESMGHKLSGGKQVIVAIGMGDFSSNKSRHVMFIRYLIRKLRPLGYTIVGVNEYFTSKKCPCCMEFVEMPAMRRLYCRRCNKWYHRDVMAADNMVNIVRGYLEHDERPTYLKPPSKDKNTPMKRKADEGGTSRAGPSKSRKTR

SEQ ID NO: 476 - protein, 243 aa, Chytriomyces confervae
RKAYFKRNQIEYNGSISRVVRDNVGNPLTFVRNTDLGDVTRVVTLETLITMGYAQDYTGSHSSSNLGQFRAYLVKRHRWKHVLSDFFQNQQHRRRKYRAQLGVRSSESKLANNIQSKFKDGDCKLVLCWGNWTPGVGIGRIMARYFKTATVDERYTSSACPHSDSDMGHPLSRPTPDGGTCEIHHLLRCKNETCSRWWQQDVMALANFKRQVLHGLEHGKNHPVFAPKTNAQAGGGRKRKHNE

SEQ ID NO: 477 - protein, 430 aa, Powellomyces hirtus
GSNRRAKRQKKKKLTRSLKIRLYPNSAQKRLMWQWMGCAWLVFNMVVTNYLLRSRATKQFFFRNLLKHKINTTREWSFMKGVPYEVLDHAISSAITARDEVITRNREHIQDGGLLHRLHFLTKKKPRQTITIRAQYCREPLRFYLRLLHNRGMVAAAGPSNHRKKDGPVHRPPFQHEKCRNNNKWPNEEGKVECDSKLTYDKRLRQWTFSWVYEMDGQDGETQAEPTIAAIDPGVVNFATWYSPTLGSGVVGNQDIERIICLCLHLDKLISKTMRVPARKRNSHRRAQAWVCQRIRNLVDEVHKKMVIWLVRTFDVIVLPEFGAKQMSIRRPGRRLGKKTVRKMLTWAHAQFRQRLLNKAEEVGVTVITSVSEAYTSKTCSECGHIHTRLGGSRVFQCAGCGIVMDRDVNGAKGILLRALACGALIAPET

SEQ ID NO: 478 - protein, 601 aa, Powellomyces hirtus
PSPYLNTRATLAMSDLPPFCKKCTDADHSISDTPYHRDARNKLCRFFTPRKKRDRSAEPAAAQVATSMSARRPWWDGDLVDEYQKWWRPHEPQFGMNYPTTTTRHHTPRRCKGLLRDLPPEQYDSWFHHRKYHYPPENSDTLRHLHRTAPLPVQEKPKPKRVSNPETNTDARRSKGGRQRSKRIVPDNHVQRTWTVRVFPTKDQRVTLKLWMNAARVTWNWALGVLRRQYARHGKTFFSPTKFEGLKKAFVTCDENRMPRRIRWIRAAPCSVREATMQELAKSYEAQFKRYHETGNFTAPTFRSVKRPSCSITVPPQNWSKKPGKRWQCYVTLLANEGKLRVRTRDRKRVLAKYPEGPVREVKIVHCAGKWFMKVPIYRSVEPLREEATGHLVALDPGSNPLMTYYSPTHMESGSFGTKEDLNTLNGLQDKIDNISSIMSLGTLSKGQRRRLRQKRLLLHERIKNRVRECSNKMTLFFACRYQFIHASTFATEEMVPCMQNGKRRRINRQTVRDLLTWCHGPFKRALAYKMEEYTGLLVEFSTEEYTTKTCDACGKLQRVDGKEFHCVSVSCKHRVHRDVHGARGHALKNCVGKYAWVTAT

SEQ ID NO: 479 - protein, 252 aa, Powellomyces hirtus
DWPRNYGNSARSSGLPSKVNHEVDTLINQVDSVIEANRLVLNARNTLNALRLRYHGRDSEESYASQPDLRAAANDVASALQQLENTRVQARLRPEIKKLLADIQHLNAGIGRRVKALHRLAIKFVTAFYVILHPKFDKRIHWNRQTGPQSYVKHTFLRLSHSTYLAELRRQLKEQGRDVLIVNESFTTQACCVCGSLCRVGCKKIYYCHVCNTFRLRDRNAACSIGISNCTRILIWCWTDLETVVTLTLHPF

SEQ ID NO: 480 - protein, 202 aa, Dreissena rostriformis
DPGGRTFATVYDPINCNVFQVGIEEDKQYVISKLHNKIDHAHMHLTKEQNKKQQQAVRERIVSLKKLHLKLKTFVEDSHLKLSSHLVKEYQYVALGKINVAPLVKKKHLSKRAKRDLLYWQHYRFRQTLTNRTTNTECILDVQNEAYTSKTCGVCRAIDDNLGKSETFYCNQCKYNTHTDVNGARNILLKSLRMFPFEKQQR

SEQ ID NO: 481 - protein, 223 aa, Dreissena rostriformis
YTRRNASNDMIEMRVCGIDPGGRTFATVYDPIDCNVFQVGIEEDKQYVISKLHNKIDHAHKHLTEAQNKKQQQAVRERIVSLKKTHLKLKTFVEDIHLKLSSHLVKEYKYVALGKINVAQLVKTDRPKPLSPRTKRDLLYWQHYRFRQRLTNLTTNTECILEVQNEAYTSKTCGMCGEMDDNLGKSETFYCNQCNYNTHRDVNGARNILLKSLHMFPFEKKQQ

SEQ ID NO: 482 - protein, 354 aa, Neoporphyra haitanensis
FKSILAKDLAVHRNMTPPVPLRSPGCGGCPTSATSRLHGATRLPRRLVCWHCLHQGNRWFWPLGELALYGDLWGAEGTRGLRTARLHAVLQRGRFAAQVARELTGGRLRRVVDGAVVAVAIGDAATHGGALHLTRRLRHLCWTVDVPERNTSQTCDGCHSRLALVVPSPGSPPRVPRGTRVCGRRRGTRGRRGRPSTAHLAGWQRGAPLRDARRRAACREAGASAAAARAAAHPQPHAGPVFLAHRYSAVWCVKECVEPSCARGMVNRDVTAAANIGWRTWQSIRGRPCYPFRTAAHVRWVRVDWNDRPGGEEAARAAGGQPDCAGRAPADALVAASGEGDDAAADGGGAAPLA

SEQ ID NO: 483 - protein, 392 aa, Neoporphyra haitanensis
LHCGGGVRGCAAWPGRPRTRGDARQSRARCPPPAGAVYTLSRGRYHEACGNGMTARAVAAHRAAAVERITQLGDTAGVRTPEQVTEHASISVADPEAVRVASRAWLAARTQALYGDLWGAEGTRGLRTARLHAVLQRGRFAAQVARELTGGRLRRVVDGAVVAVAIGDAATRGGALHLTRRLRHLCWTVDVPERNTSAACDGCHTRLALVFPTPASPPQVPRGTRVCGRRRGVRGRTGRPSGVQRGWWDRSAPVRYARRRAACRAEAENAATARAAAHPRPHAGPVFRADRKAVVWCVKVCVEPTCARGMVNRDVTAAANLGWRTWQWIRGRPCHPFRTAAHVRWPRIDWNGRTGGAADGRGAGGAAADPLVTASGEGGGAAAAGGGEAPHA

SEQ ID NO: 484 - protein, 226 aa, Neoporphyra haitanensis
KLWRQRAEAAPAARADSDTEVLPPVDEAAAHGTIRTGDREQHLRATREWAALRETAANVERFGAEATRGLRAAALHQTYQQGRFAAAMARDLTGDFLRQVRRGTVVVVAMGDARVRGGDGWVRRYLRRLRWLVDQEEFNMSQACPSCHQKLVLVYPTGNSLPTLPAELFGPPVAAPGRRGRMAAGSRRGQPKRPRPSADHNKRRGSEVDTVRASACATAHAAAVAL

SEQ ID NO: 485 - protein, 609 aa, Neoporphyra haitanensis
AAGRGRARGRRRCRSSSGGGSGGGRGGGGGGDGGDGGGGTVVPLQAPRGRTGKRRTRPRAGEDTGARSPSAQRRRVEEVAGAGGGTTRDGSAAASQATAAARTARSPGSRGSPSAPAAPGAMAVADERHATRRCVRRVRGPARRARRDGRVELCAAVGGLLAATGRRRWRVPRHAAVRVARACLPRSTRGVVAADVDGGRAPLEAYRVDRAGAMEADCTAAEAYAAALRGLAGRVRAATHASRGHGAPPPAGAVYTLSRGRYHEACGNGMTARAVAAHRAAAVERITQLGDTAGVRTPEQVTEHASISVADPEAVRVASRAWLAARTQALYGDLWGAEGTRGLRTARLHAVLQRGRFAAQVARELTGGRLRRVVDGAVVAVAIGDAATRGGALHLTRRLRHLCWTVDVPERNTSAACDGCHTRLALVFPTPASPPQVPRGTRVCGRRRGVRGRTGRPSGVQRGWWDRSAPVRYARRRAACRAEAENAATARAAAHPRPHAGPVFRADRKAVVWCVKVCVEPTCARGMVNRDVTAAANLGWRTWQWIRGRPCHPFRTAAHVRWPRIDWNGRTGGAADGRGAGGAAADPLVAASGEGGGAAAAGGGEAPHA

SEQ ID NO: 486 - protein, 1394 aa, Neoporphyra haitanensis
RYRQRIATWLDRCGLAAQARCWAPLGAACRPPNLDATRDWTYNLTRVLNQHQTVPRSTRPPHPLPTSAALAMEPDEEEPGAGPQDEGPHGHGADADDALPPGDGAASGDDADPREVAELEAAVHLKQGRLRGLLRRMGEARARRPQLPDGAALDAALARMTAAAAAAAGAPHEASPTTDGAVAASGAALEAATTPAVAGATAWVDAHHPLDDDGLLAQRARRAASLIGSTSRGMARRVAEVEDRRGAAPGGRPCARCRQRSHKTGAATCPATAVGGDKNPHAYDRGEDPAASDPYACRATGTSSVMVPVAAVLRTLPASPDGTAHAVVRGGFLATAEHHTQLHFTLTLVWLNTVHTLFGAVKADGWAAALPGPAGWGEYWNWVAYAVCCRGAHGGSLPAGVKCGSCGRARDNTLCGPAARRLSVSYPALMDATRNAMDALASSFDAACHDHLPHGNSHARWRGVVTTIVTHTARTVAVATRRLAWRVATMVVDAADAPASGEEQRGRRRAAVYAAARSCLERGSDAPHAAHAAKLDALPPDVRAAALREIADARVRAQPAPVQGTPPLFPTGGAHVVARRWAEYIPYLLHVQAEGVVDKPFSLVPGKAATLHGYGTVTKARLGPLIRRAWPAHRELYEDVRRRGAAAIAGLLGLETARCTSGADLRSNGEGVVFTLSRPATAAEAEAADVAAVTRKANGSRVQSRVQGSPTTQLEKQGFPIAAVKTLTVVSADPGKATVLTAVSSGPTAAAWGDRPWVRRRRLARSRLVAADALTRAALALDAVVWRAAALAPAEAAAAGAAAAAAAAAAAAAAGGAPPGALTPSPAWRKRKAAPGGAEQRQPPCGNAATTGPPRGGAAGGTAAPAPSVRPPSERTARGPAASLRRGAVRRLRAVAQRLVVATGNGRWRVPRHAAVDVALGCLRRAAAGWVRPRVADGRPDGAAFAACKTAAAAQDVAAAGAFASALDGLTARVADAVGATRGWRAPPPAGAVYTLTRGRYTEAAGNGMTARAAAAEHRREAAQRLAALQLPPATTPEVVAAHDTVRTGDAAAVLAASRQWMESRRQPQYRAVWGAAATAGQRKARVHQVIRRRRLGEAVARELTGGRLRRVVNRSAVVVVVGQAATRGGATWLRRHLRRLCWMVDADEHNSSQACAGCRQQLAVVYASAAAPPPVPRGTLICGRRRGRRGRQGRPRAPPTAGWERTQPVRSAARRAACRAEAAKMAAERAVKHPPPARVVFRAPAAAGVWGVKRCVERACSRQLVNRDVNAAANMGWKALRQIRQLPCHPFMRPQRVRRPRLGGGDDGEAAGAAAADRAGDGACGRPPGAAVVAVATGDAGGEAAVGPDGDGGARTAVVADTHTVATTELARAAETGDGAPAVAGGGRATSVA

SEQ ID NO: 487 - protein, 764 aa, Neoporphyra haitanensis
KRNPSKTIIACEIGEYPPKGRTTIDRSILSIVTGSTRSSSRGRPPPARELSLGSKDRPPAHAFDPITSDLGGGGLAPPVTRPFGPGAPPDPFTGVGERGCDDALGGCGRPWGCGACRPLSRGRPLRAPQAYICHRAPRPRIWAQRLERARLVANDALLRAALAVDAVVTRVTGLSASATAAVEAAADAAAGIAPAVVPLQAPRGRTGKRRTRPRAGEDTGARSPSAQRRRVEEVAGAGGGTTRDGSAAASQATAAARTARSPGSRGSPSAPAAPGAMAVADERHATRRCVRRVRGPARRARRDGRVELCAAVGGLLAATGRRRWRVPRHAAVRVARACLPRSTRGVVAADVDGGRAPLEAYRVDRAGAMEADCTAAEAYAAALRGLAGRVRAATHASRGHGAPPPAGAVYTLSRGRYHEACGNGMTARAVAAHRAAAVERITQLGDTAGVRTPEQVTEHASISVADPEAVRVASRAWLAARTQALYGDLWGAEGTRGLRTARLHAVLQRGRFAAQVARELTGGRLRRVVDGAVVAVAIGDAATRGGALHLTRRLRHLCWTVDVPKRNTSAACDGCHTRLALVFPTPASPPQVPRGTRVCGRRRGVRGRTGRPSGVQRGWWDRSAPVRYARRRAACRAEAENAATARAAAHPRPHAGPVFRADRKAVVWCVKVCVEPTCARGMVNRDVTAAANLGWRTWQWIRGRPCHPFRTAAHVRWPRIDWNGRTGGAADGRGAGGAAADPLVAASGEGGGAAAAGGGEAPHA

SEQ ID NO: 488 - protein, 465 aa, Neoporphyra haitanensis
ATAAARTARSPGSWGSPSAPTAPGAMAVADERHAPRRCVRRVRGPARRARQDGRVELRAAVGGLQAATGRRRWRVPRHAAVRVARAWLPRSTRGVVAADVHGGSAPLEAYRVDRAGAMEADCTAAEAYAAALRGLAGCVRAATHASRGHGASPPAGAVYTLSRGRHHEACGNGMTARAVAAHRAAAVERITQLGDTAGVRTPEQVTEHASISVADAEAVRVASRSWLAVRTQALYGDLWGAEGTRGLRTARLHAVLQRGRFAAQVARELTGGRLRRVVDGAVAAVAIGDAAARGGALHLTRRLRHLCWTVDVPERNTSQACDGCHSRLALVFPSPGSPPRVPRGTRVCGRRRGTRGRRGRPSTAHPAGWQRGAPLRDARRRAACREAGAEAAAARAAAHPRPHAGPVFWAHRYSAVWCVKQCVEPSWARGMVNRDVTAAANIGWRTWQSVRGRPCYPFRTAAHVR

SEQ ID NO: 489 - protein, 1381 aa, Neoporphyra haitanensis
QVRPLSPRGGLPPDAWRPHISGAAPCRPRPPPPLGRQHQTVPRSTRPPHRLPTSAALAMEPDEEEPGAGPQDEGPHGHGADADDALPPGDGAASGDDADPREVAELEAAVHLKQGRLRGLLRRMGEARARRPQLPDGAALDAALARMTAAAAAAAGAPHEASPTTDGAVAASGAALEAATTPAVAGATAWVDAHHPLDDDGLLAQRARRAASLIGSTSRGMARRVAEVEDRRGAAPGGRPCARCRQRSHKTGAATCPATAVGGDKNPHAYDRGEDPAASDPYACRATGTSSVMVPVAAVLRTLPASPDGTAHAVVRGGFLATAEHHTQLHFTLTLVWLNTVHTLFGAVKADGWAAALPGPAGWGEYWNWVAYAVCCRGAHGGSLPAGVKCGSCGRARDNTLCGPAARRLSVSYPALMDATRNAMDALASSFDAACHDHLPHGNSHARWRGVVTTIVTHTARTVAVATRRLAWRVATMVVDAADAPASGEEQRGRRRAAVYAAARSCLERGSDAPHAAHAAKLDALPPDVRAAALREIADARVRAQPAPVQGTPPLFPTGGAHVVARRWAEYIPYLLHVQAEGVVDKPFSLVPGKAATLHGYGTVTKARLGPLIRRAWPAHRELYEDVRRRGAAAIAGLLGLETARCTSGANLRSNGEGVVFTLSRPATAAEAEAADVAAVTRKANGSRVQSRVQGSPTTQLEKQGFPIAAVKTLTVVSADPGKATVLTAVSSGPTAAAWGDRPWVRRRRLARSRLVAADALTRAALALDAVVWRAAALAPAEAAAAGAAAAAAAAAAAAAAGGAPPGALTPSPAWRKRKAAPGGAEQRQPPCGNAATTGPPRGGAAGGTAAPAPSVRPPSERTARGPAASLRRGAVRRLRAVAQRLVVATGNGRWRVPRHAAVDVALGCLRRAAAGWVRPRVADGRPDGAAFAACKTAAAAQDVAAAGAFASALDGLTARVADAVGATRGWRAPPPAGAVYTLTRGRYTEAAGNGMTARAAAAAHRREAAQRLAALQLPPATTPEVVAAHDTVRTGDAAAVLAASRQWMESRRQPQYRAVWGAAATAGQRKARVHQVIRRRRLGEAVARELTGGRLRRVVNRSAVVVVVGQAATRGGATWLRRHLRRLCWMVDADEHNSSQACAGCRQQLAVVYASAAAPPPVPRGTLICGRRRGRRGRQGRPRAPPTAGWERTQPVRSAARRAACRAEAAKMAAERAVKHPPPARVVFRAPAAAGVWGVKRCVERACSRQLVNRDVNAAANMGWKALRQIRQLPCHPFMRPQRVRRPRLGGGDDGEAAGAAAADRAGDGACGRPPGAAVVAVATGDAGGEAAVGPDGDGGARTAVVADTHTVATTELARAAETGDGAPAVAGGGRATSVA

SEQ ID NO: 490 - protein, 1440 aa, Neoporphyra haitanensis
RRSPDPPPPPPPLQPPLPRPPRLRSTWRTHRPPPPPLPFHAKCGCRGVDEIPRYCRARRVASPPAEPARGAPPRRLAPPYKRGRSLPSPPPATTGRQHQTVPRSTRPPHRLPTSAALAMEPDEEEPGAGPQDEGPHGHGADADDALPPGDGAASGDDADPREVAELEAAVHLKQGRLRGLLRRMGEARARRPQLPDGAALDAALARMTAAAAAAAGAPHEASPTTDGAVAASGAALEAATTPAVAGATAWVDAHHPLDDDGLLAQRARRAASLIGSTSRGMARRVAEVEDRRGAAPGGGPCARCRQRSHKTGAATCPATAVGGDKNPHAYDRGEDPAASDPYACRATGTSSVMVPVAAVLRTLPASPDGTAHAVVRGGFLATAEHHTQLHFTLTLVWLNTVHTLFGAVKADGWAAALPGPAGWGEYWNWVAYAVCCRGAHGGSLPAGVKCGSCGRARDNTLCGPAARRLSVSYPALMDATRNAMDALASSFDAACHDHLPHGNSHARWRGVVTTIVTHTARTVAVATRRLAWRVATMVVDAADAPASGEEQRGRRRAAVYAAARSCLERGSDAPHAAHAAKLDALPPDVRAAALREIADARVRAQPAPVQGTPPLFPTGGAHVVARRWAEYIPYLLHVQAEGVVDKPFSLVPGKAATLHGYGTVTKARLGPLIRRAWPAHRELYEDVRRRGAAAIAGLLGLETARCTSGADLRSNGEGVVFTLSRPATAAEAEAADVAAVTRKANGSRVQSRVQGSPTTQLEKQGFPIAAVKTLTVVSADPGKATVLTAVSSGPTAAAWGDRPWVRRRRLARSRLVAADALTRAALALDAVVWRAAALAPAEAAAAGAAAAAAAAAAAAAAGGAPPGALTPSPAWRKRKAAPGGAEQRQPPCGNAATTGPPRGGAAGGTAAPAPSVRPPSERTARGPAASLRRGAVRRLRAVAQRLVVATGNGRWRVPRHAAVDVALGCLRRAAAGWVRPRVADGRPDGAAFAACKTAAAAQDVAAAGAFASALDGLTARVADAVGATRGWRAPPPAGAVYTLTRGRYTEAAGNGMTARAAAAHRREAAQRLAALQLPPATTPEVVAAHDTVRTGDAAAVLAASRQWMESRRQPQYRAVWGAAATAGQRKARVHQVIRRRRLGEAVARELTGGRLRRVVNRSAVVVVVGQAATRGGATWLRRHLRRLCWMVDADEHNSSQACAGCRQQLAVVYASAAAPPPVPRGTLICGRRRGRRGRQGRPRAPPTAGWERTQPVRSAARRAACRAEAAKMAAERAVKHPPPARVVFRAPAAAGVWGVKRCVERACSRQLVNRDVNAAANMGWKALRQIRQLPCHPFMRPQRVRRPRLGGGDDGEAAGAAAADRAGDGACGRPPGAAVVAVATGDAGGEAAVGPDGDGGARTAVVADTHTVATTELARAAETGDGAPAVAGGGRATSVA

SEQ ID NO: 491 - protein, 622 aa, Neoporphyra haitanensis
SPPASSEAGGAAVQPNGLTGGVAATFYVSRPDTPAEAEARAADWARQQSTAGGRRKGGAGVRSAVHAGALTQLERSGLPLGTVRRMQVVGVDPGRSCILTVAPGECISTADLPARPAVDAMRAAWARRLGLDALNRACAALLCSKDDAAGDASATASGHHQQTHVKQGKRAASAVAGGGGRAAKRPQQTGARGTSDPPSAEQTGRTYQTAMPGRSHRRVRRGPNATHRRAGRTKLAAAVRRVLRRTRLHRWTVPRHEAEAVARRVVTHAASSSSALLERVEALPRRKDRRCLAPMPGIRYKVSAAQVREASGGSFKARAWKLWRQRAEAASAARAGSDTEVPPPVDEAAAHGTMRTGDREQHLRATREWAALRETAAYVERFGAEATRGLRAAALHQTIQRGRFAAATARDLTGGLLRQVRGGTVVVVAMGNARVRGGDGWVRRYLRRLCWLVDQDKFNTSQACPSCHEKLVLAYPTGNSPPTLPAELFGPKVADSHNAMDVSSPSSARQPRRPCIRQPWMETRFWLGCSAAAGGPACVPAAEFFLFYNFFPLPHRATNGRWPRWWRWGRRRRQQWCGCGSGVNSSSNGGGRGRVFEDAMVAQDVVRERVQQPNFIVLQKFH

SEQ ID NO: 492 - protein, 622 aa, Neoporphyra haitanensis
SPPASSEAGGAAVQPNGLTGGVAATFYVSRPDTPAEAEARAADWARQQSTAGGRRKGGAGVRSAVHAGALTQLERSGLPLGTVRRMQVVGVDPGRSCILTVAPGECISTADLPARPAVDAMRAAWARRLGLDALNRACAALLCSKDDAAGDASATASGHHQQTHVKQGKRAASAVAGGGGRAAKRPQQTGARGTSDPPSAEQTGRTYQTAMPGRSHRRVRRGPNATHRRAGRTKLAAAVRRVLRRTRLHRWTVPRHEAEAVARRVVTHAASSSSALLERVEALPRRKDRRCLAPMPGIRYKVSAAQVREASGGSFKARAWKLWRQRAEAASAARAGSDTEVPPPVDEAAAHGTMRTGDREQHLRATREWAALRETAAYVERFGAEATRGLRAAALHQTIQRGRFAAATARDLTGGLLRQVRGGTVVVVAMGNARVRGGDGWVRRYLRRLCWLVDQDKFNTSQACPSCHEKLVLAYPTGNSPPTLPAELFGPKVADSHNAMDVSSPSSARQPRRPCIRQPWMETRFWLGCSAAAGGPACVPAAEFFLFYNFFPLPHRATNGRWPRWWRWGRRRRQQWCGCGSGVNSSSNGGGRGRVLEDAMVAQDVVRERVLQPNFIVLQKFH

SEQ ID NO: 493 - protein, 622 aa, Neoporphyra haitanensis
SPPASSKAGGAAVQPNGLTGGVAATFYVSRPDTPAEAEARAADWARQQSTAGGRRKGGAGVRSAVHAGALTQLERSGLPLGTVRRMQVVGVDPGRSCILTVAPGECISTADLPARPAVDAMRAAWARRLGLDALNRACAALLCSKDDAAGDASATASGHHQQTHVKQGKRAASAVAGGGGRAAKRPQQTGARGTSDPPSAEQTGRTYQTAMPGRSHRRVRRGPNATHRRAGRTKLAAAVRRVLRRTRLHRWTVPRHEAEAVARRVVTHAASSSSALLERVEALPRRKDRRCLAPMPGIRYKVSAAQFREASGGSFKARAWKLWRQRAEAASAARAGSDTEVPPPVDEAAAHGTMRTGDREQHLRATREWAALRETAAYVERFGAEATRGLRAAALHQTIQRGRFAAATARDLTGGLLRQVRGGTVVVVAMGNARVRGGDGWVRRYLRRLCWLVDQDKFNTSQACPSCHEKLVLAYPTGNSPPTLPAELFGPKVADSHNAMDVSSPSSARQPRRPCIRQPWMETRFWLGCSAAAGGPACVPAAEFFLFYNFFPLPHRATNGRWPRWWRWGRRRRQQWCGCGSGVNSSSNGGGRGRVLEDAMVAQDVVRERVLQPNFIVLQKFH

SEQ ID NO: 494 - protein, 380 aa, Neoporphyra haitanensis
GTGGASACGDAREPRVARPPPPGAVYSLSRERYHEESGNGMTTRAVADHRAAAVARIAELGDAAGVRTPEQVTERATLCVGDAEAVRVASREWLAARCKPVYEAVWGSAATRGLREARLYGVLQRGRFAARVARELTGGRLRRVVNGSVVAVALGDAATRGGATQLWRRLRHLCWTVDVPERNTSAACDGCHTRLALVFPTPASPPQVPRGTRVCGRRRGVRGRTGRPSGVQRGWWDRSAPVRYARRRAACRAEAENAATARAAAHPRPHAGPVFRADRKAVVWCVKVCVEPTCARGMVNRDVTAAANLGWRTWQWIRGRPCHPFRTAAHVRWPRIDWNGRTGGAADGRGAGGAAADPLVAASGEGGGAAAAGGGEAPHA

SEQ ID NO: 495 - protein, 307 aa, Neoporphyra haitanensis
GLPVCGWCLTEAVARELTGGRLRRVVNRSAVVVVVGQAATRGGATWLRRHLRRLCWMVDADEHNSSQACAGCRQQLAVVYASAAAPPPVPRGTLICGRRRGRRGRQGRPRAPPTAGWERTQPVRSAARRAACRAEAAKMAAERAVKHPPPARVVFRAPAAAGVWGVKRCVERACSRQLVNRDVNAAANMGWKALRQIRQLPCHPFMRPQRVRRPRLGGGDDGEAAGAAAADRAGDGACGRPPGAAVVAVATGDAGGEAAVGPDGDGGARTAVVADTHTVATTELARAAETGDGAPAVAGGGRATSVA

SEQ ID NO: 496 - protein, 380 aa, Neoporphyra haitanensis
GTGGASACGDAREPRVARPPPPGAVYSLSRGRYHEESGNGMTTRAVADHRAAAVARIAELGDAAGVRTPEQVTERATLCVGDAEAVRVASREWLAARCKPVYEAVWGSAATRGLREARLYGVLQRGRFAARVARELTGGRLRRVVNGSVVAVALGDAATRGGATQLWRRLRHLCWTVDVPERNTSAACDGCHTRLALVFPTPASPPQVPRGTRMCGRRRGVRGRTGRPSGVQRGWWDRSAPVRYARRRAACRAEAENAATARAAAHPRPHAGPVFRADRKAVVWCVKVCVEPTCARGMVNRDVTAAANLGWRTWQWIRGRPCHPFRTAAHVRWPRIDWNGRTGGAADGRGAGGAAADPLVAASGEGGGAAAAGGGEAPHA

SEQ ID NO: 497 - protein, 668 aa, Neoporphyra haitanensis
HRRQYVEGCPCVGGASQSGPTAAAWGDRPWVRRRRLARSRLVAADALTRAALALDAVVWRAAALAPAEAAAAGAAAAAAAAAAAAAAAAGGAPPGALTPSPAWRKRKAAPGGAEQRQPPCGNAATTGPPRGGAAGGTAAPAPSVRPPSERTARGPAASLRRGAVRRLRAVAQRLVVATGNGRWRVPRHAAVDVALGCLRRAAAGWVRPRVADGRPDGAAFAACKTAAAAQDVAAAGAFASALDGLTARVADAVGATRGWRAPPPAGAVYTLTRGRYTEAAGNGMTARAAAAHRREAAQRLAALQLPPATTPEVVAAHDTVRTGDAAAVLAASRQWMESRRQPQYRAVWGAAATAGQRKARVHQVIRRRRLGEAVARELTGGRLRRVVNRSAVVVVVGQAATRGGATWLRRHLRRLCWMVDADEHNSSQACAGCRQQLAVVYASAAAPPPVPRGTLICGRRRGRRGRQGRPRAPPTAGWERTQPVRSAARRAACRAEAAKMAAERAVKHPPPARVVFRAPAAAGVWGVKRCVERACSRQLVNRDVNAAANMGWKALRQIRQLPCHPFMRPQRVRRPRLGGGDDGEAAGAAAADRAGDGACGRPPGAAVVAVATGDAGGEAAVGPDGDGGARTAVVADTHTVATTELARAAETGDGAPAVAGGGRATSVA

SEQ ID NO: 498 - protein, 380 aa, Neoporphyra haitanensis
GTGGASACGDAREPRVARPPPPGAVYSLSRGRYHEESGNGMTTRAVADHRAAAVARIAELGDAAGVRTPEQVTERATLCVGDAEAVRVASREWLAARCKPVYEAVWGSAATRGLREARLYGVLQRGRFAARVARELTGGRLRRVVNGSVVAVALGDAATRGGATQLWRRLRHLCWTVDVPERNTSAACDGCHTRLALVFPTPASPPQVPRGTRVCGRRRGVRGRTGRPSGVQRGWWDRSAPVRYARRRAACRAEAENAATARAAAHPRPHAGPVFRADRKAVVWCVKVCVEPTCARGMVNRDVTAAANLGWRTWQWIRGRPCHPFRTAAHVRWPRIDWNGRTGGAADGRGAGGAAADPLVAASGEGGGAAAAGGGEAPHA

SEQ ID NO: 499 - protein, 1380 aa, Neoporphyra haitanensis
QVRPLSPRGGLPPDAWRPHISGAAPCRPRPPPPLGRLHQTVPRSTRPPHRLPTSAALAMEPDEEEPGAGPQDEGPHGHGADADDALPPGDGAASGDDADPREVAELEAAVHLKQGRLRGLLRRMGEARARRPQLPDGAALDAALARMTAAAAAAAGAPHEASPTTDGAVAASGAALEAATTPAVAGATAWVDAHHPLDDDGLLAQRARRAASLIGSTSRGMARRVAEVEDRRGAAPGGRPCARCRQRSHKTGAATCPATAVGGDKNPHAYDRGEDPAASDPYACRATGTSSVMVPVAAVLRTLPASPDGTAHAVVRGGFLATAEHHTQLHFTLTLVWLNTVHTLFGAVKADGWAAALPGPAGWGEYWNWVAYAVCCRGAHGGSLPAGVKCGSCGRARDNTLCGPAARRLSVSYPALMDATRNAMDALASSFDAACHDHLPHGNSHARWRGVVTTIVTHTARTVAVATRRLAWRVATMVVDAADAPASGEEQRGRRRAAVYAAARSCLERGSDAPHAAHAAKLDALPPDVRAAALREIADARVRAQPAPVQGTPPLFPTGGAHVVARRWAEYIPYLLHVQAEGVVDKPFSLVPGKAATLHGYGTVTKARLGPLIRRAWPAHRELYEDVRRRGAAAIAGLLGLETARCTSGADLRSNGEGVVFTLSRPATAAEAEAADVAAVTRKANGSRVQSRVQGSPTTQLEKQGFPIAAVKTLTVVSADPGKATVLTAVSSGPTAAAWGDRPWVRRRRLARSRLVAADALTRAALALDAVVWRAAALAPAEAAAAGAAAAAAAAAAAAAAGGAPPGALTPSPAWRKRKAAPGGAEQRQPPCGNAATTGPPRGGAAGGTAAPAPSVRPPSERTARGPAASLRRGAVRRLRAVAQRLVVATGNGRWRVPRHAAVDVALGCLRRAAAGWVRPRVADGRPDGAAFAACKTAAAAQDVAAAGAFASALDGLTARVADAVGATRGWRAPPPAGAVYTLTRGRYTEAAGNGMTARAAAAHRREAAQRLAALQLPPATTPEVVAAHDTVRTGDAAAVLAASRQWMESRRQPQYRAVWGAAATAGQRKARVHQVIRRRRLGEAVARELTGGRLRRVVNRSAVVVVVGQAATRGGATWLRRHLRRLCWMVDADEHNSSQACAGCRQQLAVVYASAAAPPPVPRGTLICGRRRGRRGRQGRPRAPPTAGWERTQPVRSAARRAACRAEAAKMAAERAVKHPPPARVVFRAPAAAGVWGVKRCVERACSRQLVNRDVNAAANMGWKALRQIRQLPCHPFMRPQRVRRPRLGGGDDGEAAGAAAADRAGDGACGRPPGAAVVAVATGDAGGEAAVGPDGDGGARTAVVADTHTVATTELARAAETGDGAPAVAGGGRATSVA

SEQ ID NO: 500 - protein, 847 aa, Neoporphyra haitanensis
GLPVCGWCLTAQPAPVQGTPPLFPTGGAHVVARRWAEYIPYLLHVQAEGVVDKPFSLVPGKAATLHGYGTVTKARLGPLIRRAWPAHRKLYEDVRRRGAAAIAGLLGLETARCTSGADLRSNGEGVVFTLSRPATAAEAEAADVAAVTRKANGSRVQSRVQGSPTTQLEKQGFPIAAVKTLTVVSADPGKATVLTAVSSGPTAAAWGDRPWVRRRRLARSRLVAADALTRAALALDAVVWRAAALAPAEAAAAGAAAAAAAAAAAAAAGGAPPGALTPSPAWRKRKAAPGGAEKRQPPCGNAATTGPPRGGAAGGTAAPAPSVRPPSERTARGPAASLRRGAVRRLRAVAQRLVVATGNGRWRVPRHAAVDVALGCLRRAAAGWVRPRVAHGRPDGAAFAACKTAAAAQDVAAAGAFASALDGLTARVADAVGATRGWRAPPPAGAVYTLTRGRYTEAAGNGMTARAAAAHRREAAQRLAALQLPPATTPEVVAAHDTVRTGDAAAVLAASRQWMESRRQPQYRAVWGAAATAGQRKARVHQVIRRRRLGEAVARELTGGRLRRVVNRSAVVVVVGQAATRGGATWLRRHLRRLCWMVDADEHNSSQACAGCRQQLAVVYASAAAPPPVPRGTLICGRRRGRRGRQGRPRAPPTAGWERTQPVRSAARRAACRAEAAKMAAERAVKHPPPARVVFRAPAAAGVWGVKRCVERACSRQLVNRDVNAAANMGWKALRQIRQLPCHPFMRPQRVRRPRLGGGDDGEAAGAAAADRAGDGACGRPPGAAVVAVATGDAGGEAAVGPDGDGGARTAVVADTHTVATTELARAAETGDGAPAVAGGGRATSVA

SEQ ID NO: 501 - protein, 426 aa, Neoporphyra haitanensis
DGLTARVADAVGATRGWRAPPPAGAVYTLTRGRYTEAAGNGMTARAAAAHRREAAQRLAALQLPPATTPEVVAAHDTVRTGDAAAVLAASRQWMESRRQPQYRAVWGAAATAGQRKARVHQVIRRRRLGEAVARELTGGRLRRVVNRSAVVVVVGQAATRGGATWLRRHLRRLCWMVDADEHNSSQACAGCRQQLAVVYASAAAPPPVPRGTLICGRRRGRRGRQGRPRAPPTAGWERTQPVRSAARRAACRAEAAKMAAERAVKHPPPARVVFRAPAAAGVWGVKRCVERACSRQLVNRDVNAAANMGWKALRQIRQLPCHPFMRPQRVRRPRLGGGDDGEAAGAAAADRAGDGACGRPPGAAVVAVATGDAGGEAAVGPDGDGGARTAVVADTHTVATTELARAAETGDGAPAVAGGGRATSVA

SEQ ID NO: 502 - protein, 1381 aa, Neoporphyra haitanensis
QVRPLSPRGGLPPDAWRPHISGAAPCRPRPPPPLGRQHQTVPRSTRPPHRLPTSAALAMEPDEEEPGAGPQDEGPHGHGADADDALPPGDGAASGDDADPREVAELEAAVHLKQGRLRGLLRRMGEARARRPQLPDGAALDAALARMTAAAAAAAGAPHEASPTTDGAVAASGAALEAATTPAVAGATAWVDAHHPLDDDGLLAQRARRAASLIGSTSRGMARRVAEVEDRRGAAPGGRPCARCRQRSHKTGAATCPATAVGGDKNPHAYDRGEDPAASDPYACRATGTSSVMVPVAAVLRTLPASPDGTAHAVVRGGFLATAEHHTQLHFTLTLVWLNTVHTLFGAVKADGWAAALPGPAGWGEYWNWVAYAVCCRGAHGGSLPAGVKCGSCGRARDNTLCGPAARRLSVSYPALMDATRNAMDALASSFDAACHDHLPHGNSHARWRGVVTTIVTHTARTVAVATRRLAWRVATMVVDAADAPASGEEQRGRRRAAVYAAARSCLERGSDAPHAAHAAKLDALPPDVRAAALREIADARVRAQPAPVQGTPPLFPTGGAHVVARRWAEYIPYLLHVQAEGVVDKPFSLVPGKAATLHGYGTVTKARLGPLIRRAWPAHRELYEDVRRRGAAAIAGLLGLETARCTSGADIRSNGEGVVFTLSRPATAAEAEAADVAAVTRKANGSRVQSRVQGSPTTQLEKQGFPIAAVKTLTVVSADPGKATVLTAVSSGPTAAAWGDRPWVRRRRLARSRLVAADALTRAALALDAVVWRAAALAPAEAAAAGAAAAAAAAAAAAAAGGAPPGALTPSPAWRKRKAAPGGAEQRQPPCGNAATTGPPRGGAAGGTAAPAPSVRPPSERTARGPAASLRRGAVRRLRAVAQRLVVATGNGRWRVPRHAAVDVALGCLRRAAAGWVRPRVADGRPDGAAFAACKTAAAAQDVAAAGAFASALDGLTARVADAVGATRGWRAPPPAGAVYTLTRGRYTEAAGNGMTARAAAAAHRREAAQRLAALQLPPATTPEVVAAHDTVRTGDAAAVLAASRQWMESRRQPQYRAVWGAAATAGQRKARVHQVIRRRRLGEAVARELTGGRLRRVVNRSAVVVVVGQAATRGGATWLRRHLRRLCWMVDADEHNSSQACAGCRQQLAVVYASAAAPPPVPRGTLICGRRRGRRGRQGRPRAPPTAGWERTQPVRSAARRAACRAEAAKMAAERAVKHPPPARVVFRAPAAAGVWGVKRCVERACSRQLVNRDVNAAANMGWKALRQIRQLPCHPFMRPQRVRRPRLGGGDDGEAAGAAAADRAGDGACGRPPGAAVVAVATGDAGGEAAVGPDGDGGARTAVVADTHTVATTELARAAETGDGAPAVAGGGRATSVA

SEQ ID NO: 503 - protein, 380 aa, Neoporphyra haitanensis
GTGGASACGDAREPRVARPPPPGAVYSLSRGRYHEESGNGMTTRAVADHRAAAVARIAELGDAAGVRTPEQVTERATLCVGDAEAVRVASREWLAARCKPVYEAVWGSAATRGLREARLYGVLQRGRFAARVERELTGGRLRRVVNGSVVAVALGDAATRGGATQLWRRLRHLCWTVDVPERNTSAACDGCHTRLALVFPTPASPPQMPRGTRVCGRRRGVRGRTGRPSGVQRGWWDRSAPVRYARRRAACRAEAENAATARAAAHPRPHAGPVFRADRKAVVWCVKVCVEPTCARGMVNRDVTAAANLGWRTWQWIRGRPCHPFRTAAHVRWPRIDWNGRTGGAADGRGAGGAAADPLVAASGEGGGAAAAGGGEAPHA

SEQ ID NO: 504 - protein, 283 aa, Neoporphyra haitanensis
LIDQDEFNTSQACPSCHQKLVLVYPTGNSPPTLPAELFDPPVAAPGRRVRMAAGSRRGQPKRSRPSADHETRRGSEVDTFRASARATAHAAAVARRAVALASCAVEDRGLYTDRSRSSAWSVKGCITEGGPARPDFVNRDCIAAVNMAWAIARRLTYTNVWPFKRPGRMRWSWCIICPPDRAPVPRQRRERATVRVDAWPPPGTKVGAAGDGGGAGASGGGSGGGACGADRDVPRGGLRCAPRRREAPLGDSPVAVDSAHDGARRTGTVAAEEPRGPVDAAGR

SEQ ID NO: 505 - protein, 768 aa, Saccharina japonica
GVQTSQMSSQLIMVQPSLEGNPRKKKKRKTATHEASPKTVPGFLQTVVRLYPTKCLPASGNLPRSYKGTFCCRLFSKVRFGEQVSQLLRTRTVNVGFQSATTYENRDTFQTKVDEAVDHFSRERVLASLFANFLFMERLRDGSIIPEPDEKFYNSCLSSCIKSAGGGLNEDFDRFSVLTGLARLEPPKKLNLSQIRRYEAISMATSASTRAQHHTEKRRIVITRWFLRGLVSRRDMVYKKYATKLYNLAKKIIVQFDGTIEKEQELRKDALDVDPDTDIASITEFAQKERDFSLRVSGDETCAPTIKHLNWMFKTYVAGSRRRYEEVVSRSHAFSPGEDKASRKQRDEFVKKELGKEDNCAPPRDTAVLPICSSGSVFIRIDTKTLKSWGFWHSDDAWWYNNVLQPFSKAANIKCLKSEENAKYASNQQGYLSSLLESGPAKCPWMVGESFLTDGVQIKMLLLTLRHTRKAFPGSSELNDAGYNKLPRADAPLESLLRVGRGVYNIKSLTESTRLPGDLVVMSADPGQAKVINVCSATCEEWARRDPKVILRTATCVFGDDYRRDTRASCSDEYETSRRRDRPYGKAIDRLRNEKKRTSCLDTFIRYCRSWFINGPVVAKETLVHERKLNRFSRFRATQKTLAKIANRYMGTVGEACRVMLFGKASFRAQKGRASAPRKAMIREMASRGVVLMVGEYNTSKKCPGCLEDTVEDKERRIRSCKNFKVGYPEESCKLHPLTQEFEMDRDDVGSTNIGMRGFGLLLGQKWF

SEQ ID NO: 506 - protein, 633 aa, Saccharina japonica
NIYVLYTNKSARIGLLRAGCSSRLPRPRKGMTSPEPHWHPGETPGRSGSGDLEMEDARENESTTSETSMNGSDPLSNPQNQNTMRAISTPESAHPSRPPTLSDRSRTSREVTRTTRLSRISDPDSTTDARTSRPFWDASTLAMSRRLSCPTGIGSVGTDLNSSNSSVNSTARRSWSTTSQKLRGPSKNSLKISWPSAISSSRETMGGGEAGTQKSVKDVRARKIKLDPSPEWKERLRKWMGTARWTYNRCLDYYKKGNCRINKTDFRSKVVGGWNHGDPKRRTGKKKKKRGLKRGNWSIPKKTFKRECKTSWVLETPFEIRDSAMVDLYNGFVTNLKKREKNPSHTFDMSFRSRRDVQVIKIPGACVKNGYMFKKTCGKSKLKGFEDWTSFAGEIVIQMDRSKNFYACVTKQSDVTPPRVENHEDLKVVALDPGVRTFNTGVDSKGNVTEFAPGDVGRIYRLCHHMDLLQSKAFDKSVKSKKRYRLRKAWHRAIKRVKDLVTDVRNKTVKHLCKNYDVIFLPEFNTKDMVNRAKRNIGNGTARGMMTWSHYKFKELLKTTALREGVKLVIVTEEFTSKTCSCCGHLHHNLGRSKVFSCPSCPVVMDRDENGARNILMKSCVENRLTLTWKERV

SEQ ID NO: 507 - protein, 246 aa, Saccharina japonica
RRNLNYRANLPALPSPKTGRVDIFLEYVRAALESMGQKLEVANSKRVRAVRSTVDSMGGGRQFSRASPIESFVTSSRVTTGTDVVVTYGAASFNCKGIHPGRVKTLRSEVEKRVGIGTGPSGGGGAASGEEVNEDYTSKVCSKCHEVLTSMLDERRGIFNSVRVRYCSTTSCFAPGLPVKSCRERLSQATSGTSSSTRTRTTASDQIYSRGPTTALPRSLNPQHFFVVCLYNLFGGKCHDRQASKA

SEQ ID NO: 508 - protein, 281 aa, Nymphicus hollandicus
RQAEKVGAVQPGEEKAVWRPQSSLVSGSQARILNHKNDFRIGRTTLSYDSDDKYYLSMQLASDTPFVKEKPKTGKKLGVDLNLSVFLADSNGQTINNPRFYQKMTQRLAKAQRKLSRKKVRAIKEKRSLRSAKNYQKQRRLIAKLHEKIKNRRTDFVQKLTTALINSHDLVVAERLQSKNLLKNHALAKSIQDAGWREFLASMEYKAKLYGKSFIMVDPKNTTQRCSQCGFIKEGKDKITLSGNKLHHTKHNEYVCYECGYQADRDINAAKNILAKGLKEW

SEQ ID NO: 509 - protein, 241 aa, Nymphicus hollandicus
LSVIMECDCQTFQKTGQKIGIDLGLHDLMILSNGIKYKKYTTKYLDNEAKQWQRKMAYRKNKATISVRQWNYNHDANHSQELEDYSNWQRAKQIKATYQDKAKRKRNMCLQQITTDLVKNYDVIVMEYLKVKNMMKNDHLADSIAHACWRKIRDMLTYKCQWHGKQLIVINPRNTSRVCHHCHHLQEQFKGMPTNEWLNTRQWYCEKCGILQDRDIALTKGILSNPELEIKTFSPFFNLQE

SEQ ID NO: 510 - protein, 276 aa, Nymphicus hollandicus
SFLTLFVMKNKFKVIVQYKTNKTINYKPDNGKYIGIDPGIDNAFTCVDSTMNHHPLIINGKVIKSINQYYNKRRSQLYRLHAQYNQNYRVIHTKQGLKKVYQESNATQKLTQWRNAKLHQFAHKATKRIIDYALNCGTNTIVIGNNKDWKRFVKMGKKNNQNFVGIPHQKMIDMLTYKANLQGISVITTSEGYTSQTSFLDNEKPCYQNGNASRKAKGLVPFKRRIHRGLFRSNQNILINADVNGAYQIIRKVCPKVISDGIVGTVSCPIKYSPLI

SEQ ID NO: 511 - protein, 518 aa, Neopyropia yezoensis
KQWRACSDTEAGQVAAAVAGLVAAAGDVGGVAGHLPPVDLAAAHDTMRTGDDGKYLQATLELAARRDTAAYGERFSAQATRHLRAALVRMAIQLGHFAASVARDLTSGLLRQVRGGGAVVVAMGTARVRGGDAWLRRHLRRLCWFVDLDEFNTSQACSECHDKMVLIYSTANSPPKIPRELYGPPAGPLPSTRRVRMVAGSRRGRPKRALPSATHVTGRGPDPDAYRAAVRATARAEAVARRAAALAPCAVEDRAVHADPRRLSEWAAKGCYKCSLAAPQGPGHPAPHPPAIRNRDDVAARNMAWVAARRLTGTIVWPFKRPFGMRWAWTTKRPPSGVPVPPVRRTRATTRVDVWPVLAAVDTVVDGGGGGGGGGGGGGGGGGGGGGCGGGGGGGGGGGGGGGGGCGGGGGGGGRGVVDGDATAASCTTRRGAPGGERVVAAGSAMDGVRRAETGATDAPRGLVDTAKRKDSAHLARDPHLPRGASPAPFFADEPIMGNCRPFTSRLDAGFSRGPFPG

SEQ ID NO: 512 - protein, 671 aa, Neopyropia yezoensis
GHNAVNHIATVVFTLTGPATAAEAAAAYVAESTRKADGSRVQQRVAGSPTTQLEKQGFPVAAVKTLTVVSADPGNAAILTAVLSGPTAAAWGDRPWVRCRRLARSQLVAANALTRAALALDAVVWRTASLAPAEAAAAGAAAAAAAGARPGALPPTPGRKKRKAGPGGAEQRQMPCGKAAMSGPPSRDAAGETAANASPARPPSARTVRGPAASLRRGAMRRLQAAAQCLVAATGNGRWQMPRHAAVNVALGCLRRAAAGWVRPLVGDGRPDGAAYAASKTAAVAQDVATAGAFASALDGLTVRVPHAVRATRAWHAPPPAGAVYTPTKGRYTEAAGNGMTSRAATAHRREAAQGLSALRPPPATTPESVAAHETVRTGDAAAVLASSRQWMESRRQSRYRVAWGDAATAGQRKARVHQVIQRRRLDEAVARELTGGRLRRVVNRSAVVPVVGQAATQGGATWLRRHLRRLCWIVNADEHNSSQACAGCRHQLAIVYASAASPPCVPRGTMISGRRGGSRGRQGPPRAPPTAGWERTQPVCSATGRAACRTEGAKLAAERAAKHAPPTGVVFRAPAAAGVWGVKRCVERTCPQMLVIRDVNAAANMGWKALQQIRQLPCHPFVRPQQVRRPRPGGGNGREADTAPTDTLGTAESGDGRPAAAGGGAVASTA

SEQ ID NO: 513 - protein, 997 aa, Neopyropia yezoensis
RGAHGGSLPAGVKCGSCGRARDNTLCGPAARRLLVSYPALMDATRNAMDALASSFDAACRHHEPHGNSLARWRGVVTTIVTHTARTVAVATRRLAWRVATKVVDAADAPACGDEQRGRRRAAVYTAARSCLERERDAPRAAHAAKLEALPSDVRAAALTEIADARARAQLAPAQGIPPLFPTGGAHAVERRWAQNIPYLLHVQVEGVVDKPFSLVPGKVATLHGYSTVTKARLGPLIQRAWLTHRELYDDVRRRGAAATAGLLGLETVRCTASADLRSNGEGVVFTLLRPATAAEAEAADVAAATRKANGSRVQQRVAGSPTTQLEKQGFPAATVETLTVVSADPGKATVLTAVSSGPIAAAWGDRPCVRRRRLARSRLMAADALTRAALALDAVVWWAAALAPADAAAAGAAPAPAAAGARPGALPPLPARRKRKAGPGGAEQRQPPCGKAARTGPPRGGAAGGTASPAPPARPRSARTARGPAASLRRGAVRRLRAAAQRLVATTGNGRWRVPRHAAVEVALGCLRRAAAGLGRPRVEGGQPDGAAFAACKTAAAEQDVAAAGAFAFALDGLTARVADAVGATRGWRAAPPTGAVYTLSRGRYTEAAGNGMTARAAAAHWREAAQRLAELQLPPATTPEVVAAHDTVRTGDAAAVLAASRQWMESRRQPQYRAVWGAAATAGQRKARVHQVIQPRRLGEAVARELTGGRLRRGINRSAVVVVVGQAATRGGATWLRRHIRRLCWMVDADEHNSSQACAGCRQQLAVVYALTAAPPPEPRGTLICGRRRGRRGRQGRPRAPPTAGWERTQPVRSAARRAACRAEGANMAAERAVKHPPPAGVVFRAPDAAGVWGVKRCVERACARRLVNCDVNAAANMGWKALRQMRQLPCHPFVRPQRVRRPVLEGGDDGEAAGATPAGRAVGGDGGRPPGAAVVAGATGDAGREGAVGPGGDGGARAAVVADTHTVASTELSGAAGAGDGAPAVAGGGGATFVA

SEQ ID NO: 514 - protein, 1431 aa, Neopyropia yezoensis
AKAARQPTGARGGASILRSAPCPRRSVGLGVAGGRRREGEERGGGGGRGGGAGGRGAGGGGWGGGGGGGGGEGWEDLDRRHPDGPCSPSPASTARVRQRVRTPARMVPCQTINRAVGGAPWFPIFADPLSHRRQSHPPTLLTVVPTHITRSSASTPPPPPPPGFTMNDDDDGSDEDIGVDGLEGDTTSDEEWDPAPEQAYVQDARNVVTLKRAVLSASLCRLQNVSAPHGGDAASSADWSAAVAQLQQAAKDEEAAGPLDGAGEDLVAAITGAAKAVSVYCGGRAAPSEAEVELAARAKTAAGLLDVAAAGLPRREAATDAPPACKGRTQKCSGCGELGHKVTSCKAPAGAGPAAAAAAAAAAAAAVPAAAAAAASKCRVCLRGGHSSGDAACPVQRRCKGVPAAYDRGVDPDCKDWLQSTGRQTRACTVPVGDLARAVFGDDKDYVDTRAAVETALQAELEDLSGAATKLRFLMLRVLDVALRRLVSTVADAAADDADWTGAVPANWAPVWLWLAYACGCEVVSGSPLQAGTVCAGCGKGRANTRMARARSVVTTSHLLLAEALSYALTEVMAVTAAACNRYLPVSNNTARWEPVATIVATHAGRCVDAACRKLGAKAAKDALAASPAATAAPAGGSAWDMERRLTRWAAARFRAGTADKATPGRRGLDGVRQHLVQALAQRVAVMRAAMPPSVAGLFSATPVKKRRWWAYVPFLLHVLNVGVWSPYALIPGARAVLHGHGTLVPEKMLALLRAVSAATGVGVRGHPSLRACPELRTGGAAVLAAMAAVGGRANRAASQLSTDGVAVTFFLSRPDTAAEAEARAVAWAKKLDGGGRARDRGGKGFASRAGVLTQLERAGLPLARVRWLQMVGGDPGRSAVLSASPGERVATADLPARPVVAAMRAAWSLHMGLDALNRAAVALLRGAGVQDGVAADATVPDGHPPGGSRKRAAAGALAAGAGTGGSRFKRQARRSSPEGSDDDAAAVAPAAAGATTPTEAKTYQTASPGGGHGRVRRGPQASIRRACRTQLATSVRRVLRRTRLSRWTVPSHEAEKVARWLVDPTAAAGDSDSGTTPDAPLQDRVDALPRRKGCRRLAPVPGLRDSLSAAYFREASGGNFSARAWKQWRARSGTGAGPVAAAVARLVAAAVGDGGGVAGHLPPVDLAAAHGTMRTGDDGRHLPATLAWAARWDTAAYGQRFGAQATRHQRTARVRKAIQRGRFAASVARDLTGGLLRQVRGGGAVVVAMGTARVRVEDAWLRRHLRRLCWFVDQDGFNTSQACPECHDKMVLIYSTGNSPPKTSRELYGPPAGPLPSTRRVRMAAGSRRGRPKRALPSATHVTRRGPDPDAYREAVRATARAASVARRAAALAACAVKDRAVYADPRRLSEWAARGCYTCSLATPQGPGHPAPHLPVIRNRDDVAARNIA

SEQ ID NO: 515 - protein, 650 aa, Neopyropia yezoensis
LNRAAVALLRGEGVQDGVAAAASMPEGHLPGGSRKRAAAGAPAAGAGIGGSLSKRHTRRSSPEGSDDDAVAVAPAAAGATTPPEAKTYQTASPGGGHGRVRRGPQASIRRARRTQLATSVRRVLRRTRLSRWTVPRHEAEKVARWLVDPTAAAGDSASGTNPDAPLQDRVDALPRRKRCRRLAPVSGLRYSLSAAHFREASGGNFLARAWKQWRARSGTEAGLVAAAVAGLVAAAGDGGGVTGHLPPVDLAAAHGTMRTGDDGKHLQATLEWAARRDTAAYGQRFGAQATPNLRTERVRKAIQRGRFAASVARDLTGGLLRQLRGGGAVVVAMGTARVRRGDAWLCRQLRRLCWFVDQDEFNTSQACSECHEKMVLIYPTGNSPPKIPRELNGPPAGPLPSTRRVRMAAGSRRGRPMRALPSATHVTRRGPDPDAYHDAVRATARAAAVARRAAALAACAVEDRGIYADPKRLSEWAAKGCYTCSLAAPRGPGHPAPHPPVIRNRDDVAARNIAWVAARRLTGTNVWPFKRPFGMRWAWTTKRPPSGVPVPPVRRTRATTRVDVWPVLAAVDTVVDGRGGGGGDGGGGGGGGGGGRRVVDGGAPAASCTTRRGAPGGEQVAAAGSAMDGVRRAETGATDALRGLVDTARR

SEQ ID NO: 516 - protein, 463 aa, Neopyropia yezoensis
GARSCTEAGPVAAAVAGLVASAGDRGGVAGHLPPVDLAAAHGTTRTGDDGKHLPATLEWGARRDTAAYGQRFGAQATQHLRAARVRKAIQRGRFAASVARDLTDGLLRQIRGGGAVVAAIGTERVRGGDAWLRRHLRRLCWFVDQDEFNTSQACSECHDKMVLIYWTGNSPPKIPRELYGPPAGSPASTRRVRMVAGSRRGRPKRALPSATHVTRRGPDPDAYRAAVRATARAAAVARRAAALATCAVEDRAVHADSRRLSEWAAKGCYTCSLAAPQGPDHPAPHLPVIRSRDDVAARNMAWVAARGLTCTDVWPLKRPFGMRWAWTTKRPPSGVPVPPVRRTRPTTRVDVWPVLAAVDTVVDGGGGGGGGGGGGGGGGGGGGGGGGGGGGGGGGGGGGGGGGGGGGGRGVVDGHATAASCTTRRGAPGGERVAAAGSAMDGVRRAETGATGAPRGLVDTARR

SEQ ID NO: 517 - protein, 489 aa, Neopyropia yezoensis
GPPSRDAAGATAAPASPARPPSARTVRGPAASLRRGAMRRLQAAAQCLVAATGNGRWRVPRHAAVNVALGCLRRAAAGWVRPRVPDGRPDGAAYAASKTAAVAQDVATAGAFASALDGLTVRVAHAVRATRGWHAPPPAGAVYTLTKGRYAEAAGNGMTSRAAAAHRREAAQRLSALQPPPVTTPEAVAAHETVRTGDAAAVLAASRQWMESRRQPRYRAVWGDAATACQRKARVHQVIQRRRLGEAVARELTGGRLRRVVNRSAVVLVVGQAATRGGATWLRRHLRRLCWMVDADEHNSSQACAGCRHQLAIVYASAAAPPRVPRGTMICGRRRGSRGRQGRPRAPPTAGWERTQPVRSATGRAACRAEGAKLAVERAAKHPPPTGVVFRAPAAAGVWGVKRCVERTCPQMLVNRDDNAAANMGWKALQQIRQLPCPPFVRPQQVRRPHPGGGNGREADTAPTDTLGKAESGDGLPAAAGGGAVASTA

SEQ ID NO: 518 - protein, 518 aa, Neopyropia yezoensis
KQWRACSDTEAGQVAAAVAGLVAAAGDVGGVAGHLPPVDLAAAHDTMRTGDDGKYLQATLELAARRDTAAYGERFSAQATRHLRAALVRMAIQLGHFAASVARDLTSGLLRQVRGGGAVVVAMGTARVRGGDAWLRRHLRRLCWFVDLDEFNTSQACSECHDKMVLIYSTANSPPKIPRELYGPPAGPLPSTRRVRMVAGSRRGRPKRALPSATHVTGRGPDPDAYRAAVRATARAEAVARRAAALARCAVEDRAVHADPRRLSEWAAKGCYKCSLAAPQGPGHPAPHPPAIRNRDDVAARNMAWVAARRLTGTIVWPFKRPFGMRWAWTTKRPPSGVPVPPVRRTRATTRVDVWPVLAAVDTVVDGGGGGGGGGGGGGGGGGGGGGCGGGGGGGGGGGGGGGGGCGGGGGGGGRGVVDGDATAASCTTRRGAPGGERVVAAGSAMDGVRRAETGATDAPRGLVDTAKRKDSAHLARDPHLPRGASPAPFFADEPIMGNCRPFTSRLDAGFSRGPFPG

SEQ ID NO: 519 - protein, 498 aa, Neopyropia yezoensis
KQWRACSDTEAGQVAAAVAGLVAAAGDVGGVAGHLPPVDLAAAHDTMRTGDDGKHLQATLELAARRDTAAYGERFSAQATRHLRAALVRMAIQLGHFAASVARDLTSGLLRQVRGGGAVVVAMGTARVRGGDAWLRRHLRRLCWFVDLDEFNTSQACSECHDKMVLIYSTANSPPKIPRELYGPPAGPLPSTRRVRMVAGSRRGRPKRALPSATHVTGRGPDPDAYRAAVRATARAEAVARRAAALAPCAVEDRAVHADPRRLSEWAAKGCYKCSLAAPQGPGHPAPHPPAIRNRDDVAARNMAWVAARRLTGTIVWPFKRPFGMRWAWTTKRPPSGVPVPPVRRTRATTRVDVWPVLAAVDTVVDGGGGGGGGGGGGGGGGGGGCGGGGGGGGRGVVDGDATAASCTTRRGAPGGERVVAAGSAMDGVRRAETGATDAPRGLVDTAKRKDSAHLARDPHLPRGASPAPFFADEPIMGNCRPFTSRLDAGFSRGPFPG

SEQ ID NO: 520 - protein, 587 aa, Neopyropia yezoensis
QARRLRDGNGTKSRGGVTSLEHHAAAMGLPLEGSAKKCVVGVDPGVNDIYTAYSLGLDPDLVVVPSPHVFAYRSERAWTVAAHSLARAARALIRLAAAFASPSQAQAIKTAAEARRAALPPLCVVRRTRKKPKTLPSSAVENDAAATAVAGESVPSVVGPFNVSSNASLAGGVGRGVASASGGAAGGGTVAAAGKVSRGRLRRRSQGKHRGPVATARRVTRADLLKEVREELSQTGSSAWLIDTLCAEAMRSARAEGTAGAHGEGACRRRWQRRRRHPPSRPPTCPPRGATMSVSSAAHAEQSGGEIMARAQASWRAVWEGSRPAGSEATPEDVFEGTSLKQPTLLDWSADALTWAAARSTDDYAGAYGKDALRPLRKARVHRHVQRGRFAAKVARDLSGEYGRRIVDGKAVLVVWGAAATRGGATALRRRVARGCFLATQDEYNSSQTCADCHCRLVLVYPTDLSPDDRRQVINVAQCAAQALGDADGGKRKVAVRRRRAAKGRRGCDDRGGCSSQYLTPRVRAEERDAGEARERLAEILVSGKRSGGYDVLACWSVEKCVNPDCGRLYLNRDRNAARDIAQVAVS

SEQ ID NO: 521 - protein, 540 aa, Neopyropia yezoensis
RARRTQLATSVRRVLRRTRLSRWTVPRHEAEKVARWLVDPTAAAGDSASGTTLDAPLQNRVDALPRRKGCRRLAPVPGLRYSLSAAHFREASGGNFLARAWKQWRARSGTEAGPVAVAVAGLVAAAAGDGGGVAGHLPPVDLAAAHGTMRTGDDGKHLQATLEWAARRDTAAYGQRFGAQATRHLRTARVRKAIQRGRFAASVARDLTGGLLRQVRGGGAVVVAMGTARVRGGDVWLRRHLRRLCWFVDQDEFNTSQACSECHDKMVLIYPTGNSPPKIPRELNGPPAGPLPSTRRVRMAAGSRRGRPKRALPSATHVTRRGPDPDAYREAVRATARAAAVARRAAALAACAVEDRAVYADPRRLSEWAAKGCYTCSLAAPQGPGHPAPHPPVIRNRDDVAARNIAWVAARRLKGTNVWPFKRPFGMRWAWTTKRPPSGVPVPPVRRTRATTRVDVWPVLAAVDTVVDGGGGGGGGGGGGGGGGGRGVVDGDATAASFTTRRGAPGGEQVAAAGSAMDGVRRAETGATDAPRGLVDTARR

SEQ ID NO: 522 - protein, 311 aa, Neopyropia yezoensis
RVFRRTRLHRWTLPRHEAEAVARSLMHSPDSGTDSLLELAEAVTRRKGSRRLATMPDICYWVSAAQSRGASGGNFMARAWRQWRQRAAETASVAGSGSDTDAPPPVDEAAAHGTTRTGDRAAHLQATRQCAALRYTAEYRARFGADHTRGLRSATLHKTIQREHFATAVARDLTGGLLQQVRGGTAVVVSMGKARVRGGDGWLRRYLRRLCWLVDQDEFNTSQACPSCHRKLVLVFPTGDSPPTLPSELFGPPVAASGRRVRMAAGCRRGRPKRPRLSADHKTVRRSAVDTFRAAARATARAAAVARRTTA

SEQ ID NO: 523 - protein, 1152 aa, Neopyropia yezoensis
RRRRLPGAAALWGRASGLRPRRRPRLQGPASEHWTADAGVYRAGGRPGKGGVWGRHGRRPHARGGGDGAASRAGGPLWGGYQAPLPHAPRPRRGIAAPGVDRRGRSRRRRRLDGGRARKLGARLAVVGLRLRLRGCVWQSPAGGHRVCGLWQGADQHADGARPLCGDNEPPAAGRGALLRPDAGDGRHGSCVRPVSSGEQQHGTMGARRHHRGHPRRAVCGRGVSQAGRLGGQGRAGHLPRCHGCSSGRLCLGHGAAADAVGGRALPRGYRGQGNAGPAGPRRRPPAPGPGAGATGGRHAGGHATLCGGPLSSNACEEAPLVGVRSVSSPRPECGCGEPVRPHPWRPSGAPRSRHAGAGQDARPVAGSFGRHWRRGAWPPQSSAMARAANGRCSGAGRHGWCRSPRQPGRIPAVYRRRGGNVFSVSTRHGRRGRGAGGGLGQESGRRWTCAGPRRQRLCVPGGGTDAAVLSAAPGERVATADLPARPVVAAMRAAWSRHMGLDALNRAAVALLRGAGVQDGVAAAATLPEGHPPGGSRKRAAAGAPAAGAGTGGGRSKRQARRSSPDGSDDDAAAVAPAAAGATTPPEAKTYQTASPGGGHGRVRRGPQASIRRARRTQLATSVRRVLRRTRLSRWTVPRHEAENVARWLVDPTAAAGNSASGTTPDAPLLDQVDALPRRKGCRRLAPVPGLRYSLSAAHFREASGGNFLARAWKQWRARSGTEAGPLAVAVAGLVAAAVGDGGGVAGHLPPVDLAAAHGTMRTGDDGKHLQATLEWAARRDTAAYGQRFDAQATRHLRTARVRKAIQRGRFAASVARDLTGGLLRQVRGGGAVIVAMGTARVRGGDAWLRRHLRRLCWFVDQDEFNTSQACSECHDKMVLINSTGNSPPKIPRELYGPPAGPLPSTRRVRMAAGSRRGRPKRALPSATHVTRRGPDPDAYRAAVRATARAAAVARRAAALAACAVEDRAVYADPRRLSEWAAKGCYTCSLAAPQGHGHPAPHPPVIRNRDDVAARNMACVAARRLTGTDVWPFKRPFGMRWAWTAKRPPSGVPVPPVRRTRATTRVDVWPVLAAVDTVGDGGGEGGGGGGGGGGGGRGVVDGDATAASCTTRRGAPGGEQVAAAGSAMDGVRRAETGATDAPRGLVDTAAR

SEQ ID NO: 524 - protein, 1150 aa, Neopyropia yezoensis
KDPLQSTGRQTRACTVPVGVLARAVFGDDKDDADTRAAVETALKAELEDLSGAATKLRFLMLRVLDVALRRLVSTVADAAADDADWTGAVPANWAPVLLWLAYACGCEGVSGSPLQAGTVCAGCGKGRANTRMARARSVVTTSHPLLAEALSYALTQVMAVTAAACDRYLPASNNTARWEPVATIVATHAGRCVDAACRKLGAKAAKDALATSPAATPAPASGSAWDTERRLTRWAAARFRAGTADKATPGRRGLDGVPQHLVQALAQRVAVMRAAMPPSVAGLFPATPVKKRRWWAYVPFLLHVLNVGVGSPYALIPGARAVLHGHSTLVPDKMLALLRAVSAATGVGVRGHPSLRVWPELRTGGAAVLAVMAGVGGRANRAASQLSTDGVAVTFFLSRPDTAAEAEARAVASAKKLDGGGRARDRGGKGFASRAGVLTQLERAGLPLARVRWLQMVGGDPGRSAVLSAAPGERVATADLPARPAVAAMRAAWSRHMGLDALNRAAVALLRGAGVQDGVAAAATVPDGHPPRGSRKRAAAGAPAAGAGTGGSRSKRQARRSSPEGSDDDAAAVAPAAAGATTPPEAKTYQTASPGGGHGRVRRGPQASIRRARRTQLATSVRRVLRRTRLSRWTVPRDEAEKVARWLVDPTAAAGDSDGGTTLDAPLQDRVDALPRRKGCRRLTPVPGLRYSLSAAHFREASGGYFLARAWKQWRACSGTEGVPVAVAVAGLVAAAGDGGGVAGHLPPVDLAAAHGTMRTGDDGKHRQATLEWAARRDTAAYGQRFGAQATRHLRAARVRKAIQRGRFAASVARDLTGGLLRQVRGGGAVVVAMGTARVRGGDAWLRRHLRRLCWFVDQDEFNTSKACSECHDKMVLIYSTGNSPPKIPRELYGPPAGPLPWTRRVRMAAGSRRGRPKRALPSATHVTRRGPDPDAYRAAVRATARAASVARRAAALAACAVEDRAVYADPRRLSEWAAKGCYTCSLAAPQGPGHPAPHPPVIRNRDDVAARNIAWVAARRLTGTNVWPFKRPFGMRWAWTTKRPPSGVPVPPVRRTRATTRVDVWPVLAAVDTVVDGGGGGGGGGGGGGGGGGRGVVDGDATAAPCTTRRGAPGGEQVAAAGSAMDGVRRAETGAIDAPRGLVDTARR

SEQ ID NO: 525 - protein, 1341 aa, Neopyropia yezoensis
VVPRGSPSLPTPSATVDNPTHPPSSQSFPHTQPAHPPPPPPPPPPPPPRPGFTMNEEDDGSDQDIGVDGLDGDTTSDEEWDPAQEQAYVQDARNVVTLKRAVLAANLSRLQGVSAPPGGDAASSADWSAAVAQLQQAAKDEEAAGPLDGAGEDLVAAITGTAQAVSVYCGGRAAASEAEVELAARAKTAAGLIGVAAAGLPRREAATDAPPARKGRTQKCSGCGQPGHKVTSCKAPAGAGPAAAAAAAAVVPAAAAAAASKCRDCLGGGHSSGDAACPVQRHCGGVPAAYDRGVDPDCKDPPQSTGRQTRACTAPVGVLARAVFEDDKDDADTPAAVETALQAELEDLSGAATKLRFLMPRVLDVALRRLVSTVADAAADDADWTGAVPANWAPVWLWLAYACGCEGVSGSPLQAGTVCAGCGKGRANTRMARARSVVTTSHPLLAEALSYALTQVMAVTAAACDRYLPASNNTERWEPVANIVATHAGRCVDAACRKLGAKAAKDALATCLAATAAPAGGSAWDTERRLTRWAAARIRAGTADKAAPGRRGLDGVPQHLVQALAQRVAVMRAAMPPSVAGLFPATPMKKRRWWAYVPYLLHVLNLGVESPYALIPGARAVLNVHGTLVPDRMLALLGAVSAATGVGVRGHPSPRAWPELRTGGAAVLAAMAGVGGRANRASSQLSTDGVAVTFFLSRPDTAAEAEARAVAWAKKLDGGGRARDRSVQGFASRVGVLTQLERAGLPLARVRWLQMVGGDPGRSDVLSAAPGERVATADLPARPVVAAMRAAWSRHMGLDALNRAAVALLRGAGVQDGVAAAATTPGGHLPRGSRKRAAAGAPAAGAGAGGGRSKRQARRSSPEGSDDDAAAVAPAAAGGTMPPKAKTYQTASPGGGHGRVRRGPQASIRRARRTQLATSVRRVLRRTRLSRWTVPRHEAKKVALWLVEPTAAAGNSASSTTPDAPLQDRVDALPRRKGCRRLAPVPGLRYSLSAAHFREASGGNFLARAWKQWRALSGTGAGPVAAAVAGLVAAAGDGGGVAGHLPPVDLAAAHGTMRTGDDGKHLQATLEWAARRDTAAYGQRFGAQATRHLQVARVRKAIQRGRFAASVARDLTGGLLGQVRGGGAVVVAMGTARVRGGDAWLRRHLRRLCWFVNQDEFNTSQACSECHDKMVLIYSTGNSPPKIPRELYGPPAGPLPSTRRVRMAAGSRRGRPKRALPSATHVTRRGPDPDAYRAAVRATARAAAVARRAAALAVCAVEDRAVYADPRRLSEWAAKGCYTCSLAAPQGPGHAAPHPPVIRNRDLVAARNIAWVAVRRLTGTNVWPFKRPLGMRWVWQY

SEQ ID NO: 526 - protein, 510 aa, Neopyropia yezoensis
PESPKYWYRIPAQSLTVAASTRKADGSRVQQRVAGSPTTQLEKQGFPIAAVKTLTVVSADPGNAAILTAVSSGPTAAAWGDRPWVCRRRLARSQLVAADALTRAALALNAVVWRTASLAPAEAAAAGAAAAAAAGARPGALPPTPGRRKRKAGPGGAEQRQMPCGKAARSGPPSRDAAGETAAPASPARPPSARTVRGPAASLRRCAMRQLQAAAQCLVAATGNGRWRVPRHAAVNVALGCLRRAAAGWVGPRVADGRPDGAAYAASKTAAVAQDVATAGAFAAALDGLTVRVAHAVRATRGWHAPPPAGAVYTLTKGRYAEAAGNGMTSRAAAAHRREAAQGLSALQPPPVTTPEAVAAHETVRTGDAAAVLAASRQWMESRRQPRYRAVWGDAATACQRKARVHQVIQRRRLGEAVARELTGGRLRRDVNRSAVVLVVGQAATRGGATWLRRHLRRLCWMVDADEHNSSQACDGCRHQLAIVYASAAAPPRVPRGTMICGRRRGSRGR

SEQ ID NO: 527 - protein, 1002 aa, Neopyropia yezoensis
LSVIVHRKRSAADAADAVPTAIASSGFKSRTSWHRVAAWRRGGVDAACRKLGAKAAKDALATSPAATAAPAGGSAWDTVRRLKRWAAARFRAGTAGKATPGRRGLDGVPQHLVQALAQRVAVMRAAMPPSVEGLLPATPAKKRRWWAYVPFLHHVLNVGVESPYALIPGARAVLHGHGTLVRDKMLALLRAASVATRVGVRGHPSLRAWPELRTGGAAVLAAMAGVGGRANRASSQLSTDGVAVTFFLSRPDTAAEAKARAVAWAKKLDGGGLARDRSGKGFASRMGVLTQLERAGLPLARVRWLQIVGGDPRRSAVLSAAPGERVATADFSARPVVDAMRAAWSRHMGLDALNRAAVALLRGAGVQDGVAAASTMPKRHPPRGSRKRAAAGAPAAGAGRGGGRSKRQARRSSPEGSDDDAAAVAPAAAGATTPPEAKTYQTASPGSGHGRVRRGLQVSIRRARRTQLATSVRRVLRRTRLSRWTVPRHEAEKVARWLVDPTAAAGNSSSSPTPDAPLQDRVDALHRRKGCRRLAPVPGLRYSLSAAHFREASGGNFLARAWQQWRARSGTEAVPVAAAVAGPVVAAGDTGDIAGHLPPVDLAAAHDTMRTGDDGKHLQATLEWAARRDTVAYGQRFGAKATRHLRAARVRKAIQRGRFAASVARDLTGGLLRQVRGGGAVVAAMGTERVRGGDAWLRRHLRRLCWFVDQDEFNTSQACSECHDKMVLIYSTGNSPLKIPGALYGPPASPPPSTRRVRMAAGSRRGRPKRALPSATHVTHRGPDPDAYRAAVRATARADAVARRAAALAACAIEDRAVYADPRRLSEWAAKGCYTCSLAAPQGPGHPAPHPPVIRNRADVAARNMAWVAARRLTGTSVWPFKRPCGMRWAWTTKRPPSGVPVPPVRRTRATTRVDVWPVLAAVDTVGEGGGGGGGGGGGGGGGGGGSRGVVDGDATAASCTTRRGAPGGERVAAAGSSMDGVRRAETGATDAPRGLVDTARC

SEQ ID NO: 528 - protein, 337 aa, Neopyropia yezoensis
QPQVRERFAGTGAHKWVIDTACAELAVAVDAAGAAGATPRPSSLTPVAAAAANAQRRRPPAWPPEGAIYAVSGASFRERSVGGMMSRAQADGASTRDAEADKALHERATATKLKVGSDAAWWAAAQAEVKLLDTAEYLAVGGTDATRPLREAHWHRHVQRKRFARQFALELTGILGRRIVNGQVVLVAWGAAVTGGGAVHLFRRTRRYIYAVRICEHNTSAACAGCNSRVVNVYSTPRSPADRRQVTTERRCKRQGPSRTGRRREPWSWSPGGGPPSSDAAPRVAAAAQTGMRSSGIRPGCSTTCGRRSGSRRLSLSSSGRRAVTVRPRGWPANVSA

SEQ ID NO: 529 - protein, 372 aa, Neopyropia yezoensis
AARRDTAAYGQRFGAQATRHLLTARVRKAIQRGRFAATVAPNLTGGLLRQVRGGGAVVVAMGTARVRGGDAWLRHHLRRLCWFVDQDEFNTSQACSECHDKMVLIYSTGNSPPKIPRELYGPPAGPLPSTRRVRMAAGSRRGRPKRALPSATHMTRRGPDPDAYRAAVRATARAAAVARRAAALAACAVEDRAVYADPRRLSEWAAKGCYTCSLAAPQGPGHPAPHPPVIRNRDDVVARNMAWVAARRLTGTDVWPFKRPFGMRWAWTAKRPPSGVPVPPVRRTRATTRVDVWPVLAAVDTVGDGGGGGGGGGGGGGRGVVDGDATAASCTTRRGAPGGERVAAAGSAMDGVRRAETGATDAPRGLVDTARR

SEQ ID NO: 530 - protein, 1201 aa, Neopyropia yezoensis
TRKTTAATKTLASTGWTATPPETRSGTRRMSRLQGVSAPPAGDAASSAGWSAAEARLQQAAKDEEAAGPLDGAGEDLVAAITGAAQAISVYCGGRAAASEAEVELAARAKTAAGLIGVAAAGLPCREPATDAPPARKGRTQKCSGCGQPGHKVTSCKAPAGAGPAAAAAAAAAVPAEAAAAASKCRDCLGGGHSSGDAACPVQRHCGGVSAAYDRGVDPDCKDPLQSTRRQTRACTVPVGVLARAVFGDDKDDADTRAAVETALQAEREDLSGAATKLRFLMLRVLDVALRRLVSTVADAAADDADWTGAVPANWAPVWLWLAYACGCEGVSGSPLQASTVCAGCGKGRANTRMARARSVVTTSHPLLAEALSHALTQVMAVTAAACDRYLPASNNTARWEPIAIIVAIHAGRCVDAACRKLGAKAAKDALATSPAATAAPAGGAAWDTERRLARWAAARFRAGTADKATPGRRGLDGVPQHLVQALAQRVAVMRAAMPPSVAGLFPTTPVKKRRWWAYVPYLLHVLNVGVESPYALVPGARAVLHGHGGLVPDKMLALLRAVSVATGVGVRGHPSLRTWPELRTGGAAVLAAMAGVGGRANRAASQLSTDGVAVTFFLSRPDTAEEAEARAVAWAKKLDGGGRARDRSGKGFASRVGVLTQLERAGLPLERVRWLQMGGGDPGRSAVLSAAPGERVATADLPARPAVDAMRAAWSRHMGLDALNRAAVALLRGAGVQDGVAAAATTPEGHPPRGSRKRAAAGAPAAGAGTGGGRSKRQARRSSPEGRDDDAAAVAPAATGVTTPPEAKTYQTASPGGGHGRVRRGPQASIRRARRTQLATSVRRVLRRTRLSRWTVPRHKAEKVARWLVDPTAAAGDSASGTTSDAPPQDRVDALPRRRGCRRLAPVPGLRYSLSAAHFREASGGNFLARAWKQWRARSGTEAGPVAAAVAGQVAAAGEGGGVAGHLPPIDLAAAHDTMRPGDDGKLLQATLEWAARRDTAAYGQRFGAQATRHLRVARVRKAIQRGRFAASVARDLTGGLLRQVRGGGAVVVAMGTARVRGGDAWLRRHLRRLCWFVDQDEFNTSQACSECHDKMVLMYSTGNSPPQDSKRAARAAGRPSAVDTACADGGWVASGAAKAAPPLCYPRDAPRARPRRLPGGRPSHCPCCCCGAARGRAGRLCRREPRRLRRPEAAERVGG

SEQ ID NO: 531 - protein, 699 aa, Neopyropia yezoensis
PRCAPRGPATWAWTRSSGRPWRSCVGRASKMGWRQPQPRPRATHPGGLGSGRRRAPRLQGRGQGGAAPSDKRGGRHRRGGDDDAAAVAPAVAGATTPSEAKTYQTASPGGGHGRVRRGPQASIGRACRSQLAFSVRRVLRRTRLSRWTVPRHEAEKVARWLVDPTAAAGNSDSSTTPDTPLQDRVDALPRRKGCRRLAPVSGPRYSLSAAHFREASGGNFLARAWKKWRARRGTEAGPLAAAVAGLVAAAGDGGGVAGHLPPVDLAAAHGTMRTGDDGKHLQATLEWAARRDTAAHGQRFGAQATRHLRTARVRKAIQRGRFAASVARDLTGGLLRQVRGGGAVVVAMGTACVRGGDAWLRRHLRRLCWFVDQDELNTSQACSECHDKMVLIYSTGNSPPNIPRELNGPPAGPRPSTRRVRMAAGSRRGRPKRALPSASHVTRRGPDPDAYRAAVRATARAAAVARRAAALAACAVEDPAVYADPRRLSEWAAKGCYTCSLAAPQGPGHPAPHPPVIRNQDDVAARNIAWVAARRLTGTDVWPFKRPFGMRCAWTTKRPPSGVPVPPVRRTRATTRVDVWPVLAAVDTVGDGGGGGGGGRGGGGGGGGGGRGGGGGGGGGGGGGGGGGGGVGGCGLGGGGCGGCRGAVDGDARAASCTTRRGAASGERVAAAGSAMDGVRRAETGATDAPRGLVDTARR

SEQ ID NO: 532 - protein, 617 aa, Neopyropia yezoensis
KQGFPVAAVKTLTVVSADPGNAAILTAVSSGPTAAAWGDRPWVRRRRLARSQLVAADALTRAALALDAVVWRTASLAPAEAAAVGAAAAAAAGARPGALPPTPGRRKRKAGPGGAEQRQMPCGKAARSGPPSRDAAGATAAPASPARPPSARTVRGPAASLRRGAMRRLQAAAQCLVAATGNGRWRVPRHAAVNVALGCLRRAAAGWVRPRVADGRPDGAAYAASKTAAVAQDVATAGAFASALDGLTVRVAHAVKATRGRRAPPPAGAVYTLTKGRYAEAAGNGMTSRAAAAHRWEAAQRLSALQPPPVTTPEAVAAHETMRTGDAAAVLAASRQWMESRRQPRYRAVWGDAATACQRKARVDQVIQRRRLGETVARELTGGRLRRVVNRSAVVLVVGQAATRGGATWLRRHLRRLCWTVDADEHNSSQACAGCRHQLAIVYASAAAPQRVPRGTMICGRWRGSRGRQGQPRAPPAAGWERTQPVRSATGRAACRAEGAKLAVERAAKHPPPTGVVFRAPAAAGVWGVKRCVERTCPQMLVNRDVNAAANMGWKALQQIRQLPCHPFVRPQQVRRPHPGGGNGREADTAPTDTLGKAESGDGLPAAAGGGAVASTA

SEQ ID NO: 533 - protein, 623 aa, Neopyropia yezoensis
IFVWPGGQVLGWEILSGQILRGPWGDKGRDSGAWSCFPVPMFFLSRPDTAAEAEARAVAWAKKLDGGGRARDRSVKGFASRVGVLTQLERAGLPLARVRWLQMVGGDPGRSAVLSAAPGEHVATADLPARPAVDAMRAAWSRHMGLDALNRAAVALLRGAGVQDGVTAAATMPEGHPPRGSRKRAAAGAPAAGAGRGRGRYKRHARRSSREGSDDDAAAVAPAAAGAMTPPEAKTYQTASPGGGHGRVRRGPQASIRRARRTQLATAVRRVLRRTRLSRWTVPRHEAEKVARWLVDSTAAAGNSASSTTPNAPLQDQVDALPRRKVCRRLAPVSGLRYSLSAAHFREASGGNFLACAWKQWRARSGTEAGPVAAPVAGLVAAAGDEGGVAGHLPPVDLAAALGTMRTSDGRKHLQATLEWAARRDTASYVQRFGAQATRHLRATRVRKAIQRGRFAASVARDLTGGLLRQVRGGGAVVVAMGTARVRGGDAGLRRHFRRLCWFVDQDEFNTSQACSECHDKMVLIYSTGNSLPKVPGELDGPPPGPLPSTRRVRMAAGMRRGRPKRPLPTATHVTRRGPDPDAYRAAVRATARAAAVARRAAALAACAVEDRAIYADPKPLSE

SEQ ID NO: 534 - protein, 285 aa, Neopyropia yezoensis
QSGGEIMALAHASWRAVWEASRPADSEATPEDLFEGKFLKQPTLLDWTAAAFTWAAFGSTADCAGAYGKNALWPLRKARIHRHVQRGRLAASVARDLSGGYGRRIVDGKAVLVVWGAAATRGGAEALRRRVARWRFLATQDEYSYSQICADCHCQLVLVYAADLSPDDRWQVINVAQCAAQALGEADGGKRKVVVRRRRASKGRRGCDGCGGWSPRDVTRRGRAEERDAGEARERWPEILVSGKRSGGYDVLACLSVKKCVNRPLWSAVTQPRQERGAQHRAGGG

SEQ ID NO: 535 - protein, 1612 aa, Neopyropia yezoensis
AQRLCAVCNWATNPITTTAAATPPPPAPPPPPPPPPRHRTLSRQPPSATGTAEMRRTFHFRGGEPRPRDSPQGHVAVRASSALPPAREVASVGGWRGAGGGGGRGGAGGRWEDLDRRPPDGPCSPSPASTARVRHRVRTPARMVPCQTINRAVGGAPRFPIFADPVSHRRQSLPPTLLAVVPTHTTRSSASAPPPPPFPPPPSPPRPKFTMNDDDDGSDQDIGVDGLDGDATSDEEWDPVQEQAYVQDARNVVTLKRAVLAANLSRLQGVSAPHGGDAASSADWYAAVAQVQQAAKDEEAAGPLDGAAGEDLVAAITGAAQAVSVYCGGRAAASEAEVELAARAKTAAGLIGVAAAGLPRREAATDAPPARKGRTQKCGGCGEPGHKVSSCKAPAGAGPAAAAAAGPAAAAVPAAAAAAASKCRDCLGGGHSSGDAACPVQRRCGGVSAAYDRGVNPDCKDPLQSTGRQTRACTVPVGVLARAVFGDDKDDADTRAAVETALQAELEDLSGAATKLRFLMLRVLDVALRRLVSTVADAAADDADWAGAVPANWAPVWLWLAYACGCEGVSGSPLQAGTVCAGCGKGRANTRMARARSVVTTSHPLLAEALSYALTQVMAVTAAACDRYLPASNNTARWEPVATIVATHAGRCVDAACRKLGAKAVKDALATSPAATAAPAGGSAWDTERRLTRWAAARFRAGTADKATPGRRGLDGVPQHLVQALAQRVAVMRAAMPPSVAGLFPATPVKKRRWWAYVPFLLHVLNVGVESPYALIPGARAVLHGHGTLVPDKMLPLLRAVSVATGVGVRGHPSLRAWPELRAGGAAVLAAMAGVGGRANRASSQLSTDGVAVTFFLSRPDTAAEAEARAVAWAKKLDGGGRARDRSGKAFASRVGVLTQLERAGLPLARVRWLQMVGGDPGRSAVLSAAPGERVATADLPARPVVDAMRAAWSRHMGLDALNRAAVALLRGAGVQDGVAAAATVPDGHPPGGSRKRAAAGAPAAGAGTGGGRCKRQARRSSPDGSDDDAAAVAPAAAGATTPPEAKTYQTASPGGGHGRVRRGPQASIRRARRTQLATSVRRVLRRTRLSRWTVPRHEAEKVARWLVDPTAAAGDSASGTTLDAPLQNRVDALPRRKGCRRLAPVPGLCYSLSAAHFREASGGNFLARAWKQWRARSGTGAGPVAVAVAGLVAAAAGDGGGVAGHLPPVDLAAAHGTMRTGDDGKHLQATLEWAARRDTAAYGQRFGAQATRHLRAARVRKAIQRGRFAASVARDLTGGLLRQVRGGGAVVVAMGTARVRGGDAWLRRHLRRLCWLVDQDEFNTSQACSECHDKMVLIYSTGNSPPKIPRELNGPPAGPLPSTRRVRMAAGSRRGRPKRALPSATHVTRRGPDPDAYREAVRATARAAAVARRAAALAACAVEDRAVYADPRRLSEWAAKGCYTCSLAAPQGPGHPAPHPPVIRNRDDVAARNMAWVAARRLTGTNVWPFKRPFGMRWAWTTKRPPSGVPVPPVRRTRATTRVDVWPVLAAVDTVVDGGGGGGGGGGGGGGGGGGGRGVVDGDATAASCTTRRGAPGGEQVAAAGSAMDGVRRAETGATDAPRGLVDTARR

SEQ ID NO: 536 - protein, 364 aa, Neopyropia yezoensis
FGAQATRHLRTARVRKAIQRGRFAASVARDLTGGLLRQVRGGGAVVVAMGTAHVRGGDAWLRRHLRRLCWFVDQDEFNTSQACSECHDKMVLIYSTGNSPPKTPRELYGPPAGPLPSTRRVRMAAGSRRGRPKRALPSATHVTRRGPDPDAYREAVRATARAAAVARRAAALAACAVEDRAVYADPRRLSEWAAKGCYTCSLAAPQGPGHPAPHPPVIRNRDDVAARNIAWVAARRLTGTNVWPFKRPFGMRWAWTTKRPPSGVPVPPVRRTRATTRVDVWPVLAAVDTVVDGGGSGGGGGGGGGGGGGRGVVDGDATAASCTTRRGAPGGEQVAAAGSAMDGVRRAETGATDAPRGLVDTARR

SEQ ID NO: 537 - protein, 1355 aa, Neopyropia yezoensis
PPAPSLLPSFFRPTPTGSLPVPVPRSTRPPHPLLTSAALAMEPDEEQPGAGPQDEGPHGPRADADDALPPGDGAASGDQADPRELAELEAAVHLKQRRLRGLLRHVGEARARRPQLPDGAALDAALAGLTAAAAAAAGAPHEVAPTTDGAVAAAGAALEAATTPAVAGATAWVDAHDPLDDDSLLAQRARRAASLIGSTSRGMARRGVEVEDRRGAAPGGRPCARCRQRSHKTGAATCPATALFGDKNPHAYDRGEDPAASDPYACRATVTSSVMVPVAAVLRALPATPDGTAHAVLRGGFLATAEHHTQLHFTLTLVWLNTVHTLFGAVKADGWAAALPGSAQWGEYWNWVAYAVCCRGAHGGSLPAGVTCGSCGRARDNTLCGPAARRLLVSYPALMDATRNAMDALASSFDAACHDHLPHGNSHARWRGVVTTIVTHTARTVAVATRRLAWRVAAKVVDAAEAPACGDEQRGRRRAAVYAAARSCLERGIDTPHAAHAAKLEALPSDVRAAALTEIADARARAQPAPAQGTPPLFPTGGAHAVERRWAQYIPYLLNVQVEGVVDKPFSLVPGKVATLHGYGTVTKARLGPLIRRAWPRHRELYENVRRRGAAAIAGLLGLETVRCTAGADLRSNGEGVVFTLSRPATAAEAEAADVAAATRKANGTRVQQRVAGSPTTQLEKQGFSAAAVETLTVVSADPGKATVLTAVSSGPFAAAWGDRPYVRRRRLARSRLMAADALTRAALALDGVVWRAAALAPADAAAAGAAAAAAAAGAGPGALPLLPARRKRKAGPGGAEQRQPPCGKAARTGPARGGAAGGTAAPAPPARPPSARTARGPAASLRRGAVRRLRAAAQRLVAATGNDRWRVPRHAAVQVALGCLRRAAAGLFQPRVADGRPDGAAFAVCKTAAAEQDVAAAGAFASALDGLTARVADAVGATRGWRAPPPTGAVYTLSRGRYTEAAGNGMTARAAAAHRREAAQRLAALQQPPATTPEVVAAHDTVRTGDAAAVLAASRQWMESRRQPKYRAVWGAAATAGQRKARVHQVIQRRRLGEAVARELTGGRLRRVVNRSAVVVVVGQAATRGGATWLRRHIRRLCWMVDADEHNSSQACAGCRQQLAVVYASAAAPPPVPRGTLICGRRRGRRGRQGWPRAPPTAGWERTQPVRSAARRAACRAEGAKMAAERAVKHPPPAGVVFRAPNAAGVWGVKRCVEQACARRLVNRDVNAAANMGWKALRQMRQLPCHPFVRPQRVRRPVLDGGDDGEAAGATPAGRAGGGDGGRPPGAAVVAGATGDAGREGAVGPGGAGGARAAVVADTHTVASTELSGAARAGDGAPAVAGGGGATSVA

SEQ ID NO: 538 - protein, 621 aa, Neopyropia yezoensis
CGGGGPAAAGATTPPEAKTYQTAGPGGGHGRVRRAPQESIRRARRTQLATSVRRVLHRTRLSRWTVPRHEAEKVARWLVDPTAAAGDSDSGTTPDAPLQDRGDALTRRKGCRRLAPVPGLRYSLSAVHFREASGGNFLARARKQWQARSGTGAGPVAAAVAGLVAAAGDGGGVAGHLPPVDLAAAHGTMRTGDDGKHLQATLEWAARRDTAAYGQRFGAQATRHLWAARVPKAIQRGRFAASVARDLTGGLLRQVRGGGAVVVAMGTERVRGGDAWLRRHLRRLCWFVDQDEFNTSKAFSKCHDKMVLIYSTGNSPPKIPGELYGPPAGLLPSTRRVRMAAGSRRGRPKRALPSATHVTRRGPDPDANRAAVRATARAEAVTRRAAALAACAVEDRAVYADPRRLSEWAAKGCYTCSLAAPQGPGHPAPHPPVIRNRDDVAARKMAWVAARRLTGTNVWPFKRPFGMRWAWTTKRPPSGVPVPPVRRTRATTRVDVWPVLAAVDTVGDGVGGGGGGGGGGEDGEDGEDGGGGGGGGGGGGGGGGGCGGGGGGGGGGGGGGGGGGGGRGVVDGDATAASCTTQRGAPGGERVAAAGSAMDGVRRAETGATDAPRGLVDTARR

SEQ ID NO: 539 - protein, 332 aa, Neopyropia yezoensis
VERRSMRDAEADKSLHQRVTATTLKVGSYAAWWAAAQAKVKLRDTAESLAVYDTDATRPLREAHLHCYAQRKRFARQFALELTGGLGRRIVNGQVVLVAWGAAVTGGGAVHLYRRARRDMYAVRICEHNTSAAFAGCNNRVVHVYPTPRSSADQRQVTNGATLEEERAQPHEAAVGAKVVEPRRRAAKCRRVTQSRRGGADRDEVKRDKARALDDGWAAERLKAIIAFVKRAAGRDGAAAWMARNRVCVSCLVPYFNRDKNAERNILKAASAQLSGGNKAPFFSGCHVRRPPVGPPPGLDYNWSKGHGQLVGTVVSGGGSHGRGVGGGCPRC

SEQ ID NO: 540 - protein, 252 aa, Neopyropia yezoensis
HRGQPASRLRGHPRGPLSGYVPQAADVAGLGAAALTWAASSSTADYAGAYGKDALRTLRKARVHRHMQRGRFAAKVARDLSGGYGRRIVDGKVVLVVWGAAATRGGAEALRCPVARGCFLATQDEYNSSQTWADCHCRLVIVYPNDLSPDDRRQVINVAQCAAQALGDADGGQRKVVVRRRRTPKGRRGCDGRGGCSPRDVTRRGRAEERDAGEARERLVEILVSGKHSGSFDVLACWSVKKCVTLTVVGCT

SEQ ID NO: 541 - protein, 1463 aa, Neopyropia yezoensis
VVPRGSPSLPTPSATVDNPTHPPSSQSFPHTQPALPPPPPPSPPRPGFTMNDDDDGSDQDIGVDGLDGDTTSDEEWDPAQEQAYVQDARNVVTLKRAVLAANLSRLQGVSAPHGGDAASSADWSAAVAQLQQAAKDEEAAGPLDGAGEDLVAAITGAAEAVSVYCGGRAAPSEAEVELAARAKTAAGLIGVAAAGLPRREAATDAPPARKGRTQKCRGCGEPGHKVTSCKAPAGAGPVAAAVAAAAAAAVPAAAAAAASKCRDCLGGGHSSGDAACPVQRHCGGVSAAYDRGVNPDCKDPLQSTGRQMRACTVPVGVLAGAVFGDDKDDADTRAAVETALQAELEDLSGAATKLRFLMLRVLDVALRRLVSTVADAATDDADWTGAVPANWAPVWLWLAYACGCEGVSGSPLQAGTVCAGCGKGRANKRMARARSVVTTSHPLLAEALSYALTQVMAVTAAACDRYLPASNNTARWEPVATIVATHAGRCVDAACRKLGAKAAKDALATPPAATAAPAGGSAWDTERRLTRWAAARFRAGTADKATPSRRGLDGVPQHLVQALAQRVAVMRAAMPPSVAGLFPATPVKKRRWWAYVPFLLHVLNVGVGSPYALIPGARAVLHGHGTLVPDKMLALLRAVSAATGVGVRGHPSLRAWPELRTGGAAVLAAMAGVGGRANRAASQLSTDGVAVTFFLSRPDTAAEAEARAVAWAKKLDGGGRARDRGGKGFASRAGVLTQLERAGLPLARVRWLQMVGGDPGRSAVLSAAPGERVATADLPARPAVAAMRAAWSRHMGLDALNRAAVALLRGAGVQDGVAAAATVPDGHPPAGSRKRAAAGAPAAGAGTGGSRSKRQARRSSPEGSDDDAAAVAPAEAGATTPPEAKTYQTASPGGGHGRVRRGPQASIRRARRTQLATSVRRVLRRTRLSRWTVPRHEAEKVARWLVDPTAAAGDSASGTTPDAPLLDRVDALPRRKGCRRLAPVPGLRYSLSAAHFREASGGNFLARAWKQWRARNGTGAGPVAAAVAGLVAAAGDGGGVAGHLPPVDLAAAHGTMRTGDDGKHLQATLEWAARRDTVAYGQRFGAQATRHLRAARVRKAIQRGRFAASVARDMTGGLLRQVRGGGAVVVAMGTARVRGGDAWLRRHLRRLCWFVDQDEFNTSKACSECHDKMVLIYSTGNSPPKIPRELYGPPAGPLPSTRRVRMAAGSRRGRPNRALPSATHVTRRGPDPDAYRAAVRATARAAAVARRAAALAACAVEDRAVYVYADQGRLSEWAAKGCYTCSLAAPQGPGHPAPHPPVIRNRDDVAARNMAWVAARRLTGTDVWPFKRPFGMRWAWTTKRPPSGVPVPPVRRTRATTRVDVWPVLAAVDTVGDGGGGGGGGGGGGGGGGGGGGGGGGGGGAGAGRGVVDGDATAASCTTRRGASGGERVAAAGSAMDGVRRAETGATDAPRGLVDTARR

SEQ ID NO: 542 - protein, 560 aa, Neopyropia yezoensis
AADVAAVTRRPNGYRVRDRVLASPATQLEKQGFPMQSLRTVCPVPLDPGDKEILASKSTVLHPANWGDRPCVRRRRWARAKMVALNALKCAAMAVVGVAVAASGSRQEAARVDEAMAAAAGELSPQPRGTKRKSSGPAGGRAHKSTDGGAAGGAPIRGGGGGGGGGGPGGTASASGGTNAAGGASNAARSGQPPAVVKAAEGTPAAPPSPSPPEPSPRERRQHRGRAARLRRDARQALQAALRDMLGNPHRGRWSVPRHKAVDVAFRCLYRAACRRVRLPRNVRPGVAAYAASKADAEAAYLDAAAAYAAAVDRLRAEVVAYATATRGRRSPPPAGTTCTLSRGRYHEMGGGDMVRRAAVAHWAAAVQQIRLAVQSGCVASAGPAAITPEAVAAHDSVRSGDTAVVLAATCQWMRSRRQALYRAVWGSQATAGTRKARVHQVIQRHSMAATVVRELTGGYLRRVIGGTAVVVVMGDAATRGGATWLRKHLRRLCWLVDTPEHNSSQACGRCHKKLAIVFPTAAAAPRVPRGSLICGRRRGTAGRRGHPAASIRGSWIRTT

SEQ ID NO: 543 - protein, 1474 aa, Neopyropia yezoensis
GGRWCPEVPHLCRPHQPPSTIPPTHPPHSRSHTHNPPVPPPPPPPPPPPPPRPGFTMNDDDDGSDQDIGVDGLYGDTTSDEEWDPAQEQAYVQDARNVVTLKRAVLAAGLSRLQGVSAPPGGDAASSAAWSAAVARLQQAAKDEEAAGPLDGAGEDLVAAITDAAHAVSVYCGGRAAASEAEVELAARAKTAAGLIGVAAAGLPRREAATDAPPARKGRTQMCSGCGEPGHKVTSCKAPAGVGPAAAAAAAASAVPGAAAAAAAASKCRDCLGGGHSSGDAACPVQRHCGGVSAAYDRGVDPDCKDPLQSTGRQTRACTVPVGVLARAVFGDDKDDADTRAAVETALQAELEDLSKAATKLRFLMLRVLDVALRRLVSTVADAAADDADWTGAVLANWAPVWLWLAYACGCEGVSGSPLQAGTVCAGCGKGRTNTRMARARSVVTTSHPLLAEALSYALTQVMAVTAAACDRYLPASNNTARWEPVATIVATHAGRCVDAACRKLGAKAAKDALATSPAATAAPAGSSAWDTERRLARWAAARFRAGTADKATPGRRGLDGVPPHLVHALAQRVAVMQAAMPPSVAGLFPATPVKKRRCCAYVPFLLHVLNVGVESPYALIPGARAVLHGHGTPVPDKMLALLRAVSAATGVGVRDHPSLRAWPELRTGGAAVLAAIAGVGGRANRAASQLSTEGVVVTFFLSRPDTAAEAEARAVAWAKKLDGGRRARDRGGEVFSSRGGVLTQLERAGLPLAHVRWLQMVGREPGRSAVLSAAPGERVATADLPARPVVAAMRAAWSRHMGLDALNRAAVALLHGAGVQDGVAAAATALEGHPPGGSRKRAAAGAPAAGAGTSRGRSKRQARRSSPEGSDDNAAAVAPAAAGSTTPPEAKTYQTASPGGGHGRVRRGPQASIRRARRTQLATSVRRVLRRTRLSRWTVPRHEAEKVARWLVDPTAAAGDSASGSTPDAPLQDRVDALPRRKGCRRQAPVPGLRYSLSAAHFREASGRNFLARAWKQWRARRGTEAGPVAAAVAGLVAAAGDGGGVAGHLPPVDLAAANGTMRTGDDGKHLQATLEWAARRDMAAYGQRFGAQATRHLRTARVRKAIQRGGFAASVARDLTGGLLRQVRGGGAVVVAMGTARVRGGDAWLRRHLRRLCWFVHQDEFNTSQACSECHDKMVLIYSTGNSPPKILRELYGPPAGPLPSTRRVRMAAGSRRGRPKRALPSATHVTRREPDPDAYREAVRATARAAAVARRAAALAACAVEDRAVYADPRRLSEWAAKGCYTCSLAAPQGPGHPAPHPPVIRNRDDVAARSIAWVAARRLTGTDVWPFKRPFGMTWARTTKRPPSGVPVPPVRRTRATTRVDVWPVLAAVATVVDGGGGGGGGGGGGGGGGGSGGGGGGGSGGGGGGGGGGGRGVVDGDATAASCTTRRGAPGGERVAAAGSSMDGVRRAETGATDAPRGLVDTARR

SEQ ID NO: 544 - protein, 579 aa, Neopyropia yezoensis
CDGGGSGGGGWDDAREARTYQTASPGGGHGRVRRGPQASIRWARRTQLATSVRRVLRRTRLSRGTVPRHEAEKVARWLVEPTAAAGDSASGTTIDAPLQNRVDALPRRKGCRRLAPVPGLRYSLSAAHFRKASGGNFLARAWKQWRARSGTEAGLVAVAVAGLVAAAAGDGGGVAGHLPPVDLAAAHGTMRTGDDGKHLQATLEWAPRRDTAAYGQRFGAQATRHLRTARVRKAIQRGRFAASVARDLTGGLLRQVRGGGAVVVAMGTARVRGGDAWLRRHLRRLCWFVDQDEFNTSQACSECHDKMVLIYSTGNSPPKIPRELYGPPAGPLPSTRRVRMAAGSRRGRPKRALPSATHVTRRGPDPEPYREAVRATAHAAAVARRAAALAACAVEDRTVYADPRRLSEWAAKGCYTCSLAAPQGPGHPAPHPPVIRNRDDVAARNIAWVAARRLTGTNVWPFKRPFGMRWAWTTKRPPSGVPVAPVRRTRATTRVDVWPVLAAVDTVVDGGGGGGGGGGGGGGGRGVVDGDATAASCTTRRGAPGGEQVAAAGSAMDGVRRAETGATDAPRGLVDTARR

SEQ ID NO: 545 - protein, 438 aa, Neopyropia yezoensis
LFGRAWKQWRARSGTGAGPVAAAVAGLVAAAGDGGGVAGHLPPVDLAAAHGTMRTGDGGKHLQATLEWAARRDTAAYGQRFGAQATRHPRAARVRKAIQRGRFAASVARDLTGGLLRQVRGGGAVVMAMGTERVRGGDAWLRRHLRRLCWFVDQDEFNTSKACSECHDKMVLIYPTGNSPPKIPRELNGPPAGPLPSTRHVRMAAGSRRGRPKRALPSATHVTRRGPDPDAYREAVRATARAAAVARRAAALAACAVEDRAVYADPRWLSEWAAKGCYTCSLAAPQGPGHPAPHPPVIRNRDDVATRNIAWVAARRLTGTNVWPFKRPFGMRWAWTTKRPPSGVPVPPVRRTRATTRVDVWPVLAAVDTVVDGGGGGGGGGGGRGVVDGDATAASCTTRRGAPGGEQVAAVGSAMDGVRRAETGATDAPRGLVDTARR

SEQ ID NO: 546 - protein, 1463 aa, Neopyropia yezoensis
GGRWCPVVPNLCRPHQPPSTIPPAHPPHSRSHTHNPLFRLHPPPPPPPPPPPPPPPPPPRPGFTMNEEDDGSEQDIGVDGLDGDTTSDEEWDPAQEQAYVQDARNVVTLKRAVLAANLSRLRSVSAPHGGDAASSADWSAAIAQLQQAAKDEEAEGPLDGAGQDLVAAITDAAEAVSVYCGGRAAPSEAEVELAARAKTAAGLIGVAAAGLPRREAATDAPPARKGWTQRCSGCGEPGHKVTSRKAPAGAGPAAAAATAAAAAAVPAAAAAAASKCRDCLGGGHSSGDAACPVQRHCGGVSAAYDRGVDPDCKDPLQSTGRQTRACTVPVGVLARAVFGDDKDDADTRAAVDTALQAELEDLSWAATKLRFLMLRVLDVALRRLVSTVADAAADDADWTGTVPANWAPVWLWLAYACGCEGVSGSPLQAGTVCAGCGKGRTNTRMARARSVVTTSHPLLAEALSYALTQVMAVTAAACDRYLPASKNTARWEPVATIVATHAGRCFDAACRKLGAKAAKDALATSPAATAAPAGGSAWDTERRLTRWAAARFRAGTADKATPGRRGLDGVPQHLVQALAQRVAVMRAAMPPSVAGLFPATPVKKRRWWAYVPFLLHLLNVGVGSPYALIPGARAVLHGHGTLVPEKMLALLRAVSAATGVGVRGHPSLRAWPELRTGGAAVLAAMAGVGGRANRATSQLSTDGVAVTFFLSRPDTAAEAEARAVAWAKKLDGGGRARDRGGKGFASRAGVLTQLERAGLPLARVRWLQMVGGDPGRSAVLSAAPGERVATADLPARSVVAAMRAAWSRHMGLDALNRAAVALLRGAGVQDGVAAAATTPEGHPPGGSRKRAAAGAPAAGAGTGGGRSKLQARRSSPDGSDDDAAAVAPAAAGATTPPEAKTYQTASPGGGHGRVRRGPQASIRRARRTQLATSVRRVLRRTRLSRWTVPRHEAEKVARWLVDPTAAASNSASGTTPDAPLLDRVDALPRRKGCRRLAPVPGLRYSLSAAHFREASGGNFLARAWKQWRARSGTEAGPVVVAVAGLVAAAAGDGGGVAGHLPPVDLAAAHGTMRTGDDGKHLQATLEGAARRDTAAYGQRFGAQATRHLRTARVRKAIQRGRFAASVARDLTGGLLRQVRGGGAVLVAMGTARVRGGDAWLRRHLRRLCWFVDQDEFNTSQACPECHDKMVLIYSTGNSPPKIPRELYGPPAGPLPSTRRVRMAAGSRRGRPKRALPSATHVTRRGPDPDAYREAVRATARAAAVARRTAALAACAVEDRAVYADPRRLSEWAAKGCYTCSFAAPQGPGHPAPHPPVIRHRDDVAARNIAWVAARRLTGTNVWPFKRPYGMRWAWTTKRPPSGVPVPPVRRTRATTRVDVWPVLAAVDTVVDGGGGGGGGGGGGGGGGGRGVVDGDATAASCTTRRGAPGGEQVAAAGSAMDGVRRAETGATDALRGLVDSARR

SEQ ID NO: 547 - protein, 1466 aa, Neopyropia yezoensis
VVPRGSPSLPTPSATVDNPSHPPSSQSFPHTQPAHPPPPPPPPRPPPPPPPPPPPPPPRPGFTMNDDDDGSDQDIGVDGLDGDTTSDEEWDPAQEQAYVQDARNVVTLKRAVLAANLSLLQGVSAPHGGDAASSAGWSAAVARLQQAAKDEEAAGPLDGAGEDLVAAITGAAQAVSVYCGGRAAPSEAEVELAARAKTAAGLIGVAAAGLPRREAATDAPPARKGRTQKCSGCGEPGHKVTSCKAPAGAGPAAAAAAAAAAAAAAAAAAVPAAAAAAASKCRDCLGGGHSSGDAACPVQRHCGGVPAAYDRSVNPDCKDPLQSTGRQTRACTVPVGVLARAVFGDDKDDADTRAAVETALQAELEDLSGAATKLRFLMLRVLDVALRRLVSTVADAAADDADWAEAVPANWAPVWLWLAYACGCEGVSGSPLQAGTVCAGCGRGRANTRMARARSVVTTSHPLLAEALSYALTQVMAVTAAACDRYLPASNNTARWEPVATIVATHAGRCVDAACRKLGAKAAKDALATPPDATAAPAGGSAWDTERRLMRWAAARFRAGTADKATPGQRGLDGVPQHLVQALAQRVAVMRAAMPPSVAGLFPATPVKKRRWWAYVPFLLHVLNVGVGSPYALIPVARAGFHGHGTLVPDKMLALLRAVSAATGVGVRGHPSLRAWPELRTGGAAVLAAMAGVGGRANQAACQLSTDGVAVTFFLSRPDTAAEAEARAVAWAKKLDGGGRARDRGGKGFASRAGVLTQLERAGLPLARVRWLQMVGGDPGRSAVLSAAPGERVATADLPARPAVAAMRAAWSRHMGLDALNRAAVALLRGAGVQDGVAASAITPEGHPPGGSRKRAAAGAPAAGAGTGGGRSKRQARRSSPEGSDDDAAAVAPAAAGATTPPEARTYQTASPGGGHGRVRRGPQASIRRARRTQLATSVRRVLRRTRLSRWTVPRHEAEKVARWLVDPTAAAGDSASGTTLDAPLQIRVDALPRRKGCRRLAPVPGLRYSLSAAHFREASGGSFLARAWKQWRARSGTEAGPVAVAVAVAGLVAAAAGDGGGVAGHLPPVDLAAAHGTMRTGDDGKHLQATLEWAARRDTAAYGQRFGAQATRHLRTARVRKAIQRGRFAASVARDLTGGLLRQVRGGGAVVVAMGTARVRGGDAWLRRHLRRLCWFVDQDEFNTSQACSECHDKMVLIYPTGNSPPKIPRELNGPPAGPLPSTRRVRMAAGSRRGRPKRALPSATHVTRRGPDPDAYRAAVRATARAAAVARRAAALAACAVEDRAVYADPRRLSEWAAKGCYTCSLAAPQGPGHPAPHAPVIRNRDDVAARNIAWVAARRLTGTNVWPFKRPLGMRWAWTTKRPPSGVPVPPVRRTRATTRADVWPVLAAVDTVVDGGGGGGGGGGGGGRGVVNGDATAASCTTRRGAPGGEQVAAAGSAMDGVRRAETGATRAPRGLVDTARR

SEQ ID NO: 548 - protein, 615 aa, Neopyropia yezoensis
ARHMGLDELNRAAVALLRGAGVQDGVAAAAIVPEGLPPRGFRKRAAAGAPAAGAGTGGGRSKRQARRSSPEGSDDDAAAVAPVAAGATTLPEAKTYQTASPGGGHGRVRREPQASIRRARRSQLASSVRRVLRRTRLSRWTVPRHEAEKVARLLVDPNAAAGDSARSTTPDAPLQDQVVALPRRKGCRRLAPVPGLRYSLSAAHCREASGGNFFARAWKQWRARSGLEAGPVAAAVAGLVAAVGDVGGVAGHRPPVDLAAAHGTTRTGDDGEHLQATLEWAARRDTAAYGQRFGAQATRHLRAARVRKAIQRGRFAASVAQDLTGGLHRQVRGGKAVVVAMAAARVRGADTWLRHHLRRLGWFVDQDEFNTSKACSECHDKTVLINSTGNPYPKIPRELNGPPAGPLPSTRCVRMAAGLRRGRPKRALPSATHVTRRGPDPDAYRAAVRATARAAAVARRAAALAACAVEDRAVYTDQRRLSEWAAKGCYTCSLGAPRGRGNPAPHLPVIRNRDDVAARNMAWVAARCLSGTNVWLFKRTFGMRWAWTTKRPPSGVPVPPGGRKRATTRVDVSPALAAVDTVVDGGGGGGGGSGSGGCGSGGGGGGCGGLPHLSD

SEQ ID NO: 549 - protein, 1021 aa, Neopyropia yezoensis
DRGPPTPGCTRRESLPLSPAAPPNVAKTTCTHDTQVGAVYKCCLPCRGNRRKCKSHTLYPCCGAIPPRTNKRMVCGPTVSWSGRGSRAKPRCPSPYPPRVPSESRHSESPTPAPAHRATRKFKTISAENPPIQVGFSTKLTIPNFGNVDPNAGGGTDQASGLPPLTWHVLPPYLGVNTATPDKMLALLRAVSVATGVGVRGHPSLRAWPELRTGGPAVLAAMAGVGGRASRAASQLSTDGVAVTFSLCRPDTAAEAEARAVAWAKKLDGGGRARDRSGKGFASRVGVLTQLERAGLPLARVRWLQTVGGDPGRSAVLSAAPGERVATADLPARPVVAAMRAAWSRHMILDVLNRAAVALLRGAGLQDGVAAAATMPKGHPPRGSRKRAAAGAPAAGVGTGGGRSKRQARRSSPEGSDDDAAAVAPAAAGATTPPEAMTYQTASPGGGHGRVRRGPQASIRQARRTQLATSVRRVLRRTRLSRWTVPRHEAEKVARWLVDPTAAAGDSASGTTPDAPLQDRVDALPRRKGCRRLAPVPGLRYSLSAAHFREASGGNFLALAWKQWRARSGTGVGPVAAAGDGGGVAGHLPPVDLAVVHGTMRTGDDGKQLQSTLEWAARLDTAAYGQRFGAQATRHLRVARVRKAIQRGRFAASVARDLTGGLLRQVRGGSAVVVAMGTARVRGGDAWLRRHLRRLCWFVDQDEFNTSKACSECHDKMVPIYSTGNSPPKIPRELYGPPAGPLPSTRRVRMVAGSRRGRPKRALPSAPHVTRRGPDPDAYRAAVRATARGAAVARRAAALAASAVEDRAVYADPRRLSEWAAKGCYTCSLAAPQGPGHPAPHPPVIRNRDDVAARNMAWVAARRLTGTKVWPFKRPCGMRWAWTIKRPPSGVPVPPVRRTRATTRVDVWPVLAAVDTVVDGGGGGGGGGGGGGGGGGGGGGGVGGGGGGGRGVVDGGGGGGGGGGGGRGVVDGDATAASCTTRRGAPGGERVAAAGSAMDGVRRAETGATDAHRGLVDTARR

SEQ ID NO: 550 - protein, 1132 aa, Neopyropia yezoensis
ASSRGRCLGTTRTTPTRARRWRRRCKQSWRTSLGRLPSSASSCSASSTWHCGAWCRPSRTQPPTTPTGRGPCPQSGRPSGCGWPTPAAARVCMAVPCRRAPCVCGVWQGADQHADGARPLCGDDEPPAAGRGALLRPDAGDGRHGSCVRPVSSGEQQHGTMGARRHHRGHPRRAVCGRGVSQAGRQGGQGRAGHLPRCHGCSSGRLCLGHGAAADAVGGRALPHRYRGQGNAGPTGPRRRPPAPGPGAGATGSRHAGGHANLCGGPLSSNACEEAPLVGVRAVSLPLPECGCGEPVRPHPWRPSGAPRARHAGAGKDARPVPGSFSRHWRGGAWPPQYSGMARAANGRCSGAGRHGLCRWPRQPGRLPAVHRRRVGNFSSVSTRHGRRGRGAGGGLGQEAGRRWTCAGPRRQRLCVPGRVMTQLERAGLPLARVRWLQMVGGDPGRSAVLSAAPGERVATADLPARPAVAAMRAAGSRHMGLDALNRAAVALLRGAGVQDGVAAAATTPEGHPSGGPRKRAAAGAPAAGAGTGGGRSKRQARRSSPEGSDDDAAAVAPAAAGGTTPPEARTYQTASPGGGHGRVRRGPQASIRRARRTQLATSVRRVLRRTCLSRWTVPRHEAEKVARWLVDPTAAADDSASGTTLDAPLQNRVDALPRRKGCRRLAPVPGLRYSLSAAHFREASGGNFLARAWKQWRARSGTEAGPVAVAVAGLVAAAAGDGGGVAGNLPPVDLAAAHGTMRTGDDGAHLQATLEWAARRDTAAYGQRFGAQATRHLRTARVRKAIQRGRFAASVARDLTGGLLRQVRGGGAVVPAIGTARVRGGDAWIRRHLRRLCWFVDQDEFNTSKGCSECHDKMVLIYSTGNSPPKIPRELNGPPVGPLPSTRRVRMAAGSRRKRPKRALPSATHVTRRGPDPDAYRAAVRATARAAAVARRAAALAACAVEDRAVHADARRLSEWAAKGCYTCSLAAPQGPGHPAPHAPVIRNRDDDADRNMVWVAARRLTGTEVWPFKRPFGMRWAWAAKRPPSGVPVPPVRRTRATTRVDVWPVLAAVDTVGDGGGGGGGGGGGGGGGGRGVVDGDATAASCTTRRGAPGGEQVAAVGIAMDGVRRAETGATDAPRGLVDTARR

SEQ ID NO: 551 - protein, 219 aa, Neopyropia yezoensis
QGRRQHSPSRPPTCPPRGAALSVSSAAYAEQSGGVIMARAQASWPAVWDASRPAGSKATSEDLFEGTSLKQRTLLDWAAAALTWAIFRGTADYASAYDKQALRPLRKARVHRHVQRGRFAAKVARDLSGGYGRRIVDCKAVFVVWVAAATRGGAEALRRRVARGCFLATQDEYTSSQTCADCHCQLVLVYPTDLSPDDGRKVINVAHCAAQALDDADGG

SEQ ID NO: 552 - protein, 269 aa, Neopyropia yezoensis
RARRTQLATSVRRVLRCTRLSWWTVPRHEAEKVARWLVDPTAAAGDSASGTTLDAPLQNRVDALPRRKGCRRLAPVPGFRYSLSAAHFREASGGNFLARAWKQWRARSGTEAGPVAVAVAGLVAAAVGDGGGVAGHLPPVDLAAAHGTMRTGDDGKHLQATLEWAARRDTAAYGQRFGAQATRHLRTARVRKAIQRGRFAASVARDLTGGLLRQVRGGGAVVVAMGTARVRGGDAWLRRRLRRLCWFVDQDEFNTSQACSECHDKMVLI

SEQ ID NO: 553 - protein, 348 aa, Neopyropia yezoensis
ATRHLRTARVRKAIQRGRFAASVAPDLTGGLLRQVRGGGAVVVAMGTERVRGRDAWLRRHLRRLCWFVDQDEFNTSQACSECHDKMVLIYPTGNSPPKTPGELYGPPAGPLPSTRRVRMAAGSRRGRPKRALPSATHVTRRGPHPVAYRAAVRATARAAAVARRAAALAACVVEDRAVYADQRRLSEWAAKGCYTCSLAAPQGPGYPAPHPPVIRNWDDVAARNMAWVAARRLTGTDVWPFKHPFGMRWAWTTKRPPNGVPVPPVRRTRATTRVDVWPVLAAVDTVGDGGGGGGGGGGGGGGGGCGGGGGGGGGGGGRGVVDGDATAASCATRRGAPGGERVADTARR

SEQ ID NO: 554 - protein, 402 aa, Neopyropia yezoensis
KRGERTRGHPAVVLTRPLKTPAVFAMTPPVHGRTPPASATTTLLDWAAASLTWAAARSTADYAGAYGKDALRPLRTARVHRHVQCERFAAKVARDLSGGYGRRIVDGKAVLVVWGAAATRGGATALKRHVARGCFLATQDEYNSSQACADCHFRLVFVYPTDLSPDDRRQVINMAQCAAQALGDEDGNKRKVLVRRRRAAKERRRCDGRGGCSSQDLTRRGRAEEGDAGEAREWLAEILVSGKRSGGYDMPACWSVKTCVNPECGRLYLNRDKDAARNIAQVAVSSLLGRSRFPFFRNCLPRRPLAATAQWCRDTASEWHPPWFVSDSAGGGGGGSGGGGGEGGGGGGGGGGRGGGGGGTTSSVWATTKLVSVRALDGATAYSRTATSPAGDGGGNCRTVHQ

SEQ ID NO: 555 - protein, 626 aa, Neopyropia yezoensis
IFVWPGGQVLGWEILSGEILRGPWGDKGRDSGAWPCVPVPTKKLLDHTPSSCLSVGGLPHNRDRVCGTCTSSGSPDTGGSPCTPPQLGCRVCKWFLPQGCRRLAPVPGLRYSLSAAHFREASGGNFLARAWKQWRARSGTGAGPVAAAVAGLVAAAGDGGGVAGHLPPVDLAAVHGTMRTGDDGKHLQATLEWAARRDTAAYGQRFGAQATRHLRAARVRKAIQRGRFAASVARDLTGGLLRRVRGGGAVVVAMGTERVRGGDAWLRRHLRRLCWFVDQDEFNTSQACSECHDKMVLIYSTGNSPPKIPRELYGPPAGSPASTRRVRMAAGSRRGRPKRALPSATHVTRRGPDPDAYRAAVRATARAAAVARRAAALAACAVEDRAVYADPRRLSEWAAKGCYTCSLAAPQGPGHPAPHPPVIRNRDDVAARNIAWVAARRLTGTHMWPFKRPFGMRWAWTTKRPPSGVPVPHVRRTRATTRVDVWPVLAAVDTVVDGGGGGGGGGGGGGGGGGGGGGGGGGGGGGGGGGGGGGGGGGGGGGGGGGGGGGGGGGGGGGGGGGGGGGGGGGGRGVVDGDATAASCTTRRGAPGGERVAAAGSAMDGVRRAETGATDAPRGLVDTARR

SEQ ID NO: 556 - protein, 721 aa, Neopyropia yezoensis
RSSSGLDCRWRASGGLQMVGGDPGRSAVLSATPGERVATADPPAGPAVAAMRAAWSRHMGLDALNRAAVALLRGAGVQDGVAAAATTPEGHPPGGSRKRAAAGAPAAGAGTGGGRSKRQARRSSPEGSDDDAAAVAPAAAGGTTPPEARTYQTASPGGGHGRVRRGPQASIRRARRTQLATSVRRVLRRTRLSRWTVPRHEAEEVALWLVDPTAAAGNSASGTTPDAPLLDRVDALPRRKGCRRLAPVPGLRYSLSAAHFREASGGNFLARAWKQWRARCGTEAGPVAVAVAGLVAAAAGDGGGVAGHLPPVDLAAAHGTMRTGDDGKHLQATLEWAARRDTAAYGQRFGAQATRHLRTARVRKAIHRGRFAASVARDLTGGLLRQVRGGGAVVVAMGTARVRGGDAWLRRHLRRLCWFVDQDEFNTSQACSECHDKMVLIYPTGNSPPKIPRELNGPPAGPLPSTRRVRMAAGSRRGRPKRALPSATHVTRRGPDPDAYRAAVRATARAAAVARRAAALAACAVEDRAVYADPRRLSEWAAKGCYTCSLAAPQGPGHPAPHPPVIRNRDDVAARNIAWVAARRLTGTNVWPFKRPFGMRWAWTTKRPPSGVPVPPMRRTRATTRVDVWPVLAAVDTVGDGGGGGGGGGGGGGGGGGGGGGGRGVVDGGVLYDATRCSWWGTGGGGRQCDGRGTSGGDGGDRRAPWSGGHCKTLRQRTSCP

SEQ ID NO: 557 - protein, 328 aa, Neopyropia yezoensis
AAAQAEVKLRDTAEYLAVHGTDATRPLRKAHLHCHAQRKGLARQFSLELTGGLGRRIVKVALVAWGAAVTGGGALHLYRRARRYMYAVRIREHNTSAACAGCNNRVVNVYPTPRSPADRRRVTNGAALEEARSQTYGAAVGAKVVELRRRVAKCRRGTQSRRGGADRDAVERGKDRALDDAWATERLRAIIALVKRAAGRDGAAAWMAHNCVCVSFLVTYFNRDKHAARNILKAASAQLSGGNKSPFFPGCYVRRTPAGPPPGPNYNWSRDTANSWAPRCRWGQPRAGRRRRAPQMLTTTVTTRTSRTSRTRRTRPGLTTSWCRSLCR

SEQ ID NO: 558 - protein, 312 aa, Neopyropia yezoensis
DLRPPQQVGGVWSCPGPSHGPCQEECTSLFWAQSGVGWEILSGEILRGPWGDKGRDRRLGHASPSRPRNCWTTHHLLVCQWGDCPTTGIECVRLALLPVLPTREAALVHRPNLGAACARGFCHRGDACLRRHLRRLCWFVDQDEFNTSQACSECHDKMVLIYSTGNSPPKIPGELYGPPAGPLPSARRVRMAAGSRRGRPKRALPSATHVTRRGPDPDAYRAAVRATARAAAVARRAAALAACAVEDRAVYADPRRLSEWAAKGCYTCSLAAPQGPGHPAPHPPVIRNRDDVAARNMAWVAARRLTGTHMWP

SEQ ID NO: 559 - protein, 1758 aa, Neopyropia yezoensis
CIANGRGLPEAPKGWVPASRHAAPHAPWRAGSAEGGFNCSVAIAPQHGGGHSPNTCHREGGEEGGGAGGEGGKGGGGEGRSLAMVGRAARMLACQSAQMPQCMRCTPSRTHRRATGGCHESVLCAVCNWATNSITTTAAATPPPPAPPPPPPPPPPPRHRTLSRQPPSATGAAEMRRTFHFWGGELRPRDFPQGHVAVRASSALPPAGEVASVGGWRGAGGGGERGGVGGGWEDLDRRPPDGPCSPSPASTARVRHRVRTLARMVPCQTINRAVGGAPRFPIFANPVSHRRQSLPPTLLTVVPTHTTRSSASAPPPPPPPPPPPPPLPPPPPPPPPPPPPPRPGFTMNDDDDGSDQDIGVDGLDGDTTTDEEWDPAQEQAYVQDARNVVTLKRAVLAANLSHLQGVSAPHGGDAASSADWSAAVAQLQQAAKDEEAAGPLDGAGEDLVAAITGAAQAVSVYCGGRAAASEAEVELAARAQTAAGLIGVAAAGLPRREAATDAPPARKGRTQKCGGCGEPGHKVTSCKAPAGAGPAAAAAAAAAAAAVPAAAAAAASKCRDCLGGGHSSGDAACPVQRHCGGVPAAYDRGVNPDCKDPLQSTGRQTRACTVPVGVLARAVFGDDKDDADTRAAVETALQAELEDLSGAATKLRFLMLRVLDVALRRLVSTVADAAADDADWAGAVPANWAPVWLWLAYACGCEGVSGSPLQAGTVCEGCGKGRANTRMARARSVVTTSHPLLAEALSYALTQVMAVTAAACDRYLPASNNTARWEPVATVVATHAGRCVDAACRKLGAKAAKDALATPPAAKAAPAGGSAWDTERRLTRWAAARFRAGTADKATPGRRGLDGVPQHLVQALAQRVAVMRAAMPPSVAGLFPATPVKKRRWWAYVPFLLHVLNVGVGSPYALIPGARAVLHGHGTLVPDRMLPLLRAVSAATGVGVRGHPSLRAWPELRTGGEAVLAAMAGVGSRANRASSQLSTDGVAVTFFLSRPDTAAEAEARAVAWAKKLDGGGRARDRSGKGFASRVGVLTQLERAGLPLARVRWLQMVGGDPGRSAVLSAAPGERVATADLPARPVVAAMRAAWSRHMGLDALNRAAVALLRGAGVQEGVAAAASTPKGHPPPRGSRKRAVAGAPAAGAGTGGGRSKRQARRSSPDGSDDDAAAVALAAAGATTPPEAKTYQTASPGGGHGRVRRGPQASIRRARRTQLATSVRRVLRRTRLSRWTVPRHEAEKVARWLVDPTAAAGDSDSGTTPDAPLLDRVDALPRRKGCRRLAPVPGLRYSLSAAHFREASGGNFLARAWKQWRARSGTEAGPVAVAVAGLVAAAAGDGGGVAGHLPPVDLAAAHGTMRTGDGAKHLQATLEWAARRDTAAYGQRFGAQATRHLRTARVRKAIQRGRFAASVARDLTGGLLCQVRGGGAVVVAMGTARVRGGDAWLRRHLRRLCWFVDQDEFNTSKACSECHDKMVLIYSTGNSPPKIPRELYGPPAGPLPSTRRVRMAAGSRRGRPKRALPSATHVTRRGPDPDAYRAAVRATARAAAVARRAAALAACAVEDRAVYADPRRLSEWAAKGCYTCSLAAPQGPGHPAPHPPVIRNRDGVAARNMAWVAARRLTGTDVWPFKRPFGMRWAWTAKRPPSGVPVLPVRRTRATTRVDVWPVLAAVDTVGDGGGGAGGGGGGGGGGGGGGGGGGGGGGGGRGVVDGDATAPSSVMRRGAPGGEQVAAAGSAMDGVRRAETGATDAPRGLVDTARR

SEQ ID NO: 560 - protein, 643 aa, Neopyropia yezoensis
HFSLTVAAALLRGAGVQDGVAAAATTPEGHPPRGSRKRAAAGAPAAGAGTGGGRSKRQARRSSPEGSDDDAAAVAPAAAGGTTPPEAKTYQTASPGGGHGRVRRGPQASIRRARRTQLATSVRRVLRRTRVSRWTVPRHEAEKVARWLVDPTAAAGDSASGTTPDAPLQDRVDALPRRKGCRRLAPVSGLRYSPSAAYFREASGGNFLARAWKQWRARRGTEAGPVAAAVAGLVAAAGDGGGVAGHLPPVDLAAAHGTMRTGDDGKHLQATLEWAARRDTAAYGQRFGAQATRHLRAARVHKSIQRGRFAASVARDLTGGLLRQVRGGGAVVVAMGTARVRGGDAWLRRHLRRLCWFVDQDEFNTSKACSECHDKMVLIYSTGNSPPKIPGELYGPPAGPLPSTRRVRMAAGSRRGRPKRALPSATHVTRRGPDPDAYRAAVRATARAAAVARRAAALAACAVEDRAVYADPRRLSVWAAKGCYTCSLAAPQGRGHPAPHPPVIRNRDDVAARNMAWVAARRLTGTNVWPFKRPFGMRWAWTAKRPPSGVPVPPVRRTRATTRVDVWPVLAAVDTVVDGGGGGGGGGGRGAVDGDATAASCTTGRGAPGGERVAAAGSSMDGVRRAEAGATDAPRGLVDTARR

SEQ ID NO: 561 - protein, 737 aa, Neopyropia yezoensis
RAGLPLARVRWLQMVGGDPGRSAVLSAAPGERVATADLPARPAVAAMRAAWSRHMGLDALNRAAVALLRGAGVQDGVAAAATMPQGHPPRWSRKRAAAGAPAAGAGTGGRRSKRQARRSSSEGSDDDAAAVAPAAAGATTPPEAKTYQTASPGGGHGRVRRGPQASIRRARRTQLATSVRCVLRRTRLSRWTVPRHEAEKVARWLVDPTAAAGNSDSSTTPDAPPQDRVGALPRRKGCRRLAPVPGLRYSLSAAHFREASGGNFLARAWKQWRARSGTGAGPVAAAVAGLVAAAGDVGGVAGHLAPVDLAAAHGTMRTGDDGKHLQATLEWAARRDTAAYGQRFGAQATRHLRTARVRKAIQRGRFAASMARDLTGGLLRQVRGGGAVVVAMGTERVRGGDAWLRRHLRRLCWFVDQDEFNTSQACSECHDKMVLIYSTGNPPFKIPRELYGPPAGPLPSTRRVRMAAGSRRGRPKRALPSATHVTRRGPDPDAYRAAVRATARAAAVARRAAALAACAVEDRAVYADPRRLSEWAAKGCYTCSLAAPQGPGHPAPHPPVIRNRDDVAARNMAWVAARRLMGTNVWPFKRPFGMRWAWTTKRPPSGVPVPPVRRTRATTRVDVWPVLAAVDTAGDGGGGGGGGGGGGVEDGEDGEDGGGGGDGGGGGGGGGGGSGGGGGGGGRGVVDGDATAASCTTRRGAPGGERVAAAGSAMDGVRRAETGATDAPRGLVDTARR

SEQ ID NO: 562 - protein, 287 aa, Andalucia godoyi
MHLRFRMAASLLLLASPSLHSPPLRRSIGTTIRGCRESGTEGSTATRCGISRESAKPTWRTASSSVLRRSCVAMSSHPFPQTAKTDGVLVSFGPEYETMCRPRAADDEMVPREPHPRRRRAAAGRDDQQQQPRQVPAGMTLVGIDPGRANILTAFDGTAVRSEMRNQWYHATGANAERRWMGQRSGRVCEILDELSALPRTNQEADWFPHLHFYRAHVNALWSHFTNHQGLRHCATVNCPSDRRCVGRDANAAMNIRQCWLSRPRFLCRNPRSIPSASELESRVGHS

SEQ ID NO: 563 - protein, 232 aa, Andalucia godoyi
GEAASPCLRIHRIHSRRRRAADDEMVSREPNPRRRRGAAGREDQQQQPRQVPAGMTLVGIDPGRANILTAFDGTAVRSEMRNQWYHATGANAERKWMEQRNGRVCEILDELSALLRISQEADWLPHLHFYRTHVNALWSHFTNHQGLRHCATVNCPSDRRCVGRDANATMNIRQCWLSRPRFLCRNPRGIPSASELESSREALMKIEHVWFCRTFHASRSNFRLRQVESKLL

SEQ ID NO: 564 - protein, 235 aa, Andalucia godoyi
GCVPILSCSITVRISLMDNLDDCFLSFSSSALHPDTLLSSELRMHGKRERENRQAPVVPSTTTHRVFAGFASIKAEQKDAAAVNTGRHQHVLFHRHSCLRALGQNSTGDTGSAFSTLLNAASVAIYSIIRWFHFLQRLFHKATEYRERHVAIVTEEHTSKTCGRCGEIHARRGGSKVFACPACSSQIDRDWERSAEHLSEECREACWGPIRFPTTGCKIEYACLFVGMQHVQCIV

SEQ ID NO: 565 - protein, 265 aa, Andalucia godoyi
NTNKGAQKESATRRRKSERKREKNRLQSPQKGHLCLLSYPYTSPRTLFSSHTSIAEASQKLWLPTATDCVATVSSFASGSFRKLGQNSWFSTTLHRQDPTKNLPTTSSPSSTCLWHGATGSVRPQTGSDAAERPKKIRKLSSASKKDRRRKLRSKTARQMVTWSHYRFRQHLLHKASQYGREVLIVTEEYTSKTCGRCGNTHWKLGSNKHFFVPKLSLHHRPRLEWSAEHLSQKYESSRLTGRRWGLSRLCWFLGPTDCNINDHD

SEQ ID NO: 566 - protein, 235 aa, Taenaris catops
KAERVKAIHAKIKHTRQDLIHKFTTQLVKDNALIVVGDIQSNQFNSKKGKLAKSVYDAGWFELKRQLTYKCENAGCRFEIVNERYTTQRCSCCGEITANSPKGRKSLGIREWICASCGTWHDRDINASKNILAVGLDILFACKIKSSFCLNVFKGKFKKSFLSFKEEKTEKRSAGGRKEKEETKEEEYNKSLLLVSLCAHDIWRRKVRNGEEKEEEREEEKEEQNGGDKNEGVEE

SEQ ID NO: 567 - protein, 255 aa, Actias luna
NVTISKKSGHWYVSFGTERALSENPTHPSKSAIGIDLGITKLITTSDGQYIKPKNSFKANQIKLAKLQRQLSKKVKFSENWKRQNRKIQKLHNHIANIRHDYLHKITTAISKNHAMIACEDLKAANMSRSASGTMEKKGRHVKAKSALNKSILDQGWGMMVNMFEYKQQWQGGLLIKVNPRYTSQTCFECKHIAKENRRTQANFECVECRYVTNADVNAARNILAAGHAVLSAEGGCVKGRPLKQKTCDLREKVT

SEQ ID NO: 568 - protein, 263 aa, Actias luna
DRKITWPGRSSHYVYTTIIPNKESFMLYAYPNTENSPVQFREKYDNFINGEWVAPFDGEYFDNPSPIDGKIICQVARSKEADITGIDLGCRDSATTSNGEVLKTKVTQRYAKKLGTAQRAKNKQRVKAIHAKIKHTRQDLIHKFTTNLTKTNKIIIIGKLQSKSFTKGKLAKSVYDARWFEIKRQLTYKCENAGCYYDEVNESYTTQTCSCCGSRQNSPKGRANLGIREWLCECGVTHDRDINAAKNILALGLERLVVGIPSL

SEQ ID NO: 569 - protein, 206 aa, Actias luna
HIKPKNSFKANQIKLAALQRQLSRKALFSQNWKKQKNKIQKLHHHIANIRHDYLHKITTNISKNHAMIACEDLKVANMSKSASGSATQHGRNVKAKSGLNKSILDQGWGMMVDMIEYKQHWTGGLLVKVNPQYTSQACFECKHIAKENRRTQAKFECVKCGHKANADVNAAKNILAAGHAVLSAEGGCGKGRPLKQKTCDIREKVA

SEQ ID NO: 570 - protein, 391 aa, Psitteuteles goldiei
KMIKTQVVKIKPNSHMYSEIKSLFGYRRYCWNKALELWTNMYDESTIVGDVSLRPSGRKVRDTLVAFKEDWENYLSSRVLQQTVISLEKAWKNYFNKSMPNHKKPKFKSRKNYQLTFTTDSARIKDGKLVLERPKLVEKTDWYPIRMHEKIRFEGELKTCTITEKADGLYASLTFETSQEPSIPVKQDVAGVDVNVRRFNYNDGVVWIYPNTLEHYYEKIKYYQRILARKREANKNNYKTKRYAKVRAKLRRLYQKVYNLQNDIIQKFTTQLISKYSEIHIEDLNVHGMMMSKRMGKNLHRSMFARFSEVLKYKAEWNNRELILVDRFYASTQICSECGFQKTDDCYGGKQTLTGDSIHHDHQTYHCYECGAVLDRDANAVQNIINFKVAG

SEQ ID NO: 571 - protein, 391 aa, Psitteuteles goldiei
KMIKTQVVEIEPNSHMRSEIKSLFDYRRYSWNKALESWNEMYDESIIVDDVSLRPSGRKVRDTLVALKEDWEYYLSSRVLQQTVISLEKAWKNCFNKAMPNHKRPKFKSRKNYQPTFTTDRARVKDGKLILERPKLVKKTNWFPIRMHEKIRFEGELKTCTITEKADGLYASLTFETSHEVSIPVKQDIAGVDVNVRRFNYNDGIVWIYPNNLKHYYEKIKYYQRILARKRETNNHNYKTKRYAEVRTKLRRLYQKVYNLQNNIVQKFTTQLISEYSEIHIEDLNVHGMMMSKRMGKNLHRSMFGRFSEVLKYKAEWNNRELILVDRFYASTQICSECAFQKTDNCYGGKHTLTGDNIYHDHQTYRCYECGAVLDRDANAVQNIINFKVAG

SEQ ID NO: 572 - protein, 221 aa, Psitteuteles goldiei
DVAGGVAAVGGPGARDGSKYDNPSHFAKHYRNLKRQQKKLSRKQKGSHNRIKAKVKVAKVHSKIAHCREDFLHKLSRKIVNENQVIAVENLNVKGMVRNPKLAKAISDVGWGMFTTMLKYKAEWEGKTYIEVDRFFASSKTCHVCLNRVDSLSLDIRQWQCQHCGTCHERDVNAAQNIRNEALRILSLGTSDTAWVGSVRQPGKTSVLLDAVPVESGSPML

SEQ ID NO: 573 - protein, 259 aa, Psitteuteles goldiei
QKQKRKIQRLHSHIANIRKDYLHKTTTKISKNHAMIAIEDLKVSNMSKSAKGTAEQHGRNVKAKSGLNRAILDQGWHEMRRQLEYKQLWRGGQVLAVPPAYTSQRCACCGHTAKENRLSQSKFECLECGYTENADINGARNILAAGHAVLAHKPTPHPANRLLSSWLAGFPLTLLQSKKAKVLALPHGQTLSQPQTAEQLSGWEGGNQGRATKETAGKRCKASTVGSQTQARLYLHKRPSRAGIQLSMNTPLVGGIAQI

SEQ ID NO: 574 - protein, 278 aa, Psitteuteles goldiei
ISGVSSLIKIVSSNSRQLWCKTSFLVGYDGESITEFATNDISKINRLCYHVDVLMSQISQCQIKRKRYRMRKASHRMRERIRKLVDDLHKKVAHVLVNHYKLIFLPTFNSSEMVLKSRRKLNSKSARHLLTWSHYIFSKRLMQQAERKGVLVVRCNESYTSKTCPHCGKIHEKLGGSKVFKCPNCGNSVYDYPLHPYTKALLSAVPIPDPEIEAKRERIILKGDVPSFLLPSCGCRFYSRCPSANLVGNRCRVEEPQLREINPGHFVSCHLWDSQNPP

SEQ ID NO: 575 - protein, 405 aa, Carybdea marsupialis
LTMLQAVKVRLYPEPLQQEALSKSMGCARWYWNFALNACIQHYQETGQTLKLSVYKGMLPQLKKEYPWLKTDCYSAVLQCVAINLNKAYKNFFEGKAKFPRFKSKRRKQSIQYPQNVIVANNCLKVPKIGKIKAVFHREIVGKIKTVTISQAPSGKYYASLLLEEEAALTPHPYAKEKVAGIDLGLKDFAIVNDGEKTEKYSNPKHIAKHEKNLKRKQKKLSRKVKGSKSRDKARKLVARVHERVSNSRQDFLHKLSRKLVDENQVIVVESLNIKGMVKNHCLAKAISDVGWGTFVNFLEYKLAKAGKVLVEIDRWFPSSKICSECGHQMDAMPLDVREWTCPKCQTLHDRDENASKNIRSEGIRQLRALGISASAGGGDVRLVINNVDEKQCPVNPEAAHLSIG

SEQ ID NO: 576 - protein, 306 aa, Picochlorum sp.
SHKRTFYRNERLKTKTRQSSQKGSKGWLAYAKMTMVYITQIVSLSVWTQVKSQRPRGFFMIRKSKRSMQSGMQKMVVIQRWKTDIKVILWGQENGSSYLVRNSIQPKKKRMSEYCPAWVSVPTYKTVDLEKIFESYRFQVSMWPQLQQAFFDDKKWYQKQKMRKFCKEKSAMEDVVARICGTRNKEAQKRVIVAYGDGDNNGTMRGTAPIMSTKLFNKVSECATVVLVNEFNTSKLCSCCHEAMEQYNKQFRMKRCHNNECIRNVWDRDVNASINIKDLFLEKCHNGSRIKAFKRTRKRQRTSTRQ

SEQ ID NO: 577 - protein, 769 aa, Picochlorum sp.
KKKRKVSATPSKKVKKKKFTRLDVAIKKDKDRFFNKTVVKCTLQPFCKFKVVQREIEECVFYLSRLQIHVHHVMHLLLLRNGGAFRDHKDETLYELYNKIYRHLANHLQQKKERKDVDTNLRDLCKEYCEETGLRTDWPQGCLSSWRGKTMEQMAQQSSVMHTTHLETNLNVYALRYLRYLLFRDDTDFDQIKNLSKKKFGQVFSAITQAFWERTKVSDIVERRPSLTEFASDVSVWDEAQRALDIICSLVPKTTTLSEKSRICFFILGHLEPFVESLQQRFRNGEFEGKKSILGRQKWTFCLCPQMAWKPKHIHISSTAVKTMVEQLAKKYPYIRKIVDDCPALDDYTNKYYYWKSIFNMKRVLKKKHMKDQTKLRFGCSICTDGVSVSAVIDTVKSDLECKIIHLQDDMNYVKAKLWATYCGMFATNIIAKKIRYDPLRILLGDISTIHYVLLKPLLHTLKSQKDVLQKRKAKNKDKTVITERIKRLAGIRKDDHSIYHTDCIIVGLDPGKKSAATWVFHDSEKQKIHAKWNAENGRHTEVEDKYKSDSLGSGEWIFLSSQKQYTAKMKKRMSEYCPAWMSVPTYKTVDLEKIFESYRFQVSMWPQLQQAFFDDKKWYQKQKMRKFCKEKSAMEDVVARICGTRNKEAQKRVIVAYGDGDNNGTMRGTAPIMSTKLFNKVSECATVVLVNEFNTSKLCSCCHEAMEQYNKQFRMKRCHNNECIRNVWDRDVNASINIKDLFLEKCHNGARIKAFKRTRKRQRTSTRQ

SEQ ID NO: 578 - protein, 801 aa, Picochlorum sp.
HLVHLTLVNPNLLEPWIGMKSSRHRQPCHFKMKKKRKVSATPSKQVKKKKFTRLDVAIKKDKDRFFNKTVVKCTLQPFCKFKVVQREIEECVFYLSRLQIHVHHVMHLLLLRNGGAFRDHKDETLYELYNKIYRHLANHLQQKKERKDVDTNLRDLCKEYCEETGLKTDWPQGCLSSWRGKTMEQMAQQSSVMHTTHLETNLNVYALRYLRYLLFRDDTDFDQIKNLSKKKFGQVFSAITQAFWERTKVSDIVERRPSLTEFASDVSVWDEAQRALDIICSLVPKTTTLSEKSRICFFILGHLEPFVESLQQRFRNGEFEGKKSILGRQKWTFCLCPQMAWKPKHIHISSTAVKTMVEQLAKKYPYIRKIVDDCPALDDYTNKYYYWKSIFNMKRVLKKKHMKDQTKLRFGCSICTDGVSVSAVIDTVKSDLECKIIHLQDDTNYVKAKLWATYCGMFATNIIAKKIRYDPLRILLGDISTIHYVLLKPLLHTLKSQKDVLQKRKAKNKDKTVITERIKRLAGIRKDDHGIYHTDCIIVGLDPGKKSAATWVFHDSEKQKIHAKWNAENGRHTEVEDRYKSDSLGSGEWIFLSSQKQYTAKMKKRMSEYCPAWMSVPTYKTVDLEKIFESYRFQVSMWPQLQQAFFDDKKWYQKQKMRKFCKEKSAMEDVVARICGTRNKEAQKRVIVAYGDGDNNGTMRGTAPIMSTKLFNKVSECATVVLVNEFNTSKLCSCCHEAMEQYNKQFRMKRCHNNECIRNVWDRDVNASINIKDLFLEKCHNGARIKAFKRTRKRQRTSTRQ

SEQ ID NO: 579 - protein, 862 aa, Picochlorum sp.
HEIGVMRTWLTFLPYPATEKDSCTNHHNHLAKYDVYLSRFIHYCLQSEDSFLGEHLYLFEGLTRKQYNFVSGRIMALLREEKASNNANDDDDEKENESNNTKNDEQEKKSIHKMLEGTSPRSREGIPEKVWDTLECFMSDFLLPNYYNKKIVDFDYQERSVKLYQMLQVLAPHGREMQRLALENRKRMGQRETISAAEADNLFAMPKFRSLGGDTDWRGTDGNRFRALYDNKQIEDLYAEMRKKKEIDGDRLSRVERIAYNVINGFVRRRNAMTRKTPRMRRQQKWAFDLCPQASYRAKYMPLTNTGLQQLLKFIAKRDEKVKESRRRVQELQEEDVAFMMEEGIDKDSSLAKHLLSFRYWDECFNLKTVMKDKYPEDPRSFLLMCYQHPDQIPKAKRFGNFISTDGYGTTASLEKLKEGIDKDICKLGKQIATLKDKKGKTKKEKEDLETLKEQRKQMWLDQKKQQYNIPEESGFTVTHILRQEDMDTVESLLDRWIKESGDISKECGDMVVTMKREFMTVFEQVRQGDPDRSRGRDTMDFNARLLHDLAKEWIEKDMSVEWKERDMSEETRSQFQKMGKELMSLLEKVQIYETNRKVIGIDMGKSNVATAVYHDTSLQRVHMSNEKTNKEDRFKTLSITNKAWRNKSGQMAYTFLMNKRITKFVPEMNSRPTTRTTNTDSIMESYRFMNTQWKNGTGAESGGGLEKAFFTGSYRKRKMFQGFKRQKAIADFVMLVLQGGDEEASFCRKQAKEVIVAYGDACPRHNTKGVAPAPNMPFYRKFKELATCVLVDEHRSSMNCSGCIQEMKDGCVFRLKCCRNNTCVRTTWNRDTNAGINMFNLLLWKILYGDRPRTFSRTKKK

SEQ ID NO: 580 - protein, 801 aa, Picochlorum sp.
HLVHLTLVNPNLLEPWIGMKSSRHRQPCHFKMKKKRKVSATPSKKVKKKKFTRLDVAIKKDKDRFFNKTVVKCTLQPFCKFKVVQREIEECVFYLSRLQIHVHHVMHLLLLRNGGAFRDHKDETLYELYNKIYRHLANHLQQKKERKDVDTNLRDLCKEYCEETGLKTDWPQGCLSSWRGKTMEQMAQQSSVMHTTHLETNLNVYALRYLRYLLFRDDTDFDQIKNLSKKKFGQVFSAITQAFWERTKVSDIVERRPSLTEFASDVSVWDEAQRALDIICSLVPKTTTLSEKSRICFFILGHLEPFVESLQQRFRNGEFEGKKSILGRQKWTFCLCPQMAWKPKHIHISSTAVKTMVEQLAKKYPYIRKIVDDCPALDDYTNKYYYWKSIFNMKRVLKKKHMKDQTKLRFGCSICTDGVSVSAVIDTVKSDLECKIIHLQDDMNYVKAKLWATYCGMFATNIIAKKIRYDPLRILLGDISTIHYVLLKPLLHTLKSQKDVLQKRKAKNKDKTVITERIKRLAGIRKDDHGIYHTDCIIVGLDPGKKSAATWVFHDSEKQKIHAKWNAENGRHAEVEDRYKSDSLGSGEWIFLSSQKQYTAKMKKRMSEYCPAWVSVPTCKTVDFEKIFESYRFQVSMWPQLQQAFFDDKKWYQKQKMRKFCKEKSAMEDVVARICGTRNKEAQKRVIVAYGDGDNNGTMRGTAPIMSTKLFNKVSECATVVLVNEFNTSKLCSCCHEAMEQYNKQFRMKRCHNNECIRNVWDRDVNASINIKDLFLEKCHNGSRIKAFKRTRKRQRTSTRQ

SEQ ID NO: 581 - protein, 801 aa, Picochlorum sp.
HLVHLTLVNPNLLEPWIGMKSSRHRQPCHFKMKKKRKVSATPSKKVKKKKFTRLDVAIKKDKDRFFNKTVVKCTLQPFCKFKVVQREIEECVFYLSRLQIHVHHVMHLLLLRNGGAFRDHKDETLYELYNKIYRHLANHLQQKKERKDVDTNLRDLCKEYCEETGLKTDWPQGCLSSWRGKTMEQMAQQSSVMHTTHLETNLNVYALRYLRYLLFRDDTDFDQIKNLSKKKFGQVFSAITQAFWERTKVSDIVERRPSLTEFASDVSVWDEAQRALDIICSLVPKTTTLSEKSRICFFILGHLEPFVESLQQRFRNGEFEGKKSILGRQKWTFCLCPQMAWKPKHIHISSTAVKTMVEQLAKKYPYIRKIVDDCPALDDYTNKYYYWKSIFNMKRVLKKKHMKDQTKLRFGCSICTDGVSVSAVIDTVKSDLECKIIHLQDDMNYVKAKLWATYCGMFATNIIAKKIRYDPLRILLGDISTIHYVLLKPLLHTLKSQKDVLQKRKAKNKDKTVITERIKRLAGIRKDDHGIYHTDCIIVGLDPGKKSAATWVFHDSEKQKIHAKWNAENGRHTEVEDRYKSDSLGSGEWIFLSSQKQYTAKIKKRMSEYCPAWVSVPTYKTVDLEKIFESYRFQVSMWPQLQQAFFDDKKWYQKQKMRKFCKEKSAMEDVVARICGTRNKEAQKRVIVAYGDGDNNGTMRGTAPIMSTKLFNKVSECATVVLVNEFNTSKLCSCCHEAMEQYNKQFRMKRCHNNECIRNVWDRDVNASINIKDLFLEKCHNGSRIKAFKRTRKRQRTSTRQ

SEQ ID NO: 582 - protein, 808 aa, Picochlorum sp.
NLFIICIYLYNVLYFIPNLLEPWIGMKSSRHRQPCHFKMKKKRKVSATPSKKVKKKKFTRLDVAIKKDKDRFFNKTVVKCTLQPFCKFKVVQREIEECVFYLSRLQIHAHHVMHLLLLRNGGAFRDDKDESLYELYNKIYRHLANHLQQKKERKDVDTNLRDLCKEYCEETGLKTDWPQGCLSSWRGKTMEQMAQQSSVMHTTHLETNLNVYALRYLRYLLFRDDTDFDQIKNLSKKKFGQVFSAITQAFWERTKVSDIVERRPSLTEFASDVSVWDEAQRALDIICSLVPKTTTLSEKSRICFFILGHLEPFVESLQQRFRNGEFEGKKSILGRQKWTFCLCPQMAWRPKHIHISSTAVKTMVEQLAKKYPYIRKIVDDCPALDDYTNKYYYWKSIFNMKRVLKKKHMKDQTKLRFGCSICTDGVSVSAVIDTVKSDLECKIIHLQDDMNYVKAKLWATYCGMFATNIIAKKIRYDPLRILLGDISTIHYVLLKPLLHTLKSQKDVLQKRKAKNKDKTVITERIKRLAGIRKDDHGIYHTDCIIVGLDPGKKSAATWVFHDSEKQKIHAKWNAENGRHTEVEDRYKSDSLGSGEWIFLSSQKQYTAKMKKRMSEYCPAWVSVPTYKTVDLEKIFESYRFQVSMWPQLQQAFFDDKKWYQKQKMRKFCKEKSAMEDVVARICGTRNKEAQKRVIVAYGDGDNNGTMRGTAPIMSTKLFNKVSECATVVLVNEFNTSKLCSCCHEAMEQYNKQFRMKRCQNNECIRNVWDRDVNASINIKDLFLEKCHNGSRIKAFKRTRKRQRTSTRQ

SEQ ID NO: 583 - protein, 1020 aa, Picochlorum sp.
STASVSLATGNNVGFESHHINEDFYNYQACMMATADGEVQAYVQDTSPKLGLYRKPSGKQTQYENLVIKVIKPGSLGGYQNHSRETKGQWRGVARSPRLKNLLFDTATMLGHISFEATQAAHYHVYRCLENGIDLGPMDFNGFWYKIFDAIKDLRYGGGLHHIDTHLYDSLREYEENAPLRRDDHHIDADEPFGIWDLPGHRVWRHACLKAAAKTKEQNLGVILQTNAYHNLGKVIKVRIAEYFGDTYADNFRSLVSAIAKCIWDDQPLEKVKEGYKRLSDLTQEEIRDIACHVIDPIREKFPDETGRKDNSKMIQFVYFVMGEVIEYNRVRSRQRGAQIVKFVNVCVGQQLANDIEREMGDLSKKKFVLFMKHALDIFRQCSGSDTSSVCRDIGIRCSQRVSMNGKYRSYILRRLSERILYQTENSMLKDELVLDQHQTMWIDRITAQLQLPSSLSEFESKKDLFVKYLREYIVPKLRESNLCVAQRDHQNGNNKIPWGRKIVVPSILPLAKKRACHVSIPNDAITSLAKFLAEEDKDIEQKITAMQIILSEAKERKMAIEKEIDERMLQEQTDEEYEMVCQIERNKIASEKRFRAIPTGKIHKYKMRPEETAFSMDRKKRKEEYLSSSEEFKQAEKEWERAKLLYQECCWMALFNIKVKRRHDAHEWLFGGELSTDGVDVSMQYYRIKTDEEFEAGQKEKKESGKKALQRKTKRTGKKPAGSGSALTADKSDDISSQADWRRAKDVLKDDLSNVCVFDPGPSGHVGIRMDRSKFDTLKENRKHGDYDPFKTIHLSNHEMRARSGKLKRMKLKAIWSESKPKIRAWNATAPSRKVATKAEILDFCRNTNSQLHDVYGFYSQNCFRRQRFSVYSRTQHMLDMMVEKICGTSERKVQEKTVVVFGNAAINSGECRTGRICLGELKRLLRQRCCYIEVDEFRSSQYCCACQTKLEPPPRVGLHKRWKVRRCMNNECERAFWQRDVNAAINLAKFFLWEVHGEDKDKVFRRPCRLDEDDVPDV

SEQ ID NO: 584 - protein, 801 aa, Picochlorum sp.
HLVHLTLVNPNLLEPWIGMKSSRHRQPCHFKMKKKRKVSATPSKKVKKKKFTRLDVAIKKDKDRFFNKTVVKCTLQPFCKFKVVQREIEECVFYLSRLQIHAHHVMHLLLLRNGGAFRDHKDESLYELYNKIYRHLANHLQQKKERKDVDTNLRDLCKEYCEETGLKTDWPQGCLSSWRDKTMEQMAQQSSVMHTTHLETNLNVYALRYLRYLLFRDDTDFDQIKNLSKKKFGQVFSAITQAFWERTKVSDIVERRPSLTEFASDVSVWDEAQRALDIICSLVPKTTTLSEKSRICFFILGHLEPFVESLQQRFRNGEFEGKKSILGRQKWTFCLCPQMAWKPKHIHISSTAVKTMVEQLAKKYPYIRKIVDDCPALDDYTNKYYYWKSIFNMKRVLKKKHMKDQTKLRFGCSICTDGVSVSAVIDTVKSDLECKIIHLQDDMNYVKAKLWATYCGMFATNIIAKKIRYDPLRILLGDISTIHYVLLKPLLHTLKSQKDVLQKRKAKNKDKTVITERIKRLAGIRKDDHGIYHTDCIIVGLDPGKKSAATWVFHDSEKQKIHAKWNAENGRHTEVEDRYKSDSLGSGEWIFLSSQKQYTAKIKKRMSEYCPAWVSVPTYKTVDLEKIFESYRFQVSMWPQLQQAFFDDKKWYQKQKMRKFCKEKSAMEDVVARICGTRNKEAQKRVIVAYGDGDNNGTMRGTAPIMSTKLFNKVSECATVVLVNEFNTSKLCSCCHEAMEQYNKQFRMKRCHNNECIRNVWDRDVNASINIKDLFLEKCHNGSRIKAFKRTRKRQRTSTRQ

SEQ ID NO: 585 - protein, 801 aa, Picochlorum sp.
HLVHLTLVNPNLLEPWIGMKSSRHRQPCHFKMKKKRKVSATPSKKVKKKKFTRLDVAIKKDKDRFFNKTVVKCTLQPFCKFKVVQREIEECVFYLSRLQIHAHHVMHLLLLRNGGAFRDDKDESLYELYNKIYRHLANHLQQKKERKDVDTNLRDLCKEYCDEVALERDWPQGCVSGWRDRTIEQMAQQSSVMHTTHLETNLNVYTLRYLRYLLFRDDTDFDQIKNLSKKKFGQVFSAITQAFWERTKVSDIVERRPSLTEFASDVSVWDEAQRALDIICSLVPKTTTLSEKSRICFFILGHLEPFVESLQQRFRNGEFEGKKSILGRQKWTFCLCPQMAWKPKHIHISSTAVKTMVEQLAKKYPYIRKIVDDCPALDDYTNKYYYWKSIFNMKRVLKKKHMKDQKKLRFGCSICTDGVSVSAVIDTVKSDLECTIIHLQDDMNYVKAKLWATYCGMFATNIIAKKIRYDPLRILLGDISTIHYVLLKPLLHTLKSQKDVLQKRKAKNKDKTVITERIKRLAGIRKDDHGIYHTDCIIVGLDPGKKSAATWVFHDSEKQKIHAKWNAENGRHTEVEDRYKSDSLGSGEWIFVSSQKQYTAKMKKRMSEYCPAWVSVPTCKTVDLEKIFESYRFQVSMWPQLQQAFFDDKKWYQKQKMRKFCKEKSAMEDVVARICGTRNKEAQKRVIVAYGDGDNNGTMRGTAPIMSTKLFNKVSECATVVLVNEFNTSKLCSCCHEAMEQYNKQFRMKRCHNNECIRNVWDRDVNASINIKDLFLEKCYNGSRIKAFKRTRKRQRTSTRQ

SEQ ID NO: 586 - protein, 801 aa, Picochlorum sp.
HLVHLTLVNPNLLEPWIGMKSSRHRQPCHFKMKKKRKVSATPSKKVKKKKFTRLDVAIKKDKDRFFNKTVVKCTLQPFCKFKVVQREIEECVFYLSRLQIHAHHVMHLLLLRNGGAFRDDKDESLYELYNKIYRHLANHLQQKKERKDVDTNLRDLCKEYCEETGLKTDWPQGCLSSWRGKTMEQMAQQSSVMHTTHLETNLNVYALRYLRYLLFRDDTDFDQIKNLSKKKFGQVFSAITQAFWERTKVSDIVERRPSLTEFASDVSVWDEAQRALDIICSLVPKTTTLSEKSRICFFILGHLEPFVESLQQRFRNGEFEGKKSILGRQKWTFCLCPQMAWRPKHIHISSTAVKTMVEQLAKKYPYIRKIVDDCPALDDYTNKYYYWKSIFNMKRVLKKKHMKDQTKLRFGCSICTDGVSVSAVIDTVKSDLECKIIHLQDDMNYVKAKLWATYCGMFATNIIAKKIRYDPLRILLGDISTIHYVLLKPLLHTLKSQKDVLQKRKAKNKDKTVITERIKRLAGIRKDDHGIYHTDCIIVGLDPGKKSAATWVFHDSEKQKIHAKWNAENGRHTEVEDRYKSDSLGSGEWIFLSSQKQYTAKMKKRMSEYCPAWVSVPTYKTVDLEKIFESYRFQVSMWPQLQQAFFDDKKWYQKQKMRKFCKEKSAMEDVVARICGTRNKEAQKRVIVAYGDGDNNGTMRGTAPIMSTKLFNKVSECATVVLVNEFNTSKLCSCCHEAMEQYNKQFRMKRCQNNECIRNVWDRDVNASINIKDLFLEKCHNGSRIKAFKRTRKRQRTSTRQ

SEQ ID NO: 587 - protein, 811 aa, Picochlorum sp.
NSMGKKRKEKNTETSSSNSKKKQKAVNRPDVAAKKNNDRFYHTTVIKCTMNPLCRYKVVQNEIDDCVFWMSRLQIHTSHIMNLFLLQNCGRLPLGEKKKDKAKNLPGLYNKMMRQMANHLQSNTEKKGVDTELRDLVTWYCENVGLKPDWPSGCVSSGWRADILNEAARRMATMHDNHIQVNLETRFSMRYLKMLLRSKEEYISIRELPKKIYAKVFSTIRDAFYEGKKVLKIAKRRPSVIKLCPLDSHVWGVAQDLTTRLRNFIPSKGASLSRKSQTMFDIMMEVEPFSDDLQQRFLNGEASNGKFGKQTWKFNMCPQLSWRPKHIHISTTAVVHLLEDMAGKHSHFGRLLRDLEGITKEKYLSYEKKLRLWSALFKLKKTVLRQRHVNNQNDCRFGCFISTDGVSVAATIQRRKSKAHCDVIRLNDDIAYLIGKTKTVGKGVLNSYAYGKWCLEVCQMRGKKGMGDDATALLPKLKDLIGEVTLPVDFLVLFSRIYPLIDGLQRKRMNLLAGINKRNDQTLIHEDIKDLMQLEKVDGIYYAKCKVVGLDPGKKSAATWVYHDPLKQTKHKKWKGDEGEKTMKEERYDSGSIGGGEWRYLSGQKQYTAKMNKRMTAFCPSWRSLSSTKTVDIERTLAAYRKQVELWPQINNAFFHGSKWFQKQRMRKFCKRQKAMEDVVAKIAGTKNKEEQKKVIIAYGDGDKNGTLRGTAPMMSTKLFKKVSENCRVVVTNEFRTSKLCSCCHGIMSQLRKQFRMKRCLQNDCIRTVWDRDINASINILNLFLHYCYSVKDNGKGERLSPFKRKRGCDE

SEQ ID NO: 588 - protein, 1025 aa, Picochlorum sp.
RVCRFLCAGYSNTISKSKKRKRATKPTTSSGEENLLHGDHIWNTQSIKCSFGGFCKIESLRDALRKQNHWFSQQDVHVHNVMTIYISENEGQMFPGGVIDENTGKEKKCTTGDLVKVWDVAYATVLQCLRNQKIRKTKNEQTLARKKAFYDLCARYCADTGIARDWSNEDLANFSAVIQQQRRTAVTNHHNHLAKYDVYLSRFIHYCLQSEDSFLGEHLYLFEGLTRKQYNFVFGRIMALLREEKASNNANDDDDEKENESNNTKNDEQEKKSIHKMLEGTSPRSREGIPEKVWDTLECFMSDFLLPNYYNKKIVDFDYQERSVKLYQMLQVLAPHGREMQRLALENRKRMGQRETISAAEADNLFAMPKFRSLGGDTDWRGTDGNRFRALYDNKQIEDLYAEMRKKKEIDGDRLSRVERIAYNVINGFVRRRNAMTRKTPRMRRQQKWAFDLCPQASYRAKYMPLTNTGLQQLLKFIAKRDEKVKESRRRVQELQEEDVAFMMEEGIDKDSSLAKHLLSFRYWDECFNLKTVMKDKYPEDPRSFLLMCYQHPDQIPKAKRFGNFISTDGYGTTASLEKLKEGIDKDICKLGKQIATLKDKKGKTKKEKEDLETLKEQRKQMWLDQKKQQYNIPEESGFTVTHILRQEDMDTVESLLDRWIKESGDISKECGDMVVTMKREFMTVFEQVRQGDPDRSRGRDTMDFNARLLHDLAKEWIEKDMSVEWKERDMSEETRSQFQKMGKELMSLLEKVQIYETNRKVIGIDMGKSNVATAVYHDTSLQRVHMSNEKTNKEDRFKTLSITNKAWRNKSGQMAYTFLMNKRITKFVPEMNSRPTTRTTNTDSIMESYRFMNTQWKNGTGAESGGGLEKAFFTGSYRKRKMFQGFKRQKAIADFVMLVLQGGDEEASFCRKQAKEVIVAYGDACPRHNTKGVAPAPNMPFYRKFKELATCVLVDEHRSSMNCSGCIQEMKDGCVFRLKCCRNNTCVRTTWNRDTNAGINMFNLLLWKILYGDRPRTFSRTKKK

SEQ ID NO: 589 - protein, 801 aa, Picochlorum sp.
HLVHLTLVNPNLLEPWIGMKSSRHRQPCHFKMKKKRKVSATPSKKVKKKKFTRLDVAIKKDKDRFFNKTVVKCTLQPFCKFKVVQREIEECVFYLSRLQIHVHHVMHLLLLRNGGAFRDHKDETLYELYNKIYRHLANHLQQKKERKDVDTNLRDLCKEYCEETGLRTDWPQGCLSSWRGKTMEQMAQQSSVMHTTHLETNLNVYALRYLRYLLFRDDTDFDQIKNLSKKKFGQVFSAITQAFWERTKVSDIVERRPSLTEFASDVSVWDEAQRALDIICSLVPKTTTLSEKSRICFFILGHLEPFVESLQQRFRNGEFEGKKSILGRQKWTFCLCPQMAWKPKHIHISSTAVKTMVEQLAKKYPYIRKIVDDCPALDDYTNKYYYWKSIFNMKRVLKKKHMKDQTKLRFGCSICTDGVSVSAVIDTVKSDLECKIIHLQDDMNYVKAKLWATYCGMFATNIIAKKIRYDPLRILLGDISTIHYVLLKPLLHTLKSQKDVLQKRKAKNKDKTVITERIKRLAGIRKDDHSIYHTDCIIVGLDPGKKSAATWVFHDSEKQKIHAKWNAENGRHTEVEDKYKSDSLGSGEWIFLSSQKQYTAKMKKRMSEYCPAWMSVPTYKTVDLEKIFESYRFQVSMWPQLQQAFFDDKKWYQKQKMRKFCKEKSAMEDVVARICGTRNKEAQKRVIVAYGDGDNNGTMRGTAPIMSTKLFNKVSECATVVLVNEFNTSKLCSCCHEAMEQYNKQFRMKRCHNNECIRNVWDRDVNASINIKDLFLEKCHNGARIKAFKRTRKRQRTSTRQ

SEQ ID NO: 590 - protein, 801 aa, Picochlorum sp.
HLVHLTLVNPNLLEPWIGMKSSRHRQPCHFKMKKKRKVSATPSKKVKKKKFTRLDVAIKKDKDRFFNKTVVKCTLQPFCKFKVVQREIEECVFYLSRLQIHAHHVMHLLLLRNGGAFRDHKDESLYELYNKIYRHLANHLQQKKERKDVDTNLRDLCKEYCEETGLKTDWPQGCLSSWRDKTMEQMAQQSSVMHTTHLETNLNVYALRYLRYLLFRDDTDFDQIKNLSKKKFGQVFSAITQAFWERTKVSDIVERRPSLTEFASDVSVWDEAQRALDIICSLVPKTTTLSEKSRICFFILGHLEPFVESLQQRFRNGEFEGKKSILGRQKWTFCLCPQMAWKPKHIHISSTAVKTMVEQLAKKYPYIRKIVDDCPALDDYTNKYYYWKSIFNMKRVLKKKHMKDQTKLRFGCSICTDGVSVSAVIDTVKSDLECKIIHLQDDMNYVKAKLWATYCGMFATNIIAKKIRYDPLRILLGDISTIHYVLLKPLLHTLKSQKDVLQKRKAKNKDKTVITKRIKRLAGIRKDDHGIYHTDCIIVGLDPGKKSAATWVFHDSEKQKIHAKWNAENGRHTEVEDRYKSDSLGSGEWIFLSSQKQYTAKIKKRMSEYCPAWVSVPTYKTVDLEKIFESYRFQVSMWPQLQQAFFDDKKWYQKQKMRKFCKEKSAMEDVVARICGTRNKEAQKRVIVAYGDGDNNGTMRGTAPIMSTKLFNKVSECATVVLVNEFNTSKLCSCCHEAMEQYNKQFRMKRCHNNECIRNVWDRDVNASINIKDLFLEKCHNGSRIKAFKRTRKRQRTSTRQ

SEQ ID NO: 591 - protein, 418 aa, Picochlorum sp.
VLLLEIDIQHEASIEKKHMKDQTKLRFGCSICTDGVSVSAVIDTVKSDLECKIIHLQDDTNYVKAKLWATYCGMFATNIIAKKIRYDPLRILLGDISTIHYVLLKPLLHTLKSQKDVLQKRKAKNKDKTVITERIKRLAGIRKDDHGIYHTDCIIVGLDPGKKSAATWVFHDSEKQKIHAKWNAENGRHTEVEDRYKSDSLGSGEWIFLSSQKQYTAKMKKRMSEYCPAWMSVPTYKTVDLEKIFESYRFQVSMWPQLQQAFFDDKKWYQKQKMRKFCKEKSAMEDVVARICGTRNKEAQKRVIVAYGDGDNNGTMRGTAPIMSTKLFNKVSECATVVLVNEFNTSKLCSCCHEAMEQYNKQFRMKRCHNNECIRNVWDRDVNASINIKDLFLEKCHNGARIKAFKRTRKRQRTSTRQ

SEQ ID NO: 592 - protein, 762 aa, Picochlorum costavermella
TNNNKKEKESIHRMLEGTSQHSREGIPEKVWDILEYFMSDFLLPGYYNKKIVDFDCQERSVKLYQMLQVLAPYGQEMQRLALESRERRRQRETISAEDVGILFAMPKFRNLGGDTDWKGTDGNRFRALYDNKQIEDLYAEMRKKKEKHGNRLSRVEKIAYNFINRFVRRRNATSRKTTRMRRQHKWAFDLCPQASYRPKYMPISNTGLQMLLPSFAKRDEKVKESIRRVQKLQEEDVVFLTKEGIDTKSSLAKHLRDFRYWDEFFNLKTVMKDKYPEDPRSFLLMCYQHPDQIPNAKRFGNSIFTDGYGTTALLEKLKEGIDKDLCKLGKRIATLKDKKGRTEKESEDLKSLEEQRKQMSLDQKKQQYNIPQKSGFTVMHILRQEDMDTLESRLDGWIKESRDISAECHDMVVTMQREFMTVFEQVRQGDPDQSRGRETMDFNAQLLHDLAKKWIERDMSVEWKERDMSGETRSQFRKMGKELMSLIEKVQIYETNLKVIDIDMGKSNIATAVYHDTSLQRVHMSNVKTNKEDRFKTLGITNKAWRHKSGQMAYTFLMKKRIRKFVPKLDSRPTTKTTNTERIMESYRFMNNQWENGTDAESRGGLKEAFFTGSYRKRKMFQNSRRQKAIANFVMLVLKGGDEKAKLSRKQAKEIIVAYGDACPRHHIKGVAPAPNMPFYRKFKELATCVLVDEHRSSMNCSGCIQEMKDGRVFRLKCCRNNSCVRTTWNRDTNAGINMFNLLLWKTLYEDRPTPFSRTKKK

SEQ ID NO: 593 - protein, 216 aa, Picochlorum costavermella
IECMVMRLEFLQHMTRCHQCDGITTMYSILGIYLMDILPFSCDGRGRRCIHTYIHTGGGLKEAFFTGSYRKRKMFQNSRRQKAIAHFVMLVLKGGDEKAKLSRKQAKEIIVAYGDACPRHHIKGVAPAPNMPFYRKFKELATCVLVDDHRSSMNCSGCIQEMKDGRVFRLKCCRNNSCVRTTWNRDTNAGINIFNLLLWKTLYEDRPTTFSRTKKK

SEQ ID NO: 594 - protein, 1015 aa, Picochlorum costavermella
NTRNTMSESKKRQRATRPTTSSGEENLLHGNYIWNTQSIKCSFGGFCKIESMRDALREQNHWFSQLDVHVHNVMTIYISENEGQMIPGGVINPKTGEEEKFTKGLLEKVWDTAYSTALTCLRKKDIRKTKDEQSRALKESLYDVCERYYADSGVARDWSNTVLANFSAVNQSQRRISATNHHSHLAKYDVYLSRFIHYCLQSQDSFLGEHLYLFEGLTRKQYNFVFGRIMALLREEKESINATTNNKKEKKSSNATNSNKKEKESIHRMLEGTSQHSREGIPEKVWDILEYFMSDFLLPGYYNKKIVDFDCQERSVKLYQMLQVLAPYGQEMQRLALESRERRRQRETISAEDVGILFAMPKFRNLGGDTDWKGTDGNRFRALYDNKQIEDLYAEMRKKKEKHGNRLSRVEKIAYNFINRFVRRRNATSRKTTRMRRQHKWAFDLCPQASYRPKYMPISNTGLQMLLPSFAKRDEKVKESIRRVQKLQEEDVVFLTKEGIDTKSSLAKHLRDFRYWDEFFNLKTVMKDKYPEDPRSFLLMCYQHPDQIPNAKRFGNSIFTDGYGTTALLEKLKEGIDKDLCKLGNRIATLKDKKGRTEKESEDLKSLEEQRKQMSLDQKKQQYNIPQKSGFTVMHILRQEDMDTLESRLDGWIKESRDISAECHDMVVTMQREFMTVFEQVRQGDPDQSGGRETMDFNAQLLHDLAKKWIERDMSVEWKERDMSGETRSQFRKMGKELMSLIEKVQIYETNLKVIGIDMGKSNIATAVYHDTSLQRVHMSNVKTNKKDRFKTLGITNKAWRHKSGQMAYTFLMKKRIRKFVPKLDSRPTTKTTNTERIMESYRFMNNQWENGTDAESRGGLKEAFFTGSYRKRKMFQNSRRQKAIANFVMLVLKGGDEKAKLSRKQAKEIIVAYGDACPRHHIKGVAPAPNMPFYRKFKELATCVLVDEHRSSMNCSGCIQEMKDGRVFRLKCCRNNSCVRTTWNRDTNAGINMFNLLLWKTLYEDRPTTFSRTN

SEQ ID NO: 595 - protein, 381 aa, Androctonus mauritanicus
SDYIYTGFDKNKRGGMIYIIEQNRNKIKETTTVKFKIEPNKSQEEMIRTASIEYIKQINILVAEMVENKKITSKTTKHIQAPLNSNVKNQLIRDAKSVFKKAKKNNFEKIPIMKKAIIIYNNKNYKYYENAIRIPFMIDGKSKQVMIKANITEYEWQKLESAEKIGTMRITTKNGNYIAQIAIENEIEQKVSTKVMGVDLGIKVPSVCVTDENEVKFLGNGRYNKYIRRYHNQRRKKLGKAKKLNAIRKSKNKEQRWLQDQDHKISRGIITFAVENNVGIIRLEKLANIRKKTSKSRKNNLSLSNWSFYRLSSYIEYKARLLGIRVEYVDPKYTSQKCPRCEKKNKAKDRKYVCNYCNYVAHRDVIGAKNIIKAPVLNGKS

SEQ ID NO: 596 - protein, 341 aa, Androctonus mauritanicus
IIGECIMFVDMILTCKIKHNQNFDIDLAKARQIAIVAKKTKTRSSKDVKHIGLPSAISNQILRKYSSNKKLKRINSVKLTIPSQGIKLEENTIKVSCVKLNLDFPKRTAKIHQIELDNTYAYVSYAVEEKKEIQCQSWLGVDLNTTGHCVVAANPTTKKVWKLGKIANHIHKKYKNLRRKLQKRKRRKALKKIKNKESRIIRDLNHKISKKIVSEALQNNSGIVLEELKGIRKTAKTSKKFRYALNSWSFYQLKIFIRYKAKLLGIPVAEIDPKYTSQQCSRCGLLGERKAKNFKCSCGHVENADVNASFVISLRHQGILQSPVDRDIGEGQLASPKRQVA

SEQ ID NO: 597 - protein, 320 aa, Androctonus mauritanicus
FRSVAYQSEGFNVNHTTGRDFGTLTLSKIGDIRVRAHRDLPDTKNIKRAVLKKERTGAWFACFVVEVDEPEKPNPAEIDPAECVGVDLGILSYIHTSDDCSVGCVDLKTEYEQYAREQRSLKRKERGSANWEKQRQNVARAKRRIRWKVLDFQHKLSTWLVREYDVVAVEDLDVKPMLETSQSAKNKQDAAWSRFLDLLEYKGDLYGTHVVRVDARGTTKECNQCGVETSKPLWVREHSCPACGHTEDRDLNAAKNILSRGMKQIGAGRSESTSSETLRVSDGLRKSHSDFRTPVQTVLPTFTSFQVDAKHVVEAGSPAP

SEQ ID NO: 598 - protein, 249 aa, Androctonus mauritanicus
GKKKKKKKKKLQLTGRKEISKLLSTGEVLANPKHLEAAQRELRRLQRQAARQQGPDPRTGQKPSNRWRKTQDRIARLHTAIANARLDGLHQLSTRLVDEFDVVVLENLHVAGMVRNRTLARAVSGVGMGELRRQVTYKCAWSHRELIVADRWYPSSKTCSDCHAVKATLRLSARVFTCDHCGHTADRDLNAARNLAGLVETAGSTSSQSCGATQNEPAGNPRKTTTPPGVQGIGYRHGKTAPPGAAKAA

SEQ ID NO: 599 - protein, 237 aa, Androctonus mauritanicus
PAPTGRPHSRRGPWNQQHRRRVVRRRDATVPRWVAQRVQALLQARRVRVRRRERLSRCARNAKRTLKDRRRHFHHTLSKRIITECVERGVGHLYVGDLGGIRAEDDGTGRDWGRHGNKMLHGWAFGKLTTMLEYKGEAAGIEVIVDSERDTSKTCAVCGHKNGGQRVERGLYHCKNCGRTANADANGAENIRQTLLPNPDAFDRLDRDNGCLAQPAVCSFDATDGRFHPQERAHCEP

SEQ ID NO: 600 - protein, 383 aa, Androctonus mauritanicus
RGEVVDRFHRRGGRVGGMGQRVVVIGGGLAGLATAHHLLHARPDLDLTLLDGADRPGGKVRQQSVGGVRVDVGAESVVASSIAARELFAELGLAGQVVHPEPVPASFWSRGARHAIPGRTFMGVPGPQTDLTGLLDEGEVARAAQPAPFALESDDVTIADAVGTVYGRAVVDRVVEPLLGGVYAGRVDHLSLRSTMPALWAAMASGRSRAAAVASLLPPPTSTPRARVMAWSVGSACSSRPCAAVWSTPVDARTPLEPRRPAQRLEGHRPRGHRSRLRGDRLRRLTNIRDRMDNGNDRIKRQMHNWAFRELREMLAYKAAEYGIRVEDVNPAFTSQTCSRCGHQSSTNRDSSTGWFECNECETEYDGDYNAVVGLHPTGSKVA

SEQ ID NO: 601 - protein, 450 aa, Androctonus mauritanicus
SGAGWDRSAHVDVCPVVRASGGEASEGGDAGGGGAAEVSSVIQAYRFVLDPTEVQAAALSSHCGGQRTAFNWGLGRVKANLAQRAAERSYDVPEDQLTPSLNWSAYSLRKDWNVAKHEVAPWWAENSKEVYASGLANLATALDNWNSSRKGQRAGRKLGFPRFRSKCSTWSCRFTTGSFGLTSHDRRHVQLPRIGVVRTHESTRKLARHVERGTARIRSATVSFRRGRWQVSLSVEVERREPKPATRGGTVGVDLGVKHLAVLSTGEVLANPKHLEAAQRELRRLQRQAARQQGPDTRTGQKPSNRWRATQARITQLHTAIANARVEGLHKLSTWLIDEFDAVVLEDLHVAGMLRNRKLARAISGVGMGELRRQVTYKTTWSGRQLVVADRFYPSSKTCNACGVVKAKLRLRQRTFTCDHCGMSMNRDLNAARNLANLVETAGTITSSQS

SEQ ID NO: 602 - protein, 246 aa, Androctonus mauritanicus
NYRTYQVMLRIRGTDQLEGYELANARLVRKPSGYHLLITAFKNKNEIKEKEFVKGSRIGIDMGVKTHLTLSNGVKHNVLIEETERLKRLQRKLSRQIKGSNNYGKTRYLINKQYEKMSNKKNDATNKIIHDMLNNYETIYMQDENLKAWVKKNGYVKAGRKLHHSILGRVKAKLVAHDRVVVLKKWVPTTQLCGGATCGALNKHSLNDRVYECSCGYVFDRDTHAALNMIRLIEEYAMKKKKKKVL

SEQ ID NO: 603 - protein, 240 aa, Androctonus mauritanicus
GQVNPNLKSDFSFKRLVHAPTDQAVGVDTGLDSLATLSTGEKITNPKHEKRDRKKLAKAQRELSRKQPGSNNRAKARREVARVYARITDRRRDHLHQVTTGLVRENQTVVIEDLQVRNMLRNGKLARAISDASWSQFRSMLEYKAHWYGREVIAVDRWFPSSKTCSACGRLTAKMPLHIRPWTCAGCGTTHDRDVNAAKNILAAGLAVSACGAGVRPQRETSRTGQSARKQEPSGASPKI

SEQ ID NO: 604 - protein, 249 aa, Androctonus mauritanicus
GSPKSYLKNLLLMTDLKVIKKLNWFQNYEKTISFSLLTNDTSDSHPRLGSPLADESAALDIGANNIVACTTTTGKQFLYGGRDLFGRFRETAREIARLQSLLEDGRYSSMRIRRLYRKRTSRRDYAMDALVRDLIERLYDDGISTVYVGALTDVLDTHWSVQANAKTHNFWAFRAFIDRLETTAEEYGITVEERSEAWTSQECPNCGSTEDTTRHRDTLTCLCGFEGHADLAASATFLRRHDDVTRLPS

SEQ ID NO: 605 - protein, 300 aa, Androctonus mauritanicus
SIKKIFLTLLKSFEISRILLMGPETESTIESRARDRLDLAAELLEQYPDRIHTPRDIAIERDGERVEVSVDELPVDEPALDVGQRTIDAYTDVFETAGTVILNGAFIEYKARRAGVPVTAVDPRNTSKECFACGCIDKRNRKTQSEFRCVECGHSNNADHNAAGNIARRAAVTEPLFAHECVPCAVESGFRRRRRSATSGSFRFRFERKRFQRRLFLLGLLPELDNFRRLLEAHSAMAVLRGLVEVHHVGGFGLDRVVIGGASRGTVVLCFRMFSYYSSTGDITFIQKKHIRFQTAKQML

SEQ ID NO: 606 - protein, 405 aa, Babylonia areolata
PKKVLKNLLAASNLAWNWTKWLIEERGVSKKDKKTIQTVVARKDIESIFVKTLVPDFVYLNKSLLKKTTTVRLTGMHAYLAALKSSTSLHKGCLNKFNIDYLDLYPASGTFGVQKLFVRKFAVSMLPKKYKGEPLSDRRMSILPESFGTKAQPQERFLKIAKGRSFSKMPPIDHDCKIHLRSDKMWMLLIPCKRSYLRRDNTKDQPKNEGVALDPGVRTFQTSYDPFKKEIREYGGDNIKSKIKFYKTKSQRHEHLARHSKTEQLRRDHKNRARMFWHKHETLRDQVHRKLACNLVKDNKVVIVGDFSSSKAASKKNGSKLTKGTRSEMYSWAHYKFKQRLMERARGTDTKVIFQDEAWTSKTCGKCGHIKMDLGGNKQYDCEKCGLSIDRDVNGARNIFAKALM

SEQ ID NO: 607 - protein, 406 aa, Catotricha subobsoleta
RWWTFYPFFAKLQSWFTSYRYINKYGVECRLKSFPLCPKKKFGASHIMYSNSGMAELLVKYKFITTPHKEIIKDSLPIWNNHFGIVKLSRNGKLDFAESFSTNGINVSVKFKREKQQEEITKDDFHFEHVKRLYTANEFNNYLGIDPGYRLMIGAVETDKDGNETNFKLSSKQFHYATGKNERKVKLDKWTKNFEDSMERLRKYEEKCTKVEISNKNSNFRQYTKYQLKYLNAQQKKKNTLKITRLSWDKCIRTRIFLDNITNQVLPEGRNTLVAYGDGSQSSNSPIKKYVRTPQIGLYNAFKRKRHKCTVLSTDEFRTTKLCSKCYNLVWTPHRFQFCQNCDTVWNRDVNAARNILFRAKCHLEEAALPYNCTRNTSSDSTIRFSFVKTESNRDSDVVWNGLLSL

SEQ ID NO: 608 - protein, 247 aa, Catotricha subobsoleta
SAIMIEQLKKIDCLKLKKQAIERLIQVRHSNDENDDVNDDSINEDFVDDESIYEPTDETAANRILDIRTFVAEISVKSTEYELFTTFKLKHHLAECNTKICPRTARIKWDAKIGKRQLIDKVANEIIGKPLPGKKTLVRFGDGTPGPIIRGYRKVPLNGLYAALARQKERCTVFRTDEFRTTLLCSGCHRSAPPSELPKHRFQVCKLCKVVWHRDVNAGRNILYVSLQKIQGLPVDSNFLRSTMPAT

SEQ ID NO: 609 - protein, 247 aa, Catotricha subobsoleta
EIYTINPIFNESNFLQNALYEWKRFFNIEQFESVKSSKTFGLSVSTNGVDVSVHMLRPKNDNRNKLVENTENEICTDYNNANFNRFIGIDTGLRCLYGAVQIENKEKNLLLRNGSFLKRTNHFKRKMELIKRTYQQQNTVRVNREIFLKNNNIEISKKNMNYVEYTDFMLAHMTQTYSSNKPKNVLRINWDSKIQRQKPIDKLANELIGDIDKRHPNKKTLIMFGNVKVSNAVKGYVRTPLLKLYTA

SEQ ID NO: 610 - protein, 278 aa, Callirhytis sp.
DPDPSPRTMDPDATGRNTSSDSSLPKHRKCSSREINLSHKNQIALKEWKGTTWSMLIQVDVPSACRGSFRWRDDHCPFAGAREPRAGQRDFLTKSSDNLSDSGEEEFEKERDVKETPCFVLIRKTDIPAWIRGHASTRVRLMEKRLKERAKFYGPEKLKITDTSEFYATQLYITCNEQCFVSKTKHRYVICQKGRIMWERDVFAARNILNSGSIQGIPLHEAPSLLRRKKRSNHINPETRSRCLSLNGIRLYYVQNSTPRPNNRGYFLTLIKDTTSKY

SEQ ID NO: 611 - protein, 216 aa, Heteractis magnifica
LHDLIKLGTSLKQAYKEVEKYRLPEPKQGQVGIDLGIGTLFATSSDEPTFGKEGKDDPNRNPKPYKKYESKLKQLQKRLTKKQKRSSNWKKQHRKIARIHEKIANIRIDFVQKKTTELVRDNQVICIEGLNAQGMARNRKLAKHIYDSNFGRARTLLIDKARRYGRSIIKVDTFFPSSKTCKVCNHKYDQPEKFTLEIRAWTCSKCKGFGKKQLKL

SEQ ID NO: 612 - protein, 494 aa, Isoetes engelmannii
VCVPLQSPNFWLSWDAVLPAFATSRHHQTRDLSGHHSTGLRNHWFGLVELSGFPMNVYSLKAFKFQLRAKPAAEQSLNRWGGQLRWIWNKALAEQQRRHAAGEKFASYEDMTKWLTTWRNAPETTWLAEGPSQSQQQVLKRLEDAYKRFFKAVKTGDTHRVKPPRFKRRGDDPGIRFPNPKALELDQMNGRIKLPKLGWVRIRQSCVVTGDLRNVSLTRKLNKWHVSIQVRVPEVLPAADPQPTLGIDLGLVNFATLSNGEQVQPLKALACKQVRLRRYQKSVSRKVKGSANRKKAVKKLARAHQRVANCRSDWTHKLTTELANRHVVIAIEDLKVSNMSASAKGTAAAPGRNVKQKAGLNKAILDVSWAEFRRQLEYKLTARGGRLIAVDPAYTSQTCHECGHVDKANRTSQSTFTCVACGHTDHADVNAARNILARAKALADLEHAASVQTEKEGPDMARIACGEDISRARPARAKHAASMKQEPAERLACA

SEQ ID NO: 613 - protein, 1456 aa, Ostreococcus mediterraneus
ANIPASLARNHGKGVTATMAKKGRGSKPKKVDQRAAKKRGGYIADARRTVFGKIGTMLEYPTLTSCDKGVNISAHRRILNSVRPEIKEIKAKAVGLSRAARMGCHVQDVVDVATGAYGSQATNPEIFKAKVKMVSDLFERRNGKPSKPEYSRDWLEKELIAMAESSVVIVQRAFDDEAMEYIRKRKKRIKASMDEDEKWQGVAAGLKDAEQLMKESSMRLPKTCKREVFLCATGFAYDLQNLKRHVGKYVRAGAAKKRKLFSGIEVVHETARQRAQTMAKVATRMKMTALVLPFATQLATQCIDELSDGASDIDDSKRRFIWLDSKPEAFVTLVLKVIARCIAYAPQSSGHLSRADQTERNVQAIKVQLERAEVVASAVAHFARVLEECADEFHAYVKMAIAREHAVDDVDAFFGGYPGAHHNTIATIADRLVQNSKTALVSNAKYRFRDMARAIVASWQKPTEDAAIEMSGLLRHRRSRLALLGWLQYNFVYKTVTEDRPSESGFRVGMLPYRDVCEKMLEKRPLAKHSPRPAVRKALELFGVKKSLSALQNIFEAQVERYLHGFSSEDTWIVAIATWFKRIPCAKVVKMPFSALAAFTVWSKKYSAEGTVLLNATFELPSSLAAIDDANALRRYVIEESVSFIWNTNLKNKFAAAQLELASERHRRILKASIKTMWLRAIKGALLTASFATGIVEDENADTVASEVAENASTMVVFEWSAGGLEFTRSTSVQVCSSVIAFLQQCKGQAPARKEFVYLDLIKMLQSHTSALGAAVTEHINELGEATKRLLTHLPHVTAATSQARDSTREETKDDAWFERANQRAIKKKMLEVISNEVALLSRGVEPSDSAAPSDTPSDSASVDTGSIARAHIWVPPPIRAKCRAFCMASETPHEVYVDRTMVTTLFRRFARDWSSSSSSSSSSPPPPPPFDLDTGSSVVEPGNLIFNTLLNRRVMQRRRQDDQSSDLETPWEFSGSITLNRIRVSVSCTRQVFKLGAEAQKAADVENQLPPPIKDSRELILIGADPGVNTPLTSVTLYRRETQQGQSAIVASRKSRRNEAVQESQVNVEYVNRYVPNNFSAMGARLFRKRQRRILNARRKAEKSFEAQGFPSARAAIADVKARSTSMNVAFRATSRKTAKMFKCAKTFVADAYAYWARAGNVREPNDKPTILMLVGEQGVRVNRGWSQAPVSRSSRGGNAAMFMDMVTAMKHEKLHTRYVNEFATSRDCPCCCQALVPARSGRPSFASESKRRIITPNKRNGRICVNAKCEFALECDNRDVYASINMIKVYRAYCEENGEQSGFVGIMDSFLHECFGLQNMHMNKRPVDALGEEGEGDGEDEDDGEDVESDDEEDIAVDVLRTLSMKPQVDDPATAASYALAMLTGRPHPRHGSNSPGSSPDRDANLRRRFSSPTDPDSNSPTPGASTQSRPRAERNLSRAFANVADQSEPDSRP

SEQ ID NO: 614 - protein, 217 aa, Brettanomyces custersianus
FLHPDSNGNHIWYDESVEGMNSAMMASLKALKRRVFTSSDATRKAKRLKISMIRARNRIIERIQRKKVNNERWMCNYLLRNYGTIIIPQFVDPNESWISRLLNEPGFIQRLIYEAPHYNRPTTILVVSESNTTKTCSSCGSEYNPRDAEIYSCPNAKCCMTADRDQNGAANIMIRTMFLLEAYNKGIHIQSINGNYLRGRQHAREREDLTFVPYVFR

SEQ ID NO: 615 - protein, 491 aa, Phytophthora chlamydospora
VLSTDPKTSLCSRCRARKRNKKPLVKDCTSCKKLKEIVEEIRPTIPRKQNKKIAWRSTEILKLFAKYLTEVEKFNNDHAADPDVIPERAYTVLPSKRGFRCSYFEVSSTGLGDLLRRSRDRMDRDMLDMTVVTSEGGVISLEDSLRGDAWKPAIAALWWRKLFNVEELEFIDRQGTKRLRFYDRVATDGKSVSVIFEKSVTKPTASSKRYRLEDYDKVKGSDPGYTDMFVACTYDTHTEQISNDFISYPSSKFYSNSGYTSSNRYTQRKINRSSDVKTIMHHMPSSKTASLNKLRAYVQYTIPHLQKLLQFFMRSNYRGMRFRRYMLAERNLSRACRELAGPPGQRTLVVTGDLDISNKSGAIKKKTPGSVKRLLRKLSEYCDVMIVDEYKTSKIHHDCQSPENMENQQVQRRFRRDRKLHTVCVHKVLHCKKANGGCGATVNRDVNASLNILEVGLTQLREGGDARPERLRRSANDNQEAAQAAVRPRTD

SEQ ID NO: 616 - protein, 725 aa, Phytophthora chlamydospora
RKASSARCSGALSPGRLRTGSKPLLSKKLSRAHMPRAPRRRRAAAQRAEPEWRSRLGTAVSDAYRTLGRLLFIIIDQERDVIMLRKQLRIFRPRIALLALGRMSSRRRLQQLPPLEECTAKVRELLASERRMLRVSPVATISFWMQAVLSDLLVHVLVGDADADRPLAQKIGWQRTRSMDRLFGQPYLTALQEGMRPGALMPVVGRLPQSFPQFARRPSVPAQTDMAALRQLGPPARWVVDPTEHEARRQAFLHRQERAQEEHTLRSAIERSYSYEKEASLPAAALIIAQDREAIKAQLKPLQEADRLLLVRAQKHRLFPTESQARQLRSYMAAARWTYNQCVAFARRPTMAVNLSNLMVHCVTRSTALRRNFPEGMGAPPAWVFETPASVRNNVVQQFLAARKAAITNLHRGNIRHFTMHFKSVRTHRYFTIKEDQRRVHMDASSEAGRRLLSITGVTGISVRMPADTEIAGAVTIAYQHGYWYAVVPTVVEPAELSPQGGCTAGDPGVKCFLTTIDLEGNVVHYGRRPREQDERHPDKLARLSERISRAQAAMSNFQNIEGRRHTSREWRAYNLSKREFHRCWALLGYQVDELHHKVIAQLVQTADVILIPEFRSQSMLLPSAPRTHTFNRNLLSLKHYKFRQRLQAVCERTGKTLVVCSEMYTSMSCPNCTLLYENLGTQDVYACPHCAFTAGRDETAAFNILRFTSAGSLNVKKINGKEIQ

SEQ ID NO: 617 - protein, 291 aa, Phytophthora chlamydospora
FENLELSYPRYAEYITRMPSFKTASSMKLLAHYEHVWSSINIMLEFCALKGFRKWRFTVSRFKRKTVAALAKRVVPTLDPGVCVALGKWSSQTHLAGHMHVPLKRFAAELSRRATLIMVDEFRTSLLCSDRFQPMTGMPFKIAGTTNTKLSRNARRCRNEACQATCWVRDVNAAKNMWQLGQLQVAGQRRPRQFVQGVRPVVSQTQFMRGNGAPERETQTRAHSVRQNAIFVFFCPVRTYIFFEITPMNKLQCRVLIGGRWIKIGGFNYLFKSISYIQISLPHTLTPRSGG

SEQ ID NO: 618 - protein, 591 aa, Triparma laevis
IYIFRKYTMKRKKKETDTDPPGSIGKCKGISLQSKHVNFTASQMRRYVDGMQNVLSVCIGHLPDEGATLRSAMRSVATMVLMMSKRGASITIEYPRTPRKMISTVKSCVRDTSSLTTQLFRMWVRETTGVAVALRPFWNRRCEENSEKLWLPTETDSVGSHTNSSSLFSNSIPSNSWFSIKQHVHQKQNSHRISCPSSTFSHAGKWGDAVTKSSVMGMKKVRFVPTKDQQVLLKEWMGASRFMYNRTVHVIEKEKQKVNFFGIRDRLVPKKKLKERDAWLLQTPKNVRAASVKDVITAYKSAFTNMRQGHIKRFHMRFRSKKHETSEWLNIPKSSIAPTEDGKAVYMFKRRMKSPLTLKGDTLKSVDHDCKIHHNKETNRWYLLIPVKHSVAENQGTRKPIVSIDPGVKTFLTLYDPTGTVTKFAHDDMKAVIVPHYLKTDGLISAATKCKSKKTKRNLKLRIAIRREKVKNRVHDMHTRAAKHLVTNYDTVLIPDMGTSHMVKRMFGKTNRRTLLGWSHYQFIQRLTYYGQKHGCNVQVVTEEYTSKTCGACGTLHPTLGNGDMYCCKKCGTCIDRDTNGARNILLKNME

SEQ ID NO: 619 - protein, 231 aa, Phytophthora syringae
VPAPGRFQPLSSMERESEAKVSRVQERDWHKTASYEQYLKRLEYFWQHAAFLLRFSAERPYVKWRFFQKRMARVAVDTLARRIVPTVSRLTCVAYGDWSRRDGIKGHAPSPVKGLKEALRKRAVVVSMDEFRTSKLCSQCHQSLSSVQYPTPVFPENVKKPKRKKVKGKVLPRDWSQAEIKSRHCHAVLLCENTDCQARYWDRDVNAAINMLEILKSEVQGRGRMEPFRRS

SEQ ID NO: 620 - protein, 382 aa, Phytophthora syringae
NAESQALASFFNFRRAAQVMEPQEEPPPHRRHRPPWWDAEVQRLAEDAWLPVIDDFCARSGQAASSILRQLKGKALFGLRGCTDLRLHRRTPPRDDVAAAIGDDEDDINSTFRVERQQFVNRDPRSRHSSLRLQESPVLHDLPWVGIRNGQGNPYQGRLRAAHSICALTVYSWWQVFLCIPRHKTFVPSTNTRVCAIDPGVRDFISLYDPDGLAVAVHDRDNRIYLRCLAIDHLKSLLSQEHRKRKRYRLHRTIYFTFQKMKRMVHDMHHKVSKWLSVHYEQVLMPALPVAEMVRRHNRPDRRCRRNGSKTARQMLTWSHFKFRKMLSYKMTRPLMQFVSTTRVIWCTPRKHIWNYTNPRRISVMFGLPTSIVFSAFRDHSY

SEQ ID NO: 621 - protein, 233 aa, Phytophthora syringae
RNLGNRSWAHGLHHGYEPRGQVGAISDIRLRRASGYSRSNRKSKRRIDRSPHVRQLLQNTPTKKTASLTELGNAIEWTFEHLAELLTFFMDPFFRKFKFRRYTLRTAQLDRACFVIAGSTGTRTIVGFGDSGTAGEGMIKKSPAGPVKAFARKLARYCEVVVVAEFRTSRVHNDRHASADLTNQRVERVCRDGVRRKVPVHKVLHCLTKEGGCGKTVDRDVNAAKNILNVLQN

SEQ ID NO: 622 - protein, 784 aa, Phytophthora syringae
SNALVHTKSKYTSRWPGGIFMAPWNLHDYSFIRAMERKLKKFEYPGDWNVVEESEDSDDTRPPFETVSETQDIWDLSQEPFQLTVAEARGRREKKPKRNEPKKVTPKSKSIQTRTVQRTKSSGTILEKAFRKGKGYLSVVCRLFSICSDSLLVEEIKRTAGVMKQIQMETWHLVNLHTLRCLESGLSLPDYGNTFFDHCCAGVAPTSKTYLIAEKNPSLWTSIQIYRAGRQRAGLEEIPNMTGFSELKKDMRQTMVTNAGVMIREHFRKRLRVYVEIAFGGSETDKLPTKEKKARKERLRNILNACYNTDDTDLLEALQMRDVLTPDGVEWSEQWIPWPNHMEENDMDFYVRRIWEFQYVVEARMDEIPNEKGVRAFALFPVSSAFVKAHITINGSTLAGFYSRIPDYMWYLPTITTSCISFERNRWTVMRRAFDIGRFETRRPDCPLTKPKFALLSVKEKYQHARHLFANQVTTDGYSASILLIRPKTEDEKLHDNSGPAAVVPPGFVPNVMIGLDPGMRSVCTAVREVFRPEYQQGNRRRRRRRKRGHQRGKRKKKDRPRWITRPKPPRHRNDRDIVQVTTREYRHMAGFNRFRAWNEGQKRQHPEYKKIIAEMPSFKTASFDKYLDGWRTSGDMPRICSTSPVRDHFSSGNSSGGAWCAWRWTKSPGESSPSQSIDVRGLRRLEQAERHAPSPVKGLKQALRKRATVVSMDEFRTSSSARSSTKRFRRSSIALTPISRRGGSGRAWSCRGTEPRCSSRTRRATECCTAATPTATPASGIGT

SEQ ID NO: 623 - protein, 447 aa, Phytophthora syringae
GPNEKGVRAFALFPVSSAFVKAHITINGSTLAGFYSCIPDYMWDLPTITTSCISFERNRWTVMRLAFDIGRFETRRPDCPLTKPKFALLSVKEKYQHARHLFANQVTTDGYSASILLIRPKTEDEKLHDNSGPAAVVPPGFVPNVMIGLDPGMRSVCTAVREVFRPEYQQGNRRRRRRRKRGHQRGKRKKKDRPRWITRPKPPRHRNDRDIIQVTTREYRHMAGFNRFRAWNEGQKRQHPEYKKIIAEMPSFKTASFDKHLERLAYFWRHAAYLLDFSRSRPFLKWKFFRKRKARVAVDEIARRIVPQASRSTCVAFGDWSRRKGIKGHAPSPVKGLKQALRKRSTVVSMDEFRTSKLCSQCHQTLAQVKYRVDTKLPKRRKRKGVVLPRNRAEVQFEDKTCYGVLHCGYADCDASFWDRDVNAAINMLELLKSEVLGRGRMEQFRR

SEQ ID NO: 624 - protein, 323 aa, Phytophthora syringae
VHMNRPTRGKVQKKKEGQEGKTEKTQDKNISDALGFPLPKTSIGRTEYYDVIWGIDPGHTDFITATNHEGKSVRFRTSDFRRASGYSRSNRKSKRRIDRSPRVRQLLQNTPTKKTASLTELENAIEWTFEHLAELLTFFMDPFFRKLKFRRYSLRTAQLDQACFKITGSTGSRTIVGFGDSGTAGEDMIKKSPAGPVKAFARRLARDCEVVVVDEFRTRRVHNDCHASADITNQRVERVCRDGVRRKVPVHNVLHCLTKEGGCGKTVDRDVNAAKNILNVLQNQLAGIDKRPRWLRRAAKTKLPTNSQSIHRVAQFFWGRLLE

SEQ ID NO: 625 - protein, 294 aa, Phytophthora syringae
KRSMTRTRKTKQIRQERVYSILPTKQGVTSSYFSMTSTGLRHLLRRSRNDLNLDMTVGTSDVGLISLQDSLKNNANWTPAVADLWWRKLFHVRELERENVRTNLKFHHRIATDGKGVSVWLHKEKQKPTEPQTRRIEAYDHIKGVDPGYNEMVVACTYNTKEKKFSEDFYSYPSKLFYNNSGYTASNRRIHRKIHRNEKVKAVFSDMPTSKTTSRIKLQAYTENVTPKREMLFSFFMTRNFRNLRFRRQMLSERNLRFACQELAGPSGQRTLVAFGNMPMSNKNGVIKRRHPDP

SEQ ID NO: 626 - protein, 581 aa, Undaria pinnatifida
HNNTVSIMSPDRSFQRSTESPKLPRDDGESQDSCDQFRHQEGTIDTCLMTSSRSDTEQPPDEESHIAGSARQNKKMTCAGRSNPSKKHIPNTRSSRTSDQGSSSKEKAFCECLTPSSKDVSKKLLSRTGIDCVDSLSTFSNGSARGGTHESWFKTRSYFLPSKSSQKISWPSSMCFPASCTEAGGTRTKARKIRLKPQKEQEKVLRERINSARQNYNEALRLVKAKKAKPNLLMNKLVVTSRETDKNSRLESMKSTPADVRKSATRDLVKNFKSARAAYKARLQKVRSGRVRMKKMRKSGKFNGRRRYKKRKPFEVKFKARRLTPDSIEVEKKSISFESNMVSFFGTSKKHSLEVQMSEVFSEESGRHKPSQSYRIAYCFGRWYIIIPEQVQVDKATIDTSTEPRVIGIDPGLRTAFTCSSSSGEVLEVGIETRNRFEREQSKKNSITKKMKDAACSERKRKLRKAWYRCQARAKHLVADLHWKTIKHLLDRYDVIVVGKIGTQSLVSKTGQSASNKRMFSYLSHFSFRQRLKYKAGLVSKVVVEQDESYTSQACFRCGHLKKNLGPAKTYCCRAVESVDL

SEQ ID NO: 627 - protein, 317 aa, Undaria pinnatifida
GSRRCASRGSSTGDAGRKPFEVKFKARRLTSDSIELEKKSISLESNMVSFFGTSKKHSLEVQMSEVFSEESGRHKPSQSCRIAYCFGRWYIIIPEQVQVDKATIDTSTEPRVIGIDPGLRTAFTCSSSSGEVQEVGIETRNRFEREQSKKNSITKKMKDAACSKRKRKLRKAWYRCQARAKHLVADLHWKTIKHLLDRYDVIVVGKIGTQSLVSKTGQSASNKRMFSYLSHFSFRQRLKYKAGLVSKVVVEQDESYTSQACFRCGHLKKNLGPAKTYCCRECGLVMDRDANSGYNIMVRCASEHHATESIVLGKRKS

SEQ ID NO: 628 - protein, 581 aa, Undaria pinnatifida
HNNTVSIMSPDRSFQRSTESPKLPRDDGESQDSCDQFRHQEGTIDTCLMTSSRSDTEQPPDEESHIAGSARQNKKMTCAGRSNPSKKHIPNTRSSRTSDQGSTSKEKAFCECLTPFSKDVSKKLLSRTGIDCVDSLSTFSNGSARGGIHESWFKTRSFVLPSKSSQKISWPSSMCFPASCTEAGGTRTKARKIRLKPQKEQEKVLRERINSARQNYNEALRLVKAKKAKPNLLINKLVVTSRETDKNSRLESMKSTPADVRKSATRDLVKNFKSARAAYKARLQKVRSGRVRIKKMRKSGKFNGRRRYKKRKPFEVKFKARRLTPDSIEVEKKSISFESNMVSFFGTSKKHSLEVQMSEVFSEESGRHKPSQSCRIAYCFGRWYIIIPEQVQVDKATIDTSTEPRVIGIDPGLKTAFTCSSSSGEVLEVGIETRNRFEREQSKKNSITKKMKDAACSKRKRKLRKAWYRCQARAKHLVADLHWKTIKHLLDRYDVIVVRKIGTQSLVSKTGQSASNKRMFSYLSHFTFRQRLKYKAGLVSKVVVEQDESYTSQACFRCGHLKKNVGPAKTYCCRAVESVDL

SEQ ID NO: 629 - protein, 605 aa, Undaria pinnatifida
IMSPDRSFQRSTESPKLPRDDGESQDSCDQFRHQEGTIDTCLMTSSRSDTEQPPDEESHIAGSARQNKKMTCAGRSNPSKKHIPNTRSSRTSDQGSTSKEKAFCEWLTPFSKDVSKKLLSRTGIDCVDSLSTFSNGSARGGIHESWFKTRSYVLPSKSSQKISWPSSMCFPASCTEAGGTRTKARKIRLKPQKEQKKVLRKWMNSARQTYNEALRLVKAKKAKPNLPLNKLVVTSRETDKNSRLESMKSTPADVRKSATRDLVNNFKSARAAYKDRLQKVRSGRVRIEKMRKWGKFNGRRRYKKRKPFEVKFKARRLTSDSIEVEKKSISFESNMVSFFGTSKKHSREVQMSEVFSEESGRHKPSQSCRIAYCFGRWYIIIPEQVQVDKATIDTSTEPRVIGIDPGLRTAFTCSSGSGEVLEVGIETRNRFEREQSKKNSITKKMKDAACSKRKRKLRKAWYRCQARAKHLVADLHWKTIKNLLDRYDVIVVEKIGTQSLVSKAGQSASNKRMFSHLSHFCFRQRLKYKAGLVSKVVVEQDESYTSQACFRCGHLKKNLGPAKTYCCRECGLVIDRDVNAGYNIMVHCASEHHATESIVLGKRKS

SEQ ID NO: 630 - protein, 616 aa, Undaria pinnatifida
IMSPDRSFQRSTESPKLPRDDGESQDSCDQFRHQEGTIDTCLMTSSRSDTEQPPDEESHIAGSARQNKKMTCAGRSNPSDKHIPNTRSSRTSDQGSTSKEKAFCECLTPFSKDVSKKLLSRTGIDCVDSLSTFSNGSARGGIHESWFKTRSYVLPSKSSQKISWPSSMCFPASCTEAGGTTTKARKIRLKPQKEQEKVLRKWTNSARQTYNEALRLVKAKKAKPNLLMNKLVVTSRETDKNSRLESMKSTPADVRKSATRDLVKNFKSARAAYKARLQKVRSGRVRIKKMRKSGKFNGRRRYKKRKPFEVKFKARRLTPDSIEVEKKSISFESNMVSFFGTSKKHSLEVQMSEVFSEESGRHKPSQSCRIAYCFGRWYIIIPEQVQVDKATIDTFTEPRVIGIDPGLRTAFTCSSSSGEVLEVGIETRNRFEREQSKNSITKKMKDAACSKRKGKLRKAWYRCQARAKHLVADLHWKTIKHLLDRYDVIVVGKIGTQSLVSKTGQSASNKRMFSYLSHFSFRQRLKYKAGLVSKVVVEQDESYTSQACFRCGHLKKNLGPAKTYCCRECGLVIDRDVNADTTSWCAVHPSTMQRKASFSASASLRCANTQGLVYAL

SEQ ID NO: 631 - protein, 327 aa, Undaria pinnatifida
NRHRLMCGMATRDLVKNFKSARAAYKARLQKVRSGRVRMKKMRKSGKFNGRRRYKKRKPFEVKFKARRLTPDSIEVEKKSIFFESNMVSFFGTSKKHSLEVQMSEVFSEESGRHKPSQSYRIAYCFGRWYIIIPEQVQVDKATIDTSTEPRVIGIDPGLRTAFTCSSSSGEVLEVGIETRNRFEREQSKKNSITKKMKDAACSKRKRKLRKAWYRCHARAKHLVADLHWKTIKHLLDRYDVIVVRKIGTQSLVSKTGQSASNKRMFSYLSHFSFRQRLKYKAGLVSKVVVEQDESYTSQACFRCGHLKKNLGPAKTYCCRAVESVDL

SEQ ID NO: 632 - protein, 496 aa, Undaria pinnatifida
RQSTTQEIRYGLFGTSRALYSPPTSPGLLLSAKKSTTSILKWRIRFSIKTFLNTQGNNIKISSEEISNLAPPGNQQLTRSTKIKLKPSKIWLRTLNRWFGTSRWTYNRCLSLFKEGKCKISRKDFRSKVIGSHNHGVPKKRSGKARKKRGKNRGNWSNKATQTKTPSKTSWVLETTMEIRDGAMDDLVKAFESNMAKKKINPDHHFDLSFRSKKDVQTIKVPGRCMKGGKFFKSFVGSSATLRSHEDFKDFQGEIKIQKDRTGDLYMIVLKKVTSVERQVNSNDLKVAALDPGVRTFNTSIDSDGGVLEFSPGDISRIHRLCHYNDVLQSKAFDKNTYRSRSRYRMRKAWHRSIKRIKDLVSDVHRKSVNLLCCKCDVIFLPKFETSTMCNRAGRRISKKTARAMMTWSHFRFKELLESKALERDGSIVVDVTEAYTSKTCSCCGIINTKLGSSKVFKCRNCSTTMDRDVNGARNILFKSCCSNKMDISFPVVVHQ

SEQ ID NO: 633 - protein, 672 aa, Thraustochytrium aureum
HRFFLTNYQRQNCEASRKNCQAGNLGSACRDSGRPLTPMGKRKAKREGESLPLDQRTRDSTVAVPASQKKCKVPGLMDLIREVVPEANAAAYYAVLLANMFVTMLLVNAIPVPALDRPFFELCIRRVSSSCTEPTKQRCRDTGIEHAYRYIWGDREKLVKTIYHGNIVGNAATEMATAAELYNTRALYHHMVQYVRSKYNVSKGHAKFICGQIRKKEDQDPLDYESIPDKLDIQESDLHDIILSERDIYLEAVANERIVEYRFMLMTEIQALSTPEKRLKSFTIIPERHPGNQFMTLDQETLSRLWKRRQPSRSDAEAWTRWNDVLETYKSIGDWFKLPKRGSSWDNGASLKTNGFEFHFTFDKNKTRHPVTKRAKKPKSAMTIEEDDWNPERVFTNKAGVDIRDPTNFVAADVGNYNILTCVSPTRETHPTGSPKMDVRNYRKIRYNHESKRTKVNDKVRLLQKDVGIRAYQNVLSQHSMKTTNLESLKDAVLARCKVYHVLYAHYSNRQFLKLKMEARMAERRAIDKMLNWVTYGKTKPLGIGDCSRTTGIKGTSPGGPTKKIKRHAIKSGYELVLVNESYTSKRSACCQGHDLVPAQRRDADGRLEDIHGLRICSKCGNTWDRDVSAAINIFDVFYNSVVLGGPRPPHLLKKCDTGLLGRTWHSHLIRG

SEQ ID NO: 634 - protein, 530 aa, Parietichytrium sp. I65-24A
NFLQTPNSRGWKRSSGPGSWFTKGVKLSRERVNAQMATKTLPKILSQSPRSLWQVIMDVEQRKKEEEERREKEEQLERKRRKESNDKSDDDVIDEKEGEGDDLTPVDDDAIQPPKECTRKVRVFPDEQLRRTIDSWLHNCRFVYNKLVEKYPDVKQSVTISTLRDYVVNTLRVKYPFIEEVPKDLLDNTVVRSFVKARKAEKAKRARLKFKTKKDKQQSFSIRSTDWVRKSGVFAPFRHIAPAINEVIPQNVQHEVKVIRTRLGEYYMCFTGTIERGAWNRKVCGKMNAETDEVRLRDNQAPRESLHSVISLDPGVRTMMTGYSVDEGMCIEFGKNDYSRIFRLCKHVDKLRSSIQQLKNKNKVEKEAGVKMRQRRHFSRRIKSRTTALYRAIRRIRNIIDEFHKKVACALCNTYRVILIPNFQTSQMVKDKLRRKIGSKTARMMCNWAHYRFRQRLISRANLNDWSNVIVCDEVYTSKTCGMCGSIDHRLEGSETFDCKECDNVSGRDANGARNILLRYLTLNREFLDV

SEQ ID NO: 635 - protein, 637 aa, Parietichytrium sp. I65-24A
MSETSGGESRCSSMENMHQEDSDLSCKQSVDSEIAAVLEQLLHQVATDGTAQSPLRNTSKREREEIVTNNELPVKKKRKLPRQESVRLIKKTTSSDRKSPYEETFQSIESYQTSPQESILKGRGFRPFWNLQCKEISKKLWLPTKTDLQDSASISLSGSSVGTAGGFELSLNLKKEEDKASLLQKLNSQKISSQSQRCLTVKCKGEDDTLNESTVRALRMMKVKIYPTKTQRKWLVETQHKLRALRNAAIDEVNSGRIKVSEIRQQMLKSENGDKTINSVAQRLPDDPEQRQKHEAKWKSIDSAPYTLRKNCLRKLEEQYEECFKRVKTGVIKRFKMRFSTKKDKLGRVNIHVEGRTFPKTAYDADYIFLYPRTQIGQDKDGKPIYFKRLKYKMQGSKKRRKPLPDPRLHDCQIVYEHPNRWYMLIPYDVEIEKTQAPFDDITMDPGECTFQTFYSNDAKMTGGIDLQNRRNEIGKLLIKIRLAQSLRDKAKCRGQAQYWSNRFLMLWRKLKDKKLDLHRKTTAFLVSNFNNIRVGDFGSKFVMQSKKMNNDVKSQFSFLSHYEFRQRLLSYSAVRNITVVAESYTSKTCCNCGKIHKNLKAQRVFNCPSCKSEFGRDDNGAVCIYIKDLSGQGTEV

SEQ ID NO: 636 - protein, 279 aa, Parietichytrium sp. I65-24A
SLVVPGGPSGTRTGFPYMAHTSRGKVESDALAEGTVALDPGLCTFQTCYDDSGIVTEWGHNDKVNVLRQLRYADALKARVDCASKLMDAADDRKERAWLRMKRMRLRAACRKMAWRLKNKVTEFHRMLCAFLVRKYKVIILPEFQASKISKRASRNISNRDVRTMLTWRHYGFRQMLINKAKATPGCTLIITDEAYTSMTCGGCGFLHRDLGRSREFHCPSCKTFSIPRDVNGARNIMLRFMQRLGVTPSGEILSSSASGASARLGRSSDKDEMHYTRC

SEQ ID NO: 637 - protein, 375 aa, Daphnia sinensis
KYYFCTMKLMKTYKFKLNPSKAQKETFESWVNTSRFLYNLALNERIMVYEMRKKSVSKYDQYNQLPELKKLYPWIGEVYSDTIQEVLDRLDKTYQNFFRGAGFPKFSKKGEYNSFTFKRSFKVNEKTIKLPKIGEVKYFNSRDIVGKQKTATIIKEDNNWFICITAEYETPFETIEVDNQNPIAFDMGGVRFLALSNNTFIDSPEFMKPFENELRILQRKLARQKKGSKSREETKQKIRKIYKKISNQRLDFLHKVSTNLSNKYSALYMEDLKLQKMQQNGFSNVNKMMSDKSFGNFKLLLSYKFKERGKHLGLVNPAYTSQTCNSCGTVDKKSRMSQSEFVCTSCGTVDNSDVNASKNILREGISKGTKRKALV

SEQ ID NO: 638 - protein, 210 aa, Cyclotella cryptica
FYGTQGNFGVSRKEMTKQKYTVNCARSIVKKKKFFSKKMNALVKKAIDFDGCGSYPLVFYGGAQIRSSMKGIRGGGVPTATMQKLFEDHFDCKVSDEFYTSQICCDYKACLARCANKDRHKVSGFRKEIRGVRYCKNCPPRNRFKSRDGNAARNILAKGQYFLEHGENDPNYEKHNGRMVDKWIKYFPTDLICPMMQMKTREGPCRHHPH

SEQ ID NO: 639 - protein, 240 aa, Cyclotella cryptica
MLVVLQSTLQGYTNFLKHKHFNLVNEPITQVVNSVQLYGTQGNFGVFQKEMTKQKYIVNRARSTIKKNNFFSKKMNALVKNVVNYTRGGSYPLGFYGGAQICSTMKGIRGGGVPRVAMQKLFKDHFDCKMVDEFHTSQICCDCKACLERCVNKEIQGVRYCKNCTPRSLFMSRDGNAARNIMAKGQYFLQHGENDSNYAKQNGRMADDKMVKHYPMDPNRPKLQMKTQEGPRCIIIIESE

SEQ ID NO: 640 - protein, 743 aa, Paralithodes platypus
GYNGHIRPLDSAMKRDGTTTVNKKYKNVKCSLNKILLDPDGSGPLIEKRCLAVSRMAVKASQLCNSVIRDLLAKEDGVSPVATEWTDFTKLNTFVQLFTQGCEAKKRRKPNPAISDTWERWFISTSYQTQPRYHSDYNLINYCAKTYQTCFNNNLALNFVSRQRHAIRFYLKNDQTGEKTTPTAPLVYALQTLVNGWKYVARTYSANQLAELKDWHSAFIDRHVTYLGKPALSGGPVAYLRYYGFLKREYSESTKLRNVPLAPTNAVKAHYVDFDAVGEKGLCRELGIPSGELKETEGWGFIFDLKRRRRMGGNENWTFDRCVSTDGMACSIRYYRYKKNDPGTGTGHKRKKKNDGTVAFPMGMTEVINNNTTTVVSLKGKRIIGVDPGRKNIAFCVELDPETRKITKKTRLTSKQYYCDSGMTEAKRRISSWLAHPEYKKAQEELSRADSEGEGKGSAYLNKYIEHYKTLWQTKTAKKWRRVKFRKYCLGQKTLDAFVNKTLFGGGGGENSSPFHVAYGSAKFSSTGKGEHYSSPKGKLAKLMRERAGTRNFTAVDEWNTSKVCHRCKGPLSPVGFVQVQTEDKGETEEEPKVTDKFIYLRGLRRCSAAPSNNFNEVDTQRRKRQTRIGGSVSSQQSSKKCPIGGAFLDRDSNAAANIAQKLFLDSSKLSSLSTLQRGVKVEKKRVFWLNKVHCKKKKYHTVHTRDGGVSSTALNKKGSYITPKRPNNTDPYHIWIGESFAR

SEQ ID NO: 641 - protein, 315 aa, Paralithodes platypus
QYYCDSGITEAKRRISSWMAHPEYKKAHEDLSRSDSEDVGEGKRSAYLKKYFHPYKTLWQTKTAKKWRRVKFRKYCLGQKTLDAFVNKTLFGGNNRSPFHVAYGSAKFSSTGKGEHYSSPNGKLAKLIRERAGTGNFTAVDEWNTSKVCHRCKGPLSPVGFVKVENDDNEGEMEAEPKVTERLIYLRGLRRCSAQSDNFNDVDTQRRKRQRRIGGNNNDNPVSSQQSKCPIGGAFLDRDSNAAANIAQKLFLDSSKLSSSTLQRGVKMETKRVFWLDKVYCKKSYHTMHTRDGGVSSTALNKKRVVYNPEAAKQY

SEQ ID NO: 642 - protein, 330 aa, Paralithodes platypus
EEWEGTRSGRSTFDRCVSTDGVACSIRYYRYKKNDPGTGTAHKRTKKNDGTVAFPRSTAEVINNNSSTTVVSLEGKRIIGVDPGRKNIAFCVEMGPETRNITKKTRLTSKQYYCDSGMTEAKRRISSWMAHPEYKKAQEELSRADSKNEGEEGKGSPYLKKYIEHYKTLWQTKTAKKWRRVKFRKYCLGQKTLDAFVNKTLFGGGGGENRSPFHVAYGSAKFSSTGKGEHYSSPNGKLAKLMRERAGAGNFTAVDEWNTSKVCHRCKGPLSPVGFVQVQNEDKGETEEEPKVTDKLIYLRGLRRCSAPSNNFNEVDTQRRKRQTRIGGSV

SEQ ID NO: 643 - protein, 529 aa, Paralithodes platypus
RKLPDPTPVSFGLQSLQLLRQDLPDVFQQQPRAKLRIPSEARYTFLPQKRPRGEKTTPTAPFVYALQTLVNGWKYVGRTYSANQLAELKDRHSAFVNRHAMYLGKPALSGPVAYLRYYGFLKREYSESTKLRNVPLAPTNEVKAHYVDFDAVGVKGLCRELDIPSGELKETEGWGFIFDLKRIRRMGGNEKWTFDRCVSTDGVACSIRYYRYQQNDPGTGTAHKRKKKNDGTVSFPKGTAEVINNTTVISLEGKRIIGVDPGRKNIAFCVELDPETRKITKKTRLTSKQYYCDSGMTEAKRRISSWMAHPEYKKTQEELSRADSEDEGEGEEGKGSAYIKKYIEHYKTLWHTKTAKKWRRVKFRKYCLGQKTLDAFVNNTLFGGSENRSPFHVAYGSAKFLSTGKGEHYSSPNGKLAKLIRERAVAGNFTAVDEWNTSKLCHRCKGPLSPVGFVQVQNEDKGETEEEPKVTDKLIYLRGLRRCSAQNNYFNEVDTQRRKRQTRIGDSANPVSSQQSKCPIGGSLSRQRQ

SEQ ID NO: 644 - protein, 396 aa, Paralithodes platypus
EEWEGMRSGRSIGACRPTVWPVLSDTTGIKKKKTGTGTAHKRKKKNDGTIAFPKGTAEVINNNTTIVSLEGKRIIGVDPGRKNIAFCVELDPETRKITKKTRLTSKQYYCDSVMTEAKRRISSWMAHPEYKKAQEELSRANSEDEGEGKGSAYLNKYIEHYKTLWQTKTAKKWRRVKFQKYCLGQKTLDAFVNKTLFGGGENHSPFHVAYGSAKFSSTGKGEHYSSPNGKLAKLMRERAGAENFTAVDEWNTSKVCHRCKGPLSPVGFMQVQNEDKGETEDEPKVTDKLIYLRGLRRCSAPSNNFNEVDTQRRKRQTRIGGSANPVSSHQQSKCPIGGAFLDRDSNAATNIAQKLCLDSSTLSLSTLQRGVKVEKKRIFWLKKVYCKKNIPHRAHT

SEQ ID NO: 645 - protein, 562 aa, Paralithodes platypus
CLAVSRMAVKASQLCNSVIRDLLAKEERTSGVSPVATEWPDFTKMNTFVQLFTQGCEAKKRRKPNPAISDTRERRFVSASYLTQPRYHSDYNLINYCAKTYQTCFNNNLALNFISRQRHAIRFYLKNVRGEKTTPTAPLVYALQTLVNGWKYVGRTYSANQLAELKDRHSVFIDRHATYLGKPALSGQVAYLRYYGFLKWEYSESTKLRNVPLAPTNAVKAHYVDFDAVGVKGLCRELGIPSGELKETEGWGFIFDLKRIRRMGGNEKWTFDRCVSTDGVACSIRYYRYKKKDPGTGTAHKRKKKNDGTVAFPKGTAEVINNNTTVVSLVGKRIIGVDPGRKNIAFCVELDPETRKITKKTRLTSKQYYCDSGMTEAKSRISSWMAHPEYKKAQEELSRADSEDEGEGEEGKGSAYLNKYIEHYKTLWQTKTAKKWRRVKFRKYCLGQKTLDAFVNKTLFSGGGENCSPFHVAYGSAKFSSTGKGEHYSSPNGKLAKLMRERAGAENFTAVDEWNTSKVCHRCKGPLSLVGFVQVQNEDKGETEEEPKVTDKLIYLRGLRRC

SEQ ID NO: 646 - protein, 282 aa, Paralithodes platypus
RRKRSAYLKKYIEHYNTLWQTKTAKKWRRVKFRKYCLGQKTLDAFVKKTLFGGGGENRSPFHVAYGSAKFSSTGKGEHYSSPNGKLAKLMRERAGAENFTAVDEWNTSKVCHRCKGPLSPVGFVQVQNEDKGETEEEPKVTDKLIYLRGLRRCSAPSNNFNEVDTQRRKRQTRIGGSPNPVSSQQQSKCPIGGAFLDRDSNAATNIAQKLCLDSSTLSLSTLQREVKVEKKRVFWLNKVYCKKNHTVHTRDGGVSSTALNKKRVVYNPKAAKQYLLTLTTFG

SEQ ID NO: 647 - protein, 284 aa, Paralithodes platypus
EKWEGTRSGRSIGACRPTPWPVRSDTTGIKKNDPGTGTAHKRKKKNDGTVAFPKGTAEVINNNTTVVSLEGKRIIGVDPGRKNIAFCVELDPETRKITKKTRLTSKQYYCDSGMTEAKRRISSWMAHPEYKKAQEELSRADSEDEGEGEEGKGSAYLNKYIEHYKTLWQTKTAKRWRRVKFRKYCLGQKTLDAFVNKTLFGGGGENRSPFHVAYGSAKFSSTGKGEHYSSPNGKLAKLMRDRAGAENVTAVDEWNTSKVCHRCKGPLCPVGFVQVQNEDNGKME

SEQ ID NO: 648 - protein, 600 aa, Paralithodes platypus
DTWERRFVSASYPTQPRYHSDYNLINYCAKTYQTCFNNNLALNFVSHQRHAIRFYLKNDQMGEKTTPTAPLVYALQTLVNGWKYVGRTYSANQLAELKDRHSAFIEQHATYLGKPALSGPVAYLRYYGFLKREYFESTKLRNVPLALTNAVKAHYVDFDAVGVKGLCRELGIPSGELKETEEEWGFIFDLKRIRRMGGNEKWTFDRCVSTDGVACSIRYYRYKKNDPGTGSAHKRKKKNDGTVAFPRGTAEVINNNSNTTVVSLEGKRIISVDPGRKNIAFCVELDPETRKITKKTSLTSKQYYCDSRMTEAKRRISSWMAHPEYKKAQEELSRADSEDEGEGGKGSTYLNKYIEHYKTLWQTKTAKKWRRVKFRKYCLSQKTLDAFVNKTLFGGGGGDGENSSPFHVAYGSAKFSSTGKGEHYSSPNGKLAKLMRERAGAGNFTAVDEGNTSKVCHRCKGPLSPVGFVQVQNEDKGETEEEPKVTDKLIYLRGLRRCSAPSNNFNEVDTQRRKRQTRIGGSVSSQQQSSKCPIGGAFLDRDSNAAANIAQKLFLDSSTLSSLSTLQRGVKVEKKRVFWLNKVYCKKKSYHTVHTHVTEV

SEQ ID NO: 649 - protein, 276 aa, Paralithodes platypus
KKPKKGGGFIFDLKRIRRMGGNEKWTFDRCVSTDGVACSIRYYRYKKNDPGTGTGHKRKKKNDGTVAFPRGMTEVINNNTTTVEGKRIIGVDVDPGRKNIAFCVELDPETRKITKKTRLTSKQYYCDSGMTEAKRRISSWMAHPEYKKAKEELSRADSEDEGEGKGSAYLNKYIEHYKTLWQTKTAKKWRRVKFRKYCLGQKTLDAFVNKTLFGGGGENRSPFHVAYGSAKFSSTGKGEHYSSPNGKLAKLMRERAGTGNFHRRGRVEHLQSVSSL

SEQ ID NO: 650 - protein, 362 aa, Paralithodes platypus
TTPTAPLVYALQTLVNGWKYVGRTYSVNQLAELKDRHSAFIDRHATYLGKPALSGGPVSYLRYYGFLKREYSESTKLRNVPLAPTNAVKAHYVDFDAVGVKGLCRELGIPSRELKETKEGWGFIFDLKRIRRMGGNEKWTFDRCVSTDGVACSIRYYRYKKNDPGTGTGHKRKKKNDGTVAFPRGMTEVINNNTTTVEGKRIIGVDPGRKNIAFCIELDPETRKITKKTRLTSKQYYCDSGMTEAKRRISSWMAHPEYKKAQEELSRANSEDEGEGKGSAYLNKYIEHYKTLWQTKTTKKWRRVKFRKYCLGQKTLDAFVNKTLFGGGGENRSPFHVAYGSAKFSSTGKGGTTRPPMGSWPN

SEQ ID NO: 651 - protein, 605 aa, Paralithodes platypus
GCEAKKRRKPNPAISDTWERRFISASYPTQPRYHSDYNLINYCAKTYQTCFNNNLALNFVSRQRHVIHFYLKNDQTGEKTTPTAPLVYALQTLVNGWKYVGRTYSANQLAELKDRHSAFIDRHATYLGKPTLSGGPVTYLRYYGFLKREYSESTKLRNVSLAPTNAVKAHYVDFDAVGVKGLCRELGIPSRELKETKEGWGFIFDLKRIRRMGGNEKWTFDRCVSTDGVACSIRYYRYKKNDPGTGTGHKRKKKNYGTVVFPRGMTEVINNNTTTVEGKRIIGVDPGRKNIAFCVELDPETRKITKKTRLTSKQYYCDSGMTEAKRRISSWMAHPEYKKAQEELSRADSEDEGEGKGSAYLNKYIEHYKTLWQTKTAKKWRRVKFRKYCLGQKTLDAFVNKTLFGGGGGENCSPFHVAYGSAKFSSTGKGEHYSSPNGKLAKLMRERAGTGNFNAVDEWNTSKVCHRCKGPLSPVGFVQVQNEDKGETEEEPKVTDKFIYLRGLRHCSAAPSNKFNEVETQRRKRQTRIGGSQQSSKKCPIGGAFLDRDSNAAANIAQKLFLDSSKSSTLQRGVKVEKKRVLFSVQGCRKVICPLKGCLNDVLQK

SEQ ID NO: 652 - protein, 513 aa, Paralithodes platypus
RTLPDRTPVSLGLQSRQLLRQDLPDVFQQQPRAKLRVPSETRHTFLPQKRSREDDTHRSARVRPANSRERLEVRRKDLLREPMGGTERSALSVCRPARNISMEAAVNYLRYYGFLKRKYSESTKLRNVPLAPTNEVKAHYVDFDAVGVKGLCRELGIPSGELKETEGWGFIFDLKRIRRMGGNEKWTFDRCVSTDGVACSIRYYKYKKNDPGNGTASAVTRPHLHKRKKKNDGTVAFPKGTAEVAVVSLEGKRIIGVDPGRKNIAFCVELDPETRKITKKTRLTSKQYYCDSGINEAKRQISSWMAHPEYKKVQEELSRADSEKEEDEGGGVGKRSGYLKKYVQHYKTLWQSKTAKKWRRVKFRTYYLGQKTLDAFVNKTLFGGDNRYPFHVAYGSAKFSSTGKGEHYSSPNGKLAKLMRERAGGENFTAVDEWNTSKVCHHCKGPLSPVGFVKVENEDKGETEEPKVTERLIYLRGLRHCSAQSDNFNDVDTQRRKRQRRIGGSAINLESTQ

SEQ ID NO: 653 - protein, 499 aa, Paralithodes platypus
CLAVSRMAVKASQLCNSVIRDLLAKEERTSGVSPVATEWPDFTKMNTFVQLFTQGCEAKKRRKPNPAISDTWERRFVSASYPTHPRYHSDYNLINYCAKTYQTCFNNNLALNFVSRQRQAIRFYLKNDHREKTTPTAPLVYALQAQVNGWKYVGRTYSANQLTELKDWHSAFIDRHATYLGKPALSGPVAYLRYYGFLNREYSESTKLRNVPLAPTNAVKAHYVDFDAVGVKGLCRELGIPSGELKETEGWGFIFDLKRIRRMGGNEKWTFDRCVSTDGVACSIRYYRYKKNDPGIGTAHKRKKKNDGTVAFPRGTAEVISNNTTVVSLEGKRIIGVDPGQKNIAFCVELDPETRKITKKTRLTSKQYYCDSGMTEAKRLISSRMAHPEYKKAQEELSRADSEDEGEGEEGKGSAYLNKYIEHYKTLWQTKTAKKWRRVKFRKYCLGQKTLTRSSTKLCSAAAAAAKIAPRFTSRTGRPSFLPRVRGSTTRPPTGSWPN

SEQ ID NO: 654 - protein, 722 aa, Thraustochytrium sp.
LTKRDDVDWLPRRARWLPVGEWPPARAWWPPARAWWPPARAWWLELYLASADPQRSGLECMASSMSTRTLSSPPEPPPSFSVCTQPQSVGTRIRATLAPQGLPQATADCAFATSCSATASQAGSVKRKRCPSDASATRASPAKRKKTTCSAKSRGSESTSRATTSSATSRRASTSSARALVPFWNAQCEAISPRLWLPNPDDCVAPSTSSTGLLLPTVAQFGLSIQTAKSMQADPRKSSLKTSSPSSPGDLRVMKVRVMPTKRQRMILAKIHNALRALWNLAVEHIKAKKVRPTYPALKAYFLGSRRIALDRSDPAQRALDDELESIPYAPRGDTLRRLDSAYKSGMSNYRNGNLRHFELHFQSRKKKRGFVEIPIQKPRKKADEKTAEKSGEEEVVVESEAGRSKAMANAKTRKKTKRKKTKRKSKRCPDGHFGLWPRLKWHLKDADGERNVRFGPLRFKRQGSKRRGRKVPPFVKDRKLIYEEPGRWYMVVPYTKTRRETQPAFRDVTLDPGGRTFQTFYSNDAKMTGTINPMLRTIRSRSNGTVKQYSIGGLLNKIDSTRSAAAMTLATRPELDSETRRKILAKSKYAEQMLWAKIKNKVKDTHDKTLRFLVDNFREVRVGAIDIKSVMRSRHINKKSKRALAMLSHCRFRDRLIKDHGQARTTLAVPEEYTSKTCTKCGEIKTDLGSAEIYNCTRCGLQLGRDVNGARNIYLKSIANG

SEQ ID NO: 655 - protein, 479 aa, Thraustochytrium sp.
ADPRKSSSKTSSPSSPSLAAACTVPEAAAPSDLRVMKVRVLPTKRQRMILAKIHHALRALWNLAVEHVNANKVKPTYPALKKFFAGPSRAALDRSDPAQRALDDELESIPYHLRGDTLRRLASAHKSGMSNLKNRNIHRFQLHFQSRKKKRGFIEIPMQKCHFSKKMRCTDDHFNLWPQRKFPIKDADGEREVGFGPLRYKRQGSKRRRRKLPALKKDCKLIYEEPGRWYMIVPYMKPRRANRPAFKDVTLDPGGRTFQTFYSDDAKLAGAINPLLRTVGSRAKGTAKQYSIGGLLNKIDTTRSAAAMGLATHADPATRRRVTSFKHKEQMLWAKIKNKVKDTHDKTLRFLVDNFQNRVGAIDIKSVLKSRHINKKSKRALAMLSHCRFRDRLIKDHGQSRTTLAVPEEYTSKTCTWCGNIKDDLGSAEIYNCTRCGLQLGRDINGARNIYISPSSMVNVGEWTVLFGQFIASYGITSD

SEQ ID NO: 656 - protein, 412 aa, Thraustochytrium sp.
PSPKPSSSRTTSRPRTTSCPSPCCGPKPSRRSGVAREMCPGNIRHFELHFQSRKKKRGFVEIPIQKPYAKKKADEKTAEKSGEEEVVVESEAGRSKAMANAKTRKKTKRKKTKRKSKRCPDGHFGLWSRLKWHLKDADGERNVRFGPLRFKRQGSKRRGRKVPPFVKDRKLIYEEPGRWYMVVPYTKTRRETQPAFRDVTLDPGGRTFQTFYSNDAKMTGTINPMLRTIRSRSNGTVKQYSIGGLLNKIDSTRSAAAMTLATRPELDSETRRKILAKSKYAEQMLWAKIKNKVKDTHDKTLRFLVDNFREVRVGAIDIKSVVRSRNINKKSKRALAMLSHCRFRDRLIKDHGQARTTLAVPEEYTSKTCTKCGEIKTDLGSAEIYNCTRCGLQLGRDVNGARNIYLKSITNG

SEQ ID NO: 657 - protein, 200 aa, Hypothenemus hampei
MNIKIKVHKDRKCFPFSTNGVDASLLMKKFSGRQQDDGEKENQQMYGWKTVTRLKFNSWKWHRKATNDLGNELLFPPGRMERNKKVLVCFEDDILEPGISYGRNLKPAVVELKKAFHKRGDKCDVRDVNEFRTSRRCSRCYKELRMPPRLADLLSNEERRRRCHGHHSVVSVYQNCPTMYNRNTNAARNIVLVATGLMKL

SEQ ID NO: 658 - protein, 389 aa, Hypothenemus hampei
NCIVVHFFFRIVRYYSAKYPQSKRKWEWRVVVVFEKLFSSKHSTARTLQVSEFLEDFGFPQNTKFVNLEKNWWSLITFSYRLAQQFPSHELKSFSLFPIFQPGRKHIRYNCLALYQLLHACDLELNVTQEQCSESSPLFWWRYFNLNRTRYGELDELNIKIRVHKDRRCFALSFSTNGIDASLLMNKFSGHQQEDEEEISPLPRRGRLRKGSLPSISSSSSENFDYYLGLDPGVVNYVGACLRHEPSGKEIKSIVKSEHFKQSLCRERLRTKRRKRKTRGFENMLLRDRVEIEIEVNVKLHARVSHNYRDNLEYIQCRLVHLEASQEMCGRKTICRLKFDSWKCHRKATDDLVNKLLFPPERVERDKKVLVCFGDGTLEPGISNSILWT

SEQ ID NO: 659 - protein, 231 aa, Chlamydomonas sp.
YVGKQKTIEKVCDLIAPKAQKKTIEEKVCDVIAPKAKKTVVGFGNWSNQGYGISRSCSGPVKEIRKCLSRRQNVLFKNVDELNTSCTCHGCFQKLVNMKADSVVWRRVQNEPSALIDGAPTTTTTTTFEKQKTVVKNVKVHKVLHCRNSVKSASSNVRCGATWNRDVNAAKNLLLLLTTWMDGKERPAAFCVPSSSPTPKTPVSGEANVGAQPTDPPGSVSSLQLLSSGPS

SEQ ID NO: 660 - protein, 801 aa, Chlamydomonas sp.
PRMEHVCDVCIKSSVMYKLCKMATKPPTVAKLKELLKLAEVAYSSKDKKDDIVRLCEDNGLIARPPPEYKTVEKMCVVKCALKKAMSLDDEEFGKFREHVDQLVNVVSRMLRRSSLVLTFHVTRLMEGDLPIPNMYDMKDTYWKDWLRIGVDGVFPDEESRISYESVKDVIGKVLGSDDPDYINSYPIYFDQVLNYAGHTLSTVVSNNAWVPLVPRLTRLTKATLNALEAPKTIRVYDVMRVIQQEIQEMESWPESVQEYVREVRVRLKVPDGSRLYDDYGKDMDFPTMVRFNYWMQTRLEAIGARRIRLMPIFNVQRAHVRLDMKTLVNLFRHVFPKDPNIVELSKWKDVKDPDRFMLPLKPAFKKKKSCGPGEWEAYKLAQQKYDADVNDIKDTDEYRHAKGRYDTLVNARKTVAGSFFKKPPVKTGWVFDCSICTDGVSLSMQYSKTVQVHVSDLKKKSKRSCDDEGMSVSEQYDHKLKTTLPDMGIVVLGVDPGRSNIATVTYLADDKSKTWKLTRGAFYHKSGIKKQKKQQEKRFSDMIPRWESLRENGAALSTSRTDDISAYLKNYDTFSDEWWRMALLRRESRDNFQRYIGKRKAMDSFWAGIKRNMKLDHPDLRVRVAYGSAITTLKATGPGEVAVPTGSMFASCKRLFKEDVHVTDEFKTTLMSWETGAKKECVYKIPSVQITTEGQIRLGYELLGHTPLKETPKVSYRDQLAVRVYCTRKQIQEKHRRGGLAPSLVDNNSIKRYPEVRGLRFSPETSTYSDRDRSSALTIARLHCMELLGQGRPLPFCRDA

SEQ ID NO: 661 - protein, 813 aa, Chlamydomonas sp.
PRMEHVCDVCIKSSVMYKLCKMATKPPTVAKLKELLKLAEVAYSSKDKKDDIVRLCEDNGLIARPPPEYKTVEKMCIVKCALKKAMSLDDEEFGKFREHVDQLVNVVSRMLRRSSLVLTFHITSLLEKGLDIPDLYNMKDTYWKDWLRIGVDGIFPDEESKISYEAVKDSIGDVIGNDDADYIKSYPIYFDQVLNYAGHTLSTVVSNNAWVPLIPRLARLTSTTLNKLNAPKTLDTSKIIRGYDVMQAIQQEVQNMEGWPESVQEYVNEVREMLSVPDGSRVYDNYGKDMDFPTMVRFNYWIQTRLEDMDARRIRLMPIFNVQRVHVRLDLKTLVNLFRHMFPNDQNIVELSKWEHVKNPESFMLPQRPAQKKKKSCGPGEWDAYKSVLKQYDDDVKDIKATDEYRHAKGLYDTLVNARKTVAGSFFRKPPVKNGWVFDCSICTDGVSLSMQYSKTVQVLVSDLKKTCKKPRKEEGIKIAEKYDGSLKTILPDMGIVVLGVDPGRSNIATVTYLADDKNKTWKLTRGAFYHKSGIKKQTRQKELRFADMIPMWESLRENGAALSTSRTDKISAYLSNYAKFSDEWWRLALRRRESRDNLQRYIGKRKVKDSFWAGIKRCMMKELPGMKVCVAYGSAITKLKPTGPGEVAVPTGAMFASCKRIFKEDVSVTDEFKTTLMSWETGKEKERVYKIPSVCSADVNLRLGGERFGHTKSKTMPKVADCDHLGVRLYNKRKGAQEKHRRGGFATSLVDSQKSIERYPEVRGLRFSPETCIYSDRDRSSALTIARLHCMELMGLGRPLPFAHSSSVVVDE

SEQ ID NO: 662 - protein, 496 aa, Chlamydomonas sp.
QPSGNTFASRAHMTLPLYHKILSETIEEKRKTKNEKHRTFSLLPYKSGFTLSHIPISKMAFFYMVNECHFDSCKADVASKNHQGIWERFANLKKVETVSRKFGYRIVTDGFAVSILMNKPTCLTCSMPADAFSTRAHEYVTTDEGGIVSFLNNVVVAAVDPGVTDIVTVTGLNGGTRSYSSAQYYRKGLIFKSQRQTDVWNLETADIVGGIIPDRDSSSSEQIGAYARFYMGAAPILLAHRASRGYRNLRFRRYCKKQKLIVEIADFVAPREKSAKVLVGFGDWKGLGATPISRRTCGPLQAIRFELRSRENVIMEDIDEFRTSQRCSCCENHLCNMVALTHRKKQDGTGWECTEGRKRIHKILHCKSSQRGAPRQQSGGMLHCGKTWDRDVNASRNILMLTLHQVFGRERPLAFRRDAPRSSSTTPPPDTDMGTQTVERFTKEATRNIFENLFNLLHPPTLPKATICSLDEYNVCPTLFENNCNQVCLSRWVLNR

SEQ ID NO: 663 - protein, 801 aa, Chlamydomonas sp.
PRMEHVCDVCIKSSVMYKLCKMATKPPTVAKLKELLKLAEVAYSSKDKKDDIVRLCEDNGLIARPPPEYKTVEKMCVVKCALKKAMSLDDEEFGKFREHVDQLVNVVSRMLRRSSLVLTFHVTRLMEGDLPIPNMYDMKDTYWKDWLRIGVDGVFPDEESRISYEAVKDVIGKVLGSDDPDYINSYPIYFDQVLNYAGHTLSTVVSNNAWVPLVPRLTRLTKATLNALKAPKTIRVYDVMRVIQQEIQEMESWPESVQEYVREVRVRLKVPDGSRLYDDYGKDMDFPTMVRFNYWMQTRLEAIGARRIRLMPIFNVQRAHVRLDMKTLVNLFRHVFPKDPNIVELSKWKDVKDPDRFMLPLKPAVKKKKSCGPGEWEAYKLAQQKYDADVNDIKDTDEYRHAKGRYDTLVNARKTVAGSFFKKPPVKTGWVFDCSICTDGVSLSMQYSKTVQVRVSDLKKTSKRSRDDEGMSVSEQYDHKLKTTLPDMGIVVLGVDPGRSNIATVTYLADDKSKTWKLTRGAFYHKSGIKKQKKQQEKRFSDMIPRWESLRENGAALSTSRTDDISAYLKNYDTFSDEWWRMALLRRESRDNFQRYIGKRKAMDSFWAGIKRNMKLDHPDLRVRVAYGSAITTLKATGPGEVAVPTGSMFASCKRLFKEEVHVTDEFKTTLMSWETGAKKECVYKIPSVQITTEGQIRLGYELLGHTPLKETPNVSYRDQLAVRVYCTRKQIQEKHRRGGLAPSLVDNNSIKRYPEVRGLRFSPETSTYSDRDRSSALTIARLHCMELLGQGRPLPFCRDA

SEQ ID NO: 664 - protein, 634 aa, Chlamydomonas sp.
RIQSMVLLINHAVAEAYLFANLHITRCLDDGDFDVKQLPHLDRNFYYRCLLAVSTSNVRKDTLGQSFNDTMVAFDALRPAGYVKVDVRPWGQVIADVSIQMATMACNSVWANVDRVVIKYLRLKHPSLKKHFKKIVKAVVQYPESKIDTIIPEGLVHAIHIKEVVSHLRALFPLPRGKQFNTRAHLTMRLFHHVLTELGEVGRVDPKDKKTRKSHPRLFSILPRKNGFTISYVPISSMTFMKLLSMGDSPLESVSGDGRYENHTMLWRKYFNVQGLETKRSRFDNRILSDGKGVSVQMKQKGKEEVVEEGENAGYPKDANIVECKDAVGALRVGVDPGMTDIVTVASSAGRIESFSLARFSEVAGYNTSKRRTYKWKDETQDLVKSIPSPNTSNMVDLQDHVRAYLEALPILLQHRANKGYRSMRFFRYVGKQKTIEKVCDVIAPRAQTTVVGFGNWSNQGYGISRSCSGPIKEIRRCLSRRKNVLFKNVDERNTSCKCHGCFQRLVNMKADSVVWRGVCKESPIDGSITVEKQKMVVKNVKVFKVLHCRDSVKSASSNVRCGATWNRDVNAAKNLLLLLTTWMDGRERPEAFCVPSPPPKTAVSIEASVSAKPTDPPGFVSSLPCYPLGQLKC

SEQ ID NO: 665 - protein, 437 aa, Chlamydomonas sp.
EEKSCGPGEWEAYKLAQQKYDADVKDIKATDEYRHAKGRYDTLVNARKTVAGSFFKKPPVKTGWVFDCSICTDGVSLSMQYSKTVQVRVSDLKKTSKRSRDDEGMSVSEQYDHKLKTTLPDMGIVVLGVDPGRSNIATVTYLADDKSKTWKLTRGAFYHKSGIKKQKKQQEKRLSDMIPRWEYLRENGAALSTSRKDDISAYLKNYATFSDEWWRMALRRRESRDNFQRCIGKRKAMDSFWAGIKRNMKLDHPDLRVRVAYGSAITMLKATGPGEVAVPTGSMFASCKRLFKEEVHVTDEFKTTLMSWETGAKKEYVYKIPSVQITTEGQIRLGYELLGHTPLKETPKVSYRDQLAVRVYCTRKQIQEKHRRGGLTPSLVDNNSIKRYPEVRGLRFSPETSTYSDRDRSSALTIARLHCMELLGQGRPLPFCRDACC

SEQ ID NO: 666 - protein, 209 aa, Chlamydomonas sp.
FFRYVGKQKTIEKVCDVIAPRARTTVVGFGNWSNQGYGISRSCSGPIKEIRRCLSRRKNVLFKNVDERNTSCKCHGCFQRLVNMKADSVVWRGVCKESPIDGSITVEKQKMVVKNVKVHKVLHCRDSVKSASSNVRCGATWNRDVNAAKNLLLLLTTWMDGRERPEAFCVPSPPPKTTVSIEASVSAKPTDPPGFVSRLPCYPLGQLKC

SEQ ID NO: 667 - protein, 209 aa, Chlamydomonas sp.
FFRYVGKQKTIEKVCDVIAPRAQTTVVGLGNWSNQGYGISRSCSGPIKEIRRYLSRRKNVLFKNVDERNTSCKCHGCFQRLVNMKADSVVWRGVCKESPINGSITVEKQKMVVKNVKVHKVLHCRDSVKSASSNVRCGATWNRDVNAAKNLLLLLTTWMDGRERPEAFCVPSPPPKTPVSIEASVSAKPTDPPGFVSSLPCYPLGQLKC

SEQ ID NO: 668 - protein, 302 aa, Chlamydomonas sp.
YRDGGTRSYSSAQYYRKGLIFKSQRQTDVWNLETADIVGDIIPDRDSSRYEQIGAYARFYMGAAPILLAHRASRGYRNLRFRRYCKKQKLIVEIADFVAPMENSAKVLVVFGDCKGLGATPISRRTCGPLQAIRFELRSRGNVIMEDVDEFITSQRCSCCENRLCNMVALTHRKKQDCTGWECTEGRKRIHKILHCKSSQSGAPRQQSGGKLHCGKTWDGDVNASRNILMLTLHQVFGRERPIAFRRDAPRSSSKTPAPPDTVMGTQTVERFTKEATRNIFENLFNLLHPPTLPKRNDLQSG

SEQ ID NO: 669 - protein, 688 aa, Chlamydomonas sp.
GNVGAILYHQKKKNTHPLLMGVVQDKGDDDINISVVKKTLNSLCMDVSRHQISSRIQSMVLLINHAVAEAYLFANFHITRCLNDGDFDVKQLPHLDRNFYYRCLLAVSTSNVRKDTLGQSFNDTMVAFDALRPAGYVKVDVRPWGQVIADVSIQMATMACSSVWANVDRVVIKYLRLKHPSLKKHFKKIVKAVVQYPESKIDTIIPGGLVHAIHIKEVVSHLRALFPLPRGKQFNTRAHLTMRLFHHVLTELGEVGRVDPKDKKTKKSHPRLFSILPRKNGFTTSYVPISSMTFMKLLSMGDSPLESVSGDGRYENHTMLWRKYFNVQGLETKRSRFDNRILSDGKGVSVQMKQKGKEEFVEEGENAGYPKDANIVECKDAVGALRVGVDPGMTDIVTVASSAGRIESFSSARFSEVAGYNTSKRRTYKWNDETQDLVKSIPSPNTSNMVDLQDHVRAYLKALPILLQHRANKGYRSMRFFRYVGKQKTIEKVCDVIAPRAQTTVVGFGNWSNQGYGISRSCSGPIKEIRRCLSRRKNVLFKNVDERNTSCKCHGCFQRLVNMKADSIVWRGVCKESPIDGSITVEKQKMVVKNVKVHKVLHCRDSVKSASSNVRCGATWNRDVNAAKNLLLLLTTWMDGRERPEAFCVPSPPPKTTVSIEASVSAKPTDPPGFVSSLPCYPLGQLKC

SEQ ID NO: 670 - protein, 462 aa, Chlamydomonas sp.
PCLCTTRYCRRPSKKNEKHCTFSLLPGFTLSHIPISKMAFFYMVNECHFDSCKADVASKNHQGIWERFANLKKVETVSRKFGYRIVTDGFAVSILMNKPTCLTCSMPADAFSTRAHEYVTTDEGGIVSFLDNVVVAAVDPGVTDIVTVKGLNGGTRSYSSAQYYRKGLIFKSQRQTDVWNLETADIVGGIIPDRDSSSSEQIGAYARFYMGAAPILLAHRASRGYRNLRFRRYCKKQKLIVEIADFVAPREKSAKVLVGFGDWKGLGETPISRRTCGPLQAIRFELRSRENVIMEDIDEFRTSQRCSCCENHLCNMVALTHRKKQDGTAWECTEGRKRIHKILHCKSSQRGAPRQQSGGMLHCGKTWDRDVNASRNILMLTLHQVFGRERPLAFRRDAPRSSSTTPPHPHPLILIWGHRRLNGLPKRLLGISSRTSSTCCTPQRCPKATICSLDDYKVSHFI

SEQ ID NO: 671 - protein, 340 aa, Chlamydomonas sp.
RRRYQDRRKYDGSLKTILPDMGIVVLGVDPGRSNIATVTYLADDKNKTWTLTRGAFYHKSGIKKQTRQKELRFADMIPMWESLRENGAALSTSRTDKISAYLSNYAKFSDEWWRLALRRRESRDNLQRYIGKRKVKDSFWAGIKRCMMKELPDMKVCVAYGSAITKLKPTGPGEVAVPTGAMFASCKRIFKEDVSVTDEFKTTLMSWETGKEKERVYKIPSVCSADVKLRLGGERFGHTKSKTMPKVADCDHLGVRLYNKRKGAQEKHRRGGFATSLVDSQKSIERYPEVRGLRFSPETCIYSDRDRSSALTIARLHCMELMGLGRPLPFAHSSSVVVDE

SEQ ID NO: 672 - protein, 225 aa, Chlamydomonas sp.
SSSLSVKLTFGTSRRLISSVVSFRIDSSSSEQIGAYARFYMGAAPILLAHRASRGYRNLRFRRYCKKQKLIVEIADFVAPREKSAKVLVGFGDWKGLGATPISRRTCGPLQAIRFELRSRENVIMEDIDEFRTSQRCSCCENHLCNMVALTHRKKQDGTGWERPLAFRRDTPRSSSTTPPPPPDTDMGTQTVERFTKEATRNIFENLFNLLHPPTLPKSNDLQSG

SEQ ID NO: 673 - protein, 686 aa, Chlamydomonas sp.
METIVNKEPPDKRTRPDRAAKIKDRKNGEENVVKCTLSRIIADKDNKDVITKVIKERVDSVSKRTYLAGVAVNRILKEVFEGVPDAQLHTVSVPSVDQNFIRQLMVGSRQAHMETRDATVERFFHNNYWFREKIEGREVIVKKKKQYVGAIARYDGDRNLYSHASKKYLTNFNNHYRVHLSTWIKKFVYSKENRILAKEFKDEHGIDETVFHRYLLYDIHSWGVKEDLIAIHSLLPERTKMLLKIQHSIIGRDEINRQWLKSVSNSAKMIRYNVFINRYLEATEDEGYAKLVNIAPIPTVKHAFITIDTDGLLGVLKDVGLVESLKKTLTNKEHWESVFDVENIRSTGKGVFTCTIDTDGVMACTHFLRAEKKKISIKDDGTAIKKQTNTLREFSESDPNVVVVANDPGRCNIAFLTWKKNKVEEKDKGGRKRKRHCEFGSKRLTRERYYVESGVFKSRGPTKKWLSNIQDCLDDLKDNSPKRTSLESFDAYVTVMVNHWDSRWGERSKSRWGAQRLRLYGGKKRVLARFFNEVQADVGERKTIVIAYGSSKFAPGGKGELSVPTTSAFNAFSDRFKGRVAVIDEFRTTKIWHKDSTTVLQSVQSEKEGRTVRGLLWCSSTMENSKLFVNRDLNAAINIHNCFTMYPTRPGILARPKKYCKLEVVVGRTIDYKLTGSLQNAVSSEV

SEQ ID NO: 674 - protein, 686 aa, Chlamydomonas sp.
METIVNKEPPDKRTRPDRASKIKDRRNGEVNVVKCTLSRIIADKDNKDVIIKVIKERVDSVSKRTYLAGVAVNRILKEVFEGVPDAQLHTVSVPSVDQNFIRQLMVGSRQANMETRDATVERFFHNNYWFREKIEGREVIVKKKKQYAGAIARYDGDRNLYSHASKKYLTNFNNHYRVHLSTWIKKFVYSKENRILAKEFKDEHGIDETVFQRYLLYDIHSWGVKEDLIAIHSLLPERTKMLLKIQHSIIGRDEINRQWLKSVSNSAKMSRYNVFINRYLEATEDEGYAKLVNIAPIPTVKHAFITIDTDGLLGVLKDVGLVESLEKTLTNKEHWESVFDVENIRSTGKGVFTCTIDTDGVMACTHFLRAEKKKISIKDDGTAIKKQTNTLREFSESDPNVVVVANDPGRCNIAFLTWKKNKVEEKDKGGRKRKRHCEFGSKRLTRERYYVESGVFKSRGPTKKWLSNIQDCLDDLKDNSPKRTSLESFDAYVTVMVNHWDSRWGEMSKSRWGAQRLRLYGGKKRVLARFFNEVQADVGERKTIVIAYGSSKFAPGGKGELSVPTTSAFNAFSDRFKGRVAVINEFRTTKIWHKDSTTVLQSVQSEKEGRTVRGLLWCSSTMENSKLFVNRDLNAAINIHNCFTMYPTRPGILARPKKYCKLEVVVGRTIDYKLTGSLQNAVSSEV

SEQ ID NO: 675 - protein, 304 aa, Chlamydomonas sp.
EQHRYSHVSGRRQKQDMEAYTRSFLPQVWYQETEKTARKRFSDMIPRWESLRENGAALSTSRKDDISAYLKNYATFSDEWWRMALRRRESRDNFQRYIGKRKAMDSFWAGIKRNMKLDHPDLRVRVAYGSAITKLKATGPGEVAVPTGSMFASCKRLFKEEVHVTDEFKTTLMSWETGAKKECVYKIPSVQITTEGQIRLGYELLGHTPLKETPKVSYRDQLAVRVYCTRKKIQEKHRRGGLAPSLVDNNSIKRYPEVRGLRFSPETSTYSDRDRSSALTIARLHCMELLGQGRPLPFCRDACC

SEQ ID NO: 676 - protein, 615 aa, Chlamydomonas sp.
QCIRNLHVLNIRMPCMATNASVKLARPPMPVVSQGPSSVNGRIMARSGLQATNVSLTQAASKATSSSRKKKPAVVKSFYTHVCPHTNNNPTCSDSNCSCKPIFLTNIPDVSKSRTSDQGSTSSAQDFYEYWDSSRQDLYRQLLWLPKTGTQGLVSSSFNGFAHSTPTRSSFSITKTEPLKTSLEKTSCPSFKYIVTDGTVEDATKSNAKPKLRTLKLKLNPTKAQKSMLAEFAGCSRFMYNKAVAARLGVGSTHKSVFRIRDRYVTNKVRGEGKMPNPYFKNRQWLLQCPKSVRQSAIKAALANIKACFSNLKAGNIKQFSAPFRRKKTELERGWAIEMDQKNVSKDGDKLFIFKDILGNMRYFGSKQLHKLMPEENPTHDPKVHKSRFGEYFLVLSVAATDRRAERKPVHPDKVATASIDPGVRKTMVTYSPENEESFMLGQGQASDLVKLLLVHDKLQSRLDTEKTLRSKERMKIKKHMIRIRKRIFYLKKEFRDQTTNFLAARYDVLLVPQLETAKMTISAERELTTKVARQMLTLSHSVLFNRLKEKCAEYGTVFLHVLEHYTSQTCPMCGFLNKCGETYTCKNCQFTCDRDIVGAAGIFLKAVRTENPCS

SEQ ID NO: 677 - protein, 617 aa, Chlamydomonas sp.
GKHLKAYEAVKDSIGDVIGNDDADYIKSYPIYFDQVLNYAGHTLSTVVSNNAWVPLIPRLARLTSTTLNKLNAPKTLDTSKIIQGYDVMQAIQQEVQNMEGWPESVQEYVNEVREMLSVPDGSRFYDNYGKDMDFPTMVRFNYWIQTRLEDMDARRIRLMPIFNVQRVHVRLDLKTLVNLFRHMFPNDQNIVELSKWEHVKNPDTFMLPQRPAQKKKKSCGPGEWEAYKSVLKQYDDDVKDIKATDEYRHAKGLYDTLVNAQKTVAGSFFRKPPVKNGWVFDCSVCTDGVSLSMQYSKTVQVLVSDLKKTCKNPRKEEGIKIAEKYDGSLKTILPDMGIVVLGVDPGRSNIATVTYLADDKKKTWTLTRGAFYHKSGIKKQTRQKELRFADMIPMWESLRENGAALSTSRTDKISAYLSNYAKFSEEWWRLALRRRESRDNLQRYIGKRKVKDSFWAGIKRCMMKELPDMKVCVAYGSAITKLKPTGPGEVAVPTGAMFASCKRIFKEDVSVTDEFKTTLMSWETGKEKERVYKIPSVCSADVKLRLGGERFGHTKSKTMPKVADCDHLGVRLYNKRKGAQEKHRRGGFSTSLVDSQKSIERYPEVRGLRFSPETCI

SEQ ID NO: 678 - protein, 608 aa, Chlamydomonas sp.
CMYVCRCILAVSTSNVRKDTLGQSLKDSMVAFDALRHAGYLKVDVRQWGQVIADVSIQMATMACNSVWANVDRVVIKYLRLKHPWLKKHFNKIVKAVVQYPESDIDKIIPASLVHANLIKDVVRRLRDLLPLPRGKQFNTRAHLTMRLFHHVLTELGADLKEKTTKKRPRLFSILPRKSGFTISYVPISSMTLMKLLSMGDSPLESFRGDGRHENHTMLWRKYFNVQGLETKGSRFDNRILSDSKGVSVQMKHQASEDVAVDNAGYPKDAILEDCQDASLRVGVDPGMTDIVTVAFSDGRVESFSSARFSEAAGYNTSNRRTNKWNVDTQDLVKSIPSPTTSSMHDMQDHVRGYLSALPTLLQHRASRGYRSMRFFRYVGKQKTIEKVCDLIAPKAQKKTIEEKVCDVIAPRAQTTVVGFGNWSNQGYGISRSCSGPIKEIRRCLSRCKNVLFKNVDERNTSCTCHGCFQKLVNMKADSVVWRRVQNEPPSLINGAPTTTTTTTIEKQKTVVKNVKVHKVLHCRNSVKSASSKVRCGATWNRDVNAAKNLLLLLTTWMDGKERPATFCVPSSSPTPKTTVSGEANVGAQPTDPLGSVSSLQLLSSGPA

SEQ ID NO: 679 - protein, 304 aa, Chlamydomonas sp.
RSRRSTHFAVCLSCDRSPFTDASVCGQPAVTRSDPTRVSASPQLNSHAPRSEQIGAYARFYMGAAPILLAHRASRGYRNLRFRRYCKKQKLIVEIADFVAPRKKSAKVLVGFGDWKGLGATPISRRTCGPLQAIRFELRSRENVIMEDIDEFRTSQRCSCCENHLCNMVALTHRKKQDGTGWECTEGRKRIHKILHCKSSQSGAPRQQSGGMLHCGKTWDRDVNASRNILMLTLHQVFGRERPLAFRRDAPRSSSTTPPPPPDTDMGTQTVERFTKEATRNIFENLFNLLHPPTLPKSNDLQSG

SEQ ID NO: 680 - protein, 453 aa, Chlamydomonas sp.
HVCFRRSQACRLLKGGRSSMGTCNCRRLNTNGDDGMQQRLMKLLSMGDSPLESFRGDGRHENHSMLWRKYFNVQGLETKGSRFDNRILSDGKGVSVQMKHQASEDVAVDNAGYPKDAILEDCQDASLRVGVDPGMTDIVTVASSDGRVESFSSARFSEAAGYNTSNRRTNKWNVDTQDLVKSIPSPTTSSMHDMQDHVRGYLSALPTLLQHRASRGYRSMRFFRYVGKQKTIEKVCDLIAPKAQKKTIEEKVCDVIAPRAQTTVVGFGNWSNQGYGISRSCSGPIKEIRRCLSRRKNVLFKNVDERNTSCTCHGCFQKLVNMKADSVVWRRVQNEPPSLINGAPTTTTTIEKQKTVVKNVKVHKVLHCRNSVKSASSKVRCGATWNRDVNAAKNLLLLLTTWMDGKERPATFCVPSSSPTPKTTVSGEANVGAQPTDPLGSVSSLQLLSSGPA

SEQ ID NO: 681 - protein, 624 aa, Chlamydomonas sp.
RTRSLQTCLFSWPQWPSNHLWTNLERRITTYLKWKYPQIAKRLRSDIVAALIKCPTKNLDVIFKMSPHTTKLPTKLPTSRLRSAKSAVALAKKRVGRKEPEGSPLRVRLTKLQERLEKLSEGWLSSKNLRVDADNAKLFFAREVAFCLRGVLPLPSGNTFASRAHMTLPLYHKILSETIEEKRKLKTKNIAHSRCCLTNLDSLCRTFRFLKWPFSIWSTSATFDSCKADIASKNHQGIWERFANLKKVETVSRKFGYRIVTDGFAVSILMNKPTCLTCSMPADAFSTRAHEYVTTDEGGIVSFLDNVVVAAVDPGVTDIVTVTGLNGGTRSYSSAKYYRKGLIFKSQRQTDVWNLETADIVGGIIPDRDSSSSEQIGAYARFYMGAAPILLAHRASRGYRNLRFRRYCKKQKLIVEIADFVAPRKKSAKVLVGFGDWKGLGATPISRRTCGPLQAIRFELRSRENVIMEDIDEFRTSQRCSCCENHLCNMVALTHRKKQDGTGWECTEGRKRIHKILHCKSSQSGAPRQQSGGMLHCGKTWDRDVNASRNILMLTLHQVFGRERPLAFRRDAPRSSSTTPPPDTDMGTQTVERFTKEATRNIFENLFNLLHPPTLPKSNDLQSG

SEQ ID NO: 682 - protein, 686 aa, Chlamydomonas sp.
METIVNKEPPDKRTRPDRAAKIKDRKNGEENVVKCTLSRIIADKDNKDVITKVIKERVDSVSKRTYLAGVAVNRTLKEVFEGVPDAQLHTVSVPSVDQNFIRQLMVGSRQAHMETRDATVERFFHNNYWFREKIEGREVIVKNKKQYVGAIARYDGDRNLYSHASKKYLTNFNNHYRVHLSTWIKKFVYSKENRILAKEFKDEHGIDETVFHRYLLYDIHSWGVKEDLIAINSLLPERTKMLLKIQHSIIGRDEINRQWLKSVSNSAKMIRYNVFINRYLEATEDEGYAKLVNIAPIPTVKHSFITIDTDGLLGVLKDVGLVESLEKTLTNKEHWESVFDVENIRSTGKGVFTCTIDTDGVMACTHFLRAEKKKISIKDDGTAMKKQTKTLREFSESDPNVVVVANDPGRCNIAFLTWKKNKVEEKDKGGRKRKRHCEFGSKRLTRERYYVESGVFKSRGPTKKWLSNIQDCLDDLKDNSPKRTSLESFDAYVTVMVNHWDSRWGEMSKSRWGAQRLRLYGGKKRVLARFFNEVQADVGERKTIVIAYGSSKFAPGGKGELSVPTTSAFNAFSDRFKGRVAVVDEFRTTKIWHKDSTTVLQSVQSEKEGRTVRGLLWCSSTMENSKLFVNRDLNAAINIHNCFTMYPTRPGILARPKKYCKLEVVVGRTIDYKLTGSLQNAVSSEV

SEQ ID NO: 683 - protein, 615 aa, Chlamydomonas sp.
QCIRNLHVLNIRMPCMATNASVKLARSPMPVVSPGPSSVDGRIMARSGLQATNVSLTQAASQATSSSRKKKPAVVKSFSTHVCPHTNNNPTCSDSNCSCKPIFLTNIPDASKSRTSDQGSTSSSLDFYEYWDSSRQDLYRQLLWLPKTGTQGLVSSSFNGFAHSTPTRSSFSITKTEPLKTSLEKTSCPSFKYIVTDGTVEDATKSNAKPKLRTLKLKLNPTKAQKSMLAEFAGCSRFMYNKAVAARLGVGSTHKSVFRIRDRYVTNKVRGKGKMPNPYFKNRQWLLQCPKSVRQSAIKSALANIKACFSNLKAGNIKQFSSPFRRKKTELERGWVIEMDQKNVSKDGDKLFIFKEILGNMRYFGSKQLHKLMPEENPTHDPKVQKSRFGEYFLVFSVAARDRRAERKPVNPDKVATASIDPGVRKTMVTYSPENEESFMLGQGQASDLVKLLLVHDKLQSRLDTEKTLRSKERMKIKKLMIRIRKTIFYLKKEFRDQTTNFLAARYDVLLVPQLETAKMTISAERELTTKVARQMLTLSHSVLFNRLKEKCEEYGTVFLHVLEHYTSQTCPMCGFLNKCGETYTCKNCQFTCDRDIVGAAGIFLKAVRTENPCS

SEQ ID NO: 684 - protein, 498 aa, Chlamydomonas sp.
EMRQYMGMVLYHVRSSRGLRVRCTRMPCWKARVPVKGSVPLQLLPPSTGKQFNTRAHLTMRLFHSVLAELVSSSSSEPNRRAPRLFSLLPRKIGFTISYIPISSMTFMKILSMGNTPLEKIRGDGRLEDHDRLWRKYFNIGSVETKASRFDCRIITDGKGVSIQMRRELGQCLMETSGYPKDSSIGECLNATTHRNARCVGVDPGMTDIATVAFSSGGGTQSFSSSHFSHTAGYKTSKRRTDKWNVETSELVQSIPTSMTTSMDGLERHVQAYLGALPKLLQHRTNKGYRSMRFFRYVGKQKAIEEVCDMIALRDTPTIVGFGNWSNQGNGISRPCYGPVKEIRKKLSQRGNVLFKNIDERNTSCTCHGCFERLVNMKANSVRWRRGQIGQLGVSVKEKVMVKNVKVHKILHCCNSVGSAPSERCGTTWNRDVNASKNILLLLKTWVAGKERPAAFCVPYKNKITTSREATEMLRPVDPSLGSIGHTRLLSSEHQLKC

SEQ ID NO: 685 - protein, 212 aa, Chlamydomonas sp.
SMRFFRYVGKQKTIEKVCDVIAPRAQTTVVGFGNWSNQGYGISRSCSGPIKEIRRCLSRRKNVLFKNVDERNTSCKCHGCFQRLVNMKADSVVWRGVCKESPIDGSITVEKQKMVVKNVKVHKVLHCRDSVKSASSNVRCGATWNRDVNAAKNLLLLLTTWMDGRERPEAFCVPSPPPKTTVSIEASVSAKPTDPPRFVSSFPCYPLGKLKC

SEQ ID NO: 686 - protein, 700 aa, Chlamydomonas sp.
YQDKERTLPPSISMGVVTNNGDDDDDLDIMVVKKTLNSLCMDVSRQQICSRIQSMVLVINHAVAEAYLFANFHITRCLDDVDFDVKQLPHLDRNFYYRCILAVSTSNVRKDTLGQSLKDSMVAFDALRPAGYLKVDVRQWGQVIADVSIQMATMACNSVWANVDRVVIKYLRLKHPSLKKHFNKIVKAVVQYPESDIDKIIPASLVHANLIKDVVRRLRDLLPLPRGKQFNTRAHLTMRLFHHVLTELGADLKEKTTKKRPRLFSILPRKSGFTISYVPISSMTLMKLLSMGDSPLESFRGDGRHENHSMLWRKYFNVQGLETKGSRFDNRILSDGKGVSVQMKHQGSEDVDVEGGDNAGYPKDAILEDCQDASLRVGVDPGMTDIVTVASSAGRVESFSSARFSEAAGYNTSNRRTKKWNVDTQDLVKSIPSPTTSSMHDMQDHVRGYLSALPTLLQHRASRGYRSMRFFRYVGKQKTIEKVCDLIAPKAQKKTIEEKVCDVIAPRAQTTVVGFGNWSNQGYGISRSCSGPIKVIRRCLSRRKNVLFKNVDERNTSCTCHGCFQKLVNMKGDSVVWRRVQNEPPSLINGAPTTTTIEKQKTVVKNVKVHKVLHCRNSVKSASSNVRCGATWNRDVNAAKNLLLLLTTWMDGKERPATFCVPSSSPTPKTTVSGEANVGAQPTDPPGSVSNLQLLSSGPA

SEQ ID NO: 687 - protein, 648 aa, Chlamydomonas sp.
KMATKPPTVAKLKELLKLAEVPYSSKSNKDDLVRLCEDNGLIARPPPEYKTVEKMCVVKCALKKAMSLDDEEFGKFREHVDQLVNVVSRMLRRSSLVLTFHITSLLEKGLDIPDLYNMKDTYWKDWLRIGVDGIFPDEESKISYEAVKDSIGDVIGNDDADYIKSYPIYFDQVLNYAGHTLSTVVSNNAWVPLIPRLARLTSTTLNKLNAPKTLDTSKIIRGYDVMQAIQQEVQNMEGWPESVQEYVNEVREMLSVPDGSRVYDNYGKDMDFPTMVRFNYWIQTRLEDMDARRIRLMPIFNVQRVHVRLDLKTLVNLFRHMFPNDQNIVELSKWEHVKNPDSFMFPQRPAQKKKKSCGPGEWEAYKSVLKKYDDDVKDIKATDEYRHAKGLYDTLVNARKTVAGSFFRKPPVKNGWVFDCSICTDGVSLSMQYSKTVQVLVSDLKKTCKKPRKEEGIKIAEKYDGSLKTILPDMGIVVLGVDPGRSNIATVTYLADDKNKTWTLTRGAFYHKSGIKKQTRQKELRFADMIPMWESLRENGAALSTSRTDKISAYLSNYTKFSDEWWRLALRRRESRDNLQRYIGKRKVKDSFWAGIKRCMMKELPDMKVCVAYGSAITKLKPTGPGEVAVPTGAMFASCKEFSKRTFL

SEQ ID NO: 688 - protein, 293 aa, Chlamydomonas sp.
CVFSASPFILVWFSNNKWNVDTQDLVKSIPSPTTSSMHDMQDHVRGYLSALPTLLQHRASRGYRSMRFFRYVGKQKTIEKVCDLIAPKAQKKTIEEKVCDVIAPRAQTTVVGFGNWSNQGYGISRSCSGPIKEIRRCLSRRKNVLFKNVDERNTSCTCHGCFQKLVNMKADSVVWRGVCKESLIDGSITVEKQKMVVKNVNVHKVLHCRNSVKSASSNVRCGATWNRDVNAAKNLLLLLTTWMDGKERPATFCVPSSSPTPKTTVSGEANVGAQPTDPPGSVSSLQLLSSGPA

SEQ ID NO: 689 - protein, 700 aa, Chlamydomonas sp.
YQDKKRTLPPSISMGVVTNNGDDDDDLDIMVVKKTLNSLCMDVSRQQICSRIQSMVLVINHAVAEAYLFANFHITRCLDDVDFDVKQLPHLDRNFYYRCILAVSTSNVRKDTLGQSLKDSMVAFDALRPAGYLKVDVRQWGQVIADVSIQMATMACNSVWANVDRVVIKYLRLKHPSLKKHFNKIVKAVVQYPESDIDKIIPASLVHANLIKDVVRRLRDLLPLPRGKQFNTRAHLTMRLFHHVLTELGADLKEKTTKKRPRLFSILPRKSGFTISYVPISSMTLMKLLSMGDSPLESFRGDGRHENHSMLWRKYFNVQGLETKGSRFDNRILSDGKEVSVQMKHQASEDVAVDNAGYPKDAILEDCQDASLQVGVDPGMTDIVTVASSAGRVESFSSARFSEAAGYNTSNRRTNKWNVDTQDLVKSIPSPTTSSMHDMQDHVRGYLSALPTLLQHRASRGYRSMRFFRYMGKQKTIEKVCDLIAPKAQKKTIKEKVCDVIAPRAQTTVVGFGNWSNQGYGISRSCSGPIKEIRRCLSRRKNVLFKNVDERNTSCTCHGCFQKLVNMKADSVVWRRVQNEPPSLINGAPTTTTTTTIEKQKTVVKNVKVHKVLHCRNSVKSASSKVRCGATWNRDVNAAKNLLLLLTTWMDGKERPATFCVPSSSPTPKTTVSGEANVGAQPTDPPGSVSSLQLLSSGPA

SEQ ID NO: 690 - protein, 793 aa, Chlamydomonas sp.
KMATKPPTVAKLKELLKLAEVPYSSKSNKDDLVRLCEDNGLIARPPPEYKTVEKMCVVKCALKKAMSLDDEEFGKFREHVDQLVNVVSRMLRRSSLVLTFHITSLLEKGLDIPDLYNMKDTYWKDWLRIGVDGIFPDEESKISYEAVKDSIGDVIGNDDADYIKSYPIYFDQVLNYAGHTLSTVVSNNAWVPLIPRLARLTSTTLNKLNAPKTLDTSKIIRGYDVMQAIQQEVQNMEGWPESVQEYVNEVREMLSVPDGSRVYDNYGKDMDFPTMVRYNYWIQTRLEDMDARRIRLMPIFNVQRVHVRLDLKTLVNLFRHMFPNDQNIVELSKWEHVKNPDSFMFPQRPAQKKKKSCGPGEWEAYKSVLKQYDDDVKDIKATDEYRHAKGLYDTLVNARKTVAGSFFRKPPVKNGWVFDCSICTDGVSLSMQYSKTVQVLVSDLKKTCKKPRKEEGIKIAEKYDGSLKTILPDMGIVVLGVDPGRSNIATVTYLADDKNKTWTLTRGAFYHKSGIKKQTRQKELRFADMIPMWESLRENGAALSTSRTDKISAYLSNYAKFSDEWWRLALRRRESRDNLQRYIGKRKVKDSFWAGIKRCMMKELPDMKVCVAYGSAITKLKPTGPGEVAVPTGAMFASCKRIFKEDVSVTDEFKTTLMSWETGKEKERVYKIPSVCSADVKLRLGGERFGHTKSKTMPKVADCDHLGVRLYNKRKGAQEKHRRGGFATSLVDSQKSIERYPEVRGLRFSPETCIYSDRDRSSALTIARLHCMELMGLGRPLPFSHSSSVVVDE

SEQ ID NO: 691 - protein, 390 aa, Chlamydomonas sp.
MISPETRYRSVVHYKYFLRSLRKVCNIYKVSKSSLHRWVNADQAGKSKRLKRKRKELSMLLRSTISNNIADVVVAAVDPGVTDIVTVTGLNGSTNSYSSAQYYRKGLIFKSQRQTDVWNLETADIFGDVIPDRDSPRSEQIGAYARFYMGAAPILLAHRALRGYRNLRFRRYCKKQKLIVEIAHFVAPREKSTKVLVGFGDWKGLGATPISRRTCGPLQAIRFELLSRENVIMEDVDEFRTSQRCSCCETRLCNMVALTHRKRQDGTGWECTEGRKRIHKILHFKSSQSGAPRQHSGGRLHCGKTWDRDVNASRNILMLTLHQVFGRERPLAFRRDAPRSSSKTPPTPDTDLGTQTVERFTKEATRNIFENLFNLLHPPTLPKSNDLQSG

SEQ ID NO: 692 - protein, 1094 aa, Chlamydomonas sp.
MYDIAVRKLALRMVADLGVLKNSVFTNISRSTLWRWKRFGVNRKRREFVSKLFETNKDLLKLFLLSTQCTTARGVVAFFKSNHNLRLSTKTVYRFIKLIGFTRKRSKLRGQCKGDLVPLVTEFSSRYKDTIYAGKILVSVDECGFSERLKPHYGYSPVGKPVIVKTTGGWVHHSLLMAVFSDGSKEFVVKKGSVKKTDFAAFIDSLSLCNNSVVIMDNASIHKNLVLRSPVNICYTPPYSPEFNAIELCFAKVKKDFRRLNYIPNDTKTHVSDMISLAFSNLTDKIIMGYFDHVWNTCDVCIKSSVMYKLCKMATKPPTVAKLKELLKLADVAYSSKDKKDDIVRLCEDNGLIARPPPEYKTVEKMCVVKCALKKAMSLDDEEFGKFRGNVDQLVNVVSRMLRRSSLVLTFHVTRLMEGDLPIPNMYDMKDTYWKDWLRIGVDGVFPDEESIISYEAVKDVIGKVLGSDDPDYINSYPIYFDQVLNYAGHTLSTVVSNNAWVPLVPRLTRLTKATLKALGAPKTIRVYDVMRVIQQEIQEMESWPESVQEYVREVRVRLKVPDGSRLYDDYGKDMDFPTIVRFNYWMQTRLEAMGARCIRLMPIFNVQRAHVRLDMKTLVNLFRHVFPKDPNIVELSKWENVKDPDRFMLPLNPAVKKKKSCGPGEWEAYKLAQQKYDADVKDIKATDEYRHAKGRYDTLVNARKTVAGSFFKKPPVKTGWVFDCSICTDGVSLSMQYSKTVQVRVSDLKKTSKRSRDEEGMSVAEQYDHKLKTTLPDMGIVVLGVDPGRSNIATVTYLADDKSKTWKHTRGAFYHKSGIKKQKKQQEKRFSDMIPRWESLRENGAALSTSRKDDISAYLKNYATFSDEWWRMALRRRESGDNFQRYIGKRKAMDSFWAGIKRNMKLDHPDLRVRVAYGSAITKLKATGPGEVAVPTGSMFASCKRLFKEEVHVTDEFKTTLMSWETGAKKECVYKIPSVQITTEGQIRLGYELLGHTPLKETPKVSYRDQLAVREYCTRKKIQEKHRRGGLAPSLVDNKSIKRYPEVRGLRFSPETSTYSDRDRSSALTIARLHCMELLGQGRPLPFCRDACC

SEQ ID NO: 693 - protein, 527 aa, Chlamydomonas sp.
SDSNCSCKPIFLTNIPDASKSLKSRTSDQGSTSSAQDFYEYWDSSRQDLHRQLLWFPKTGSQGLVSSSLNGFARSTPARSSFSITKTEPLKTSLEKTSCPSFKYIVADGTVEDATKSNAKPKLRTLKLKLNPNKAQKSMLAEFAGCSRFMYNKAVAARLGVGSTHKSVFRIRDRFVTNKVRRKGKMPNPYFKNRQWLLQCPKSVRQSAIKAALANIKACFSNLKAGNIKQFSAPFRRKKTELERGWAIEMDQKNVSKDGDKLFIFKDILGNMRYFGSKQLHKLMPEENPTHDPKVQKSRFGEYFLVLSVAARDRRAERKPVHPDKVATASIDPGVRKTMVTYSPENEESFMLGQGQASDLVKLLQVHDKLQSRLDTEKTLQSKERMKIKKQMIRIRKRIFYLKKEFRDQTTNFLAARYDVLLVPQLETAKMTISAERELTTKVARQMLTLSHSVLFNRLKEKCEEYGTVFLHVLEHYTSQTCPMCGFLNKCGGETYTCKNCQFTCDRDIVGAAGIFLKAVRPENPCS

SEQ ID NO: 694 - protein, 249 aa, Chlamydomonas sp.
GWHLSFRDNVVVAAVDPGVTDIVTVTGLDGSTNSYSSAKYYRKGLIFKSQRQTDVWNLETADIFGDVIPDRDSPMSQQIGAYARFYMGAAPILLAHRASRGYRNLRFRRYCKKQKLIVEIADFVAPREKSTKVLVGFGDWKGLGRHQSLGGLVALSKLFVSSFVAAKTLSWRTSRSSEHLNDAAAVRPDFATWLHSLIVRSKTVLGNVRKDASGFTRFSTAKAVKAERHANRAAVGSTAGRLRRYLVLL

SEQ ID NO: 695 - protein, 308 aa, Chlamydomonas sp.
HKILSETIEEKRKTKNEKLRTFSLLPYKSGFTLSHIPISKMALFYMVNECHFDSCKADVASKNHQGIWERFANLKKVETVSQKFGYRIVTDGFAVSILMNKPTCLTCSMPADAFSTRVHEYVTTDEGGIVSFLDNVVVAAVDPGVTDIVTVTGLDGGTRSYSSAQYYRKGLIFKSQRQTDVWNLETADIVGGIIPDRDSSRSEQIGAYARFYMDAAPILLAHRASRGYRNLCFRRYCKKQKLIVEIADFVAPREKSTKVLVGFGDWKGLGATPISRRTCGPLQAIRFELRSRENVIMEDVDEFRTSQR

SEQ ID NO: 696 - protein, 543 aa, Chlamydomonas sp.
SLEYVPDGSRVYDNYGKDMDFPTMVRFNYWIQTRLEDMDARRIRLMPIFNVQRVHVRLDLKTLVNLFRHMFPNDQNIVELSKWEHVKNPDSFMLSQRPAQKKKKSCGPGEWEAYKSVLKQYDDDVKDIKATDEYRHAKGLYDTLLNARKTVAGSFFRKPPVKNGWVFDCSICTDGVSLSMQYSKTVQVLVSDLKKTCKNPRKEEGIKIAEKYDGSLKTILPDMGIVVLGVDPGRSNIATVTYLADDKNKTWKLTRGAFYHKSGIKKQTRQKELRFADMIPMWESLRENGAALSTSRTDKISAYLSNYAKFSDEWWRLALRRRESRDNLQRYIGKRKKVKDSFWAGIKRCMMKELPDMKVCVAYGSAITKLKPTGPGEVAVPTGAMFASCKRIFKEDVSVTDEFKTTLMSWETGKEKERVYKIPSVCSADVKLRLGGERFGHTKSKTMPKVADCDHLGVRLYNKRKGAQEKHRRGGFATSLVDSQKSIERYPEVRGLRFSPETCIYSDRDRSSALTIARLHCMELMGLGRPLPFAHSSSVVVDE

SEQ ID NO: 697 - protein, 794 aa, Chlamydomonas sp.
KMAKKPPTVAKLKELLKLAEVPYSSKSNKDDLVRLCEDNGLIARPPPEYKTVEKMCVVKCALKKAMSLDDEEFGKFREHVDQLVNVVSRMLRRSSLVLTFHITSLLEKGLDIPDLYNMKDTYWKDWLRIGVDGIFPDEESKISYEAVKDSIGDVIGNDDADYIKSYPIYFDQVLNYAGHTLSTVVSNNAWVPLIPRLARLTSTTLNKLNSPKTLDTSKIIRGYDVMQAIQQEVQHMEGWPESVQEYVNEVREMLSVPDGSRVYDNYGKDMDFPTMVRFNYWIQTRLEDMDARRIRLMPIFNVQRVHVRLDLKTLVNLFRHMFPNDQNIVELSKWEHVKNPDSFMLPQRPAQKKKKSCGPGEWEAYKSVLKQYDDDVKDIKATDEYRHAKGLYDTLLNARKTVAGSFFRKPPVKNGWVFDCSICTDGVSLSMQYSKTVQVLVSDLKKTCKNPRKEEGIKIAEKYDGSLKTILPDMGIVVLGVDPGRSNIATVTYLADDKNKTWTLTRGAFYHKSGIKKQTRQKELRFADMIPMWESLRENGAALSTSRTDKISAYLSNYAKFSDEWWRLALRRRESRDNLQRYIGKRKKVKDSFWAGIKRCMMKELPDMKVCVAYGSAITKLKPTGPGEVAVPTGAMFASCKRIFKEDVSVTDEFKTTLMSWETGKEKERVYKIPSVCSADVKLRLGGERFGHTKSKTMPKVADCDHLGVRLYNKRKGAQEKHRRGGFATSLVDSQKSIERYPEVRGLRFSPETCIYSDRDRSSALTIARLHCMELMGLGRPLPFAHSSSVVVDE

SEQ ID NO: 698 - protein, 686 aa, Chlamydomonas sp.
METIVNKEPPDKRTRPGRAAKIKDRKNGEENVVKCTLSRIIADKDNKDVITKVIKERVDSVSKRTYLAGVAVNRILKEVFEGVPDAQLHTVSVPSVDQNFIRQLMVGSRQAHMETRDATVERFFHNNYWFREKIEGREVIVKKKKQYVGAIARYDGGRNLYSHASKKYLTNFNNHYRVHLSTWIKKFVYSKENRILAKEFKDEHGIDETVFHRYLLYDIHSWGVKEDLIAIHSLLPERTKMLLKIQHSIIGRDEINRQWLKSVSNSAKMIRYNVFINRYLEATEDEGYAKLVNIAPIPTVKHSFITIDTDGLLGVLKDVGLVESLEKTLTNNEHWESVFDVENIRSTGKGVFTCTIDTDGVMACTHFLRAEKKKISIKDDGTAMKKQTKTLREFSESDPNVVVVANDPGRCNIAFLTWKKNKVEEKDKGGRKRKRHCEFGSKSLTRERYYVESGVFKSRGPTKKWLSNIQDCLDDLKDNSPKRTSLESFDAYVTVMVNHWDSRWGEMSKSRWGAQRLRLYGGKKRVLARFFNEVQADVGERKTIVIAYGSSKFAPGGKGELSVPTTSAFNAFSDRFKGRVAVIDEFRTTKIWHKDSTTVLQSVQSEKKGRTVRGLLWCSSTMENSKLFVNRDLNAAINIHNCFTMYPTRPGILARPKKYCKLEVVVGRTIDYKLTGSLQNAVSSEV

SEQ ID NO: 699 - protein, 284 aa, Chlamydomonas sp.
EEKSCGPGEWEAYKLAQQKYDTDVNDIKATDEYRHAKGRYDTLVNARKTVAGSFFKKPPVKTGWVFDCSICTDGVSLSMQYSKTVHVRVSDLKKTSKKSRDDEGMSVSEQYDHKLKTTLPDMGIVVLGVDPGRSNIATVTYLADDKSKTWKLTRGAFYHKSGIKKQKKQQEKRFSDMIPRWESLRENGAALSTSRKDDISAYLKNYATFSDEWWRMALRRRESRDNFQRYIGKRNMKLDHPDLRVRVAYGSAITTLKATGPGEVAVPTGSMFASCKRLFKEVFM

SEQ ID NO: 700 - protein, 425 aa, Chlamydomonas sp.
SFSAWAILRSRASVAMDVTRIIPCCGESTSMSKDLRRKGLVLTTESSATAKGSRVSVQMKHQVGKDIAGEGGGDNAGYPKDASIEDCQDASLRQGALRVGIDPGMTDIVTIASSDGRVESFSSARFSEAAGYNTSNRRTNKWNVDTQDLVKSIPSPTSSSMHDMQDHVRGYLSALLTLLQHRANRGYRSMRFFRYVGKQKTIEKVCDLIAPKAQKKTIEEKVCDVIAPKAKKTVVGFGNWSNQGYGISRSCSGPVKEIRKCLSRRQNVLFKNVDERNTSCTCHGCFQKLVNMKADSVVWRRVKNEPSALIDGAPTTTTTTTFEKQKTVVKNVKVHKVLHCRNSVKSASSNVRCGATWNRDMNAAKNLLLLLTTWMDGKERPATFCVPSSSPTPKTTVSGEANVGAQPTNPPGSVSSLQLLSSGPA

SEQ ID NO: 701 - protein, 547 aa, Chlamydomonas sp.
GNCQLVWYHQNNNHSLSMGVVTNNGDDDDLDIMVVKKTLNSLCMDVSRQQICSRIQSMVLVINHAVAEAYLFANFHITRCLDDGDFDVKQLPHLDWNFYYRCILAVSISNVRNDTLDQSLKDSMVAFDALRPAGYVKVDVRPWGQVIADVSIQMATMACNSVWANVDRVVIKYLRLKHPSLKKHFKKIVKAVVQYPDSDIDKIIPAGLVHANLIKDVVRRLRDLLPLPRGKQFNTQAHLTMRLFHHVLTELGADLKEKTTKKRPRLFSILPRKSGFTISYVPISSMTLMKLLSMGDSPLESVRGDGRHENHSMLWRKYFNVQGLETKGSRFDNRILSDGKGVSVQMEHQVGKDIAGEGGGDNAGYPKDASIEDCQDASLRQGALRVGIDPGMTDIVTIASFDGRVESFSSARFSEAAGYNTSNRRTNKWNADTQDLVKSIPSPTTSSMRDMQDHVRGYLSALPTLLQHRANRGYRSMRFFRYVGKQKTIEKVCDLIAPKAQKKTIEEKVCDVIAPKAKKTVVGFGNWSNQGYGICRSCSGPVKVIRK

SEQ ID NO: 702 - protein, 204 aa, Chlamydomonas sp.
LRGSRARRYSSGLVIEGLGATPISRRTCGPLQAIRFELRSRENVIMEDVDEFRTSQRCSCCETRLCNMDALTHRKKQDGTWECTEGRKRIHKILHCKSSQSGAPRQQSGGRLHCGKTWDRDVNASRNILMLTLHQVFGRERPLAFRRDAPRGSSKNPPTPETDMGTQTVERFTTETTRNIFENLFNLLHPPTLPKRNDLQFFRV

SEQ ID NO: 703 - protein, 315 aa, Chlamydomonas sp.
RIYPNAKGGSFCTPLLIAPDLMRLNKYYRKGLIFKSQRQTDVWNLETADIVGGIIPDRDSSRSEQIGAYARFYMGAAPILLAHRASRGYRNLRFRGYCKKQKLIVEIADFVAPREKSTKVLVGFGDWKGLGATPISRRTCGPLQAIRFELRSREKIIMEDVDKFRTSQRCSCCETRLCNMVALTHRKRQDGTGWECTEGRKRIHKILHCKISQSGAPRQQSGGRLHCGKTWDRDLNASRNILMLTLHQVFGRERPLVFRRDAPRSSSKPPPTPDTDLGTQTVERFTKEATRNLFENLFNLLHPPTLPKSNDLQSG

SEQ ID NO: 704 - protein, 699 aa, Chlamydomonas sp.
YQLTNVGLVSVSSHIMDIPDLYNMKDTYWKDWLRIGVDGIFPDEESKISYEAVKDSIGDVIGNDDADYIKSYPIYFDQVLNYAGHTLSTVVSNNAWVPLIPRLARLTSTTLNRLNAPKTLDTSKIIRGYDVMQAIQQEVQNMEGWPESVQEYVNEVREMLSVPDGSRVYDNYGKDMDFPTMVRFNYWIQTRLEDMDARRIRLMPIFNVQRVHVRLDLKTLVNLFRHMFPNDQNIVELSKWEHVKNPESFMLPQRPAQKKKKSCGPGEWEAYKSVLKQYDDDVKDIKATDEYRHAKGLYDTLVNARKTVAGSFFRKPPVKNGWVFDCSICTDGVSLSMQYSKTVQVLVSDLKKTCKKPRKEEGIKIAEKYDGSLKTILPDMGIVVLGVDPGRSNIATVTYLADDKNKTWKLTRGAFYHKSGIKKQTRQKELRFADMIPMWESLRENGAALSTSRTDNISAYLSNYAKFSDEWWRLALRRRESRDNLQRYIGKRKVKDSFWAGIKRCMMKELPDMKVCVAYGSAITKLKPTGPGEVAVPTGAMFASCKRIFKEDVSVTDEFKTTLMLWETGKEKERVYKIPSVCSADVKLRLGGERFGHTKSKTMPKVADCDHLGVRLYNKRKGAQEKHRRGGFATSLVDSQKSIERYPEVRGLRFSPETCIYSDRDRSSALTIARLHCMELMGLGRPLPFAHSSSVVVDE

SEQ ID NO: 705 - protein, 688 aa, Chlamydomonas sp.
RNVGATLYHQKKKNTHPLLMGVVQDKGDDDINISVVKKTLNSLCMDVSRHQISSRIQSMVLLINHAVAEAYLFANFHITRCLDDGDFDVKQLPHLDRNFYYRCLLAVSTSNVRKDTLGQSFNDTMVAFDALRPAGYVKVDVRPWGQVIADVSIQMATMACNSAWANVDRVVIKYLRLKHPSLKKHFKKIVKAVVQYPESKIDTIIPEGLVYAIHIKEVVSHLRALFPLPRGKQFNTRAHLTMRLFHHVLTELGEVGRVDPKDKKTRKSHPRLFSILPRKNGFTISYVPISSMTFMKLLSMGDSPLESVSGDGRYENHTMLWRKYFNVQGLETKRSRFDNRILSDGKGVSVQMKQKGKEEVVEEGENAGYPKDANIVECKDAVGALRVGVDPGMTDIVTVASSAGRIESFSSARFSEVAGYNTSKRRTYKWNDETQDLVKSIPSPNTSNMSDLQDHVRAYLKALPILLQHRANKGYRSMRFFRYVGKQKTIEKVCDVIAPRAQTTVVGFGNWSNQGYGISRSCSGPIKEIRRCLSRRKNVLFKNVDERNTSCKCHGCFQRLVNMKADSVVWRGVCKESPIDGSITVEKQKMVVKNVKVHKVLHCRDSVKSASSNVRCGATWNRDVNAAKNLLLLLTTWMDWRERLEAFCVPSPPPKTTVSIEASVSAKPTDPPGFVSSLPCYPLGQLKC

SEQ ID NO: 706 - protein, 975 aa, Chlamydomonas sp.
RGRLLAVIRFTLVRITQRFVRRAQQFEKLLSSIPLAVRRCCPFVRMPFQSCLPVCSPNLLCRCSVCCHPQQFIVAADHDGLRWAFIDVYSCSQIKSKRLKRKRKELSMLLRSTISNNIAENPFITCKDLVGIICKSCNVRLSISTASRHIKQCGFSRKKAFPTVLYGHSKENVEMFCDKYRESSNVVCIDEAGFYAGEHSKYGYSKIGSRLTTKTMSNLRRVKFTLLLAISSQGIIDYQLLEHNCKKEDFIKFFKTLVIPNNTTIVMDNIRFHHSSEIKDISECKGWKLLYTPPYCPRANAIEQIFESMKRDYRASCPLTSTCNFDYLMQICCVLEMWRYKDFSKYMINTRDWVRNVRESLSADPDYIKTFSGVQFVMENGIGESSSLVHEADQHDDVAELVDYEGEEDEECAPGRAICVVKMKLSTFIPHDWLRKKIDTLVLDMNKLLGEGYIFANFHIARLFENGIAVPPVNRNFFYRCLIAVSTNKCKGSTLGKDFESSRLLFDLLREPGQSKVDIRGKVKNQIIADLSILMATMASNHLWTNLERRITTYLKWKYPQIAKRLRSDIVAAVIKCPTKNLDVIFKMSPHTTKLPTKLPTTRLRSAKSAVALAKKRVGRKEPEGSPLRVRLTKLQERLEKLSEAWLSSKNLRVDADNAKRFFARDVAFCLRGVLPLPSGNTFASAHDPASAPQDIVGDHRRKTKNEKRKTSHILVVALQIWIHSAAHSDRFYMGAAPILLAHRASRGYRNLRFRRYCKKQKLIVEIADFVAPREKSAKVLVGFGDWKGLGATPISRRTCGPLQAIRFELRSRENVIMEDIDEFRTSQRCSCCENHLCNMVALTHRKKQDGTGWECTEGRKRIHKILHCKSSQSGAPRQQSGGMLHCGKTWDRDVNASRNILMLTLHQVFGRERPLAFRRDAPRSSSTTPPPPPDTDMGTQTERFTKEATRNIFENLFNLLHPPTLPKSNDLQSG

SEQ ID NO: 707 - protein, 621 aa, Chlamydomonas sp.
QCIRNLHVLNIRMPCMATNVSVKLARPPMPLVSPGPSSVDGQIMARSERSGLQATNVSLTQAASKATSSSRKKNPAVVKSFSTHVCPHTNNNPTCSDSNCSCKPIFLTNIPDASKSLKSRTSDQGSTSSAQDFYEYWDSSRQDLYRQLLWLPKTGSQGLVSSSLNGFARSTPARSSFSITKTEPLKMSLEKTSCPSFKYIVADGTVEDATKSNAKPKLMTLKLKLNPTKAQKSMLAEFAGCSRFMYNKAVAARLGVGSTHKSVFRIRDRYVTNKVRGEGKMPNPYFKNRQWLLQCPKSVRQSAIKAALANIKACFSNLKAGNIKQFSAPFRRKKTELERGWAIEMDQKNVSKDGDKLFIFKDILGNMRYFGSKQLHKLMPEVNPTHDPKVHKSRFGEYFLVLSVAARDRRAERKPVHPDKVATASIDPGVRKTMVTYSPENEESFMLGQGQASDLVKLLLVHDKLQSRLNTEKTLRSKERMKIKMQMIRIRKRIFYLKKEFRDQTTNFLAARYDVLLVPQLETAKMTISAERELTTKVARQMLTLSHSVLFDRLKEKCEEYGTVFLHVLEHYTSQTCPMCGFLNKCGETYTCKNCQFTCDRDIVGAAGIFLKAVRTENPCS

SEQ ID NO: 708 - protein, 688 aa, Chlamydomonas sp.
RNVGATLYHQKKNNTHPLLMGVVQDKGDDDINISVVKKTLNSLCMDVSRHQISSRIQSMVLFIKYAVAEAYLFANFHITRCLDDGDFDVKQLPHLDRNFYYRCLLAVSTSNVRKNTLGQSFNDTMVAFDALRPVGYVKVDVRPWGQVIADVSIQMATMACNSIWANVDRVVLKYLRLKHPSLKKHFKKIVKSVVQYPESKIDTIIPEGLVHAIHIKEVVSHLRALFPLPRGKQFNTRAHLTMRLFHHVLTELGEVGRVDPKDKKTRKSHPRLFSILPRKNGFTISYVPISSMTFMKLLSMGDSPLESVSGDGRYENHTMLWRKYFNVQGLETKRSRFDNRILSDGKGVSVQMKQKGKEEVVEEGENAGYPKDANIVECNDAVGALRVGVDPGMTDIVTVASSAGRIESFSSARFSEVAGYNTSKRRTYKWNDETQDLVKSIPSPNTSNMSDLQDHVRAYLKALPILLQHRANKGYRSMRFFRYVGKQKTIEKVCDVIAPRAQTTVVGFGNWSNQGYGISRSCSGPIKEIRRCLSRRKNVLFKNVDERNTSCKCHGCFQRLVNMKADSVVWRGVCKESPIDGSITVEKQKMVVKNVKVHKVLHCRDSVKSASSNVRCGATWNRDVNAAKNLLLLLTTWMDGRERPEAFCVPSPPPKTTVSIEASVSAKPTDPPGFVSSLPCYPLGQLKC

SEQ ID NO: 709 - protein, 310 aa, Chlamydomonas sp.
SARTQWVRVGVDPGMTDIVTVASSAGRIESFSSARFSEVAGYNASKRRTYKWNDETQDLVKSIPSPNTSNMSDLQDHVRAYLKALPILLQHRANKGYRSMQFFRYVGKQKTIEKVCDVIAPRAQTTVVGFGNWSNQGYGISRSCSGPIKEIRRCLSRRKNVLFKNVDERNTSCKCHGCFQRLVNMKADSVVWRGVCKESPIDGSITVEKQKMVVKNVKVHKVLHCRDSVKSASSNVRCGATWNRDVNAAKNLLLLLTTWMDGRERPEAFCVPSPPPKTTVSIEASVSAKPTDPPGFVSSLPCYPLGQLKC

SEQ ID NO: 710 - protein, 603 aa, Chlamydomonas sp.
FPLIPRLARLTSTTLNKLNAPKTLDTSKIIRGYDVMRAIQQEVQNMEGWPESVQEYVNEVREMLSVPDGSRVYDNYGKDMDLPTMVRFNYWIQTRLEDMDARRIRLMPIFNVQRVHVRLDLKTLVNLFRHMFPNDQNIVELSKWEHVKNPDSFMLPQRPAQKKKKSCGPGEWEAYKSVLKQYDDDVKDIKATDEYRHAKGLYDTLVNARKTVAGSFFRKPPVKNGWVFDSSICTDGVSLSMQYSKTVHVLVSDLKKTCKKPRKEEGIKIAEKYDGSLKTILPDMGIVVLGVDPGRSNIATVTYLADDKNKTWTLTRGASYHKSGIKKQTRQKELRFSDMIPMWESLRENGAALSTSRTDKISAYLSNYAKFSDEWWRLALRRRESRDNLQRYIGKRKVKDSFWAGIKRCMMKELPDMKVCVAYGSAITKLKPTGPGEVAVPTGAMFASCKRIFKEDVSVTDEFKTTLMSWETGKEKERVYKIPSVCSADVKLRLGGERFGHTKSKTMPKVADCDHSGVRLYNKRKGAQEKHRRGGFATSLVDSQKSIERYPEVRGLRFSPETCIYSDRDRSSALTIARLHCMELMGLGRPLPFAHNSSVVVDE

SEQ ID NO: 711 - protein, 631 aa, Chlamydomonas sp.
SGKVLGSDDPDYINSYPIYFDQVLNYAGHTLSTVVSNNAWVPLVPRLTRLTKATLNALEAPKTIRVYDVMRVIQQEIQEMESWPESVQEYVREVRVRLKVPDGSRLYDDYGKDMDFPTMVRFNYWMQTRLEAIGARRIRLMPIFNVQRAHVRLDMKTLVNLFRHVFPKDPNIVELSKWKDVKDPDRFMLPLKPAFKKKKSCGPGEWEAYKLAQQKYDADVNDIKDTDEYRHAKGRYDTLVNARKTVAGSFFKKPPVKTVWVFDCSICTDGVSLSMQYSKTVQVRVSDLKKTSKRSRDDEGMSVSEQYDHKLKTTLPDMGIVVLGVDPGRSNIATVTYLADDKSKTWKLTRGAFYHKSGIKKQKKQQEKRFSDMIPRWESLRENGAALSTSRTDDISAYLKNYDTFSDEWWRMALLRRESRDNFQRYIGKRKAMDSFWAGIKRNMKLDHPDLRVRVAYGSAITTLKATGPGEVAVPTGSMFASCKRLFKEEVHVTDEFKTTLMSWETGAKKECVYKIPSVQITTEGQIRLGYELLGHTPLKETPKVSYRDQLAVRVYCTRKQIQEKHRRGGLAPSLVDNNSIKRYPEVRGLRFSPETSTYSDRDRSSALTIARLHCMELLGQGRPLPFCRDA

SEQ ID NO: 712 - protein, 455 aa, Chlamydomonas sp.
KPQHVGIRPRRVPFSAKTQSRSDYSGNMETREYKPELCCVPTQTLERIQYIPYTAHVNKSKKNHQGIWERFANLKKVETVSRKFGYRIVTDGFAVSILMNKPTCLTCSMPADAFYTRAHEYVTTDEGGIVSFLDNVVVAAVDPGVTDIVIVTGLNGGTRSYSSAQYYRKGLIFKSQRQTDVWNLETADIVGGIIPDRDSSSSEQIGAYARFYMGAAPILLSHRASRGYRNLRFRRYCKKQKLIVEIADFVAPRKKSAKVLVGFGDWKGLGATPISRRTCGPLQAIRFELRSRENVIMEDIDEFRTSQRCSCCENHHCNMVALTHRKKQDGTGWECTEGRKRIHKILHCKSSQSGAPRQQSGGMLHCGKTWDRDVNASRNILMLTLHQVFGRERPLAFRRDAPRSSSTTPPPPIDTDMGTQTVERFTKEATRNIFENLFNLLHPPKLPKSNDLQSG

SEQ ID NO: 713 - protein, 795 aa, Chlamydomonas sp.
LWKMATKPPTVAKLKELLKLAEVPYSSKSNKDDLVRLCEDNGLIARPPPEYKSVEKMCVVKCALKKAMSLDDEEFGKFREHVDQLVNVMSRMLRRSSLVLTFHITSLLEKGLEIPDLYNMKDTYWKDWLRIGVDGIFPDEESKISYEAVEDSIGDVIGNDDADYIKSYPIYFDQVLNYAGHTLSTVVSNNAWVPLIPRLARLTSTTLNKLNAPKTLDTSKIIRGYEVMQAIQQEVQNMEGWPESVQEYVNEVREMLSVPDGSRVYDNYGKDMDFPTMVRFNYWIQTRLEDMDARRIRLMPIFNVQRVHVRLDLKTLVNLFRHIFPNDQNIVELSKWEHVKNPDSFMLSQRPAQKKKKLCGPGEWEAYKSVMKQYDDDVKDIKATDEYRHAKGLYDTLVNARKTVAGSFFRKPPVKNGWVFDCSICTDGVSLSMQYSKTVQVLVSDLKKTCKKPRKEEGIKIAEKYDGSLKTILPDMGIVVLGVDPGRSNIATVTYLADDKNKTWKLTRGAFYHKSGIKKQTRQKELRFADMIPMWESLRENGAALSTSRTDKISAYLSNYAKFSEEWWRLALRRRESRDNLQRYIGKRKVKDSFWAGIKRCMMKELPDMKVCVAYGSAITKLKPTGPGEVAVPTGAMFASCKRIFKEDVSVTDEFKTTLMSWETGKEKERVYKIPSVCSADVKLRLDGERFGHTKSKTMPKVADCDHLGVRLYNKRKGAQEKHRRGGFAASLVDSQKSIERYPEVRGLRFSPETCIYSDRDRSSALTIARLHCMELMGLGRPLPFAHSSSVVVDE

SEQ ID NO: 714 - protein, 474 aa, Chlamydomonas sp.
DCFITCLQSWERILKRKQQKKRPRLFSILPRKSGFTISYVPISSMTLMKLLSMGDSPLESVRGDGRHENHSMLWRKYFNVQGLETKGSRFDNRILSDGKGVSVQMKHQVGKDIAGEGGGDNAGYPKDASIEDCQDASLRQGALRVGIDPGMTDIVTIASSDGGVESFSSARFSEAAGYNTSNRRTNKWNADTQDLVKSIPSPTTSSMHDMQDHVRGYLSALPTLLQHRANRGYRSMRFFRYVGKQKTIEKVCDLIAPKAQKKTIEEKVCDVIAPKAKKTVVGFGNWSNQGYGISRSCSGPVKEIRKCLSRRQNVLFKNVDERNTSCTCHGCFQKLVNMKADSVVWRRVQNEPSALIDGAPTTTTTTTTTTFEKQKTVVKNVKVHKVLHCRNSVKSASSNVRCGATWNRDVNAAKNLLLLLTTWMDGKERPAAFCVPSSSPTPKTTVSGEANVGAQPTDPPGSVSSLQLLSSGPA

SEQ ID NO: 715 - protein, 328 aa, Chlamydomonas sp.
YCIVSFRDNVVVAAVDPGVTDIVTVTGLDGGTRPYSSAQYYRKGLIFKSQRQTDVWNLETADIVGGIIPDRDSSRSEQIGAYARFYMGAAPILLAHRASRGYRNLRFRRYCKKQKLIVEIADFVAPREKSTKVLVGFGDWKGLGATPISRRTCGPLQAIRFELRSRENVIMEDVDEFRKSQRCSCCETRLCNMVALTHRKRQDGTGWECTEGRKQIHKILHCKSSQSGAPRQQSGGRLHCGKTWDRDVNASRNILMLTLHQVFGRERPLAFRRDAPRSSSKTPPTPDTDLGTQTVERFTKEATRNIFENLFNLLHPPTLPKSNDLQSG

SEQ ID NO: 716 - protein, 515 aa, Chlamydomonas sp.
YLRLKHPSLKKHFKKIVKAVVQYPESKIDTIIPEGLVHAIHIKEVVSHLRALFPLPRGKQFNTRAHLTMRLFHHVLTELGEVGRVDPKDKKTRKSHPRLFSILPRKNGFTISYVPISSMTFMKLLSMGDSPLESVSGDGRYENHTMLWRKYFNVQGLETKRSRFDNRILSDGKGVSVQMKQKGKEEVVEEGENAGYPKDANIVECKDAVGALRVGVDPRMTDIVTIASSAGRIESFSSARFSEVAGYNTSKRRTYKWNDETQDLVKSIPSPNTSNLSDLQDHVRAYLKALPILLQHRANKGYRSMRFFRYVGKQKTIEKVCDVIAPRAQTTVVGFGNWSNQGYGISRSCSGPIKEIRRCLSRRKNVLFKNVDERNTSCKCHGCFQRLVNMKADSVVWRGVCKESPIDGSITVEKQKMVVKNVKVHKVLHCRDSVKSASSNVRCGATWNRDVNAAKNLLLLLTTWMDGRERPEAFCVPSPPPKTTVSIEASVSAKPTDPPGFVSSLPCYPLGQLKC

SEQ ID NO: 717 - protein, 448 aa, Chlamydomonas sp.
QCDCSITCLQSWERVGRVDPKDKKTRKSHPRLFSILPRKNGFTILYVPISSMTFMKLLSMGDSPLESVSGDGRYENHTCCGDSTLMSKVLETKRSRFDNRILSDGKGVSVQMKQKGKEEVVEEGENAGYPKDANIVECKDAVGALRVGVDPGMTDIVTVASSAGRIESFSSARFSEVAGYNTSKRRTYKWNDETQDLVKSIPSPNTSNMSDLQDHVRAYLKALPILLQHRANKGYRSMRFFQYVGKQKTIEKVCDVIAPRAQTTVVGFGNWSNQGYGISRSCSGPIKEIRRCLSRRKNVLFKNVDERNTSCKCHGCFQRLVNMKADSVVWRGVCKESPIDGSITVDKQKMVVKNVKVHKVLHCRDSVKSASSNVRCGAIWNRDVNAAKNLLLLLTTWMDGRERPEAFCVPSPPPKTTVSIEASVSAKPTDPHGFVSSLPCYPLGQLKC

SEQ ID NO: 718 - protein, 658 aa, Chlamydomonas sp.
PRMEHVCDVCIKSSVMYKLCKMATKPPTVAKLKELLKLAEVAYSSKDKKDDIVRLCEDNGLIARPPPEYKTVEKMCVVKCALKKAMSLNDEEFGKFRGHVDQLVNVVSRMLRRSSLVLTFHVTRLMEGDLPIPNMYDMKDTYWKDWLRIGVDGVFPDEESRISYEAVKDVIGKVLGSDDPDYINSYPIYFDQVLNSAGHTLSTVVSNNAWVPLVPRLTRLTKATLKALGDPKTIRVYDVMRVIQQEIQEMESWPESVQEYVREVRVRLKVPDGSRLYDDYGKDMDFPTMVRFNYWMQTRLEAMGARRIRLMPIFNVQRAHVRLDMKTLVNLFRHVFPKDPNIVELSKWENVKDPDRFMLPLKPAVKKKKSCGPGEWEAYKLAQQKYDADVKDIKATDEYRHAKGRYDMLVNARKTVAGSFFKKPPVKTGWVFDCSICTDGVSLSMQYSKTVQVRVSDLKKTSKRSRDEEGMSVSEQYDHKLKTTLPDMGIVVLGVDPGRSNIATVTYLADDKSKTWKLTRGAFYHKSGIKKQKKQQEKRFSDMIPRWESLRENGAALSTSRKDDISAYLKNCATFSDEWWRMALRRRESRDNFQRYIGKRKAMDSFWAGIKRNMKLDHPDLRVRVAYGSAITKLKATGPGEVAVPTGSMFASCKRLFK

SEQ ID NO: 719 - protein, 730 aa, Chlamydomonas sp.
VQGACGSARQCGEPRVTAFQSGADFPCHEAHDGDLPIPNMYDMKDTYRKDWLRIGVDGVFPDEESRISYEAVKDVIGKVLGSDDPDYINSYPIYFDQVLNYAGHTLSTVVSNNAWVPLVPRLTRLTKATLKALGAPKTIRVYDVMRVIQQEIQEMESWPESVQEYVREVRVRLKVPDGSRLYDDYGKDMDFPTMVRFNYWMQTRLEDIGARRIRLMPIFNVQRAHVRLDMKTLVNLFRHVFPKDPNIVELSKWENVKDPDRFMLPLKPAVKTKKSCGLGEWEAYKLAQQKYDADVKDIKATDEYRHAKGRYDTLVNARKTVAGSFFKKPPVKTGWVFDCSICTDGVSLSMQYSKTVQVRVSDLKKTSKRSRDEEGMSVSEQYDHKLKTTLSDMGIVVLGVDPGRSNIATVTYLAEDKSKTWKLTRGAFYHKSGIKKQKKQQEKRFSDMIPRWESLRENGAALSTSRKDDISAYLKNYATFSDEWWRMALRRRESRDNFQRYIGKRKAMDSFWAGIKRNMKLDHPDLRVHVAYGSAITKLKATGPGEVAVPTGSMFASCKRLFKEEVHVTDEFKTTLMSWETGAKKECVYKIPSVQITTEGRIRLGYELLGYTPLKETPKVSYRDQLAVRVYCTRKKIQEKHRTGGLAPSLVDNNSIKRYPEVRGLRFSPETSTYSDRDRSSALTIARLHCMELLGQGRPLPFCRDACCWATKKHDGVPLQCGLLHHKVTP

SEQ ID NO: 720 - protein, 421 aa, Chlamydomonas sp.
RETLLCTRRGLLSQGGSPFTIHDSCKADVASKNHQGIWERFANLKIVELVSRKFGYRIVTDGFAVSILMNKPTCLTCSMPADAFSTRAHEYMTTDEGGIVSFCDNVGVEAVDPGVTDIVTVTGLNGVTRSYSSAQYYRKGLIFKSQRQTNVWNLDTADIVGVIIPDRDSSRSEQIGAYARFYMDAAPILLAHRASRGYRNLRFRRNCKKQKLIVEIADFVAPREKSTKVLVGFGDWKGLGATPISGRTCGPLQAIRFELRSRENVIMEDVDEFRTSQRCSCCETRLCNMVALTHRKKQDGTGWECTEGRKRIYKILHCKSSQSGAPRQQSGGRLHCGKTWDRDVNASRNILMLTVFGRERPLAFRQDAPRSSSKTPPTPDTDLGTQAVERFTKEATRNIFENLFNLLHPPTLPKSNDLQSG

SEQ ID NO: 721 - protein, 224 aa, Chlamydomonas sp.
TQGPHRTQVRCAHGSNVPARQRWCVTSIQRNTSHDLVLPRIRRERRTLQSAEQASDLVKLLLVHDKLQSRLDTEKTLRSKERMKMKKQMIRIRKRFFYLKKEFRDQTTNFLAARYDVLLVPQLETAKMTISAERELTTKVARQMLTLSHSVLFNRLKEKCEEYGTVFLHVLEHYTSQTCPLCGFLNKCGGDTYTCKNCQFTCDRDIVGAAGIFLKAVRTENPCS

SEQ ID NO: 722 - protein, 293 aa, Chlamydomonas sp.
LPIKSKTWKLTRGAFYHKSGIKKQKKQQEKRFSDMIPGWESLRENGAALSTSRKDDISAYLKNYATFSDEWWRLALRRRESRDNLQRYIGKRKVMDSFWAGIKRNMKLDHPDLRVRVAYGSAIKTMKATGPGEVAVPTGSMFASCKRLFKEEVRVTDEFKTTLMSWETGAKKECVYKIPSVQITTEGQIRIGYELLGHTPLKETPKVSDRDQLAVRVYCTRKKIQEKHRRGGLAPSLVDNKSIERYPEVRGLRFSPETSTYSDRDRSSALTIARLHCMELLGQGRPLPFCRDA

SEQ ID NO: 723 - protein, 618 aa, Chlamydomonas sp.
QCIRNLHVLNIRMPCMATNASVKLARPPMPLVSPGPSSVDGRIMARSERSGLRATNVSLTQAASKATSSSRKKNPAVVTSFSTHVCPHTNNNPTCSDSNCSCKPIFLTNIPDACKSMTSDQGSTSSAQDFYEYWDSSRQDLYRQLLWLPKKGSQGLVSSSLNGFARSNPVRSSFSITKTEPLKTSLENTSCPSFKYIVADGTVEDATKSNAKPKLRTLKLKLNPTKAQKSMLAEFAGCSRFMYNKAVAARLGVGSTHKSVFRIRDRYVTNKVKGEGKMPNPYFKNRQWLLQCPKSVRQSAIKAALANIKACFSNLKAGNIKQFSAPFRRKKTELERGWAIEMDQHNISKDGDKLFIFKDTLGNMRYFGRKQLQKLMPEKIPTHDPKVQKSGFGEYFLVLSVAARDRREERKPVHPGKVATASIDPGVRKTMVTYSPENEESFMLGKGQASDLVKLLLVHDKLHSRLDTEKTLRSKERMKIKMQMIRIRKRIFYLKKEFRDQTTNFLAARYDVLLVPQLETAKMTISAERELTTKVARQMLTLSHSVLFNRLKEKCEEYGTVFLHVLEHYTSQTCPMCGFLNKCGETYTCKNCQFTCDKDIVGAAGIFLKAVRTENPCS

SEQ ID NO: 724 - protein, 391 aa, Chlamydomonas sp.
MYDIAGSFFKKPPVKTGWVFDCSICTDEVSLSMQYSKTVQVRVSDLKKTSKRSRDEEGMSVSEQYDHKLKTTLPDMGIVVLGVDPGRSNIATVTYLADDKSKTWKLTRGAFYHKSGIKKQKKQQEKRFSDMIPRWESLRENGAALSTSRKDDISAYLKNYATFSDEWWRMALRRRESRDNFQRYIGKRNAMDSFWAGIKRNMKLDHPDLRVRVAYGSAITKLKATGPGEVAVPTGSMFASCKRLFKEEVRVTDEFKTNLMSWETGAKKECVYKIPSVQITTEGQIRLGYELLGHTPLKETPKVSYRDQLAVRVYCTRKKIQEKHRRGGLAPSLVENNSVKGYPEVRGLRFSPETSTYSDRDRSSALTIARLHCMELLGQGRPLPFCRDACC

SEQ ID NO: 725 - protein, 549 aa, Chlamydomonas sp.
EYVNEVREMLSVPDGSRVYDNYGKDMDFPTMVRFNYWIQTRLEDMDARRIRLMPIFNVQRVHVRLDLKTLVNLFRHMFPNDQNIVELSKWEHVKNPDSFMLPQRPAQKKKKSCGPGEWEAYKSVLKQYDDDVKDIKATDEYRHAKGLYDTLVNARKTVAGSFFRKPPVKNGWVFDCSICTDGVSLSMQYSKTVQVLVSDLKKTCKNLRKEEGIKIAEKYDGSLKTILPDMGIVVLGVDPGRSNIATVTYLADDKNKTWTLTRGAFYHKSGIKKQTRQKELRFADMIPMWESLRENGAALSTSRTDKISAYLSNYAKFSEEWWRLALRRRESRDNLQRYIGKRKVKDSFWAGIKRCMMKELPDMKVCVAYGSAITKLKPTGPGEVAVPTGAMFASCKRIFKEDVSVTDEFKTTLMSWETGKEKERVYKIPSVCSADVKLRLGGERFGHTKSKTMPKVVDCDHLGVRLYNKRKGAQEKHRRGGFATSLVDSQKSIERYPEVRGLRFSPETCIYSDRDRSSALTIARLHCMELMGLGRPLPFAHSSSVVVDE

SEQ ID NO: 726 - protein, 620 aa, Chlamydomonas sp.
QCIRNLHVLNIRMPCMATTSVKLARPPMPLVSPGPSSVDGRIMARSERSGLQATNVSLTQAASKATSSSRKKNPAVVKSFSTHVCPHTNNNPTCSDSNCSCKPIFLTNIPDASKSLKSRTSDQGSTSSAQDFYEYWDSSRQDLYRQLLWLPKTGSQGLVSSSLNGFARSTPARSSFSITKTEPLKTSLEKTSCPSFKYIVADGTVKDATKSNAKPKLRTLKLKLNPTKAQKSMLAEFAGCSRFMYNKAVAARLGVGSTHKSVFRIRDRYVTNKVRGEGKMPNPYFKNRQWLLQCPKSVRQSAIKAALANIKACFSNLKAGNIKQFSAPFRRKKTELERGWAIEMDQKNVSKDGDKLFIFKDILGNMRYFGSKQLHKLMPEENPTHDPKVQKSRFGEYFLVLSVAARDRRAERKPVHPDKVATASIDPGVRKTMVTYSPENEESFMLGQGQASDLVKLLLVHDKLQSRLDTEKTLRSKERMKIKMQMIRIRKRIFYLKKEFRDQTTNFLAARYDVLLVPQLETAKMTISAERELTTKVARQMLTLSHSVLFNRLKEKCEEYGTVFLHVLEHYTSQTCPMCGFLNKCGETYTCKNCQFTCDRDIVGAAGIFLKAVRTENPCS

SEQ ID NO: 727 - protein, 703 aa, Chlamydomonas sp.
GNCPLVWYHQNNNHSLSMGVVTNNGDDDDLDIMVVKKTLNSLCMDVSRQQICSRIQSMVLVINHAVAEAYLFANFHITRCLDDLSGLGTSTTGAYLRVSISNVRNDTLDQSLKDSMVAFDALRPAGYVKVDVRPWGQVIADVSIQMATMACNSVWANVDRVVIKYLRLKHPSLKKHFKKIVKAVVQYPDSDIDKIIPAGLVHANLIKDVVRRLRDLLPLPRGKQFNTRAHLTMRLFHHVLTELGADLKEKTTKKRPRLFSILPRKSGFTISYVPISSMTLMKLLSMGDSPLESVRGDGRHENHSMLWRKYFNVQGLETKGSRFDNRILSDGKGVSVQMKHQVGKDIAGEGGGDNAGYPKDASIEDCQDAYLRQGALRVGIDPGMTDIVTIASSDGRVESFSSARFSEAAGYNTSNRRTNKWNADTQDLVKSIPSPTTSSMHDMQDHVRGYLSALPTLLQHQANRGYRSMRFFRYVGKQKTIEKVCDLIAPKAQKKTIEEKVCDVIAPKAKKTVVGFGNWSNQGYGISRSCSGPVKEIRKCLSRRQNVLFKNVDERNTSCTCHGCFQKLVNMKADSVVWRRIQNEPSALIVGAPTTTTTTFEKQKTVVKNVKVHKVLHCRNSVKSASSNVLCGATWNRDVNAAKNLLLLLTTWMDGKERPAAFCVPSSSPTPKTTVSGEANVGAQPTDPPGSVSSLQWLSSGPA

SEQ ID NO: 728 - protein, 350 aa, Chlamydomonas sp.
WTTPVSIRTWSSGDDEGMSVSEQYDHKLKTTLPDMGIVVLGVDPGRSNIATVTYLADDKSKTWKLTRGAFYHKSGIKKQKKQQEKRFSDMIPRWESLRENGAALSTSRTDDISAYLKNYATFSDEWWRMALLRRESRDNFQRYIGKRKDMDSFWAGIKRNMKLDHPDLRVRVAYGSAITTLKATGPGEVAVPTGSMFASCKRLFKEEVHVTDEFKTTLMSWETGAKKECVYKIPSVQITTEGQIRLGYELLGHTPLKETPKVSYRDQLAVRVYCTRKQIQEKHRRGGLAPSLVDNNSIKRYPEVRGLRFSPETSTYSDRDRSSALTIARLHCMELLGQGRPLPFCRDACC

SEQ ID NO: 729 - protein, 224 aa, Chlamydomonas sp.
VETTNVCVFLISLKNPMLSTHANYRKGLIFKSQRQTDVWNLETADIVGGIIPDRDSSSSEQIGAYARFYMGAAPILLAHRASRGYRNLRFRRYCKKQKLIVEIADFVAPRKKSAKVLVGFGDWKGLGATPISRRTCGPLQAIRFELRSRDNVIMEDIDEFITSQRCSCYENHLCNMVAKVVQVGNVQKDASGFIRFSTAKAVKAERHANRAVVCFTAGRLGTAM

SEQ ID NO: 730 - protein, 526 aa, Chlamydomonas sp.
RNISVKAVVQYPDSDIDKIIPAGLVHANLIKDVVRRLRDLLPLPRGKQFNTRAHLTMRLFHHVLTELGADLKEKTTKKRPRLFSILPRKSGFTISYVPISSMTLMKLLSMGDSPLESVRGDGRHENHSMLWRKYFNVQGLETKGSRFDNRILSDGKGVSVQMKHQVGKDIAGEGGGDNAGYPKDASIEDCQDASLRQGALRVGIDPGMTDIVTIASSDGRVESFSSARFSEAAGYNTSNRRTNKWNADTQDLVKSIPSPTTSSMHDMQDHVRGYLSALPTLLQHRANRGYRSMRFFRYVGKQKTIEKVCDLIAPKAQKKTIEEKVCDVIAPKAKKTVVGFGNWSNQGYGISRSCSGPVKEIRKCLSRRQNVLFKNVDERNTSCTCHGCFQKLVNMKADSVVWRRVQNEPSALIDGAPTTTTTFEKQKTVVKNVKVHKVLHCRNSVKSASSNVRCGATWNRDVNAAKNLLLLLTTWMDGKERPAAFCVPSSSPTPKTTVSGEANVGAQPTDPPGSVSSLQLLSSGPA

SEQ ID NO: 731 - protein, 688 aa, Chlamydomonas sp.
GNVGAILYHQKKKNTHPLLMGVVQDKGDDDINISVVKKTLNSLCMDVSRHQISSRIQSMVLIINHAVAEAYLFANFHITRCLDDGDFDVKQLPHLDRNFYYRCLLAVSTSNVRKDTLDQSFNDTMVAFDALRPAGYVKVDVRPWGQVIADVSIQMATMACNSVWANVDRVVIKYLRLKHLSLKKHFKKIVKAVVQYPESKIDTIIPEGLVHAIHIKEVVSHLRALFPLPRGNQFNTRAHLTMRLFHHVLTELGEVGRVDPKDKKTKKSHPRLFSILPRKNGFTISYVPISSMTFMKLLSMGDSPLESVSGDGRYENHTMLWRKYFNVQGLETKRSRFYNRILSDGKGVSVQMKQKGKEEVVEEGENAGYPKDANIVECKDAVGALRVGVDPGMTDIVTVASSAGRIESFSSSRFSEVAGYNTSKRRTYKWNDETQDLVKSIPSPNTSNMVDLQDHVRAYLKALPILLQHRANKGYRSMRFFRYVGKQKTIEKVCDVIAPRAQTTVVGFGNWSNQGYGISRSCSGPIKEIRRCLSRRKNVLFKNVDERNTSCKCHGCFQRLVNMKADSVVWRGVCKESPIDGSITFEKQKMVVKNVKVHKVLHCRDSVKSASSNVRCGATWNRDVNAAKNLLLLLITWMDGRERPEAFCVPSPPPKTTVSIEASVSAKPTDPPGFVSSLPCYPLGQLKC

SEQ ID NO: 732 - protein, 753 aa, Chlamydomonas sp.
PRMEHVCDVCIKSSVMYKLCKMATKPPTVAKLKELLKLAEVAYSSKDKKDDIVRLCEDNGLIARPPPEYKTVEKMCVVKCALKKAMSLDDEEFGKFRGHVDQLVNVVSRMLRRSSLLLTFHVTRLMEGDLPIPNMYDMKDTYWKDWLRIGVDGVFPDEESRISYESVKDVIGKVLGSDDPDHINSYPIYFDQVLNYAGHTLSTVVSNNAWVSLVPRLTRLTKATLNALGAPKTIRVYDVMRVIQQEIQEMESWPESVQEYVREVRVKLKVPDGSRLYDDYGKDMDFPTMVRFNYWMQTRLEAIGARRIRLMPIFNVQRAHVRLDMKTLVNIFRHVFPKDPNIVELSKWKNVKDPTRFMLPLKPAIKKKKSCGPGEWEAYKLAQQKYDSDVNDIKASDEYRHAKGRYDTLVNARKTVACSFFKKPPVKNGWVFDCSICTDGVSLSMQYSKTVQVRVSDLKKTSKRSRDDEGMSVSEQYDHKLKTTLPDMGIVVLGVDPGRSNIATVTYLADDKSKTWKLTRGAFYHKSGIKKQKKQQEKRFSDMIPRWESLRENGAALSTSRTDDISAYLKNYATFSDEWWRMALRRRESRDNFQRYIGKRKAMDSFWAGIKRNMKLDHPDLRVRVAYGSAITTLKATGPGEVAVPTGSMFASCKRLFKEEVHVTDEFKTTLMSWETGAKKECVYKSPSVQITTEGQIRLGYELLGHTPLKETPKVSYRDQFAVRVYCTRKQIKEKHRRGGLAPSLVENNSIKP

SEQ ID NO: 733 - protein, 590 aa, Chlamydomonas sp.
HQKKKNTHPLLMGVVQDKGDDDINISVVKKTLNSLCMDVSRHQISSRIQSMVLLINHAVAEAYLFANFHITRCLDDGDFDVKQLPHLDRNFYYRCLLAVSTSNVRKDTLGQSFNDTMVAFDVLRPAGYVKVDVRPWGQVIADVSIQMATMACNSVWANVDRVVIKYLRLKHPSLKKHFKKIVKAVVQYPESKIDTIIPEGLVHAIHIKEVVSHLRALFPLPRGKQFNTRAHLTMRLFHHVLTELGEVGRVDPKDKKTRKSHPRLFSILPRKNGFTISYVPISSMTFMKLLSMGDSPLESVSGDGRYENHTMLWRKYFNVQGLETKRSRFDNRILSDGKGVSVQMKQKGKEEVVEEGENAGYPKDANIVECKDAVGALRVGVDPGMTDIVTVASSAGRIESFSSARFSEVAGYNTSKRRTYKWNDETQDLVKSIPSPNTSNMVDLQDHVRAYLKALPILLQHRANKGYRSMRFFRYVGKQKTIEKVCDVIAPRAQTTVVGFGNWSNQGYGISRSCSGPIKEIRRCLSRRKNVLFKNVDERNTSCKCHGCFQRLVNMKADSVVWRGVCKESPIDGSITVEKQKMVVKNVKVH

SEQ ID NO: 734 - protein, 687 aa, Chlamydomonas sp.
GNCQLVWYHQNNNHSLSMGVVTNNGDDDDLNIMVVKKTFNSLCMDVSRQQICSRIQSMVLVINHAVAEAYLFANFHITRCLDDGDFDVKQLPHLDRNFYYRCILAVSISNVRNDTLDQSLKDSMVAFDALRPAGYVKVDVRPWGQVIADVSIQMATMACNSVWANVDRVVIKYLRLKHPSLKKHFKKIVKAVVQYPDSDIDKIIPAGLVHANLIKDVVRRLRDLLPLPRGKQFNTRAHLTMRLFHHVLTELGADLKEKTTKKRPRLFSILPRKSGFTISYVPISSMTLMKLLSMGDSPLESVRGDGRHENHSMLWRKYFNVQGLETKGSRFDNRILSDGKGVSVQMKHQVGKDIAGEGGGDNAGYPKDASIEDCQDASLRQGALRVGIDPGMTDIVTIASSDGRVESFSSARFSEAAGYKTSNRRTNKWNADTQDLVKSIPSPTTSSMHDMQDHVRGYLSALPTLLQQRANRGYRSMRFFRYVGKQKTIEKVCDLIAPKAQKKTIEEKVCDVIAPKAKKTVVGFGNWSNQGYGISRSCSGPVKEIRKCLSRRQNVLFKNVDERNTSCTCHGCFQKLVNMKADSVVWRRVQNEPSALIDGASTTTTTTTTFEKQKTVVKNVKVHKVLHCRNSVKSASSNVRCGATWNRDVNAAKNLLLLLTTWMDGKERPAAFCVPSSSPTPKTTVSG

SEQ ID NO: 735 - protein, 347 aa, Chlamydomonas sp.
KRKQQKKRPRLFSILPRKSGFTISYVPISSMTLMKLLSMGDSPLESVRGDGRHENHSMLWRKYFNVQGLETKGSRFDNRILSDGKGVSVQMKHQVGKDIAGEGGGDNAGYPKDASIEDCQDASLRQGALRVGIDPGMTDIVTIASSDGRVESFSSARFREAAGYNTSNRRTNKWNADTQDLVKSIPSPTTSSMHDMQDHVRGYLSALPTLLQQRANRGYRSMRFFRYVGKQKTIEKVCDLIAPKAQKTTIEKVCDVIAPKAKKTVVGFGNWSNQGYGISRSCSGPVKEIRKCLSRRQNVLFKNVDERNTSCTCHGCFQKLVNMKADSVVWRRVQNEPSALIDNNNNV

SEQ ID NO: 736 - protein, 535 aa, Chlamydomonas sp.
PCLCTTRYCRRPSKKNEKHRTFSLLPGFTLSHIPISKMAFFYMVNECHFDSCKADVASKNHQGMWERFANLKKVETVSRKFGYRIVTDGFAVSILMNKPACLTCSMPADEGGIVSFLDNVVVASVDPGVTDIVTVTGLNGGTRSYSSAQYYRKGLIFKSQRQTDVWNLETADIVGGIIPDRDSSSSEQIGAYARFYMGAAPILLAHRASWGYRNLRFRRYCKKQKLIVEIADFVAPREKSAKVLIVFGDWKGLGATPISRRTCGPLQAIRFELRSRENVIMEDIDEFRTSQRCSCCENHLYNMVALTHRKKQDGTAWECTEGRKRIHKILHCKSSQSGAPRQQSGGMLHCGKTWDRDVNASRNILMLTLHQVFGRERPLAFRRDAPRSSSTTPPPPPDTDMGTQTVERFTKEATRNIFENLFNLLHPPNVAQKQRSAVWMIIRCPTLFENNCTTNDNHVFILATGLAFRRLGLNCLPQRRLGISSRTSSTCCPPQRCQKATICSLDDYKVCPTLFENNCTVCCQICFAPLFYNRV

SEQ ID NO: 737 - protein, 238 aa, Chlamydomonas sp.
VVMRRSRLVQRWLEAIVAMRIDRSAMIWFFTSPRMSTLDCPGSLNKSNRSRLLSIKALPILLQHRANKGYRSMRFFRYVGKQKTIEKVCDVIAPRAQTTVVGFGNWSNQGYGISRSCSGPIKEIRRCLSRRKNVLFKNVDERNTSCKCHGCFQRLVNMKADSVVWRGVCKESPIDGSITVEKQKMVVKNVKVHKVLHCRDCQKRIIQCALWCNLEPRRERCQEPSSASDNVDGRERAT

SEQ ID NO: 738 - protein, 686 aa, Chlamydomonas sp.
METIINKEPPDKRTRPDRAAKIKDRKNGEENVVKCTLSWIIADKDNKDVITKVIKERVDSVSKRTYLAGVAGNRILKEVFEGVPDAQLHTVSVPSVDQNFIRQLMVGSRQAHMETRDATVERFFHNNYWFREKIEGREVIVKKKKQYVGAIARYDGDRNLYSHASKKYLTNFNNHYRVHLSTWIKKFVYSKENRILAKEFKDEHGIDETVFHRYLLYDIHSWGVKEDLIAIHSLLPERTKMLLKIQHSIIGRDEINRQWLKSVSNSAKMIRYNVFINRYLEATEDEGYAKLVNIAPIPTVKHSFITIDTDSLLGVLKDVGLVESLEKTLTNKEHWESVFDVENIRSTGKGVFTCTIDTDGVMACTHFLRAEKKKISIKDDGTAIKKQTNTLREFSESDPNVVVVANDPGRCNIAFLTWKKNKVEEKDKGGRKRKRHCEFGSKRLTRERYYVESGVFKSRGPTKKWLSNIQDCLDDLKDNSPKRTSLESFDAYVTVMVNHWDSRWGEMSKSRWGTQRLRLYGGKKRVLARFFNEVQADVGERKTIVIAYGSSKFAPGGKGELSVPTTSAFNAFRDRFKGRVAVIDEFRTTKIWHKDSTTVLQSVQSEKEGRTVRGLLWCSSTMENSKLFVNRDLNAAINIHNCFTMYPTRPGILARPKKYCKLEVVVGRTIDYKLTGSLQNAVSSEV

SEQ ID NO: 739 - protein, 803 aa, Chlamydomonas sp.
PRMEHVCDVCIKSSVMYKLCKMATKPPTVAKLKELLKLAEVAYSSKDKKDDIVRLCEDNGLIARPPPEYKTVENMCVVKCALKKAMSLDDEEFGKFREHVDQLVNVVSRMLRRSSLVLTFHVTRLMEGDLPIPNMYDMKDTYWKDWLRIGVDGVFPDEESRISYESVKDVIGKVLGSDDPDYINSYPIYFDQVLNYAGHTLSTVVSNNAWVPLVPRLTRLTKATLNALGAPKTIRVYDVMRVIQQEIQEMESWPESVQEYVRDVRVRLKVPDGSRLYDDYGNDMDFPTMVRFNYWMQTRLEAIGARRIRLMPIFNVQRAHVRLDMKTLVNLFRHVFPKDPNIVELSKWKNVKDPDRFMLPLKPAVKKKKSCGPGEWEAYKLAQQKYDADVNDIKDTDEYRHAKGRYDTLVNARKTVAGSFFKKPPVKTGWVFDCSICTDIVSLSMQYSKTVQVRVSDLKKTSKRSRDDEGMSVSEQYDHKLKTTLPDMGIVVLGVDPGRSNIATVTYLADDKSKTWKLTRGSFYHKSGIKKQKKQQEKRFSDMIPRWESLRENGAALSTSRTDDISAYLKNYATFSDEWWRMALLRRESRDNFQRYIGKRKAMDSFWAGIKRNMKLDHPDLRVRVAYGSAITTLKATGPGEVAVPTGSMFASCKRLFKEEVHVTDEFKTTLMSWETGAKKECVYKIPSVQITTEGQIRLGYELLGHTPLKETPKVSYRDQLAVRVYCTRKQIQEKHRRGGLAPSLVDNNSIKRYPEVRGLRFSPETSTYSDRDRSSALTIARLHCMELLGQGRPLPFCRDACC

SEQ ID NO: 740 - protein, 794 aa, Chlamydomonas sp.
ECSREPVCRSRLHQNVFGVQFVMENGIGESSSLVHEADQHDDVAELVDYEGEEDEECAPGRAICVVKMKLSTFIPHDWLRNKIDTLVLDMNKLLGEGYIFANFHIARLFENCIAVPPVNRNFFYRCLIAVSTNKCKGSTLGEDFESSRLLFDLLREPGQSKFDIRGNVKNQIIADLSILMATMASNHLWTNLERRITTYLKWKYPQIAKRLWSDIVAALIKCPTKNLDVIFKMSPHTTKLPTKLPTSRLRSAKSAVALAKKRVGRKEPEGSPLRVRLTKLQERLEKLSEAWLSSKNLRVDADNAKRFFAREVAFCLRGVLPLPSGNTFASRAHMTLPLYHKILSETIEEKRKTKNEKHRTFSLLPYKSGFTLSHIPISKMAFFYMVNECHFDSCKADVASKNHQGIWERFANLKKVETVSRKFGYRIVTDGFAVSILMNKPTCLTCSMPANAFSTRAHEYVTTDEGGIVSFLDNVVVAAVDPGVTDIVTVTGLNGGTRSYSSAQYYRKGLIFKSQRQTDVWNLETADIVGGIIPDRDSSSSEQIGAYARFYMGAAPILLAHRASRGYRNLRFRRYCKKQKLIVEIADFVAPREKSAKVLVGFGGWKGLGATPISRRTCGPLQAIRFELRSRENVIMEDIDEFRTSQRCSCCENHLCNMVALTHRKKQDGTGWECTEGRKRIHKILHCKSSQSGAPRQQSGGMLHCGKTWDRDVNASRNILMLTLHQVFGRERPLAFRRDAPRSSSTTPPTHPDTDMGTQTVERFTKEATRNIFENLFNLLHPPTLPKSNDLQSG

SEQ ID NO: 741 - protein, 200 aa, Chlamydomonas sp.
CSKSKEDRVVGFGNWSNQGYGISRLCSGPVKEIRKCLSRRQNVLFKNVDERNTSCTCHGCFQKLVNMKADSVVWRRVQNEPSALIDGAPTTTTTTTFEKQKTVVKNVKVHKVLHCRNSVKSASSNVRCGATWNRDVNAAKNLLLLLTTWMDGKERPAAFCVPSSSPTPKTTVSGEANVGAQPTDPPGSVSSLQLLSSGPA

SEQ ID NO: 742 - protein, 415 aa, Chlamydomonas sp.
HSATSLIKLLWVVLNTLVNAQKTVAGSFFRKPPVKNGWVFDCSICTDGVSLSMQYSKTVQVLVSDLKKTCKKPRKEEGIKIAEKYDGSLKTILPDMGIVVLGVDPGRSNIATVTYLADDKNKTWTLTRGAFYHKSGIKKQTRQKELRFADMIPMWESLRENGAALSTSRTDKISAYLSNYAKFSDEWWRLALRRRESRDNLQRYIGKRKVKDSFWAGIKRCMMKELPDMKVCVAYGSAITKLKPTGPGEVAVPTGAMFASCKRIFKEDVSVTDEFKTTLMSWETGKEKERVYKIPSVCSADVKLRLGGERFGHTKSKTMPKVADCDHLGVRLYNKRKGAQEKHRRGGFATSLVDSQKSIERYPEVRGLRFSPETCIYSDRDRSSALTIARLHCMELMGLGRPLPFAHSSSVVVDE

SEQ ID NO: 743 - protein, 760 aa, Chlamydomonas sp.
HTHQRTRRTILSVYAKTMVSSPDPPPEYKTVEKMCVVKCALKKAMSLDDEEFGKFREHVDQLVNVVSRMLRRSSLVLTFHVTRLMEGDLPIPNMYDMKDTYWKDWLRIGVDGVFPDEESRISYESVKDVIGKVLGSDDPDYINSYPIYFDQVLNYAGHTLSTVVSNNAWVPLVPRLTRLTKATLNALKAPKTIRVYDVMRVIQQEIQEMESWPESVQEYVREVRVRLKVPDGSRLYDDYGKDMDFPTMVRFNYWMQTRLESIGARRIRLMPIFNVQRAHVRLDMKTLVNLFRHVFPKDPNIVELSKWKDVKDPDRFMLPLKPAVKKKKSCGPGEWEAYKLAQQKYDADVNDIKDTDEYRHAKGRYDTLVNARKTVAGSFFKKPPVKTGWVFDCSICTDGVSLSMQYSKTVQVRVSDLKKTSKRSRDDEGMTVSEQYDHKLKTTLPDMGIVVLGVDPGRSNIATVTYLADDKSKTWKLTRGAFYHKSGIKKQKKQQEKRFSDMIPRWESLRENGAALSTSRTDDISAYLKNYDTFSDEWWRMALLRRESRDNFQRYIGKRKAMDSFWAGIKRKMKLDHPDLRVRVAYGSAITTLKATGPGEVAVPTGSMFASCKRLFKEEVHVTDEFKTTLMSWETGAKKECVYKIPSVQITTEGQIRLGYELLGHTPLKETPKVSYRDQLAVRVYCTRKQIQEKHRRGGLAPSLVDNNSIKRYPEVRGLRFSPETSTYSDRDRSSALTIARLHCMELLGQGRPLPFCRDA

SEQ ID NO: 744 - protein, 454 aa, Chlamydomonas sp.
GDAEFPDGSRVYDNYGKDMDFPTMVRFNYWIQTRLEDMDARRIRLMPIFNVQRVHVRLDLKTLVNLFRHMFPNDQNIVELSKWEHVKNPDSFMFPQRPAQKKKKSCGPGEWEAYKSVLKQYDDDVKDIKATDEYRHAKGLYDTLVNARKTVAGSFFRKPPVKNGWVFDCSICTDGVSLSMQYSKTVQVLVSDLKKTCKKPRKEEGIKIAEKYDGSLKTILPDMGIVVLGVDPGRSNIATVTYLADDKNKTWKLTRGAFYHKSGIKKQTRQKELRFADMIPMWESLRENGAALSTSRTDKISAYLSNYAKFSDEWWRLALRRRESRDNLQRYIGKRKVKDSFWAGIKRCMMKELPDMKVCVAYGSAITKMKPTGPGEVAVPTGAMFASCKRIFKEDVSVTDEFKTTLMSWETGKEKERVYKIPSVCSADVKLRLGGERFGHTKSKRCQRSLIATT

SEQ ID NO: 745 - protein, 268 aa, Chlamydomonas sp.
QEKRFSNMIPRWESLRENGAALSTSRKDDISAYLKNYATFSDEWWRMALRRRESRDNFQRYIGKRKAMDSFWAGIKRNMKLDHPDLRVRVAYGSAITKLKATGPGEVAVPTGSMFASCKRLFKEEVHVTDEFKTTLMSWETGAKKECVYKIPSVQITTEGQIRLGYELLGHTPLKETPKVSYRDQLAVRVYCTRKKIQEKHRRGGLAPSLVDNKSIKRYPEVRGLRFSPETSTYSDRDRSSALTIARLHCMELLGQGRPLPFSRDACC

SEQ ID NO: 746 - protein, 716 aa, Chlamydomonas sp.
GACGPARQCVSRMLRRSSLVLTFHITSLLEKGLEIPDLYNMKDTYWKDWLRIGVDGIFPDEESKISYEAVKDSIGDVIVNNDADYIKSYPIYFDQVLNYAGHTLSTVVSNNAWVPLIPRLARLTSTTLNKLNAPKTLDTSKIIRGYDVMQAIQQEVQNMEGWPESVQEYVNEVREMLSVPDGSRVYDNYGKDMDFPTMVRFNYWIQTRLEDMDARRIRLMPIFNVQRVHVRLDLKTLVNLFRHMFPNDQNIVELSKCIHVKNPDSFMLPQRPAQKKKKSCGPGEWEAYKSVLKQYDDDVKDIKATDEYRHAKGLYDTLVNARKTVAGSFFRKPPVKNGWVFDCSICTDGVSLSMQYSKKVQVLVSDLKKFCKNPRKEEGIKIAEKYDGSLKTILPDMGIVVLGVDPGRSNIATVTYLADDKNKKWTLTRGAFYHKSGIKKQTRQKELRFADMIPMWESLRENGAALSTSRTDKISAYLSNYAKFSEEWWRLALRRRESRDNLQRYIGKRKVKDSFWAGIKRCMMKELPDMKVCVAYGSAITKLKPTGPGEVAVPIGAMFASCKRIFKEDVSVTDEFKTTLMSWETGKEKERVYKIPSVCSADVKLRLGGERFGHTKSKTMPKVADCDHLGVRLYNKRKGAQEKHRRGGFATSLVDSQKSIERYPEVRGLRFSPETCIYSDRDRSSALTIARLHCMELMGLGRPLPFAHSSSVVVDE

SEQ ID NO: 747 - protein, 686 aa, Chlamydomonas sp.
METIVNKEPPDKRTRPDRAAKIKDRKNGEENVVKCTLSRIIADKDNKDVITKVIKERVDSVSKRTYLAGVAVNRILKEVFEGVPDAQLHTVSVPSVDQNFIRQLMVGSRQAHMETRDATVERFFHNNYWFREKIEGREVIVKKKKQYVGAIARYDGDRNLYSHASKKYLTNFNNHYRVHLSTWIKKFVYSKENRILAKEFKDEHGIDETVFHRYLLYDIHSWGVKEDLIAIHSLLPERTKMLLKIQHSIIGQDEINRQWLKSVSNSAKMIRYNVFINRYLEATEDEGYAKLVNIAPIPTVKHSFITIDTDGLLGVLKDVGLVESLEKTLTNKEHWESVFDVENIRSTGKGVFTCTIDTDSVMACTHFLRAEKKKISIKDDGTAIKKQTKTLREFSESDPNVVVVANDPGRCNIAFLTWKKNKVEEKDNGGRKRKRHCEFGSKRLTRERYYVESGVFKSRGPTKKWLSNIQDCLDDLKDNSPKRTSLESFDAYVTVMVNHWDSRWGEMSKSRWGAQRLRLYGGKKRVLARFFNEVQADVGERKTIVIAYGSSKFAPGGKGELSVPTTSAFNAFRDRFKGRVAVIDEFRTTKIWHKDSTTVLQSVQSEKKGRTVRGLLWCSSTMENSKLFVNRDLNAAINIHNCFTMYPTRPGILARPKKYCKLEVVVGRTIDYKLTGSLQNAVSSEV

SEQ ID NO: 748 - protein, 792 aa, Chlamydomonas sp.
KMATKPPTVAKLKELLKLAEVPYSSKSNKDDLVRLCEDNGLIARPPPEYKTVEKMCVVKCALKKAMSLDDEEFGKFREHVDQLVNVVSRMLRRSSLVLTFHITSLLEKGLEIPDLYNMKDTYWKDWLRIGVDGIFPDEESKISYEAVKDSIGDVIGNDDADYIKSYPIYFDQVLNYAGHTLSTVVSNNAWVPLIPRLARLTSTTLNKLNAPKTLDTSKIIRGYDVMQAIQQEVQNMEGWPESVQEYVNEVREMLSVPDGSRVYDNYGKDMDFPTMVRFNYWIQTRLEDMDARRIRLMPIFNVQRVHVRLDLKTLVNLFRHMFPNDQNIVELSKWEHVKNPESFMLPQRPAQKKKKSCGPGEWEAYKSVLKQYDDDVKDIKATDEYRHAKGLYDTLVNARKTVAGSFFRKPPVKNGWVFDCSICTDGVSLSMQYSKTVHVLVSDLKKTCKKPRKEEGIKIAEKYDGSLKTILPDMGIVVLGVDPGRSNIATVTYLADDKNKTWKLTRGAFYHKSGIKKQTRQKELRFADMIPMWESLRENGAALRTSRTDKISAYLSNYAKFSDEWWRLALRRRESRDNLQRYIGKRKVKDSFWAGIKRCMMKELPDMKVCVAYGSAITKLKPTGPGEVAVPTGAMFASCKRIFKEDVSVTDEFKTTLMSWETGKEKERVYKIPSVCSADVKLRLGGERFGHTKSKTMPKVADCDHLGVRLYNKRKGAQEKHRRGGFATSLVDSQKSIERYPEVRGLRFSPETCIYSDRDRSSALTIARLHCMELMGLGRPLPFAHSSSVVVE

SEQ ID NO: 749 - protein, 405 aa, Chlamydomonas sp.
IISYLSTIVKKKISLNSLKLWSFANLKKVETVSRKFGYRIVTDGFAVSILMNKPTCLTCSMPADAFSTRAHEYVTTDEGGIVSFLDNVVVAAVDPGVTDIVTVTGLNGGTRSYSSAKYYRKGLIFKSQRQTDVWNLETADIVGGIIPDRDSSSSEQIGAYARFYMGAAPILLAHRASRGYRNLRFRRYCKKQKLIVEIADFVAPRKKSAKVLVGFGDWKGLGATPISRRTCGPLQAIRFELRSRENVIMEDIDEFRTSQRCSCCENHLCNMVALTHRKKQDGTGWECTEGRKRIHKILHCKSSQSGAPRQQSGGMLHCGKTWDRDVNASRNILMLTLHQVFGRERPLAFRRDAPRSSSTTPPPDTDMGTQTVDRFTKEATRNIFENLFNLLHPPTLPKSNDLQSG

SEQ ID NO: 750 - protein, 615 aa, Chlamydomonas sp.
QCIRNLHVLNIRMPCMATNASVKLARSPMPVVSPGPSSVDGRIMARSGLQATNVSLTQAASKATSSSRKKKPAVVKSFSTHVCPHTNNNPTCSDSNCSCKPIFLTNIPDASKSRTSDQGSTSSAQDFYEYWDSSRQDLYRQLLWLPKTGTQGLVSSSFNGFAHSTPTRSSFSITKTEPLKTSLEKTSCPSFKYIVTDGTVEDATKSNAKPKLRTLKLKLNPTKAQKSMLAEFAGCSRFMYNKAVAARLGVGSTHKSVFRIRDRYVTNKVRGKGKMPNPYFKNRQWLLQCPKSVRQSAIKSALANIKACFSNLKVGNIKQFSAPFRRKKTELERGWVIEMDQKNVSKDGDKLFIFKEILGNMRYFGSKQLHKLMPEENPTHDPKVQKSRFGEYFLVLSVAARDRRAERKPVNPDKVATASIDPGVRKTMVTYSPENEESFMLGQGQASDLVKLLLVHDKLQSRLDTEKTLRSKERMKIKKLMIRIRKTIFYLKKEFRDQTTNFLAARYDVLLVPQLETAKMTISAERELTTKVARQMLTLSHSVLFNRLKEKCEEYGTVFLHVLEHYTSQTCPMCGFLNKCGETYTCKNCQFTCDRDIVGAAGIFLKAVRTENPCS

SEQ ID NO: 751 - protein, 810 aa, Chlamydomonas sp.
SSFSSLPESCLRGACFPCRIKSSVMYKLCKMATKPPTVAKLKELLKLAEVAYSSKDKKDDIVRLCEDNGLIARPPPEYKTVEKMCVVKCALKKAMSLDDEEFGKFREHVDQLVNVVSRMLRRSSLVLTFHVTRLMEGDLPIPNMYDMKDTYWKDWLRIGVDGVFPDEESRISYEAVKDVIGKVLGSDDPDYINSYPIYFDQVLNYAGHTLSTVVSNNAWVPLVPRLTRLTKATLNALKAPKTIRVYDVMRVIQQEIQEMESWPESVQEYVREVRVRLKVPDGSRLYDDYGKDMDFPTMVRFNYWMQTRLESIGARRIRLMPIFNVQRAHVRLDMKTLVNLFRHVFPKDPNIVELSKWKDVKDPDRFMLPLKPAVKKKKSCGPGEWEAYKLAQQKYDADVNDIKDTDEYRHAKGRYDTLVNARKTVAGSFFKKPPVKTGWVFDCSICTDGVSLSMQYSKTVQVRVSDLKKTSKRSRDDEGMSVSEQYDHKLKTTLPDMGIVVLGVDPGRSNIATVTYLADDKSKTWKLTRGAFYHKSGIKKQKKQQEKRFSDMIPRWESLRENGAALSTSRTDDISAYLKNYDTFSDEWWRMALLRRESRDNFQRYIGKRKAMDSFWAGIKRNMKLDHPDLRVRVAYGSAITTLKATGPGEVAVPTGSMFASCKRLFKEEVHVTDEFKTTLMSWETGAKKECVYKIPSVQITTEGQIRLGYELLGHTPLKETPNVSYRDQLAVRVYCTRKQIQEKHRRGGLAPSLVDNNSIKRYPEVRGLRFSPETSTYSDRDRSSALTIARLHCMELLGQGRPLPFCRDA

SEQ ID NO: 752 - protein, 697 aa, Chlamydomonas sp.
HVRCLQTRSLRGHEYVTTDEGGIVSFLDNVVVAAVDPGVTDIVTVTGLNGGTRSYSSAQYYRKGLIFKSQRQTDVWNLETADIVGGIIPDRDSSSSEQIGAYARFYMGAAPILLAHRASRGYRNLRFRRYCKKQKLIVEIADFVAPRKKSAKVLVGFGDWKGLGATPISRRTCGPLQAIRFDLRSRENVIMEDIDEFRTSQRCSCCENHLCNMVALTHRKKQDGTGWECTEGRKRIHKILHCKSSQSGAPRQQSGGMLHCGKTWDRDVNASRNILMLTLHQVFGRERPLAFRRDAPRSSSTTPPPDTDMGTQTVERFTKEATRNIFENLFNLLHPPTLPKSNDLDAVWMIIKFPTLFKNNCMHRKKKLKCLDLFSGIGGNALALRSICKTIAYCEIDPFARDVLEANMKRKNLDKAPIFEDVTTLKAVDVPELPDVITASFPCQDISSAGKGAGITGEHSGLYKHIFRLVKEFRRHRNHRISVIVMENSPMIKNRGLEKIESDLRSLGFRFQSVYRKASDFGARHERRRWCMVAIDKQSDLDLPCTYFRHNFDNLDNIPVLLKREGKASANFIRYGALGNAVVPKFIASVWDELICSVPFDSQDINRYPLLSYNTPHVTATRRLWPTPLYSRQQWTMRPFIRVGRREWSNMANRVFHEEGVMRKYNYNDANQAYHTYIINPEWVEALMGYPTGWTGT

SEQ ID NO: 753 - protein, 397 aa, Chlamydomonas sp.
TPEKTVAGSFFRKPPVKNGWVFDCSICTDGVSLSMQYSKTVQVLVSDLKKTCKKPRKEEGIKIAEKYDGSLKTILPDMGIVVLGVDPGRSNIATVTYLADDKNKTWTLTRGEFYHKSGIKKQTRQKELRFADMIPMWESLRENGAALSTSRTDKISAYLSNYAKFSDEWWRLALRRRESRDNLQRYIGKRKVKDSFWAGIKRCMMKELPDMKVCVAYGSAITKLKPTGPGEVAVPTGTMFASCKRIFKEDVSVTDEFKTTLMSWETGKEKERVYKIPSVCSADVKLRLGGERFGHTKSKTMPKVADCDHLGVRLYNKRKGAQEKHRRGGFATSLVDSQKSIERYPEVRGLRFSPETCIYSDRDRSSALTIARLHCMELMGLGRPLPFAHSSSVVVDE

SEQ ID NO: 754 - protein, 282 aa, Chlamydomonas sp.
TFYHKSGIKKQKKQQEKRFSDMIPRWESLRENGAALSTSRTDDISAYLKNYATFSDEWWRMALRRREFRDNFQRYIGKRKAMDSFSAGIKRNMKLDHPDLRVRVAYGSAITTLKATRPGEVAVPTGSMFASCKRLFKEEVHVTDEFKTTLMSWETGAKKECVYKIPSVQITTEGQIRLGYELLGHTPLKETPKVSYRDQLAVRVYCTRKQIQEKHRRGGLAPSLVDNNSIKRYPEVRGLRFSPETSTYSDRDRSSALTIARLHCMELLGQGRPLPFCRDACC

SEQ ID NO: 755 - protein, 464 aa, Chlamydomonas sp.
CNVMTLPLYHKILSETIEEKRKTKNEKHRTFSLLPYKSGFTLSHIPISKMAFFYMVNECHFDSCKADVASKNHQGIWERFANLKKVETVSRKFGYRIVTDGFAVSILMNKPTCLTCSMPADAFSTRAHEYVTTDEGGIVSFLDNVVVAAVDPGVTDIVTVTGLNGGTRSYSLAQYYRKGLIFKSQRQTDVWNLETADIVGGIIPDRDSSSSEQIGAYARFYMGAAPILLAHRASRGYRNLRFRRYCKKQKLIVEIADFVAPREKSAKVLVGFGDWKGLGATPISRRTCGPLQAIRFELRSRENVIMEDIDEFRTSQRCSCCENHLCNMVALTHRKKQDGTGWECTEGRKRIHKILHCKSSQSGAPRQQSGGMLHCGKTWDRDVNASRKYLMLTLHQVFGRERPLAFRRDAPRRSSTTPPPPLDTDMGTQTVERFTKEATRNIFENLFNLLHPPTLPKSNDLQSG

SEQ ID NO: 756 - protein, 499 aa, Chlamydomonas sp.
RTSDQGSTSSTQDFYEYWDSSRQDLYRQLLWLPKTGSQGLVSSSLNGFARSTPTRSSFSITKTEPLKTKTSCPSFKYIVADGTVKDATKSNAKPKLRTLKLKLNPTKAQKSMLAEFAGCSRFMYNKAVAARLGVGSTHKSVFRIRDKYVTNKVRGEGKMPNPYFKNRQWLLQCPKSVRQSAIKSALANVKACFSNLKAGNIKQFSAPFRRKNTELERGWAIEMDQHNISKDGDKLFIFKDTLGNMRYFGSKQLHKLMPEENPTHDPKVQKSRFGEYFLVLSVAAMDRRAERKPVHPDKVATASIDPGVRKTMVTYSPENEESFMLGQGQASDLVKLLLVHDKLQSRLDTEKTLRSKERMKIKQQMIRIRKRFFYLKKEFRDQTTNFLAARYDVLLVPQLETAKMTISAERELTTKVARQMLTLSHSVLFNRLKDKCEEYGTVFLHVLEHYTSQTCPMCGFLNKCGGETYTCNNCQFTCDRDIVGAAGIFLKAVRTENPC

SEQ ID NO: 757 - protein, 221 aa, Chlamydomonas sp.
RYCKKQKLIVEIADFVAPREKSAKVLVGFGDWKGLGATPISRRTCGPLQAIRFELRSRENVIMEDIDEFRTSQRCSCCENHLCNMVALTHRNKQDGTGWECTEGRKRIHKILHCKSSQSGAPRQQSGGMLHCGKTWDRDVNASRNILMLTLHQVFGRERPLAFRRDAPRSSSTTPPPPPDTDMGTQTVERFTKGATRNIFENLINLLHPPTLPKSNDLQSG

SEQ ID NO: 758 - protein, 794 aa, Chlamydomonas sp.
ECSREPLCRSRLHQNVFGVQFVMDNGIGESSSLVQEADQHDDVAELVDYEGEEDEERAPGRAICVVKMKLSTFIPHDWLRNKIDTLVLDMNKLLGEGYIFANFHIARLFENGIAVPPVNRNFFYRCLIAVSTNKCKGSTLGEDFESSRLLFDLLREPGQSKVDIRGNVKNQIIADLSILMATMASNHLWTNLERRITTYLKWKYPQIAKRLRSDIVAALIKCPTKNIDVIFKMSPHTTKLPTKLPTSRLRSAKSAVALAKKRVGRKEPEGSPLRVRLTQLQERLEKLSEAWLSSKNLRVDADNAKRFFAREVAFCLRGVLPLPSGNTFASRAHMTLPLYHKILSETIEEKRTTKNEKHRTFSLLPYKSGFTLSHIPISKMAFFYMVNECHFDSCKADVASKNHQGIWERFANLKKVETVSRKFGYRIVTDGFAVSILMNKPTCLTCSMPADAFSTRAHEYVTTDEGGIVSFLDNVVVAAVDPGVTDIVTVTGLNGGTRSYSSAQYYRKGLILKSQRQTDVWNLETADIVGGIIPDRDSSSSEQIGAYAGFYMGAAPILLAHRASRGYRNLRFRRYCKKQKLIVEIADFVAPREKSAKVLVGFGDWKGLGATPISRRTCGPLQAIRFELRSRENVIMEDIDEFRTSQRCSCCENHLCNMVALTHRNKQDGTGWECTEGRKRIHKILHCKSSQSGAPRQQSGGMLHCGKTWDRDVNASRNILMLTLHQVFGRERPLAFRRDAPRSSPTTPPPPPDTDMGTQTVERFTKEATRNIFDNLFNLLHPPTLPKSNDLQSG

SEQ ID NO: 759 - protein, 794 aa, Chlamydomonas sp.
ECSREPLCRSRLHQNVFGVQFVMDNGIGESSSLVQEADQHDDVAELVDYEGEEDEERAPGRAICVVKMKLSTFIPHDWLRNKIDTLVLDMNKLLGEGYIFANFHIARLFENGIAVPPVNRNFFYRCLIAVSTNKCKGSTLGEDFESSRLLFDLLREPGQSKVDIRGNVKNQIIADLSILMATMASNHLWTNLERRITTYLKWKYPQIAKRLRSDIVAALIKCPTKNLDVIFKMSPHTTKLPTKLPTSRLRSAKSAVALAKKRVGRKEPEGSPLRVRLTKLQERLEKLSEAWLSSKNIRVDADNAKRFFAREVAFCLRGVLPLPSGNTFASRAHMTLPLYHKILSETIEEKRTTKNEKHRTFSLLPYKSGFTLSHIPISKMAFFYMVNECHFDSCKADVASKNHQGIWERFANLKKVETVSRKFGYRIVTDGFAVSILMNKPKCLTCSMPADAFSTRAHEYVTTDEGGIVSFLDNVVVAAVDPGVTDIVTVTGLNGGTRSYSSAQYYRKGLIFKSQRQTDVWNLETADIVGGIIPDRDSSSSEQIGAYARFYMGAAPILLAHRASRGYRNLRFRRYCKKQKLIVEIADFVAPREKSAKVLVGFGDWKGLGATPISRRTCGPLQAIRFELRSRENVIMEDIDEFRTSQRCSCCENHLCNMVALTHRNKQDGTGWECTEGRKRIHKILHCKSSQSGAPRQQSGGMLHCGKTWDRDVNASRNILMLTLHQVFGRERPLAFRRDAPRSSSTTPPPPPDTDMGTQTVERFTKEATRNIFENLFNLLHPPTLPKSNDLQSG

SEQ ID NO: 760 - protein, 794 aa, Chlamydomonas sp.
ECSREPVCRSRLHQNVFGVQFVMENGIGESSSLVHEADQHDDVAELVDYEGEEDGECAPGRAICVVKMKLSTFIPHDWLRNKIDTLVLDMNKLLGEGYIFANFHIARLFENGIAVPPVNRNFFYRCLIAVSTNKCKGSTLGEDFESSRLLFDLLREPGQSKVDIRGSVKNQIIADLSILMATMASNHLWTNLERRITTYLKWKYPQIAKRLRSDIVAALIKCPTKNLDVIFKMSPHTTKLPTKLPTSRLRSAKSAVALAKKRVGRKEPEGSPLRVRLTKLQERLEKLSEAWLSSKNLRVDADNAKRFFAREVAFCLRGVLPLPSGNTFASRAHMTLPLYHKILSETIEEKRKTKNEKHRTFSLLPYKSGFTLSHIPISKMAFFYMVNECHFDSCKADVASKNHQGIWERFANLKKVETVSRKFGYRIVTDGFAVSILMNKPTCLTCSMPADAFSTRAHEYVTTDEGGIVSFLDNVVVSAVDPGVTDIVTVTGLNGGTRSYSSAKYYRKGLIFKSQRQTDVWNLETADIVGGIIPDRDSSSSEQIGAYARFYMGAAPILLAHRASRGYRNLRFRRYCKKQKLIVEIADFVAPRKKSAKVLVGFGDWKGLGATPISRRTCGPLQAIRFELRSRENVIMEDIDEFRTSQRCSCCENHLCNMVALTHRKKQDGTGWECTEGRKRIHKILHCKSSQSGAPRQQSGGMLHCGKTWDRDVNASRNILMLTLHQVFGRERPLAFRRDAPRSSSTTPPPPPDTDMGTQTVERFTKEATRNIFENLFNLLHPPTLPKSNDLQSG

SEQ ID NO: 761 - protein, 801 aa, Chlamydomonas sp.
PRMEHVCDVGIKSSVMYKLCKMATKPPTVAKLKELLKLAEVAYSSKDKKDDIVRLCEDNGLIAKPPPEYKTVEKMCVVKCALKKAMSLDDEEFGKFREHVDQLVNVVSRMLRRSSLVLTFHVTRLMEGDLPIPNMYDMKDTYWKDWLRIGVDGVFPDEESRISYEAVKDVIGKVLGSDDPDYINSYPIYFDQVLNYAGHTLSTVVSNNAWVPLVPRLTRLTKATLNALKAPKTIRVYDVMRVIQQEIQEMESWPESVQEYVREVRVRLKVPDGSRLYDDYGKDMDFPTMVRFNYWMQTRLEAIGARRIRLMPIFNVQRAHVRLDMKTLVNLFRHVFPKDPNIVELSKWKDVKDPDRFMLPLKPPFKKKKSCGPGEWEACKLAQQKYDADVNDIKDTDEYRHAKGRYDTLVNARKTVAGSFFKKPPVKTGWVFDCSICTDGVSLSMQYSKTVQVRVSDLKKTSKRSRDDEGMSVSEQYDHKLKTTLPDMGIVVLGVDPGRSNIATVTYLADDKSKTWKLTRGAFYHKSGIKKKKKQQEKRFSDMIPRWESLRENGAALSTSRTDDISAYLKNYDTFSDEWWRMALLRRESRDNFQRYIGKRKAMDSFWAGIKRNMKLDHPDLRVRVAYGSAITTLKATGPGEVAVPTGSMFASCKRLFKEEVHVTDEFKTTLMSWETGAKKECVYKIPSVQITTEGQIRLGYELLGHTPLKETPNVSYRDQLAVRVYCTRKQIQEKHRRGGLAPSLVDNNSIKRYPEVRGLRFSPETSTYSDRDRSSALTIARLHCMELLGQGRPLPFCRDA

SEQ ID NO: 762 - protein, 477 aa, Chlamydomonas sp.
LDMIRRLGRPCRYRSRAHMTLPLYHKILSETIEEKRKTKNEKHRTFSLLPYKSGFTLSHIPISKMAFFYMVNECHFDSCKADVASKNHQGIWERFANLKKVETVSRKFGYRIVTDGFAVSILMNKPTCLTCSMPADAFSTRAHEYVTTDEGGIVSFLDNVVVSAVDPGVTDIVTVTGLNGGTRSYSSAKYYRKGLIFKSQRQTDVWNLETADIVGGIIPDRDSSSSEQIGAYARFYMGAAPILLAHRASRGYRNLRFRRYCKKQKLIVEIADFVAPRKKSAKVLVGFGDWKGLGATPISRRTCGPLQAIRFELRSRENVIMEDIDEFRTSQRCSCCENHLCNMVALTHRKKQDGTGWECTEGRKRIHKILHCKSSQSGAPRQQSGGMLHCGKTWDRDVNASRNILMLTLHQVFGRERPLAFRRDAPRSSSTTPPPDTDMGTQTVERFTKEATRNIFENLFNLLHPPTLPKSNDLQSG

SEQ ID NO: 763 - protein, 793 aa, Chlamydomonas sp.
KMATKSPTVAKLKELLKLAEVPYSSKSNKDDLVRLCEDNGLIARPPPEYKTVEKMCVVKCALKKAMSLDDEEFGKFREHVDQLVNVVSRMLRRSSLVLTFHITSLLEKGLDIPDLYNMKDTYWKDWLRIGVDGIFPDEESKISYEAVKDSIGDVIGNDDADYIKSYPIYFDQVLNYAGHTLSTVVSNNAWVPLIPRLARLTSTTLNKLNAPKTLDTSKIIRGYDVMQAIQQEVQNMEGWPESVQEYVNEVREMLSVPDGSRVYDNYGKDMDFPTMVRFNYWIQTRLEDMDARRIRLMPIFNVQRVHVRLDLKTLVNLFRHMFPNDQNIVELSKWEHVKNPESFMLPQRPAQKKKKSCGPGEWEAYKSVLKQYDDDVKDIKATDEYRHAKGLYDTLVNARKTVAGSFFRKPPVKNGWVFDCSICTDGVSLSMQYSKTVQVLVSDLKKTCKKPRKEEGIKIAEKYDGSLKTILPDMGIVVLGVDPGRSNIATVTYLADDKNKTWKLTRGAFYHKSGIKKQTRQKELRFADMIPMWESLRENGAALSTSRTDKISAYLSNYAKFSDEWWRLALRRRESRDNLQRYIGKRKVKDSFWAGIKRCMMKELPDMKVCVAYGSAITKLKPTGPGEVAVPTGAMFASCKRIFKEDVSVTDEFKTTLMSWETGKEKERVYKIPSVCSADVNLRLGGERFGHTKSKTMPKVADCDHLGVRLYNKRKGAQEKHRRGGFATSLVDSQKSIERYPEVRGLRFSPETCIYSDRDRSSALTIARLHCMELMGLGRPLPFSHSSSVVVDE

SEQ ID NO: 764 - protein, 799 aa, Chlamydomonas sp.
PRMEHVCDVCIKNSVMYKLCKMATKPPTVAKLKELLKLAEVAYSSKDKKDDIVRLCEDNGLIARPPPEYKTVEKMCVVKCALKKAMSLDDEEFGKFREHVDQLVNVVSRMLRRSSLVLTFHVTRLMEGDLPIPNMYDMKDTYWKDWLRIGVDGVFPDEESRISYEAVKDVIGKVLGSDDPDYINSYPIYFDQVLNYAGHTLSTVVSNNAWVPLVPRLTRLTKATLNALKAPKTIRVYDVMRVIQQEIQEMESWPESVQEYVREVRVRLKVPDGSRLYDDYGKEMDFPTMVRFNYWMQTRLESIGARRIRLMPIFNVQRAHVRLDMKTLVNLFRHVFPKDPNIVELSKWKDVKDPFMLPLKPAFKKKKSCGPGEWEAYKLAQQKYDADVNDIKDTDEYRHAKGRYDTLVNARKTVAGSFFKKPPVKTGWVFDCSICTDGVSLSMQYSKTVQVRVSDLKKTSKRSRDNEGMSVSEQYDHKLKTTLPDMGIVVLGVDPGRSNIATVTYLADDKSKTWKLTRGAFYHKSGIKKQKKQQEKRFSDMIPRWESLRENGAALSTSRTDDISAYLKNYDTFSDEWWRMALLRRESRDNFQRYIGKRKAMDSFWAGIKRNMKLDHPDLRVRVAYGSAITTLKATGPGEVAVPTGSMFASCKRLFKEEVHVTDEFKTTLMSWETGAKKECVYKIPSVQITTEGQIRLGYELLGHTPLKETPNVSYRDQLAVRVYCTRKQIQEKHRRGGLAPSLVDNNSIKRYPEVRGLRFSPETSTYSDRDRSSALTIARLHCMELLGQGRPLPFCRDA

SEQ ID NO: 765 - protein, 241 aa, Chlamydomonas sp.
NSVSFHKTHWFYKKKEQTPWTVSVAARDRRAERKPVNPDKVATASIDPGVRKTMVTYSPENEESFMLGQGQASDLVKLLLVHDKLQSRLDTEKTLRSKERMKIKKLMIRIRKTIFYLKKEFRDQTTNFLAARYDVLLVPQLETAKMTISAERELTTKVARQMLTLSHSVLFNRLKEKCEEYGTVFLHVLEHYTSQTCPMCGFLNKCGETYTCKNCQFTCDRDIVGAAGIFLKAVRTENPCS

SEQ ID NO: 766 - protein, 372 aa, Chlamydomonas sp.
VAARLGVGSTHKSVFRIRDRYVTNKVRGKGKMPNPYFKNRQWLLQCPKSVRQSAIKSALANIKACFSNLKAGNIKQFSAPFRRKKTELERGWVIEMDQKNVSKDGDKLFIFKEILGNMRYFGSKQLHKLMPEENPTHDPKVQKSRFGEYFLVLSVAARDRRAERKPVNPDKVATASIDPGVRKTMVTYSPENEESFMLGQGQASDLVKLLLVHDKLQSRLDTEKTLRSKERMKIKKLMIRIRKTIFYLKKEFRDQTTNFLAARYDVLLVPQLETAKMTISAERELTTKVARQMLTLSHSVLFNRLKEKCEEYGTVFLHVLEHYTSQTCPMCGFLNKCGETYTCKNCQFTCDRDIVGAAGIFLKAVRTENPCS

SEQ ID NO: 767 - protein, 457 aa, Chlamydomonas sp.
HQGEREEPDHSRPVYSHGHNGLNHLWTNLERRITTYLKWKYPQIAKRLRSDIVAAVIKCPTKNLDVIFKMSPHVAKLPTKLPTARLRSAKSAVALAKKRVGRKEPEVSPLRVRLTKLQARFEKLSEAWLSSKNLRVDEDNAKRFFARDVAFCLRGGLPLPSGNTFASRAHMTLPLYHKILSETIEEKRKTKNEILRTFLSLPYKSGFTLSHIPISKMAFFYMVNEYHFDSCKADVASKNHQGIWERFANLKKVETVSRKFGYRIVTDGFAVSILMNKPTCLTCSMPADSFSTRAHEYVTTDEGGIVSFRDNVVVAAVDPGVTDIVTVTGLDGGTRSYSSAQYYRKGLIFKSQRQTDVWNLETADIVGDIIPDRDSSRSEQIGAFARFYMGAAPILLAHRASRGYRNLRFRRYCKKQKLIVEIADFVAPREKSAKVLVGFGDWKGLGATPIYTLPGTS

SEQ ID NO: 768 - protein, 534 aa, Chlamydomonas sp.
NVGAILYHQKKKNTHPLLMGVVQDRGDDDINISVVKKTLNSLCMDVSRHQISSRIQSMVLLINHAVAEAHLFANFHITRCLDDGDFDVKQLPHLDRNFYYRCLLAVSTSNVRKDTLGQSFNDTMVAFDALRPAGYVKVDIRPWGQVIADVSIQMATMACNSVWANVDRVVIKYLRLKHPSLKKHFKKIVKAVVQYPESKIDTIIPEGLVHAIHIKEVVSHLRALFPLPRGKQFNTRAHLTMRLFHHVLTELREVGRVDPKDKKTKKSHPRLFSILPRKNGFTISYVPISSMTFMKLLSMGDSPLESVSGDGRYENHTMLWRKYFNVQGLETKRSRFDNRILSDGKGVSVQMKQKGKEEVVEEGENAGYPKDANIVECKDAVGALRVGVDPGMTDIVTVASSAGRIESFSSARFSEVAGYNTSKRRTYKWNDETQDLVNSIPSPNTSNMVDLQDHVRAYLKALPILLQHRANKGYRSMRFFRYVGKQKTIEKVCDVISPRAQTTVVGFGNWSNQGYGISRSCSGPIKEIRRCLTS

SEQ ID NO: 769 - protein, 555 aa, Chlamydomonas sp.
PKQHPRLPHRAGKKKPAVVKSFSTHVCPHTNNNPTCSDSNCSCKPIFLTNIPDASKSRTSDQGSTSSAQDFYEYWDSSRQDLYRQLLWLPKTGSQGLVSSSLNGFARSTPARSSFSITKTEPLKTSLDKTSCPSFKYIVADGTVEDATMSNAKPKLRTLNPIKDQKSMLAEFAGCSRFMYNKAVAARLGVGSTHKSVFRIRDRYVTNKVRGEGKMPNPYFKNRQWLLQCPKSVRQSAIKAALANIKACFSNLKAGNIKQFSAPFRRKKTELERGWAIEMDQKNISKDGDKLFIFKDILSNMRYFGSKQLHKLMPEENPTHDPKVQKSRFGEYFLVLSVAARDRRAERKPVHPDKVATASIDPGVRKTMVTYSPENEESFMLGQGQASDLVKLLLVHDKLQSRLDTEKTLRSKERMKIKKQMIRIRKRIFYLKKEFRDQITNFLAARYDVLLVPQLETAKMTISAERELTTKVARQMLTLSHSVLFNRLKEKCEEYGTVFLHVLEHYTSQTCPMCGLLNKCGETYTCKNCQFTCDRDIVGAAGIFLKAVRTENPCS

SEQ ID NO: 770 - protein, 621 aa, Chlamydomonas sp.
QCIRNLHVLNIRMPCMATNASVKLARPPMPLVSPGPSSVDGRIIARSERSGLQATNVSLTQAASKATSSSRKKNPAVVKSFSTHVCPHTNNNPTCSDSNCSCKPIFLTNIPDVSKSLKSRTSDQGSTSSAQDFYEYWDSSRQDLYRQLLWLPKTGSQGLVSSSLNGFARSTPARSSFSITKTEPLKTSLDKTSCQSFKCIVADGTAEEAIKSNAKPKLRTLKLKLNPTKDQKSMLAEFAGCSRFMYNKAVAARLGVGSTHKSVFRIRDRYVTNKVRGKGKMPSPYFKNRQWLLQCPKSVRQSAIKAALANIKACFSNLKAGNIKQFSAPFRRKKTELERGWVIEMDQKNISKDGDKLFIFKDILGNMRYFGSKQLHKLMPEENPTHDPKVQKSRFGEYFLVLSVAARDRRAERKPVHPDKVAIASIDPGVRKTMVTYSPENEESFMLGQGQASDLVKLLLVHDKLQSRLDTEKTLRSKERMKIKKQMIRIRKRIFYLKKEFRDQTTNFLAACYDVLLVPQLETAKMTISAERELTTKVARQMLTLSHSVLFNRLKEKCEEYGTVFLHVLEHYTSQTCPMCGLLNKCGETYTCKNCQFTCDRDIVGAAGIFLKAVRTENPCS

SEQ ID NO: 771 - protein, 620 aa, Chlamydomonas sp.
LETSAQRNHKSAPYHVSQPVKIGREAGTPIDRKNGEGNVVKCTLSRIIADKDNKDVITKVIKERVDSLSKRTYLAGVAVNRILKEVFEGVPDAQLHTVSVHSVDQNFIRQLMVGSRQAHMETRDDDTVERFFHNNYWFREKIEGREVIVKKKKQYVGAIARYDGDRNLYSHASKKYLTNFNNHYRVHLSTWIKKFVYSKENRILAKEFKDEHGIDETVFHRYLLYDIHSWGVKEDLIAIHSLLPERTKMLLKIQHSIIGRDEINRQWLKSVSNSAKMIRYNVFINRYLEATEDEGYAKLVNIAPIPTVKHSFITIDTDGLLGVLKDVGLVESLEKTLTNKEHWESVFDVENIRSTGKGVFTCTIDTDGVMACTHFLRAEKKKISIKDDRTAIKKQTKTLRECSESDPNVVVVANDPGRCNIAFLTWKKNKVEEKDKGGRKRKRHCEFGSKRLTRERYYVESGVFKSRGPTKKWLSNIQDCLDDLKDNSPKRTSVESFDAYVTVMVNHWDSRWGEMSKSRWGAQRLRLYGGKKRVLARFFNEVQADVGERKTIVIAYGSSKFAPGGKGELSVPTTSAFNAFSDRFKGRVAVIDEVRTTKIWHKDSTTVLQSVQSEKEGRTV

SEQ ID NO: 772 - protein, 688 aa, Chlamydomonas sp.
RNVGTILYHQNKKNTHPLLMGVVQDKGDDDINFSVVKKTLNSLCMDVSRHQISSRIQSMVLLINHAVAEAYLFANFHITRCLDDGDFDVKQLPHLDRNFYYRCLLAVSTSNVRKDTLGQSFNDTMVAFDALRPAGYVKVDVRPWGQVIADVSIQMATMACNSIWANVDRVVIKYLRLKHPSLKKHFKKIVKAVVQYPESKIDTIIPEGLVHAIHIKEVVSHLRALFPLPRGKQFNTRAHLTLRLFHHVLTELGEVGRVDLKDKKTRKSHPRLFSILPRKNGFTISYVPISSMTFMKLLSMGDSPLESVSGDGRYENHTMLWRKYFNVQGLETKRSRFDNRILSDGKGVSVQMKQKGKEEVVEEGENAGYPKDANIVECNDAVGALRVGVDPGMTDIVTVASSAGRIESFSSARFSEVAGYNTSKRRTYKWNDETQDLVKSIPSPNTSNMSDLQDHVRAYLKALPILLQHRANKGYRSMRFFRYVGKQKTIEKVCDVIAPRAQTTVVGFGNWSNQGYGISRSCSGPIKEIRRCLSRRKNVLFKNVDERNTSCKCHGCFQRLVNMKADSVVWRGVCKESPIDGSITVEKQKMVVKNVKVHKVLHCRDSVKSASSNVGCGATWNRDVNAAKNLLLLMTTWMDGRERPEAFCVPSPPPKTTVSIEASVSAKPTDPPGFVSSFPCYPLGQLKC

SEQ ID NO: 773 - protein, 686 aa, Chlamydomonas sp.
METIVNKEPPDKRTRPDRAAKIKDRKNGEENVVKCTLSRIIADKDNKDVIIKVIKERVDSVSKRTYLAGVAVNRILKEVFEGVPDAQLHNVSVPSVDQNFIRQLMVGSRQAHMETRDATVERFFHNNYWFREKIEGREVIVKKKKQYVGAIARYDGDRNLYIHASKKYLTNFNNHYRVHLSTWIKKFVYSKENRTLAKEIKDEHGIDETVFHRYLLYDIHSWGVKEDLIAIHSILPERTKMLLKIQHSILGRDEINRQWLKSVSNSAKMIRYNVFINRYLEATEDEDYAKLVNIAPIPTVKHAFITIDTDGLLGVLKDVGLIESLEKTLTNKEHWESVFDVENIRSTGKGAFTCTIDTDGVMACTHFFRAEKKNISIKDDGTAIKKQTKTLREFSESDPNVVVVANDPGRCNIAFLTWKKNKVEEKDNGGRKRKRHCEFGSKRLTRERYYVESGVFKSRGPTKKWLSNIQDCLDDLKDNSPKRTSLVSFDAYVTVMVNHWDSRWGEMSKSRWGAQRLRLYGGKKRVLARFFNEVQEDVGERKTIVVAYGSAKFAPGGKGELSVPTTSAFKAFSYRFKGRVAVIDEFRTTKIWHKDSTTVLQSVQSEKEGRTVRGLLWCSSTMENSKLFVNRDLNAAINIHNCFTMYPIRPGILARPKKYCKLEVVVGRKIDYKLTGSLQNAVSSEV

SEQ ID NO: 774 - protein, 330 aa, Chlamydomonas sp.
PGPPDRYTLHIMNGCVDATVFRRLRVHGAAALACKNKTWTLTRGAFYHKSGIKKQTRQKELRFADMIPMWESLRENGAALSTSRTDKISAYLSNYAKFSDKWWRLALRRRESRDNLQRYIGKRKVKDSFWAGIKRCMMKELPDMKVCVAYGSAITKLKPTGPGEVAVPTGAMFASCKRIFKEDVSVTDEFKTTLMSWETGKEKERVYKIPSVCSADVKLRLGGERFGHSKSKTMPKVADCDHTGVRLYNKRKGAQEKHRRGGFATSIVDSQKSIERYPEVRGLRFSPETCIYSDRDRSSALTIARLHCMELMGLGRPLPFAHSSSVVVDE

SEQ ID NO: 775 - protein, 688 aa, Chlamydomonas sp.
RNVGTILYHQKKKNTHPLLMGVVQDKGDDDINISVVKKTLNSLCMDVSRHQISSRIQSMVLLINHAVAEAYLFANFHITRCLDDGDFDVKQLPHLDRNFYYRCLLAVSTSNVRKDTLGQSFNDTMVAFDALRPAGYVKVDVRPWGQVIADVSIQMATMACNSVWANVDRVVIKYLRLKHPSLKKHFKKIVKAVVQYPESKIDTIIPEGLVHAIHIKEVVSHLRALFPLPRGKQFNTRAHLTMRLFHHVLTELGEVGRVDPKDKKTRKSHPRLFSILPRKNGFTISYVPISSMTFMKLLSMGDSPLESVSGDGRYENHTMLWRKYFNVQGLETKRSRFDNRILSDGKGVSVQMKQKGKEEVVEEGENAGYPKDVNIVECKDAVGALRVGVDPGMTDIVTVASSAGRIESFSSARFSEVAGYNTSKRCTYKWNDETQDLVKSIPSPNTSNMSDLQDHVRAYLKALPILLQHRANKGYRSMRFFRYVGKQKTIEKVCDVIAPRAQTTVVGFGNWSNQGYGISRSCSGPIKEIRRCLSGRKNVLFKNVDERNTSCKCHGCFQRLVNMKADSVVWRGVCKESPINGSITVEKQKMVVKNVKVHKVLHCRDSVKSASSNVRCGATWNRDVNAAKNLLLLLTTWMDGRERPEAFCVPSPPPKTTVSIEASVSAKPTDPPGFVSSLPCYPLGQLKC

SEQ ID NO: 776 - protein, 303 aa, Chlamydomonas sp.
YPLKPDTGPWFTTRSLHRWVNADQAGKSKRLKRKRKELSMLLRSTISNNIAENPFITCKDLVGIICKSCNVRLSISTASRHIKQCGFSRKKAFPPVDFVAPREKSAKVLVGFGDWKGLGATPISRRTCGPLQAIRFELRSRGNVIMEDVDEFRTSQRCSCCENRLSNMVALTHRKKQDGTGWECTEGRKRIHKILHYKSSQSGAPRQQSGGRLHCGKTWDRDVNASRNILMLTLHQVFGRERPLAFRRDAPRSSSKTPPPPDTDMGTQTVERFTKETTRNIFENLFNLLHPPTLPKRNDLQSG

SEQ ID NO: 777 - protein, 548 aa, Chlamydomonas sp.
SVQEYVREVRVRLKVPDGSRLYDDYGKDMDFPTMVRFNYWMQTRLEAIGARRIRLMPIFNVQRAHVRLDMKTLVNLFRHVFPKDPNIVELSKRKNVKDPDRFMLPLKPAFKKKKSCGSGEWEAYKLSQQKYDADVNDIKATDEYRHAKGRYDTLVNAQKTVAGSFFKKPPVKTGWVFDCSICTDGVSLSMQYSKTVQVRVSDLKKTSKRSRDDEGMSVSEQYDHKLKTTLPDMGIVVLGVDPGRSNIATVTYLADDKSKTWKLTRGAFYHKSGIKKQKKQQEKRFSDMIPRWESLRENGAALSTSRKDDISAYLKNYATFSGEWWRMVLRRRESRDNFQRYIGKRKAMDSFWAGIKRNMKLDHPDLRVRVAYGSAITTLKATGPGEVAVPTGSMFASCKRLFKEEVHVTDEFKTTLMSWETGAKKECVYKIPSVQITTEGQIRLGYELLGHTPLKETPKVSYRDQLAVRVYCTRKQIQEKHRRGGLAPSLVDNNSIKRYPEVRGLRFSPETSTYSDRDRYSALTIARLHCMELLGQGRPLPFCRDACC

SEQ ID NO: 778 - protein, 794 aa, Chlamydomonas sp.
ECSREPVCRSRLHQNVFGVQFVMENGIGESSSLVHEADQHDDVAELVDYEGEEDGECAPGRAICVVKMKLSTFIPHDWLRNKIDTLVLDMNKLLGEGYIFANFHIARLFENGIAVPPVNRNFFYRCIIAVSTNKCNGSTLGEDFESSRLLFDLLREPGQSKVDIRGRVKNQIIADLSILMATMASNHLWTNLERRITTYLKWKYPQIAKRLRSDIVAALIKCPTKNLDDIFKMSPHTTKLPTKLPTSRLRSAKSAVALAKKRVGRKEPEGSPLRVRLTKLQDRLEKLSEAWLSSKNLRVDADNAKRFFAREVAFCLRGVLPLPSGNTFASRAHMTLPLYHKILSETIEEKRKTKNEKHRTFSLLPYKSGFTLSHIPISKMAFFYMVNECHFDSCKADVASKNHQGIWERFANLKKVETVSRKFGYRIVTDGFAVSILMNKPTCLTCSMPADAFSTRAHEYVTTDEGGIVSFLDNVVVAAVDPGVTDIVTVTGLNGGTRSYSSAQYYRKGLIFKSQRQTDVWNLETADIVGGIIPDRDSSSSEQIGAYARFYMGAAPILLSHRASRGYRNLRFRRYCKKQKLIVEIADFVAPRKKSAKVLVGFGDWKGLGATPISRRTCGPLQAIRFELRSRENVIMEDIDEFRTSQRCSCCENHLCNMVALTHRKKQDGTGWECTEGRKRIHKILHCKSSQSGAPRQQSGGMLHCGKTWDRDVNASRNILMLTLHQVFGRERPLAFRRDAPRSSSTTPPPPIDTDMGTQTVERFTKEATRNIFENLFNLLHPPKLPKSNDLQSG

SEQ ID NO: 779 - protein, 801 aa, Chlamydomonas sp.
PRMEHVCDVCIKSSVMYKLCKMATKPPTVAKLKELLKLAEVAYSSKDKKDDIVRLCEDNGLIARPPPEYKTVEKMCVVKCALKKAMSLDDEEFGKFREHVDQLVNVVSRMLRRSSLVLTFHVTRLMEGDLPIPNMYDMKDTYWKDWLRIGVDGVFPDEESRISYEAVKDVIGKVLGSDDPDYINSYPIYFDQVLNYAGHTLSTVVSNNAWVPLVPRLTRLTKATLNALEAPKTIRVYDVMRVIQQEIQEMESWPESVQEYVREVRVRLKVPDGSRLYDDYGKDMYFPTMVRFNYWMQTRLEDMDARRIRLMPIFNVQRAHVRLDMKTLVNLFRHVFPKDPNIVELSKWKDVKDPDRFMLPLKPAVKKKKSCGPGEWEAYKLAQQKYDADVNDIKDTDEYRHAKGRYDTLVNARKTVAGSFFKKPPVKTGWVFDCSICTDGVSLSMQYSKTVQVRVSDLKKTSKRSRDDEGMSVSEQYDHKLKTTLPDMGIVVLGVDPGRSNIATVTYLADDKSKTWKLTRGAFYHKSGIKKQKKQQEKRFSDMIPRWESLRENGAALSTSRTDDISAYLKNYDTFSDEWWRMALLRRESRDNFQRYIGKRKAMDSFWAGIKRNMKLDHPDLRVRVAYGSAITTLKATGPGEVAVPTGSMFASCKRLFKEEVHVTDEFKTTLMSWETGAKKECVYKIPSVQITTEGQIRLGYELLGHTPLKETPNVSYRDQLAVRVYCTRKQIQEKHRRGGLAPSLVDNKSIKRYPEVRGLRFSPETSTYSDRDRSSALTIARLHCMELLGQGRPLPFCRDA

SEQ ID NO: 780 - protein, 618 aa, Chlamydomonas sp.
QCIRNLHVLNIRMPCMATNASVKLARPPMPVVSPGPSSVDGRIMARSGLQATNVSLTQAASKATSSSRKKKPAVVKSFSTHVCPHTNNNPTCSDSNCSCKPIFLTNIPDASKSLKSRTSDQGSTSSAQDFYEYWDSSRQDLYRQLLWLPKTGTQGLVSSSFNGFAHSTPTRSSFSITKTEPLKTSLEKTSCPSFKYIVTDGTVEDATKSNAKPKLRTLKLKLNPTKAQKSMLAEFAGCSRFMYNKAVAARLGVGSTHKSVFRIRDRYVTNKVRGKGKMPNPYFKNRQWLLQCPKSVRQSAIKSALANIKACFSNLKAGNIKQFSAPFRRKKTELERGWVIEMDQKNVSKDGDKLFIFKEILGNMRYFGSKQLHKLMPEENPTHDPKVQKSRFGEYFLVLSVAARDRRAERKPVNPDKVATASIDPGVRKTMVTYSPENEESFMLGQGQASDLVKLLLVHDKLQSRLDTEKTLRSKERMKIKKLMIRIRKTIFYLKKEFRDQTTNFLAARYDVLLVPQLETAKMTISAERELTTKVARQMLTLSHSVLFNRLKEKCEEYGTVFLHVLEHYTSQTCPMCGFLNKCGETYTCKNCQFTCDRDIVGAAGIFLKAVRTENPCS

SEQ ID NO: 781 - protein, 793 aa, Chlamydomonas sp.
KMATKPPTVAKLKELLKLAEVPYSSKSNKDDLVRLCEDNGLIARPPPEYKTVEKMCVVKCALKKAMSLDDEEFGKFREHVDQLVNVVSRMLRRYSLVLTFHITSLLEKGLDIPDLYNMKDTYWKDWLRIGVDGIFPDEESKISYEAVKDSIGDVIGNDDADYIKSYPIYFDQVLNYAGHTLSTVVSNNAWVPLIPRLARLTSTTLNKLNSPKTLDTSKIIRGYDVMQAIQQEVQNMEGWPESVQEYVNEVREMLSVPDGSRVYDNYGKDMDFPTMVRFNYWIQTRLEDMDARRIRLMPIFNVQRVHVSLDLKTLVNLFRHMFPNDQNIVELSKWEHVKNPDSFMLPQRPAQKKKKSCGPGEWEAYKSVLKKYDDDVKDIKATDEYRHAKGLYDTLVNARKTVAGSFFRKPPVKNGWVFDCSICTDGVSLSMQYSKTVQVLVSDLKKTCKKPRKEEGIKIAEKYDGSLKTILPDMGIVVLGVDPGRSNIATVTYLADDKNKTWTLTRGAFYHKSGIKKQTRQKELRFADMIPMWESLRENGAALSTSRTDKISAYLSNYAKFSDEWWRLALRRRESRDNLQRYIGKRKVKDSFWAGIKRCMMKELPDMKVCVAYGSAITKLKPTGPGEVAVPTGAMFASCKRIFKEDVSVTDEFKTTLMSWETGKEKERVYKIPSVCSADVKLRLGGERFGHTKSKTMPKVADCDHLGVRLYNKRKGAQEKHRRGGFATSLVDSQKSIERYPEVRGLRFSPETCIYSDRDRSSALTIARLHCMELMGLGRPLPFAHSSSVVVDE

SEQ ID NO: 782 - protein, 407 aa, Chlamydomonas sp.
ERFQQRQDDPVQRLYQSIPRGHRGRGLRQAGQHRSHPKDVGLVESLEKTLTNKEHWESVFDVENIRSTGKGVFTCTIDTDGVMACTHFLRAEKKKISIKDDGTAIKKQTKTLREFSESDPNVVVVANDPGRCNIAFLTWKKNKVEEKDKGGRKRKRHCEFGSKRLTRERYYVESGVFKSRGPTKKWLSNIQDCLDDLKDNSPKRTSLESFDAYVTVMVNHWDSRWGEMSKSRWGAQRLRLYGGKKRFLARFFNEVQADVGERKTIVIAYGSSKFAPGGKGELSVPTTSAFNAFSDRFKGRVAVIDEFRTTKIWHKDSTTVLQSVQSEKEGRTVRGLLWCSSTMENSKLFVNRDLNAAINIHNCFTMYPTRPGILARPKKYCKLEVVVGRTIDYKLTGSLQNAVSSEV

SEQ ID NO: 783 - protein, 698 aa, Chlamydomonas sp.
YQDKKRTLPPSISMGVVTNNGDDDDDLDIMVVKKTLNSLCMDVSRQQICSRIQSMVLVINHAVAEAYLFANFHITRCLDDVDFDVKQLPHLDRNFYYRCILAVSTSNVRKDTLGQSLKDSMVAFDALRPAGYLKVDVRQWGQVISDVSIQMATMACNSVWANVDRVVIKYLRFKHPSLKKHFNKIVKAVVQYPESDIDKIIPASLVHANLIKDVVRRLRDLLPLPRGKQFNTRAHLTMRLFHHVLTELGADLKEKTTKKRPRLFSILPRKSGFTISYVLISSMTLMKLLSMGDSPLESFRGDGRHENHSMLWRKYFNVQGLETKGSRFDNRILSDGKGVSVQMKHQASEDVAVDNAGYPKDAILEDCQDASLRVGVDPGMKDIVTVASSAGRVESFSSARFSEAAGYNTSNRRTNKWNVDTQDLVKSIPSPTTSSMHDMQDHVRGYLSALPTLLQHRASRGYRSMRFFRYVGKQKTIEKVCDLIAPKAQKKTIEENVCDVIAPKAQKTIVGFGNWSNQGYGISRSCSGPVKEIRKCLSRRQNVLFKNVDERNTSCTCHGCFQKLINMKADSVVWRRVQNEPPSLINGAPTTTTTIEKQKTVVKNVKIHKVLHCRNSVKSASSNVRCGATWNRDVNAAKNLLLLLTTWMDGKERPATFCVPSSSPTPKTTVSGEANVGAQPTDPPGSVSSLQLLSSGPA

SEQ ID NO: 784 - protein, 793 aa, Chlamydomonas sp.
KMATKPPTVAKLKELLKLAEVPYSSKSNKDDLVRLCEDNGLIARPPPEYKTVEKMCVVKCALKKAMSLDDEEFGKFREHVDQLVNVVSRMLRRSSLVLTFHITSLLEKGLDIPDLYNMKDTYWKDWLRIGVDGIFPDEESKISYEAVKDSIGDVIGNDDADYIKSYPIYFDQVLNYAGHTLSTVVSNNAWVPLIPRLARLTSTTLNKLNAPKTLDTSKIIRGYDVMQAIQQEVQNMEGWPESVQEYVNEVREMLSVPDGSRVYDNYGKDMDFSTMVRFNYWIQTRLEDMDARRIRLMPIFNVQRVHVRLDLKTLVNLFRHMFPNDQNIVELSKWEHVKNPDSFMLPQRPAQKKKKSCGPGEWEAYKSVLKQYDDDVKDIKATDEYRHAKGLYDTLVNARKTVAGSFFRKPPVKNGWVFDCSICTDGVSLSMQYSKTVQVLVSDLKKTCKKPRKEEGIKIAEKYDGSLKTILPDMGIVVRGVDPGRSNIATVTYLADDKNKTWTLTRGAFYHKSGIKKQTRQKELRFADMIPMWESLRENGAALSTSRTDKISAYLSNYAKFSDEWWRLALRRRESRDNLQRYIGKRKVKDSFWAGIKRCMMKELPDMKVCVAYGSAITKVKPTGPGEVAVPTGAMFASCKRIFKEDVSVTDEFKTTLMSWETGKEKERVYKIPSVCSADVKLRLGGERFGHTKSKTMPKVADCDHLGVRLYNKRKGAQEKHRRGGFATSLVDSQKSIERYPEVRGLRFSPETCIYSDRDRSSALTIARLHCMELMGLGRPLPFSHSSSVVVDE

SEQ ID NO: 785 - protein, 417 aa, Chlamydomonas sp.
VRMAGPLESTDILQFVDSKSYWCIKSYLAIHKYASSRSSLVIVGAEQATYHSSHQPEDTTLLDGANTRTHVNVVVAAVDPGVTDIVTVTGLDGGTRSYSSVQYYGKGLIFKSQRQTDVWNLKTADIVGDIIPGRDSSRSEQIGAYARFYTGAAPILLAHRASMGYRNLRFRRYCKKQKLIVEIADFVAPREKSAKVLVVFGDWKGLGATPISRRTCGPLQAIRFELRSRGNVIMEDVDEFRTSQRCSCCENRLCNMVALTHRKKQDGTGWECTEGRNRIHKILHCKSSQSGAPRQQSGGRLHCGKTWDRDVNASRNILMLTLHQVFGRERPLAFRRDAPRSSSRTPPPPNTDRRLNGLPKRLLGISSRTSSTCCTPQRFPTATICSLDDYKVCPTLFENYCITEEEENTWKRKTKTR

SEQ ID NO: 786 - protein, 688 aa, Chlamydomonas sp.
GNVGAILYHQKKKNTHPLLMGVVQDKGDDDINISVVKKTLNSLCMDVSRHQISSRIQSMVLLINHAVAEAYLFANFHITRCLDDGDFDVKQLPHLDRNFYYRCLLAVSTSNVRKDTLGQSFNDTMVAFDALRPAGYVKVDVRPWGQVIADVSIQMATMACNSVWANVDRVVIKYLRFKHPSLKKNFKKIVKAVVQYPESKIDTIIPEGLVHAIHIKEVVSHLRALFPLPRGKQFNTRAHLTMRFFHHVLTELGEVGRVDPKDKKTKKSHPRLFSILPRNNGFTISYVPISSMTFMKILSMGDSPLESVSGDGRYENHTMLWRKYFNVQGLETKRSRFDNRILSDGKGVSVQMKQKGKEEVVEEGENAGYPKDANIVECKDAVGALRVGVDPGMTDIVTVASSAGRIKSFSSARFSEVAGYNTSKRRTYKWNDETQDLVKSIPSPNTSNMVDLQDHVRAYLKALPILLQHRANKGYRSMRFFRYVGKQKTIEKVCNVIAPRAQTTVVGFGNWSNQGYGISRSCSGPIKEIRRCLSRRKNVLFKNVDERNTSCKCHGCFQRLVNMKADSVVWRGVCKESPIDGSITVEKQKMVVKNVKVHKVLHCRDSVKSASSNVRCGATWNRDVNAAKNLLLLLTTWMDGRERPEAFCVPSPPPKTTVSIEASVSAKPTDPPGFVSSLPCYPLGQLKC

SEQ ID NO: 787 - protein, 651 aa, Chlamydomonas sp.
RCEIWQGYQKMGRNIEEMFPDIPRKGCNSCLVCFPKTVYKEFACTRYQNAMYGNQRFCKIGKASDALGVSRTVLRRWADNGTIRTPGNQRLFDTSSIQGYLIEQEKKPAVVKSFSTHVCPHTNNNPTCSDSNCSCKPIFLTNIPDASKSRTSDQGSTSSAQDFYEYWDSSRQDLYRQLLWLPKTGTQGLVSSSFNGFAHSTPTRSSFSITKTEPLKTSLEKTSCPSFKYIVTDGTVEDATKSNAKPKLRNLKLKLNPTKAQKSMLAEFAGCSRFMYNKAVAARLGVGSTHKSVFRIRDRYVTNKVRGEGKMPNPYFKNRQWLLQCPKSVRQSAIKAALANIKACFSNLKAGNIKQFSAPFRRKKTELERGWAIEMDQKNVSKDGDKLFIFKDILGNMRYFGSKQLHKLMPEENPTHDPKVQKSRFGEYFLVLSVAARDRRAERKPVHPDKVATASIDPGVRKTMVTYSPENEESFMLGQGQASDLVKLLLVHDKLQSRLDTEKTLRSKERMKIKKHMIRIRMRIFYLKKEFRDQTTNFLAARYDVLLVPQLETAKMTISAERELTTKVARQMLTLSHSVLFNRLKEKCAEYGTVFLHVLEHYTSQTCPMCGFLNKCGETYTCKNCQFTCDRDIVGAAGIFLKAVRTENPCS

SEQ ID NO: 788 - protein, 208 aa, Chlamydomonas sp.
ILIRNLKKTAGRQERPLMVNHWDSRWGEMSKSRWGAQRLRLYGGKKRVLARFFNEVQADVGERKTIVVAYGSAKFAPGGKGELSVPTTSAFKAFSDRFKGRVAVIDEFRTTKIWHKDSTTVLQSVHSEKEGRTVRGLLWCSSTMENSKLFVNRDLNAAINIHNCFTMYPTRPGILARPKKYCKLEVVVGRTIDYKLTGSLQNAVSSEV

SEQ ID NO: 789 - protein, 524 aa, Chlamydomonas sp.
ANVDRVVIKYLRLKHPSRKKHFKKIVKAVVQYPESKIDTIIPEGLVHAIHIKEVVSHLRALFPLPRGNQFNTRAHLTMRLFHHVLTELGEVGRVDPKDKKTRKSHPRLFSILPRKNGFTISYVPISSMTFVKLLSMGDSPLESVSGDGRYENHTMLWRKYFNVQGLETKRARFDNRILSDGEGVSVQMKQKGKEEVVEERENAGYPKDANIVECKDAVGALRVGVDPGMTDIVTVASSAGRIESFSSARFSEVAGYNTSKRRTCKWNDETQDLVKSIPSPNTSNMSDLQDHVRAYLKALRILLQHRANKGYRSMRFFRYVGKQKKIEKVCDVIAPRAQTTVVGFGNWSNQGYGISRSCSGPIKEIRRCLSRRKNVLFKNVDERNTSCKCHGCFQRLVNMKADSVVWRGVCKESPIDGSITVEKQKMVMKNVKVHKVLHCRDSVKSASSNVRCGATWNRDVNAAKNLLLLLTTWMDGRERPEAFCVPSPPPKTTVSIEASVSAKPTDPPGFVSSFPCYPLGQLKC

SEQ ID NO: 790 - protein, 267 aa, Chlamydomonas sp.
YPLKPDTLHLRSLLPPSTGKQFNTRAHLTMRLFHSVLAELVSSSSTEPNRLFSLLPRKIGFTISYIPISSMTFMKILSMVNGNKVYRSMRFFRYVGKQKAIEEVCDMIAPRHTPTIVGFGDWSNQGNGISRPCSGPVKEIRKRLSQRGNVLFKNIDERNTSCTCHGCFELLVNMKANSVRWRRGQIGQLGVSVKEKVMVKNVKVHKIQHCCNSVGSAPSVRCGTTWNRDVNASKNILLLLMTWVAGQERPTAFCVPSKKNHNFQRGN

SEQ ID NO: 791 - protein, 795 aa, Chlamydomonas sp.
LWKMATKPPTVAKLKELLKLAEVPYSSKSNKDDLVRLCEDNGLIARPPPEYKTVEKMCVVKCALKKAMSLDDEEFGKFREHVDKLVNVVSRMLRRSSLVLTFHITSLLEKGLEIPDLYNMKDTYWKDWLRIGVDGIFPDEESKISYEAVKDSIGEVIGNDDADYIKSYPIYFDQVLNYAGHTLSTVVSNNAWVPLIPRLARLTSTTLNKLNALKTLDTSKIIRGYDVMQAIQQEVQNMEGWPESVQEYVNEVREMLSVPDGSRVYDNYGKDMDFPTMVRFNYWIQTRLEDMDARRIRLMPIFNVQRVHVRLDLKTLVNLFRHMFPNDQNIVELSKWEHVKNPDSFMLPQRPAQKKKKSCGPGEWEAYKSVLKQYDDVVKDIKATDEYRHAKGLYDTLVNARKTVAGSFFRKPLVKNGWVFDCSIYTDGVSLSMQYSKTVQVLVSDLKKTCKNPRKEEGIKIAEKYDGSLKTILPDMGIVVLGVDPRRSNIATVTYLADDKNKTWTLTRGAFYHKSGIKKQTRQKELRFADMIPMWESLRENGAALSTSRTDKISAYLSNYAKFSEEWWRLALRRRESRDNLQRYIGKRKVKDSFWAGIKRCMMKELPDMKVCVAYGSAITKLKPTGPGEVAVPTRAMFASCKRIFNEDVSVTDEFKTTLMSWETGKEKERVYKIPSVCSADVKLRLGGERFGHTKSKTMPKVADCDHLGVRLYNKRKGAQEKHRRGGFATSLVDSQKSIERYSEVRGLRFSPETCIYSDRDRSSALTIARLHCMELMGLGRPLPFAHSSSVVVDE

SEQ ID NO: 792 - protein, 398 aa, Chlamydomonas sp.
RIPTASCCPRGLHRRRKNHVVLVNGRHTSRSLKQYDDDVKDIKATDEYRHAKGLYDTLVNARKTVAGSFFRKPPVKNGWVFDCSICTDGVSLSMQYSKTVQVLVSDLKKTCKNPRKEEGIKIAEKYDGSLKTILPDMGIVVLGVDPRRSNIATVTYLADDTNKTWTLTRGAFYHKSGIKKQTRQKELRFADMIPMWESLRENGAALSTSRTDKISVYLSNYAKFSEEWWRLALRRRESRDNLQRYIGKRKVKDSFWAGIKRCMMKELPDMKVCVAYGSAITKLKPTGLEEVAVPTGAMFASCKRIFKEDVSVTDEFKTTLMSWETGKEKERVYKIPSVCSADVKLRLGGERFGHTKSKTMPKVADCDHLGVRLYNKRKGAQEKHRRGGFATSLVDSQK

SEQ ID NO: 793 - protein, 615 aa, Chlamydomonas sp.
QCIRNLHVLNIRMLCMATNASVKLARSPMPLVSPGPSSVDGRIMARSGPQATNVSLTQAASKATSSSRKKKPAVVKSFSTHVCPHTNNNPTCSDSNCSCKPIFLTNIPDASKSRTSDQGSTSSAQDFYEYWDSSRQDLYRQLLWLPKTGSQGLVSSSLNGFARSTPARSSFSITKTEPLKTSLDKTSCPSLKYIVADGTVEDATKSNAKPKLRTLKLKLNPTKAQKSMLAEFAGCSRFMYNKAVSARLGVGSTHKSVFRIRDRYVTNKVRGEGKMPNPYFKNRQWLLQCPQSVRQSAIKAALANIKACYSNLKAGNINQFSAPFRRKKTELERGWAIEMDQKNVSKDGDKLFIFKDILSNMRYFGSKQLHKLMPEENPTHDPKVQKSRFGEYFLVLSVAVRDRRAERKPVHPDKVATASIDPGVRKTMVTYSPENEESFMLGQGQASDLVKLLLVHDKLHSRLDTEKTLRSKERMKIKKQMIRIRKRIFYLKKEFRDQTTNFLAARYDVLLVPQLETAKMTISAERKLTTKVARQMLTLSHSVLFNRLKEKCEEYGTVFLHVLEHYTSQTCPMCGLLNKCGETYTCKNCQFTCDRDIVGAAGIFLKAVRTENPCS

SEQ ID NO: 794 - protein, 820 aa, Chlamydomonas sp.
NHYGLFRPLMEHVCDVCIKSSVMYKLCKMATKPPTVAKLKELLKLAEVAYSSKDKKDDIVRLCEDNGLIARPPPEYKTVEKMCVVKCALKKAMSLDDEEFGKFREHVDQLVNVVSRMVRRSSLVLTFHITSLLEKGLDIPDLYNMKDTYWKDWLRIGVDGIFPDEESKISYEAVKDSIGNVIGNDDADYIKSYPIYFDQVLNYAGHTLSTVVSNNAWVPLIPRLARLTSTTLNKLNAPKTLDTSKIIRGYDVMQAIQQEVQNMEGWPESVQEYVNEVREMLSVPDGSRVYDNYGKDMDFPTMVRFNYWIQTRLEDMDARRIRLMPIFNVQRVHVRLDLKTLVNLFRHMFPNDQNIVELSKWGHVKNPDSFMLPQRPAQKKKKSCGPGEWEAYKSVMKQYDDDVKDIKATDEYRHAKGFYDTLVNARKTVAGSFFRKPPVKNGWVFDCSICTDGVSLSMQYSKTVQVLVSDLKKTCKKPRKEEGIKIAEKYDGSLKTILPDMGIVVLGVDPGRSNIATVTYLADDKNKTWTLTRGEFYHKSGIKKQTRQKELRFADKIPMWESLRENGAALSTSRSDKISAYLSNYAKFSDEWWRLALRRRESRDNLQRYIGKRKVKDSFWAGIKRCMMKELPDMKVCVAYGSAITKLKPTGPGEVAVPTGAMFASCKRIFKEDVSVTDEFKTTLMSWETGKEKERVYKIPSVCSADVKLRLGGERFGHTKSKTMPKVADCDHLGVRLYNKRKGAQEKHRRGGFATSLVDSQKSIERYPEVRGLRFSPETCIYSDRDRSSALTIARLHNMELMGLGRPLPFAHSSSVVVDE

SEQ ID NO: 795 - protein, 230 aa, Chlamydomonas sp.
RVVEIGLRRRESRDNLQRYIGKRKVKDSFWAGIKRCMMKELPDMKVCVAYGSAITKLKPTGPGEVAVPTGAMFASCKRIFKEDVSVTDEFKTTLMSWETGKEKERVYKIPSVCSADVKLRLGGERFGHTKSKTMPKVADCDHLGVRLYNKRKGAQEKHRRGGFATSLVDSQKSIERYPEVRGLRFSPETCIYSDRDRSSALTIARLHCMELMGLGRPLPFAHSSSVVVDE

SEQ ID NO: 796 - protein, 794 aa, Chlamydomonas sp.
KMATKPPTVAKLKELLKLAEVPYSSKSNKDDLVRLCDDNGLIARPPPEYKTVEKMCVVKCALKKAMSLDDEEFGKFREHVDQLVNVVSRMLRRSSLVLTFHITSLLEKGLDIPDLYNMKDTYWKDWLRIGVDGIFPDEESKISYEAVKDSIGDVIGNDDADYIKSYPIYFDQVLNYAGQTLSTVVSNNAWVPLIPRLARLTSTTLNKLNAPKTLDTSKIIRGYDVMQAIQQEVQNMEGWPESVQEYVNEVREMLSVPDGSRVYDNYGKDMDFPTMVRFNYWIQTRLEDMDARRIRLMPIFNVQRVHVRLDLKTLVNLFRHMFPNDQNIVELSKWEHVKNPDSFMLPQRPAQKKKKSCGPGEWEAYKSVLKQYDDDVKDIKATDEYRHAKGLYDTLVNARKTVAGSFFRKPPVKNGWVFDCSICTDGVSLSMQYSKTVQVLVSDLKKTCKKPRKEEGIKIAEKYDGSLKTILPDMGIVVLGVDPGRSNIATVTYLADDKNKTWTLTRGAFYHKSGIKKQTRQKELRFADMIPMWESLRENGAALSTSRTDKISAYLSNYAKFSDEWWRLALRRRESRDNLQRYIGKRKVKDSFWAGIKRCMMKELPDMKGCVAYGSAITKLKPTGPGEVAVPTGAMFASCKRIFKEDVSVTDEFKTTLMSWETGKEKERVYKIPSVCSADVKLRLGGERFGHTKSKTMPKVADYRDHLGVRLYNKRKGAQEKHRRGGFATSLVDSQKSIERYPEVRGLRFSPETCIYSDRDRSSALTIARLHCMELMGLGRPLPFAHSSSVVVDE

SEQ ID NO: 797 - protein, 813 aa, Chlamydomonas sp.
PRMEHVFDVCIKSSVMYKLCKMATKPPTVAKLKELLKLAEVAYSSKDKKDDIVRLCEDNGLIARPPPEYKTVEKMCVVKCALKKAMSLDDEEFGKFREHVDQLVNVVSRMLRRSSLVLTFHITSLLEKGLDIPDLYNMKDTYWKDWLRIGVDGIFPDEESKISYEAVKDSIGDVIGNDDADYIKSYPIYFDQVLNYAGHTLSTVVSNNAWVPLIPRLARLTSTTLNKLNAPKTLDTSKIIRGYEVMQAIQQEVQNMEGWPESVQEYVNEVREMLSVPDGSRVYDNYGKDMDFPTMVRFNYWIQTRLEDMDARRIRLMPIFNVQRVHVRLDLKTLVNLFRHMFPNDQNIVELSKWEHVKNPDSFMLSQRPAQKKKKSCGPGEWDAYKSVMKQYDDDVKDIKATDEYRHAKGLYDTLVNARKTVAGSFFRKPPVKNGWVFDCSICTDGVSLSMQYSKTVQVLVSDLKKTCKNPRKEEGIKIAEKYDGSLKTILPDMGIVVLGVDPGRSNIATVTYLADDKNKTWKLTRGAFYHKSGIKKQTRQKELRFADMIPVWESLRENGAALSTSRTDKISAYLSNYAKFSDEWWRLALRRRESRDNLQRYIGKRKIKDSFWAGIKRCMMKELPDMKVCVAYGSAITKLKPTGPGEVAVPTGAMFASCKRIFKEDVSVTDEFKTTLMSWETGKEKERVYKIPSVCSADVKLRLGGERFGHTKSKTMPKVADCDHLGVRLYNKRKGAQEKHRRGGFATSLVDSQKSIERYPEVRGLRFSPETCIYSDRDRSSALTIARLHCMELMGLGRPLPFAHSSSVVVDE

SEQ ID NO: 798 - protein, 680 aa, Chlamydomonas sp.
RNVGTILYHKKKKNTHPLLMGVVQDKGDDDINISVVKKTLNSLCMDVSRHQISSRIQSMVLLINHAVAEAYLFANFHITRCLDDGDFDVKQLPHLDRNFYYRCLLAVSTSNVRKDTLGQSFNDTMVAFDALRPAGYVKLDVRPWGQVIADVSIQMATMACNSVWANVDRVVIKYLRLKHPSLKKHFKKIVKAVVQYPESKIDTIIPEGLVHAIHIKEVVTHLRVIFPLPRGKQFNTRAHLTMRLFHHVLTALGEVGRVDPKDKKTRKSHPRLFSILPRKNGFTISYVPISSMTFMKLLSMGDSPLESVSGDGRYENHTMLWRKYFNVQGLETKRSRFDNRILSDGKGVSVQMKQKGKEEVVEEGENAGYPKDANIVECKDAVGALRVGVDPGMTDIVTVASSAGRIESFSSARFSEVAGYNTSKRRTYKWNDETQDLVKSIPSPNTSNMSDLQDHVRAYLKALPILLQHRANKGYRSMRFFRYVGKQKTIEKVCDVIAPRAQTTVVGFGNWSNQGYGISRSCSGPIKEIRRCLSRRKNVLFKNVDERNTSCKCHGCFQRLVNMKADSVVWRGVCKESPIDGSITVEKQKMVVKNVKVHKVLHCRDSVKSASSNVRCGATWNRDVNAAKNLLLLLTTWMDGRERPEAFCVPSPPPKTTVSIEASVSAKPTDPPGFVSSFPC

SEQ ID NO: 799 - protein, 209 aa, Chlamydomonas sp.
EVRLPHCDRRLCSQYILMNKPTCLTCSMPGDAFSTRAHEYMTTDEGGILSFRDNVVVAAVDPGVTDIVTVTGLDGSPNLYSSAQYYRKGLIFKSQRQTDVWNLETADIFGDVIPDRDSPMSRQIGAYARFYMGAAPILLAHRASRGYRNLRFRRYCKKQKLIVEIADFVAPREKSTKVLVGFGDWKGLGATPISRRGTCGPLQSYSFRA

SEQ ID NO: 800 - protein, 621 aa, Chlamydomonas sp.
CIRNLHVLNIRMPCMATNASVKLARPPMPLVSPGPSSVDGRIMARSERSGLQATNVSLTQAASKATSSSWKKNPAVVKSFSTHVCPHTNNNPTCSDSNCSCKPIFLTNIPDASKSLKSRTSDQGSTSSAQDFYEYWDSSRQDMYRQLLWLPKTGSQGLVSSSLNGFARSTPVRSSFSITKTEPLKTSLEKTSCPSFKYIVANGTVEDATKSNAKPKLRTLKLKLNPTKAQKSMLAEFAGCSRFMYNKAVAARLGVGSTHKFVFRIRDRYVTNKVKGEGKMPNPYFKNRQWLLQCPKSVRQSAIKAALTNIKACFSNLKAGNIKQFSAPFRQKKTELERGWAIEMDQHNISKDGDKLFIFKDTLGNMRYFGRKQLQKLMPEKNPTHDPKVQKSRFGEYFLVLSVAARDRREERKPVHPGKVATASIDPGVRKTMVTYSPENEESFMLGKGQASDLVKLLLVHDKLHSRLDTEKTLRSKERMKIKKQMIRIRKRIFYLKKEFRDQTRNFLAARYDVLLVPQLETAKMTISAERELTTKVARQMLTLSHSVLFNRLNENCEEYGTVFLHVLEHYTSQTCPMCGFLNKCGGETYTCKNCQFTCDRDIVGAAGIFLKTVRTENPCS

SEQ ID NO: 801 - protein, 710 aa, Chlamydomonas sp.
GNCPLVWYHQNNNHSLSMGVVTNNGDDDDLDIMVVKKTLNSLCMDVSRQQICSRIQSMVLVINHAVAEAYLFAIFHITRCLDDGDFDVKQLPHLDRNFYYRCILAVSISNVRNDTLDQSLKDSMVAFDALRPAGFLKVDVCQWGQVIADVSIQMATMACNSVWANVDRVVIKYLRLKHPSLKKHFNKIVKAVVQYPDSDIDKIIPAGLVHANLIKDVVRRLRDLLPLPRGKQFNTRAHLTMRLFHHVLTELGADLKEKTTKKRPRLFSILPRKSGFTISYVPISSMTLMKLLSMGDSPLESVRGDGRHENHSMLWRKYFNVQGLETKGSRFDNRILSDGKGVSVQMKHQVGKDIAGEGGGDNAGYPKDASIEDCQDASFRQGALRVGIDPGMTDIVTIASSDGRVESFSSARFSEAAGYNTSNRRTNKWNSDTQALVKSIPSPTTSSMHDMQDHVRGYLSALPTLLQHRANRGYRSMRFFRYVGKQKTIEKVCDLIAPKAQKKTIEEKVCDVIAPKAKKTVVGFGNWSNQGYGISRSCSGPVKEIRKCLSRRQNVLFKNVDERNTSCTCHGCFQKLVNMKADSVVWRRVQNEPSALIDGAPTTTTTFEKQKTVVKNVKVHKVLHCRNSVKSASSNVRCGATWNRDVNAAKNLLLLLTTWMDGKERPAAFCVPSSSPTPKTTVSGEANVGAQPTDPPGSVSSLQLLSSGPA

SEQ ID NO: 802 - protein, 682 aa, Chlamydomonas sp.
YYITKRKIILTPLLMGVVQDKGDDDINISVVKKTLNSLCMDVSRHQISSRIQSMVLLINHAVAEAYLFANFHITRCLDDGDFDVKQLPHLDRNFYYRCLLAVSTSNVRKDTLGQSFNDTMVAFDALRPAGYVKVDVRPWGQVIADVSIQMATMACNSVWANVDRVVIKYLRLKHPSLKKHFKKIVKAVVQYPESKIDTIIPEGLVHAIHIKDVVSHLRALFPMPRGKQFNTRAHLTMRLFHHVLTELGEVGRVDPKDKKTRKSHPRLFSILPRKNGFTILYVPISSMTFMKLLSMGDSPLESVSGDGRYENHTMLWQKYFNVQGLETKRSRFDNRILSDGKGVSVQMKQKGKEEVVEEGENAGYPKDANIVECKDAVGALRVGVDPGMTDIVTVASSAGRIESFSSARFSEVAGYNTSKRRTYKWNDETQDLVKSIPSPNTSNMSDLQDHVRAYLKALPILLQHRANKGYRSMRFFRYVGKQKTIEKVCDVIAPRAQTTVVGFGNWSNQGYGISRSCSGPIKEIRRCLSRRKNVLFKNVDERNTSCKCHGCFQRLVNMKADSVVWREVCKESPIDGSITVEKQKMVVKNVKVHKVLHCRDSVKSASSNVRCGATWNRDVNAAKNLLLLTTWMDGRERPEAFCVPPPPPKTTVSIEASVSAKPTDPPGFVSSLPCYPLGQLKS

SEQ ID NO: 803 - protein, 243 aa, Chlamydomonas sp.
ANRGYRSMRFFRYVGKQKTIEKVCDLIAPKAQKKTIEEKVCDVIAPKAKKTVVGFGNWSNQGYGISRSCSGPVKEIRRCLSRRQNVLFKNVDERNTSCTCHGCFQKLVNMKADSVVWRRFQNEPYALIDGAPTTTTTTTFEKQKTVVKNVTVHKVLHCRNSVKSASSNVRCGATWNRDVNAAKNLLLLLTTWMDGKERPAALCVPSSSPTPKTTVSGEANVGAQPTDPPGSVSSLQLLSSGPA

SEQ ID NO: 804 - protein, 525 aa, Chlamydomonas sp.
RRNNFLGRTVGDAICGTPYSRRNSKMNVRRAHVRLDMKTLVNLFRHVFPKDPNIVELSKWKNVKDPDRFMLPLKPAFKKKKSCGPGEWEAYKLAQQKYDADVNDIKDPSTHPPTSFHPPTHPLPSTHPPTSFHARKIVAGSFFKKPPVKTGWVFDCSICTDGVSLSMQYSKTVQVRVSDLKKTSKRSRDDEGMSVSEQYEHKLKTTLPDMGIVVLGVDPGRSNIATVTYLADDKSKTWKLTRGAFYHKSGIKKQKKQQEKRFSDMIPRWESLRENGAALSTSWTDDISAYLTNYATFSDEWWRMALRRRESRDNFQRYIGKRKAMDSFWAGIKRNMKLDHPDLRVRVAYGSAITTLKATGPGEVAVPTRSMFASCKRLFKEELHVTDEFKTTLMSWETGAKKECVYKIPSVQITTEGQIRLGYELLGHTPLKETPKVSYRDQLAVRVYCTRKQIQEKHRRGGLAPSLVDNNSIKRYPEVRGLRFSPETSTYSDRDRSSALTIARLHCMEQLGQGRPLPFCRDACC

SEQ ID NO: 805 - protein, 707 aa, Chlamydomonas sp.
GNCPLVWYHQNNNHSLSMGVVTNNGDDDDLDIMVVKKTLNSLCMDVSRQQICSRIQSMVLVINHAVAEAYLFANFHITRCLDDGDFDVKQLPHLDRNFYYRCILAVSISNVRNDTLDQSLKDSMVAFDALRPAGYVKVDVCQWGQVIADVSIQMATMACNSVWANVDRVVIKYLRLKHPSLKKHFKKIVKAVVQYPDSDIDKIILAGLVHANLIKDVVRRLRDLLPLPRGKQFNTRAHLTMRLFHHVLTELGADLKEKTTKKRPRLFSILPRKSGFTISYVPILSMTLMKLLSIESVRGDGRHENHSMLWRKYFNVQGLETKGSRFDNRILSDGKGVSVQMKHQVGKDIAGEGGGDNAGYPKDASIEDCQDASLRQGALRVGIDPGMTDIVTIASSDGRVESFSSARFSEAAGYNTSNRRTNKWNADTQDLVKSIPSPTTSSMHDMQDHVRGYLSALPTLLQHRANRGYRSMRFFRYVGKQKTIEKVCDLIAPKAQKKTIEEKVCDVIAPKAKKTVVGFGNWSNQGYGISRSCSGPVKEIRKCLSRRQNVLFKNVDERNTSCTCHGCFQKLVNMKADSVVWRRVQNEPPSLINRAPTTTTTTTFEKQKTVVKNVKVHKVLHCRNSVKSASSNVRCGATWNRDVNAAKNLLLLLTTWMDGKERPAAFCVPSSSPTPKTTVSGEANVGAQPTDPPGSVSSLQLLSSGPA

SEQ ID NO: 806 - protein, 571 aa, Chlamydomonas sp.
LVQIGSWPHGKQICTILQGYHLPRGRSFSVGIGEQKTPPGRLKTPPGRLKHPSLKKHFKKIVKAVVQYPDSDIDKIIPAGLVHANLIKDVVRRLRDLLPLPRGKQFNTRAHLTMRLFHHVLTELGADLKEKTTKKRPRLFSILPRKSGFTISYVPISSMTLMKLLSMGDSPLESVRGDGRHENHSMLWRKYFNVQGLETKGSRFDNRILSDGKGVSVQMKHQVGKDIAGEGGGDNAGYPKDASIEDCQDASLRQGALRVGIDPGMTDIVTIASSDGRVESFSSARFSEAAGYNTSNRRTNKWNADTQDLVKSIPSPTTSSMHDMQDHVRGYLSALPTLLQHRANRGYRSMRFFRYVGKQKTIEKVCDLIAPKAQKKTIEEKVCDVIAPKAKKTVVGSGNWSNQGYGISRSCSGPVKEIRKCLSRRQNVLFKNVDERNTSCTCHGCFQKLVNMKADSVAWRRVQNEPSALIDGAPTTTTTFEKQKTVVKNVKVHKVLHCRNSVKSASSNVRCGATWNRDVNAAKNLLLLLTTWMDGKERPAAFCALLIAHPKNHSFRRGKCGRSTNRPTWVS

SEQ ID NO: 807 - protein, 268 aa, Chlamydomonas sp.
WLHLGHGLQTTCCSPWWNCTIASLEPCALLFRTAHSGGRWCCPCARSLWYGHAGPCQRLPQRSPDTPSTPSQQRLPIGFFRYVGKQKTIEKVCDLIAPKAQKKTIEEKVCDVIAPKAQKTIVGFGNWSNQGYGISRSCSGPVKEIRKCLSRRQNVLFKNVNERNTSCTCHGCFQKLVNMKADSVVWRRVQNEPPSLINGAPTTTTTIEKQKTVVKNVKVHKVLHFVCPPHRPPQKPQFPERQMWALNQPTHLGQLAAYNCYPLGQLKC

SEQ ID NO: 808 - protein, 802 aa, Chlamydomonas sp.
PRMEHVCDVCIKSSVMYKLCKMATKPPTVAKLKELLKLAEVAYSSKDKKDDIVRLCEDNGLIARPPPEYKTVENMCVVKFALKKAMSLDDEEFGKFRGHVDQLVNVVSRMLRRSSLVLTFHVTRLMEGDLPIPNMHDMKDTYRKDWLRIGVDGVFPDEESRISYESMKDVIGKVLGSDDPDYISSYPIYFDQVLNYAGHTLSTVVSNNAWVPLVPRLTRLTKATLNALGAPKTIRVYDVMRLIQQEIQEMESWPESVQEYVREVRVRLKVPDGSRLYDDYGKDMDFPTMVRFNYWMQTRLEAIGARRIRLMPIFNVQRAHVRLDMKTLVNLFRHVFPKDPNIVELSKWKNVKDPDRFMLPLKSAVKKKKSCGPGEWEAYKLAQQKYDADVNDIKDTDEYRHAKGRYDTLVNARKTVAGSFFKKPPVKTGWVFDCSVCTDGVSLSMQYSKTVQVRVSDLKKTSKRSRDDEGMSVSEQYDHKLKTTLPDMGIVVLGVDPGRSNIATVTYLADDKSKTWKLTRGAFYHKSGIKKQKKQQEKRFSDMIPRWESLLENGAALSTSRTDDISAYLKNYATFSDEWWRMALLRRESRDNFQRYIGKRKAMDSFWAGIKRNMKLDHPDLRVRVAYGSAITTLKATGPGEVTVPTGSMFASCKRLFKEEVHVTYEFKTTLMSWETGAKKECVYKIPSVQITTEGQIRLGYELGHTPLKETPKVSYRDQLAVRVYCTRKKIQEKHRRGGLAPSLVDNNSIKRYPEVRGLRFSPETSTYSDRDRSSALTIARLHCMELLGQGRPLPFCRDACC

SEQ ID NO: 809 - protein, 794 aa, Chlamydomonas sp.
ECSREPVCRSRLHQNVFGVQFVMENGIGELSSLVHEADQHDDVAELVDYEGEEDEECAPGRAICVVKMKLSTFIPHDWLRKKIDTLVLDMNKLLGEGYIFANFHIARLFENGIAVPPVNRNFFYRCLIAVSTNKCKGSTLGEDFESSRLLFDLLREPGQSKVDIRGNVKNQIIADLSILMATMASNHLWTNLERRITTYLKWKYPQIAKRLRSDIVAAVIKCPTKNLDVIFKMSPHTTKLPTKLPTARLRSAKSAVALAKKRVGRKEPEGSPLRVRLTKLQERLEKLSEAWLSSKNLRVDADNAKRFFARDVAFCLRGVLPLPSGNTFASRAHMTLPLYHKILSETIEEKRKTKNEKHRTFSLLPYKSGFTLSHIPISKMAFFYMVNECHFDSCKADVTSKNHQGIWERFANLKKVETVSRKFGYRIVTDGFAVSILMNKPTCLTCSMPADAFSTRAHEYVTTDEGGIVSFLDNVVVAAVDPGVTDIMTVTGLNGGTRSYSSAQYYRKGLIFKSQRQTDVWNLETADIVGGIIPDRDSSSSEQIGAYARFYMGAAPILLAHRASRGYRNLRFRRYSKKQKLIVEIADFVAPREKSAKVLVGFGDWKGLGATPISRRTCGPLQAIRFELRSRENVIMEDIDEFRTSQRCSCCENHLCNMVALTHRKKQDGTGWECTEGRKRIHKILHCKSSQSGAPRQQSGGMLHCGETWDRDVKASRNILMLTLHQVFGRERPLAFRRDAPRSSSTTPPPPPDTDMGTQTVERFTKEATRNIFENLFNLLHPPTLPKSNDLQSG

SEQ ID NO: 810 - protein, 621 aa, Chlamydomonas sp.
QCIRNLHVLNIRMPCMATNASVKLARPPMPLVSPGPSSVDGRIMARSERSGLQATNVSLTQAASKATSSSRKKNPAVVKSFSTQVCPHTNNNPTCSDSNCSCKPIFLTNIPDASKSLKSRTSDQGSTSSAQDFYEYWDSSRQDLYRQLLWLPKTGSQGLVSSSLNGFARSTPARSSFSITKTEPLKTSLEKTSCPSFKYIVADGTVEDATKSNAKPKLRTLKLKLNPTKAQKSMLAEFAGCSRFMYNKAVAARLGVGSTHKSVFRIRDRYVTNKVRGKGKMPNPYFKNRQWLLQCPKSVRQSAIKAALANIKACFSNMKAGNIKQFSAPFRRKKRELERGWAIEMDQKNVSKDGDKLFIFKDILGNMRYFGSKQLHKLMPEENPTHDPKVQKSRFGEYFLVLSVASRDRRAEQEPVHPDKVATASIDPGVRKTMVTYSPENEESFMLGQGQASDLVKFLLVHDKLQSRLDTEKTLRSKERMKIKKHMIRIRKRIFYLKKEFRDQTTNFLAARYDVLLVPQLETAKMTISAERELTTKVARQMLTLSHSVLFNRLKEKCAEYGTVFLHVLEHYTSQTCPMCGFLNKCGETYTCKNCQFTCDRDIVGAAGIFLKAVRTENPCS

SEQ ID NO: 811 - protein, 293 aa, Chlamydomonas sp.
QISVASSAGRIESFSSARFSKVAGYNTSKRRTYKWNDETQDLVKSIPSPNTSNMVDLQDHVRAYLKALPILLQHRANKGYRSMRFFRYVGKQKTIEKVCDVIAPRAQTTVVGFGNWSNQGYGISRSCSGPIKEIRRCLSRRKNVLFKNVDERNTSCKCHGCFQRLVNMKADSVVWRGVCKESPIDGSITVEKQKMVVKNVKVHKVLHCRDSVKSASSNVRCGATWNRDVNAAKNLLLLLTTWMDGRERPEAFCVPSPPPKTTVSIEASVSAKPTDPPGFVSSLPCYPLGQLKC

SEQ ID NO: 812 - protein, 200 aa, Chlamydomonas sp.
AFSSMQQRSKHRDNKQHRNKQGGSSQHYCKQQDSDGKKRVLARFFNEVQEDVGERKTIVVAYGSAKFAPGGNGELSVPTTSAFKAFSDRFKGRVAVIDEFRTTKIWHKDSTTVLQSVQSEKEGRTVRGLLWCSSTMENSKLFVNRDLNAAINIHNCFTMYPIRPGILARPKKYCKLEVVVGRKIDYKLTGSLQNAVSSEV

SEQ ID NO: 813 - protein, 664 aa, Chlamydomonas sp.
PRMEHVCDVCIKSSVMYKLCKMATKPPTVAKLKELLKLAEVAYSSKDKKDDIVRLCEDNGLIARPPPEYKTVEKMCVVKCALKKAMSLDDEEFGKFRGHVDQLVNVVSRMLRRSSLVLTFHVTRLMEGDLPIPNMYDMKDTYWKDWLRIGVDGVFPDEESRISYEAVKDVIGKVLGSDDPDYINSYPIYFDQVLNYAGHTLSTVVSNNAWVPLVPRLTRLTKATLKALGAPKTIRVYDVMRVIQQEIQEMESWPESVQEYVREVRVRLKVPDGSRLYDDYGKDMDFPTMVRFNYWMQTRLEAMGARRIRLMPIFNVQRAHVRLDMKTLVNLFRHVFPKDPNIVELSKWENVKDPDRFMLPLKPAVKKKKSCGPGEWEAYKLAQQKYDADVKDIKATDEYRHAKGRYDTLVNARKTVAGSFFKKPPVKTGWVFDCSICTDGVSLSMQYSKTVHVRVSDLKKTSKRSRDEEGMSVAEQYDHKLKTTLPDMGIVVLGVDPGRSNIATVTYLADDKSKTWKLTRGAFYHKSGIKKQIKQQEKRFSDMIPRWEFLRENGAALSTSRKDDISAYLKNYATFSDEWWRMALRRRESRDNFQRYIGKRKAMDSFWAGIKRNMKLDHPDLRVRVAYGSAITKLKATGPGEVAVPTGSMFASCKRLFKGGSCDR

SEQ ID NO: 814 - protein, 407 aa, Chlamydomonas sp.
DHPLIHYNVCRPDSSRTVSRKFGYRIVTDGFAVSILMNKPTCSMPADSFSTRAHEYVTTDEGGIVSFRDNVVVAAVDPGVTDIVTVTGLGGGTRSYSSAQYYRKGLIFKSQRQTEVWNLETADIVGDIIPDRDSSRSEQIGAYAWFYMGAAPILLAHRASRGYRNLRFRRYCKKQKLIVEIADFVAPREKSAKVLVGFGDWKGLGATPISRRTCGPLQAIRFELRSRGNVIMEDVDEFRTSQRCSCCENRLCNMVALTHHKKQDGTGWECTEGRKRIHKILHCKSSQSGAPRQQSGGRLHCGKTWDRDVNASRNILMLTLHQVFGRERPLAFRRDAPRSSSKTPPPPDTDMGTQTVERFTKEATRNIFENLFNLLHPPPQRCPKATICSLDDYKVCPTLFENYCIKH

SEQ ID NO: 815 - protein, 621 aa, Chlamydomonas sp.
QCIRYLHVLNIRMPCTATNASVKLVRPPMPLVFPGPSSVDGRIMARSERSGLQATNVSLTQAASKATSSSRKKKPAVVKSFSTHVCPHTNNNPTCSDSNCSCKPIFLTNIPDASKSLKSRTSDQGSTSSAQDFYEYWDSSRQDLYRQLLWLPKTGSQGLVSSSLNGFARSTPARSSFSITKTEPLKTSLEKTSCPSFKYIVADGTVEDATKSNAKPKLRTLKLKLNPTKAQKSMLAEFAGCSRFMYNKAVAARLGVGSTHKSVFRIRDRYVTNKVRGEGKMPNPYFKNRQWLLQCPKSVRQSAIKAALANIKACFSNLKAGNIKQFSAPFRRKKTELERGWAIEMDQKNVSKDGDKLFIFKDILGNMRYFGSKQLHKLMPEENPTHDPKVQKSRFGEYFLVLSVAARDRRAERKPVHPDKVATASIDPGVRKTMVTYSPENEESFMLGQGQASDLVKLLLVHDKLQSRLDTEKTLRSKERMKIKMQMIRIRKRIFYLKKEFRDQTTNFLAARYDVLLVPQLETAKMTISAERELTTKVARQMLTLSHSVLFNRLKEKCEEYGTVFLHVLEHYTSQTCPMCGFLNKCGETYTCKNCQFTCDRDIVGAAGIFLKAVRTENPCS

SEQ ID NO: 816 - protein, 803 aa, Chlamydomonas sp.
PRMEHVCDVCIKSSVMYKLCKMATKPPTVAKLKELLKLAEVAYSSKDKKDDIVRLCEDNGLIARPPPEYKTVEKMCVVKCALKKAMSLDDEEFGKFREHVDQLVNVVSRMLRRSSLVLTFHVTRLMEGDLPIPNMYDMKDTYWKDWLRIGVDGVFPDEESRISYESVKDVIGKVLGSDDPDYINSYPIYFDQVLNYAGHTLSTVVSNNAWVPLVPRLTRLTKATLNALGAPKTIRVYDVMRVIQQEIQEMESWPESVQEYVREVRVRLKVPDGSRLYDDYGKDMDFPTMVRFNYWMQTRLEAIGARRIRLMPIFNVQRAHVRLDMKTLVNLFRHVFPKDPNIVELSKWKDVKDPDRFMLPLKPAVKKKKSCGPGEWEAYKLAQQKYDADVNDIKDTDEYRHAKGRYDTLVNARKKVAGSFFKKPPVKTGWVFDCSICTDGVSLSMQYSKTVQVRVSDLKKTSKRSRDDEGMSVSEQYDHKLKTTLPDMGIVVLGVDPGRSNIATVTYLADDKSKTWKLTRGAFYHKSGIKKQKKQQEKRFSDMIPRWESLRENGAALSTSRTDDISAYLKNYATFSDEWWRMALLRRESRDNFQRYIGKRKAMDSFWAGIKRNMKLDHPDLRVCVAYGSAITTLKATGPGEVAVPTGSMFASCKRLFKEEVHVTDEFKTTLMSWETGAKKECVYKIPSVQITTEGQIRLGYELLSHTPLKETPNVSYRDQLAVRVYCTRKQIQEKHRRGGLAPSLVDNNSIKRYPEVRGLRFSPETSTYSDRDRSSALTIARLHCMELLGQGRPLPFCRDACC

SEQ ID NO: 817 - protein, 682 aa, Chlamydomonas sp.
NNNHSLSMGVVTNNGDDDDLDIMVVKKTLNSLCMDVSRQQICSRIQSMVLVINHAVAEAYLFANFHITRCLDYGDFDVKQLPHLDRNFYYRCILAVSTSNVRKDTLGQSLKDSMVAFDALRPAGYLKVDVCQWGQVIADVSIQMATMACNSVWANVDRVVIKYLRLKHPSLKKHFNKIVKAVVQYPDSDIDKIIPASLVHANLIKDVVRRLRDLLPLPRGKQFNTRAHLTMRLFHHVLAELGANLKEKTTKKRPRLFSILPRKSGFTISYVPISSMTLMKLLSMGDSPLESVRGDGRHENHSMLWRKYFNVQGLETKGSRFDNRILSDGKGVSVQMKHQVGKDIAGEGGGDNAGYPKDASIEDCQDASLRQGALRVGIDPGMTDIVTIASSDGRVESFSSARFSEAAGYNTSNRRTNKWNADTQDLVKSIPSPTTSSMHDMQDHVRGYLSALPTLLQHRANRGYRSMRFFRYVGKQKTIEKVCDLIAPKAQKKTIEEKVCDVIAPKAKKTVVGFGNWSNQGYGISRSCSGPVKEIRKCLSRRQNVLFKNVDERNTSCTCHGCFQKLVNMKADSVAWRRVKNEPSALIDGAPTTTTTFEKQKTVVKNVKVHKVLHCRNSVSLWCNLEPRRERCQEPSSASDNVDGRERATSGILCALLIAHPKNHSFRRGKCGRSTNRPTWVS

SEQ ID NO: 818 - protein, 803 aa, Chlamydomonas sp.
PRMEHVCYVCIKSSVMYKLCKMATKPPTVAKLKELLKLAEVAYSSKDKKDDIVRLCEDNGLIARPPPEYNTVEKMCVVKCALKKAMSLDDEEFGKFREHVDQLVNVVSRMLRRSSLVLTFHVTRLMEGDLPIPNMYDMKDTYWKDWLRIGVDGVFPDEESRISYESVKDVIGKVLGSDDPDYINSYLIYFDQVLNYAGHTLSTVVSNNAWVPLVPRLTRLTKATLNALGAPKTIRVYDVMRVIQQEIQEMESWPESVQEYVREVRVRLKVPDGSRLYDDYGKDMDFPTMVRFNYWMQTRLEAIGARRIRLMPIFNVQRAHVRLDMKTLVNLFRHVFPKDPNIVELSKCKNVKDPDRFMLPLKPAVKKKKSCGPGEWEAYKLAQQKYDADVNDIKDTDEYRHAKGRYDTLVNARKTVAGSFFKKPPVKTGWVFDCSICTDGVSLSMQYSKTVQVRVSDLKKTSKRSRDDEGMSVSEQYDHKLKTTLPDMGIVVLGVDPGRSNIATVTYLADDKRKTWKLTRGAFYHKSGIKKQKKQQEKRFSDMIPRWESLRENGAALSTSRTDDISAYLKNYATFSDEWWRMALRRRESRDNFQRYIGKRKAMDSFWAGIKRNMKLDHPDLRVRVAYGSAITTLKATGPGEVAVPTGSMFASCKRLFKEEVHVTDEFKTTLMSWETGAKKECVYKIPSVQITTEGQIRLGYELLGHTPLKETPNVSYRDQLAVRVYCTRKQIQEKHRRGGLAPSLVDNNSIKRYPEVRGLRFSPETSTYSDRDRSSALTIARLHCMELLGQGRPLPFCRDACC

SEQ ID NO: 819 - protein, 795 aa, Chlamydomonas sp.
LWKMATKPPTVAKLKELLKLAEVPYSSKSNKDDLVRLCEDNGLIARPPPEYKTVEKMCVVKCALKKAMSLDDEEFGKFREHVDQLFNVVSRMLRRSSLVLTFHITSLLEKGLEIPDLYNMKDTYWKDWLRIGVDGIFPDEESKISYESVKDSIGDVIGNDDADYIKSYPIYFDQVLNYAGHTLSTVVSNNAWVPLIPRLARLTSTTLNKLNAPKTLDTSKIIRGYDVMQAIQQEVQNMEGWPESVQEYVNEVREMLSVPDGSRVYDNYGKDMDFPTMVRFNYWIQTRLEDMDARRIRLMPIFNVQRVHVRLDLKTLVNLFRHMFPNDQNIVELSKWEHVKNPDSFMLPQRPAQKKKKSCGPGEWEAYKSVLKQYDDDVKDIKATDEYRHAKGLYDTLVNAQKTVAGSFFRKPPVKNGWVFDCSICTDGVSLSMQYSKKVQVLVSDLKKICKNPRKEEGIKIAEKYDGSLKTILPDMGIVVLGVDPGRSNIATVTYLADDKNKTWTLTRGAFYHKSGIKKQTRQKELRFADMIPMWESLRENGAALSTSRTDKISAYLSNYAKFSEEWWRLALRRRESRDNLQRYIGKRKVKDSFWAGIKRCMMKELPDMKVCVAYGSAITKLKPTGPGEVAVPTGAMFASCKRIFKEDVSVTDEFRTTLMSWETGKEKERVYKIPSVCSADVKLRLGGERFGHTKSKTMPKVADCDHLGVRLYNKRKGAQEKHRRGGFATSLVDSQKLIERYPEVRGLRFSPETCIYSDRDRSSALTIARLHCMELMGLGRPLPFAHSSSVVVDE

SEQ ID NO: 820 - protein, 543 aa, Chlamydomonas sp.
ETIRGCHRSLRWRSKPVQPRVEEVPDQFHNPHRPVHLSTWIKKFVYSKENRILAKEFKDEHGIDETVFHRYLLYDIHSWGVKEDLIAIHSLLPERTKMLLKIQHSIIGRDEINRQWLKSVSNSAKMIRYNVFINRYLEATEDEGYAKLVNIAPIPTVKHAFIMIDTDGLLGVLKDVGLVESLEKTLTNKEHWESVFDVENIRSTGKGVFTCTIDTDGVMACTHFLRAEKKKISIKDDGTAIKKQTKTLREFSESDPNVVVVANDPGRCNIAFLTWKKNKVEEKDKGGRKRKRHCEFGSKRLTRERYYVESGVFKSRGPTKKWLSNIQDCLDDLKDNSPKRTSLESFDAYVTVIVNHWDSRWGEMSKSRWGAQRLRLYGGKKRVLARFFNEVQADVGERKTIVIAYGSSKFAPGGKGELSVPTTSAFNAFSDRFKGRVAVIDEFRTTKIWHKDSTTVLQSVQSEKEGRTVRGLLWCSSTMENSKLFVNRDLNAAINIHNCFTMYPIRPGILARPKKYCKLEVVVGRKIDYKLTGSLQNAVSSEV

SEQ ID NO: 821 - protein, 725 aa, Chlamydomonas sp.
VPLFPHDWLRKKIDTLVLDMNKLLEEGYIFANFHIARLFENGIAVPPVNRNFFYRCILAVSTNKCKGSTLGEDFESSRLLFDLLREPGQSKVDIRGNVKNQIIADLSILMATMASNHLWTNLERRITTYLKWKYPQIAERLRSDTVAAVIKCPTKNLDVIFKMSPHVAKLPTKLPTAQLRSAKSAVALAKKRVGRKEPEVSPLRVRLTKLQARFEKLSEAWLSSKNLRVDEDNAKRFFARDVAFCLRGGLPLPSGNTFASRAHMTLPLYHKILSETIEEKRKTKNEKLRTFSLLPYKSGFTLSHIPISKMAFFYMVNECHFDSCKADVASKNHQGIWERFANLKKVETVSRKFGYRIVTDGFAVSILMNKPTCLTCSMPADSFSSRAHEYVTTDEGGIVSFRDNVVVAAVDPGVTDIVTVKGLDGCTRSYSSAQYYRKGLIFKSQRQTDVWNLETADIVGNIIPDRDSSRSEQIGAYARFYMGAAPILLAHRASRGYRNLRFRRYCKKQKLIVEIADFVAPREKSAKVLVGFGDWKGLGATPISRRTCGPLQAIRFELRSRGNVIMEDVDECRTSQRCSCCENRLCNMVALTHRKKQDGTGWECTEGRKRIHKILHCKSSQSGAPRQQSGGRLHCGKTWDRDVNASRNILMLTLHQVFGRERPLAFLRDAPRSSSRPPPPPDTDMGTQTVEWFTKEATRNIFENLFNLLHPPTLPKSNDLQSGSL

SEQ ID NO: 822 - protein, 384 aa, Chlamydomonas sp.
DERVSFDNRILSDGKGVSVQMKHQVGKDIAGEGGGDNAGYSKDASIEDCQDASLRQGALRVGIDPGMTDIVTIASSDGRVESFSSARFSEAAGYNTSNRRTNKWNADTQDLVKSIPSPTTSSMHDMQDHVRGYLSALPTLQHRANRGYRSMRFFRYVGKQKTIEKVCYLIAPKAQKKTIEEKVCDVIAPKAKKTVVGFGNWSNQGYGISRSCSGPVKEIRKCLSRRQNVLFKNVDERNTSCTCHGCFQKLVNMKADSVVWRRVQNEPSALIDGAPTTTTTFEKQKTVVKNVKVHKVLHCRNSVKSASSNVRCGATWNRDVNAAKNLLLLLTTWMDGKERPAAFCVPSSSPTPKTTVSGEANVGAQPTDPPGSVSSLQLLSSGPA

SEQ ID NO: 823 - protein, 363 aa, Chlamydomonas sp.
YLEATEDEGYAKLVNIAPIPTVKHSFITIDTDGLLGVLKDVGLVKSLEKTLTNKEHWESVFDVENTRSTGKGVFTCTIDTDGVMACTHFLRAEKKKISIKDDGTAIKKQTKTLREFSESDPNVVVVANDPGRCNIAFLTWKKNKVEEKDKGGRKRKRHCEFGSKRLTRERYYVESGVFKSRGPTKKWLSNIQDCLDDLKDNSPKRTSLESFDAYVTVMVNHWDSRWGEMSKSRCVAQRLRLYGGKKRVLARFFNEVQADVGERKTIVIAYGSSKFAPGGKGELSVPTTSAFNAFSDRFKGRVAVIDEFRTTKIWHKDSTTVLQSVQSEKEGRTVRGLLWCSYTMDNSKLFVNRDLNAAINIHN

SEQ ID NO: 824 - protein, 794 aa, Chlamydomonas sp.
ECSREPVCRSRLHQNVFGVQFVMENGIGESSSLVHEADQHDDVAELVDYEGEEDEECAPGRAICVVKMKLSTFIPHDWLRNKIDTLVLDMNKLLGEGYIFANFHIARLFENGIAVPPVNRNFFYRCLIAVSTNKCKGLTLGEDFKSSRLLFDLLREPGQSKVDIRGNVKNQIIADLSILMATMASNHLWTNLERRITTYLKWKYPQIAKRLRSDIVAALIKCPTKNLDVIFKMSPHTTKLPTKLPTSRLRSAKSAVALAKKRVGRKEPEGSPLRVRLTKLQERLEKLSEAWLSSKNLRVDADNAKRFFAREVAFCLRGVLPLPSGNIFATRAHMTLPLYHKILSETIEEKRKTKNEKHRTFSLLPYKSGFTLSHIPISKMAFFYMVNECHFDSCKADVASKNHQGIWERFANLKKVETVSRKFGYRIVTDGFAVSILMNKPTCLTCSMPADAFSTRAHEYVTTYEGGIVSFLDNVVVAAVDPGVTDIVTVTGLNGGTRSYSSAQYYRKGLIFKSQRQTDVWNLETADIVGGIIPDRDSSSSEQIGAYARFYMGAAPILLAHRASRGYRNLRFRRYCKKQKLIVEIADFVAPREKSAKVLVGFGDWKGLGATPISRRTCGPLQAIRFELRSRENVIMEDIDEFRTSQRCSCCENHLCNMVALTHRKKQDGTGWECTEGRKRIHKILHCKSSQSGAPRQQSGGMLHCGKTWDRDVNASRNILMLTLHQVFGRERPLAFRRDAPRSSSTTPPPPPDTDMGTQTVERFTKEATRNIFENLFNLLHPPTLPKSNDLQSG

SEQ ID NO: 825 - protein, 547 aa, Chlamydomonas sp.
ECSREPVCRSRLHQNVFGVQFVMEHGVVLVHEADQHDDVAELVDYEGDEDEERAPGRAICVVKMKLSTFIPHDWLRRKIDTLVLDMNKLLGEGCIFANFHIARLFENGIAVPPVNRNFFYRCLLAVSTNKCKGSTLGEDFESSRLLFDLLREPGKNHQGIWERFANLKKVETVSRKFGYRIVTDGFAVSILMNKPTCLICSMPADAFSTRAHEYVTTDEGGIVSFRDNVVVAAVDPGVTDIVTVTGLDGGTRSYSSAQYYRKGLIFKSQRQTDVWNLETADIVGDIIPDRDSSRSEQIGAYARFYIGAAPILLAHRASRGYRNLRFRRYCKKQKLIVEIADFVAPREKSAKVLVGFGDWKGLEATPISRRTCGPLQAIRFELCSRENVIMEDVDEFRTSQRCSCCENRLCNMVALTHRKKQDGTGWECTEGRKRIHKILHCKSSQSGAPRQQNGGRLHCGKTWDRDVNASRNILMLTLHQVFGRERPLAFRRDAPRSSSKTPPPPDTDMGTQTVERFTKEATRNIFENFFNLLHPPTLPKSNDLQSG

SEQ ID NO: 826 - protein, 487 aa, Chlamydomonas sp.
YWDSSRQDLYRQLLWLPKTGSQGLVSSSLNGFARSTSARSSFSITKTEPLKTSLEKTSCPSFKYIVADGTVEDATKSNAKPKLRTLKLKLNPTKAQKLMLAEFAGCSRFMYNKALAARLGVGSTHKSVFRIRDRYVTNKVRGKGKMPNPYFKNRQWLLQCPKSVRQSAIKAALANIKACFSNLKAGNIKQFSAPFRRKKTELERGWAIEMDQKNVSKDGDRLFIFKDILGNMRYFGSKQLHKLMPEENPTHDPKVQKSRFGEYFLVLSVAARDRRAERKPVHPDKVATASIDPGVRKTMVTYSPENEESFMLGQGQASDLVKLLLVHDKLQSRLDTEKTFRSKERMKIKKQMIRIRKRIFYLKKEFRDQTTNFLAARYDVLLVPQLETAKMTISAERELATKVARQMLTLSHSVLFNRLKEKCEEYGTVFLHVLEHYTSQTCPMCGFLNKCGGETYTCKNCQFTCDRDIVGAAGIFLKAVRTENPCS

SEQ ID NO: 827 - protein, 684 aa, Chlamydomonas sp.
KETIVNKEPPDKRTRPDRAAKFKDRKNGEESVVKCTLSRIIADKDNKDVIMKVIKERVDSVSKRTYLAGVAVNRILKEVFEGVPDAQLHTVSVPSVDQNFIRQLMVGSRQAHMETRDATVERFFHNNYWFREKIEGREVIVKKKKQYVGAIARYDGDRNLYSHASKKYLTNFNNHYRVHLSTWIKKLVYSKENRILAKEIKDEHGIDETVFHRYLLYDIHSWGVKEDLIEIHSLLPERTKMLLKIQHSIRDEINRQWLKSVSNSAKMIRYNVFINRYLEATEDEGYAKLVNIAPIPTVKHAFITIDTDGLLGVLKDVGLIERLEKTLTNKEHWESVFDVENIRSTGKGVFTCTIDTDGVMACTHFLRAEKKKISIKDDGTAIKKQTKTLREFSESEPNVVVVANDPGRCNIAFLTWKKNKVEEKDKGGRKRKRHCEFGSKRLTRERYYVESGVFKSRGPTKKWLSNIQDCLDDLKDNSPKRTSLVSFDAYVTVMVNHWGSRWGEMSKSQWGAQRLRLYGGKKRVLARFFNEVQEDVGERKTIVVAYGSAKFAPGGKGELSVPTTSAFNAFSDRFKRRVAVIDEFRTTKIWHKDSTTVLQSVQSEKEGRTVRGLLWCSSTMENSKLFVNRDLNAAINIHNCFTMYPIRPGILARPRKYCKLEVVVGRKIDYKLTGSLQNAVSSEV

SEQ ID NO: 828 - protein, 242 aa, Chlamydomonas sp.
EQHRYSHVSGRRQKQDMEAYTRSFLPQVWYQETEKTARKRFSDIIPRWESLRENGAALSTSRKDDISAYLKNYATFSDEWWRMALPRRESRDNFQRYIGKRKAMDSFWAGIKRNMKLDHPDLRVRVAYGSAITKLKATGPGEVAVPTGSMFASCKRLFKEEVHVTDEFKTTLMSWETGAKKECVYKIPSVQITAEGQIRLGYELLGHTPLKETPKVSYRDQLAVRVYCTHKKKSKKTTGGVA

SEQ ID NO: 829 - protein, 715 aa, Chlamydomonas sp.
GNCPLVWYHQNNNHSLSMGMVTNNGDDDDLDIMVVKKTLNSLCMDVSRQQICSRIQSMVLVINHAVAEAYLFANFHITRCLDDGDFDVKQLPHLDRNFYYRCILAVSISNVRNDTLDQSLKDSMVAFDALRPAGYLKVDVCQWGQVIADVSIQMATMACNSVWANVDRVVIKYLRLKHPSLKKHFNKIVKAVVQYPDSDIDKIIPAGLVHANLIKDVVRRLRDLLPLPRGKQFNTRAHLTMRLFHHVLTELGADLKEKTTKKRPRLFSILPRKSGFTISYVPISSMTLMKLLSMGDSPLESVRGDGRHENHSMLWRKYFNVQGLETKGSRFDNRILSDGKGVSVQMKHQVGKDIAGEGGGDNAGYPKDASIEDCQDASLRQGALRVGIDPGMTDIVTIASSDGGVESFSSARFSEAAGYNTSNRRTNKWNADTQDLVKSIPSPTTSSMHDMQDHVRGYLSALPTLLQHRANRGYRSMRFFRYVGKQKTIEKVCDLIAPKAQKKTIEEKVCDVIAPKAKKTVVGFGNWSNQGYGISRSCSGPVKEIRKCLSRRQNVLFKNVDERNTSCTCHGCFQKLVNMKADSVVWRRVQNEPSALIDGAPTTTTTTTTTTFEKQKTVVKNVKVHKVLHCRNSVKSASSNVRCGATWNRDVNAAKNLLLLLTTWMDGKERPAAFCVPSSSPTPKTTVSGEANVGAQPTDPPGSVSSLQLLSSGPA

SEQ ID NO: 830 - protein, 321 aa, Chlamydomonas sp.
TQTTLPDMGIVVLGVDPGRSNIATVTYLADDKSKTWKLTRGAFYHKSGIKKQKKQQEKRFSDMIPRWESLRENGAALSTSRTDDISAYLKNYDTFSDEWWRMALLRRESRDNFQRYIGKRKAMDSFWAGIKRNMKLDHPDLRVRVAYGSAITTLKATGPGEVAVPTGSMFASCKRLFKEEVHVTDEFKTTLMSWETGAKKECVYKIPSVQITTEGQIRLGYELLGHTPLKETPNVSYRDQLAVRVYCTRKQIQEKHRRGGLAPSLVDNNSIKRYPEVRGLRFSPETSTYSDRDRSSALTIARLHCMELLGQGRPLPFCRDA

SEQ ID NO: 831 - protein, 623 aa, Chlamydomonas sp.
IYQCIRNLHVLNIRMPCMATKASVKLARPPMPLVSPGPSSVDGRIMARSERSGLQATNVSLTQAASKATSSSRKKNPAVVKSFSTHVCPHTNNNPTCSDSNCSCKPIFLTNIPDASKLLKSRTSDQGSTSSAQDFYEYWDSSRQDLYRQLLWLPKTGSQGLVSSSLNGFARSTPARSSFSITKTEPLKTSLEKTSCPSFKYIVADGTVEDATKSNAKPKLRTLKLKLNPNKAQKSMLAEFAGCSRFMYNKAVAARLGVGSTHKSVFRIRDRYVTNKVRGKGKMQNPYFKNRQWLLQCPKSVRQSAIKSALANIKACFSNLKAGNIKQFSAPFRRKKTELERGWAIEMDQKNVSKDGDKLFIFKEILGNMRYFGSKQLHKLMPEENPTHDPKVQKSRFGEYFLVLSVAARDRRAERKPVHPDKVATASIDPGVRKTMVTYSPENEESFMLGQGQASDLVKLLLVHDKLQSRLDTEKTLRSKERMKIKKLMIRIRKTIFYLKKEFRDQTTNFLAARYDVLLVPQLETAKMTISAERELTTKVARQMLTLSHSVLFNRLKEKCEEYGTVFLHVLEHYTSQTCPMCGFLNKCGETYTCKNCQFTCDRDIVGAAGIFLKAVRTENPCS

SEQ ID NO: 832 - protein, 793 aa, Chlamydomonas sp.
KMATKSPTVAKLKELLKLAEVPYSSKSNKDDLVRLCEDNGLIARPPPEYKTVEKMCVVKCALKKAMSLDDEEFGKFREHVDQLVNVVSRMLRRSSLVLTFHITSLLEKGLDIPDLYNMKDTYWKDWLRIGVDGIFPDEESKISYEAVKDSIGDVIGNDDADYIKSYPIYFDQVLNYAGHTLSTVVSNNAWVPLIPRLARLTSTTLNKLNAPKTLDTSKIIRGYDVMQAIQQEVQNMEGWPESVQEYVNEVRERLSVPDGSRVYDNYGKDMDFPTMVRFNYWIQTRLEDMDARRIRLMPIFNVQRVHVRLDLKTLVNLFRHMFPNDQNIVELSKWEHVKNPESFMLPQRPAQKKKKSCGPGEWEAYKSVLKQYDDDVKDIKATDEYRHAKGLYDTLVNARKTVAGSFFRKPPVKNGWVFDCSICTDGVSLSMQYSKTVQVLVSDLKKTCKKPRKEEGIKIAEKYDGSLKTILPDMGIVVLGVDPGRSNIATVTYLADDKNKTWKLTRGAFYHKSGIKKQTRQKELRFADMIPMWESLRENGAALSTSRTDKISAYLSNYAKFSDEWWRLALRRRESRDNLQRYIGKRKVKDSFWAGIKRCMMKELPDMKVCVAYGSAITKLKPTGPGEVAVPTGAMFASCKRIFKEDVSVTDEFKTTLMSWETGKEKERVYKIPSVCSADVNLRLGGERFGHTKSKTMPKVADCDHLGVRLYNKRKGAQEKHRRGGFATSLVDSQKSIERYPEVRGLRFSPETCIYSDRDRSSALTIARLHCMELMGLGRPLPFSHSSSVVVDE

SEQ ID NO: 833 - protein, 793 aa, Chlamydomonas sp.
KMATKPPTVAKLKELLKLAEVPYSSKSNKDDLVRLCEDNGLIARPPPEYKTVEKMCVVKCALKKAMSLDDEEFGKFREHVDQLVNVVSRMLRRSSLVLTFHITSLLEKGLDIPDLYNMKDTYWKDWLRIGVDGIFPDEESKISYEAVKDSIGDVIGNDDADYIKSYPIYFDQVLNYAGHTLSTVVSNNAWVPLIPRLARLTSTTLNKLNSPKTLDTSKIIRGYDVMQAIQQEVQNMEGWPESVQEYVNEVREMLSVPDGSRVYDNYGKDMDFPTMVRFNYWIQTRLEDMDARRIRLMPIFNVQRVHVRLDLKTLVNLFRHMFPNDQNIVELSKWEHVKNPESFMLPQRPAQKKKKSCGPGEWEAYKSVLKQYDDDVKEIKATDEYRHAKGLYDTLVNARKTVAGSFFRKPPVKNGWVFDCSICTDGVSLSMQYSKTVQVLVSDLKKTCKKPRKEEGIKIAEKYDGSLKTILPDMGIVVLGVDPGRSNIATVTYLADDKNKTWKLTRGAFYHKSGIKKQTRQKELRFADMIPMWESLRENGAALSTSRTDKISAYLSNYAKFSDEWWRLALRRRESRDNLQRYIGKRKVKDSFWAGIKRCMTKELPDMKVCVAYGSAITKLKPTGPGEVAVPTGAMFASCKRIFKEDVSVTDEFKTTLMSWETGKEKERVYKIPSVCSADVKLRLGGERFGHTKSKTMPKVADCDHLGVRLYNKRKGAQEKHRRGGFATSLVDSQKSIERYPEVRGLRFSPETCIYSDRDRSSALTIARLHCMELMGLGRPLPFAHSSSVVVDE

SEQ ID NO: 834 - protein, 686 aa, Chlamydomonas sp.
METIVNKEPPDKRTRPDRAAKIKDRKNGEENVVKCTLSRIIADKDNKDVITKVIKERVDSVSKRTYLAGVAVNRILKEVFEGVPDAQLHTVSVPSVDQNFIRQLMVGSRQALMETRDATVERFFHNNYWFREKIEGREVIVKKKKQYVGAIARYDGDRNLYSHASKKYLTNFNNHYRVHLSTWIKKFVYSKENRILAKEFKDEHGIDETVFHRYLLYDIHSWGVKEDLIAIHSLLPERTKMLLKIQHSIIGQDEINRQWLKSVSNSAKMIRYNVFINRYLEATEDEGYAKLVNIAPIPTVKHSFITIDTDGLLGVLKDVGLVESLEKTLTNKEHWESVFDVENIRSTGKGVFTCTIDTDGVMACPHFLRAEKKKISIKDDGTAIKKQTKTLREFSESDPNVVVVANDPGRCNIAFLTWKKNKVEEKDNGGRKRKRHCEFGSKRLTRERYYVESGVFKSRGPTKKWLSNIQDCLDDLKDNSPKRTSLESFDAYVTVMVNHWDSRWGEMSKSRWGAQRLRLYGGKKRVLARFFNEVQADVGERKTIVIAYGSSKFAPGGKGELSVPTTSAFNAFSDRFKGRVAVIDEFRTTKIWHKDSTTVLQSVQSEKKGRTVRGLLWCSSTMENSKLFVNRDLNAAINIHNCFTMYPTRPGILARPKKYCKLEVVVGRTIDYKLTGSLQNAVSSEV

SEQ ID NO: 835 - protein, 801 aa, Chlamydomonas sp.
PRMEHVCDVGIKSSVMYKLCKMATKPPTVAKLKELLKLAEVAYSSKDKKDDIVRLCEDNGLIARPPPEYKTVEKMCVVKCALKKAMSLDDEEFGKFREHVDQLVNVVSRMLRRSSLVLTFHVTRLMEGDLPIPNMYDMKDTYWKDWLRIGVDGVFPDEESRISYEAVKDVIGKVLGSDDPDYINSYPIYFDQVLNYAGHTLSTVVSNNAWVPLVPRLTRLTKATLNALKAPKTIRVYDVMRVIQQEIQEMESWPESVQEYVREVRVRLKVPDGSRLYDDYGKDMDFPTMVRFNYWMQTRLEDMDARRIRLMPIFNVQRAHVRLDMKTLVNLFRHVFPKDPNIVELSKWKDVKDPDRFMLPLKPAVKKKKSCGPGEWEAYKLAQQKYDADVNDIKDTDEYRHAKGRYDTLVNARKTVAGSFFKKPPVKTGWVFDCSICTDGVSLSMQYSKTVQVRVSDLKKTSKRSRDDEGMSVSEQYDHKLKTTLPDMGIVVLGVDPGRSNIATVTYLADDKSKTWKLTRGAFYHKSGIKKQKKQQEKRFSDMIPRWESLRENGAALSTSRTDDISAYLKNYDTFSDEWWRMALLRRESRDNFQRYIGKRKAMDSFWAGIKRNMKLDHPDLRVRVAYGSAITTLKATGPGEVAVPTGSMFASCKRLFKEEVHVTDEFKTTLMSWETGAKKECVYKIPSVQITTEGQIRLGYELLGHTPLKETPNVSYRDQLAVRVYCTRKQIQEKHRRGGLAPSLVDNKLIKRYPEVRGLRFSPETSTYSDRDRSSALTIARLHCMELLGQGRPLPFCRDA

SEQ ID NO: 836 - protein, 614 aa, Chlamydomonas sp.
DYRSVLHLWTNLERRITTYLKWKYPQIAKRLRSDIVAALIKCPTKNLDVIFKMSPHTTKLPTKLPTSRLRSAKSAVALAKKRVGRKEPEGSPLRVRLTKLQERLEKLSEAWLSSKNLRVDADNAKRFFAREVAFCLRGVLPLPSGNTFASRAHMTLPLYHKILSETIEEKRKTKNEKHRTFSLLPYKSGFTLSHIPISKMAFFYMVNECHFDSCKADVASKNHQGIWERFANLKKVETVSRKFGYRIVTDGFAVSILMNKPTCLTCSMPADAFSTRAHEYVTTDEGGIVSFLENVVVSAVDPGVTDIVTVTGLNGGTRSYSSAKYYRKGLIFKSQRQTDVWNLETADIVGGIIPDRDSSSSEQIGAYARFYMGAAPILLAHRASRGYRNLRFRRYCKKQKLIVEIADFVAPRKKSAKVLVGFGDWKGLGATPISRRTCGPLQAIRFELRSRENVIMEDIDEFRTSQRCSCCENHLCNMVALTHRKKQDGTGWECTEGRKRIHKILHCKSSQSGAPRQQSGGMLHCGKTWDRDVNASRNILMLTLHQVFGRERPLAFRRDAPRSSSTTPPPPPDTDMGTQTVERFTKEATRNIFENLFNLLHPPTLPKSNDLQSG

SEQ ID NO: 837 - protein, 347 aa, Chlamydomonas sp.
GGEGKMPNPYFKNRQWLLQCPKSVRQSAIKAALANIKACFSNLKAGNIKQFSAPFRRKKTELERGWAIEMDQKNVSKDGDKLFIFKDILGNMRYFGSKQLHKLMPEENPTHDPKVQKSRFGEYFLVLSVAARDRRADRKPVHPDKVATASIDPGVRKTMVTYSPQNEESFMLGQGQASDLVKLLLVHDKLQSRLDTEKTLRSKERMKIKMQMIRIRKRIFYLKKEFRDQTTNFLAARYDVLLVPQLETAKMTISAERELTTKVARQMLTLSHSVLFNRLKEKCEEYGTVFLHVLEHYTSQTCPMCGFLNKCGGETYTCKNCQFTCDRDIVGAAGIFLKAVRTENPCS

SEQ ID NO: 838 - protein, 686 aa, Chlamydomonas sp.
METIVNKEPPDKRTRPDRAAKIKDRKNGEENVVKCTLSRIIADKDNKDVITKVIKERVDSVFKRTYLAGVAVNRILKEVFEGVPDAQLHTVSVPSVDQNFIRQLMVGSRQAHMETRDATVERFFHNNDWFREKIEGREVIVKKKKQYVGAIARYDGDRNLYSHASKKYLTNFNNHYRVHLSTWIKKFVYSKENRILAKEFKDEHGIDETVFHRYLLYDIHSWGVKEDLIAIHSLLPERTKMFLKIQHSIIGRDEINRQWLKSVSNSAKMIRYNVFINRYHEATEDEGYAKLVNIAPIPTVKHSFITIDTDGLLGVLKDVGLVESLEKTLTNKEHWESVFDVENIRSTGKGVFTCTIDTDGVMACTHFLRAEKKKISIKDDGTAIKKQTKTLREFSESDPNVVVVANDPGRCNIAFLTWKKNKVEEKDKGGRKRKMHCEFGSKRLTRERYYVESGVFKSRGPTKKWLSNIQDCLDDLKDNSPKRTSLESFDAYVTVMVNHWDSRWGEMSKSRWGAQRLRLYGGKKRVLARFFNEVQADVGERKTIVIAYGSSKFAPGGKGELSVPTTSAFNAFSDRFKGRVAVIDEFRTTKIWHKDSTTVLQSVQSEKEGRTVRGLLWCSSTMENSKLFVNRDLNAAINIHNCFTMYPTRPGILGRPKKYCKLEVVVGRTIDYKLTGSLQNAVSSEV

SEQ ID NO: 839 - protein, 518 aa, Chlamydomonas sp.
YPFTQPSCQQLDFDRQKSAVALAKKRVGRKEPEGSPLRVRLTKLQERLEKLSEAWLSSKNLRVDADNAKRFFARDVAFCLRGVLPLPSGNTFASRAHMTLPLYHKILSETIEEKRKTKNEKHRTFSLLPYKSGFTLSHIPISKMAFFYMVNECHFDSCKADVASKNHQGIWERFANLKKVETVSRKFGYRIVTDGFAVSILMNKPTCLTCSMPADAFSTRAHEYVTTDGGGIVSFLDNVVVAAVDPGVTDIVTVTGLNGGTRSYSSAQYYRKGLIFKSQRQTDVWNLETADIVGGIIPDRDSSSSEQIGACARFYIGAAPILLAHRASRGYRNLRFRRYCKKQKLIVEIADFVAPREKSAKVLVGFGDWKGLGATPISRRTCGPLQAIRFELRSRENVIMEDIDEFRTSQRCSCCENHLCNMVALTHRKKQDGTSWECTEGSKRIHKILHCKSSQSGAPRQQSGGMLHCGKTWDRDVNASRNILMRTLHQVFGRERPLAFRRDAPRSSSTTPPPPPDI

SEQ ID NO: 840 - protein, 793 aa, Chlamydomonas sp.
LLKMATKPPTVAKLKELLKLAEVPYSSKSNKDDLVRLCEDNGLIARPPPEYKTVEKMCVVKCALKKAMSLDDEEFGKFREHVDQLVNVVSRMLRRSSLVLTFHITSLLEKGLEIPDLYNMKDTYWKDWLRIGVDGIFPDEESKISYEAVKDSIGDVIGNDDADYIKSYPIYFDQVLNYAGHTLSTVVSNNAWVPLIPRLARLTSTTLNKLNAPKTLDTSKIIGGYDVMRAIQQEVQNMEGWPESVQEYVNEVREMLSVPDGSRVYDNYGKDMDFPTMVRFNYWIQKRLEDMDARRIRLMPIFNVQRVHVRLDLKTLVNLFRHMFPTDKNIVELSKWEHVKNPDSFMLPQRPAQKKKKSCCPGEWEAYKSVLKQYDDDVKDIKATDEYRHAKGLYDTLVNARKTVAGSFFRKPPVKNGWVFDCSICTDGVSLSMQYSKTVQVLVSDLKKTCKKPRKEEGIKIAEKYDGSLKTILPDMGIVVLGVDPGRSNIATVTYLADDKNKTWKLTRGAFYHKLGIKKLTGQKELRFADMIPMWESLHENGAALSTSRTDNISAYLSNYAKFSDEWWRLALRRRESRDNLQRYIGKRKVKDSFWAGIKRCMMKELPDMKVCVAYGSAITKLKPTGPGEVAVPTGAMFASCKRIFKEDVSVTDEFKTTLMSWETGKEKEHVYKIPSVCSADVKLRLGGERFGHTKSKTMPKVADCDHLGVRLYNKRKRAQEKHRRGGFATSLVDSQKSIERYPEVRGLRFSPETCIYSDRDRSSALTIARLHCMELMGLGRPLPFAHSSSVDE

SEQ ID NO: 841 - protein, 926 aa, Chlamydomonas sp.
YYSRRNSKMKHISDGRKEFVVKKGSVKKKDFAAFIDTLSLCNNSVVIMDNASIHKNLVLRSPVNICYTPPYSPEFNAIELCFAKVKKDFRRLNYIPNDTNTHVSDMISLAFSNLTDKIIMGCFDHVWNTYEICIKSSVMYKLCKMATKPPTVAKLKELLKLAEVAYSSKDKKDDIVRLCEDNGLIARPPPEYKTVEKMCVVKCALKKAMSLDDEEFGKFRGHVDQLVNVVSRMLRRSSLVLTFHVTRLMEGDLPIPNMYDMKDTYWKDWLRIGVDGVFPDEESRISYEAVKDVIGKVLGSDDPDYINSYPIYFDQVLNYAGHTLSTVVSNNAWVPLVPRLTRLTKATLNAMGAPKTIRVYDVMRVIQQEIQEMESWPESVQEYVREVRVRLKVPDGSRLYDDYGKDMNFPTMVRFNYWMQTRLEAIGARRIRLMPIFNVQRAHVRLDMKTLVNLFRHVFPKDPNIVELSKWKNVKDPDRFMLPLKPAFKKKKSCGPGEWEAYKLSQQKYDADVNDIKATDEYRHAKGRYDTLVNARKTVAGSFFKKPPVKTGWVFDCSICTDGVSLSMHYSKTVQVCVSDLKKTSKRSRDDEGMSVSEQYDHKLKTTLPDMGIAVLGVDPGRSNIATVTYLADDKSKTWKLTRGAFYHKSGIKKQKKQQEKRFSDMIPRWESLRENGAALSTSRKDDISAYLKNYATFSDEWWRMALRRRESRYNFQRYIGKRKAMDSFWAGIKRNMKLDHPDLRVRVAYGSAITTLKATGPGEVAVPTGSMFASCKRLFKEEVHVTDEFKTTLMSWETGAKKECVYKIPSVQITTEGQIRLGYELLGHTPLKETPKVSYRDQLAVRVYCTRKQIQEKHRRGGLAPSLVDNNLIKRYPEVRGLRFSPETSTYSDRDRSSALTIARLHCMELLGQGRPLPFCRDACC

SEQ ID NO: 842 - protein, 701 aa, Chlamydomonas sp.
RPQGGGVQSRFRSIQLGTFDITKRKIILTPLLMGVVQDKGDDDINISVVKKTLNSLCMDVSRHQISSRIQSMVLLINHAVAEAYLFANFHVTRCLDDGDFDVKQLPHLDRNFYYRCLLAVSTSNVRKDTLGQSFNDTMVAFDALRPAGYVKVDVRPWGQVIADVSIQMATMACNSVWANVDRVVIKYLRLKHPSLKKHFKKIVKAVVQYPESKIDTIIPEGLVHAIHIKEVVSHLRALFPLPRGKQFNTRAHLTMRLFHHVLTELGEVRRVDPKDKTTRKSHPRLFSILPRKNGFTISYVPISSMTFMKLLSMGDSPLESVSGDGRYENHTMLWRKYFNVQGLETKRYRFDNRILSDGKGVSVQMKQKGKEEVVEEGENAGYPKDANIVECKDAVGALRVGVDPGMADNVTVASSAGRIESFSSARFSEVAGYNTSKRRTYKWNDETQDLVKSIPSPNTSNMSDLQDHVRAYLKALLILLQHRANKGYRSMRFFRYVGKQKTIEKVCDVIAPRAQTTVVGFGNWSNQGYGISRSCSGPIKEIRRCLSRRKNVLFKNVDERNTSCKCHGCFQRLVNMKADNVVWRGVCKESPIDGSITVEKQKMVVKNVKVHKVLHCRDSVKSASSNVRCGATWNRDVNAAKNLLLLLTTWMDGRERPEAFCVPSPPPKTTVSIEASVSAKPTDPPGFVSSLPCYFFGQLKC

SEQ ID NO: 843 - protein, 793 aa, Chlamydomonas sp.
KMATKPPTVAKLKELLKLAEVPYSSKSNKDDLVRLCEDNGLIARPPPEYKTVEKMCVVKCALKKAMSLDDEEFGKFREHVDQLVNVVSRMLRRSSLVLTFHITSLLEKGLDIPDLYNMKDTYWKDWLRIGVDGIFPDEESKISYEAVKDSIGDVIGNDDADYIKSYPIYFDQVLNYAGHTLSTVVSNNAWVPLIPRLARLTSTTLNKLNAPKTLDTSKIIRGYDVMQAIQQEVQNMEGWPESVQEYVNEVREMLSVPDGSRVYDNYGKDMDFPTMVRFNYWIQTRLEDMDARRIRLMPIFNVQRVHVRLDLKTLVNLFRHMFPNDQNIVELSKWEHVKNPDSFMLPQRPAQKKKKSCGPGEWEAYKSVLKQYDDDVKDIKATDEYRHAKGLYDTLVNARKTVAGSFFRKPPVKNGWVFDCSICTDGVSLSMQYSKTVQVLVSDLKKTCKKPRKEEGIKIAEKYDGSLKTILPDMGIVVLGVDPGRSNIATVTYLADDKNKTWTLTRGAFYHKSGIKKQTRQKELRFADMIPMWESLRENGAALSTSRTDKISAYLSNYAKFSDEWWRLALRRRESRDNLQRYIGKRKVKDSFWAGIKRCMMKELPDMKVCVAYGSAITKLKPTGPGEVAVPTGAMFASCKRIFKEDVSVTDEFKTTLMSWETGKEKERVYKIPSVCSADVKLRLGGERFGHTKSKTMPKVADRDHLGVRLYNKRKGAQEKHRRGGFATSLFDSQKSIERYPEVRGLRFSPETCIYSDRDRSSALTIARLHCMELMGLGRPLPFAHSSSVVVDE

SEQ ID NO: 844 - protein, 374 aa, Chlamydomonas sp.
CRGRRTCGLIESLEKTLTNKEHWESVFDVENIRSTGKGVFTCTIDTDGVMACTHFLRAEKKKISIKDDGTAIKKQTKTLREFSESDPNVVVVANDPGRCNIAFLTWKKNKVEEKDKGGRKRKRHCEFGSKRLTRERYYVESGVFKSRGPTKKWLSNIQECLDNLKDNSPKRTSLVSFDAYVTVMVNHWDSRWGEMSKSRWGAQRLRLYGGKKRVLARFFNEVQEDVGERKTIVVAYGSAKFAPGGKGELSVPTTSAFKAFSDRFKGRVAVIDEFRTTKIWHKDSTTVLQSVQSEKKGRTVRGLLWCSSTMENSKLFVNRDLNAAINIHNCFTMYPIRPGILARPKKYCKLEVVVGRKIDYKLTGSLQNAVSSEV

SEQ ID NO: 845 - protein, 551 aa, Chlamydomonas sp.
METIVNKEPPDKRTRPDRAAKIKDRKNGEENVVKCTLSRIIADKDNKDVIIKVIKERVDSVSKRTYLAGVAVNRILKEVFEGVPDAQLHTVSVPSVDQNFIRQLMVGSRQVHMETRDATVERFFHNNYWFREKIEGREVIVKKKKQYVGAIARYDGDRNLYSHASKKYLTNFNNHYRVHLSTWIKKFVYSKENRILAKEIKDEHGIDETVFHRYLLYDIHSWGVKEDLIAIHSLLLERTKMLLKIQHSILRRDEINRQLLKSVSNSAKMIRYNVFIDRYLEATEDEVYAKLVNIAPIPTIKHAFITIDTDGLLGVLKDVGLIESLKKTLTNKEHWESVFDVENIRSTGKGVFTCTIDTDGVMACTHFLRAEKKKISIKDDGTAIKKQTKTLREFSESDSNVVVVANDPGRCNIAFLTWKKNKVEEKDKGGRKRKRQCEFGSKRLTRERYYVESGVFKLRGPTKKWLSNIQDCLDNLKDNSPKRTSLVSFDAYVTVMVNHWDSRWGEMSKSRWGAQRLRLYGGKKRVLARFFNEVQEDVGERKTIVVAYGSA

SEQ ID NO: 846 - protein, 688 aa, Chlamydomonas sp.
GNVGAILYHQKKKNTHPLLMGVVQDKGDDDINISVVKKTLNSLCMDVSRHQISSRIQSMVLLINHAVAEAYLFANFHITRCLDDGDFDVKQLPHLDRNFYYRCLLAVSTSNVRKDTLGQSFNDTMVAFDALRPAGYVKVDVRPWGQVIADVSIQMATMACNSVWANVDRVVIKYLRLKHPSLKKHFKKIVKAVVQYPESKIDTIIPEGLVHAIHIKEVVSHLRALFPLPRGKQFNTRAHLTMRLFHHVLTELGEVGRVDPKDKKTKKSHPRLFSILPRKNGFTISYVPISSMTFMKLLSMGDSPLESVSGDGRYENHTMLWRKYFNVQGLETKRSRFDNRILSDGKGVSVQMKQKGKEEVVEEGENAGYPKDANIVECKDAVGALRVGVDPGMTDIVTVASSAGRIESFSSARFSEVAGYNTSKRRTYKWNDETQDLVKSIPSPNTSNMVDLQDHVRAYLKALPILLQHRANKGYRSMRFFRYVGKQKTIEKVCDVIAPRAQTTVVGFGNWSNQGYGISRSCSGPIKEIRRCLSRRKNVLFKNVDERNTSCKCHGCFQRLVNMKADSVVWRGVCKESPIDGSITVEKQKMVVKNVKVHKVLHCRDSVKSASSNVRCGATWNRDVNAAKNLLLLLTTWMDGRERPEAFCVPSPPPKTTVSIEASVSAKPTDPPGFVSSLPCYPLGQLKC

SEQ ID NO: 847 - protein, 317 aa, Chlamydomonas sp.
DANIVECKDAVGALRVGVDPGMTDIVTVASSAGRIESFSSARFSEVAGYNTSKRRTYKWNDETQDLVKSIPSPNTSNMVDLQDHVRAYLKALPILLQHRANKGYRSMRFFRYVGKQKTIEKVCDVIAPRAQTTVVGFGNWSNQGYGISRSCSGPIKEIRRCLSRRKNVLFKNVDERNTSCKCHGCFQRLVNMKADSVVWRGVCKESPIDGSISVEKQKMVVKNVKVHKVLHCRDSVKSASSNVRCGATWNRDVNAAKNLLLLLTTWMDGRERPEAFCVPSPPPKTTVSIEASVSAKPTDPPGFVSSLPCYPLGQLKC

SEQ ID NO: 848 - protein, 587 aa, Chlamydomonas sp.
PKQHPRLPHRAGKKTQQSSSHSLRTCVCPHTNNNPTCSDSNCSCKPIFLTNIPDASKSLKSRTSDQGSTSSAQDFYEYWDSSRQDLYRQLLWLPKTGSQGLVSSSLNGFARSTPVRSSFSITKTEPLNTSLEKTSCPSFKYIVADGTVEDATKSNAKPKLRTLKLKLNPTKAQKSMLAEFAGCSRFMYNKVAARLGVGSTHKSVFRIRDRYVTNKVRGEGKMPNPYFKNRQWLLQCPKSVRQSAIKAALANIKACFSNLKAGNIKQFSAPFRRKKTELERGWAIEMDQKNVSKDGDKLFIFKDILGNMRYFGSKQLHKLMPEENPTHDPKVHKSRFGEYFLVLSVAARDRRAERKPVHPDKVATASIDPGVRKTMVTYSPENEESFMLGQGQASDLVKLLLVHDKLQSRLDTEKTLRSKERMKIKMQMIRIRKRIFYLKKEFRDQTTNFLAARYDVLLVPQLETAKMTISAERELTIKVARQMLTLSHSVLFNWLKEKCEEYGTVFLHVLEHYTSQTCPMCGFLNKCGETYTCKNCQFTCDRDIVGAAGIFLKAVRTEKSPGELTPMIPIWRIHCLSYYMSPGPPDV

SEQ ID NO: 849 - protein, 370 aa, Chlamydomonas sp.
MLWRKYFNVQGLETKRSRFDNRILSDGKGVSVQMKQKGKEEVVEEGENAGYPKDANIVECKDAVGALRVGVDPGMTDIVTVASSAGRIESFSSARFSEVAGYNTSKRRTYKWNDETQDLVKSIPLPNTSNMVDLQDHVRAYLKALPILLQHRANKGYRSMRFFRYVGKQKTIGKVCDMIAPRAQTTVVGFGNWSNQGYGISRSCSGPIKEIRRCLSRRKNVLFKNVDERNTSCKCHGCFQRLVNMKADSVVWRGVCKESPIDGSITVEKQKMVVKNVKVHKVLHCRDSVKSASSNVRCGATWNRDVNAAKNLLLLLTTWMDGRERPEAFCVPSPPPKTTVSIEASVSAKPTDPPGFVSSLPCYPLGQLKC

SEQ ID NO: 850 - protein, 561 aa, Chlamydomonas sp.
METIVNKEPPDKRTRPDRAAKIKDRKNGEENVVKCTLSRIIADKDNKDVIIKVIKERVDSISKRTYLAGVAVNRILKEVFEGVPDAQLHTVSVPSIDQNFIRQLMVGSRQAHMETRDATVERFFHNNYWFREKIEGREVIVKKKKQYVGAIARYDGDRNLYSHASKKYLTNFNKHYRVHLSTWIKKFVYSKENRILAKEIKDEHGIDETVFHRYLLYDIHSWGVKEDLIAIHSLLPERTKMLLKIQHSILGRDEINRQWLKSVSNSAKMIRYNVFINRYLEATEDEGYAKLVNIAPIPTVKHAFITIDTDGLLGVLKDVGLIESLEKTLTNKEHWESVFNVENICSTGKGVFTCTIDTDGVMACTHFLRAEKKKISIKDDGTAIKKQTKTLREFSESDPNMVVVANDPGRCNIAFLTWKKNKVEEKDKGGRKRKRHCEFGSKRLTRERYYVESGVFKSRGPTKKWLSNIQDCLDDLKDNSPKRTSLVSFDAYVTVMVNHWDSRWGEMSKSRWGAQRLRLYGGKKRVLARFFNEVQADVGERKTINGRSCLPADFFKFLIRI

SEQ ID NO: 851 - protein, 794 aa, Chlamydomonas sp.
ECSREPVCRSRLHQNVFGVQFVMENGIGESSSLVHEADQHDDVAELVDYEGEEDGECAPGRAICVVKMKLSTFIPHDWLRNKIDTLVLDMNKLLGEGYIFANFHIARLFENGIAVPPVNRNFFYRCLIAVSTNKCKGSTLGEDFESSRLLFDLLREPGQSKVDIRGNVKNQIIADLSILMATMASNHLWTNLERRITTYLKWKYPQIAKRLRSDIVAALIKCPTKNLDVIFKMSPHTTKLPTKLPTSRLRSAKSAVALAKKRVGRKEPEGSPLRVRLTKLQERLEKLSEAWLSSKNLRVDADNAKRFFAREVAFCLRGVLPLPSGNTFASRAHMTLPLYHKILSETIEEKRKTKNEKHRTFSLLPYKSGFTLSHIPISKMAFFYMVNECHFDSCKADVASKNHQGIWERFANLKKVETVSRKFGYRIVTDGFAVSILMNKPTCLTCSMPADAFSTRAHEYVTTDEGGIVSFLDNVVVAAVDPGVTDIVTVTGLNGGTRSYSSAQYYRKGLIFKSQRQTDVWNLETADIVGGIIPERDSSSSEQIGAYARFYMGASPILLAHRASRGYRNLRFRRYCKKQKLIVEIADFVAPREKSAKVLVGFGDWKGLGATPISRRTCGPLQAIRFELRSRENVIMEDIDEFRTSQRCSCCENHLCNMVALTHRKKQDGTGWECTEGRKRIHKILHCKSSQSGAPRQQSGGMLHCGKTWDRDVNASRNILMLTLHQVFGRERPLAFRRDAPRSSSTTPPPPPDTDMGTQTVERFTKEATRNIFENLFNLLHPPTLPKSNDLQSG

SEQ ID NO: 852 - protein, 601 aa, Chlamydomonas sp.
QCIRNLHVLNIRMPCMATNASVKLARPPMPLVSPGPSSVDGRIMARSERSGLQATNVSLTQAASKATSSSRKKNPTVVKSFSTHVCPHTNNNPTCSDSNCSCKPIFLTNIPDASKSLKSLKSRTSDQGSTSSAQDFNEYWDSSRQDLYRQLLWLPKTGSQGLVSSSLNGFARSTPARSSFSITKTEPLKTSLDKTSCPSFKYIVADGMVEYATKSNAKPKLRTLKLKLNPTKAQKSMLAEFAGCSRFMYNKAVAARLGVGSTHKSVFRIRDRYVANKVRGKGKMPNPYFKNRQWLLQCPKSVRQSAIKAALANIKACFSNLKAGNIKQFSAPFRRKKTELERGWAIEMDQKNFSKDGDKLFIFKDILGNMRYFGSKQLHKLMPEENPTHDPKVQKSRFGEYFLVLSVAARDRRAERKPVHPDKVANASINLGVRKTMVTYSPENEESFMLGQGQASDLVKLLLVHDKLQSRLDTEKTLRSKERMKIKKQMIRIRKRIFYLKKEFRDQTTNFLAARYDVLLVPQLETAKMTISAERELTTKVARQMLTLSHSVLFNRLKEKCEEYGTVFLHVLEHYTSQTCPMCGFLNKCGETYTCKNCQFS

SEQ ID NO: 853 - protein, 350 aa, Chlamydomonas sp.
RETLLCTRRGILSRGVLPLPSGNTFASRAHMTLPLYHKILSETIEEKRKTKNEKHRTFSLLPYKSGFTLSHIPISKMAFFYMVNECHFDSCKADVASKNHQGIWERFANLKKVETVSRKFGYRIVTDGFAVSILMNKPTCLTCSMPADAFSTQAHEYVTTDEGGIVSFLDNVVVAAVDPGVTDIVTVTGLNGGTRSYSSAQYYRKGLIFKSQRQTDVWNLETADIVGGIIPDRDSSSSEQIGAYARFYMGAAPILLAHRASRGYRNLRFRRYCKKQKLIVEIADFVAPREKSAKVLVGFGDWKGLGATPISRRTCGPLQAIRFELRSRENVIMEDIDEFRKRHRRYLVLL

SEQ ID NO: 854 - protein, 794 aa, Chlamydomonas sp.
ECSREPVCRSRLHQNVFGVQFVMENGIGESSSLVHEADQHDDVAELVDYEGEEDGECAPGRAICVVKMKLSTFIPHDWLRNKIDTLVLDMNKLLGEGYIFANFHIARLFENGIAVPPVNRNFFYRCLIAVSTNKCKGSTLGEDFESSRLLFDLLREPGQSKVDIRGSVKNQIIADLSILMATMASNHLWTNLERRITTYLKWKYPQIAKRLRSDIVAALIKCPTKNLDVIFKMSPHTTKLPTKLPTSRLRSAKSAVALAKKRVGRKEPEGSPLRVRLTKLQERLEKLSEAWLSSKNLRVDADNAKRFFAREVAFCLRGVLPLPSGNTFASRAHMTLPLYHKILSETIEEKRKTKNEKHRTFSLLPYKSGFTLSHIPISKMAFFYMVNECHFDSCKADVASKNHQGIWERFANLKKVETVSRKFGYRIVTDGFAVSILMNKPTCLTCSMPADAFSTRAHEYVTTDEGGIVSFLDNVVVAAVDPGVTDIVTVTGLNGGTRSYSSAKYYRKGLIFKSQRQTDVWNLETADIVGGIIPDRDSSSSEQIGAYARFYMGAAPILLAHRASRGYRNLRFRRYCKKQKLIVEIADFVAPRKKSAKVLVGFGDWKGLGATPISRRTCGPLQAIRFELRSRENVIMEDIDEFRTSQRCSCCENHLCNMVALTHRKKQDGTGWECTEGRKRIHKILHCKSSQSGAPRQQSGGMLHCGKTWDRDVNASRNILMLTLHQVFGRERPLAFRRDAPRSSSTTPPPPPDTDMGTQTVERFTKEATRNIFENLFNLLHRSTLPKSNDLQSG

SEQ ID NO: 855 - protein, 450 aa, Chlamydomonas sp.
SRRLHVAQRPARKKKRSCGPGEWEAYNSALKQYDDDVKDIKATDEYRHAKGLYDTLVNARKTVADSFFRKPPVKNGWVFDCSICTDGVSLSMQYSKKVQVRVSDIKKTSMRSRDNEGLSVAEQYDRKLETTLTEMGIVVLGVDPGRSNIATVTYLAKGKSKTWKLTRGAFYHKSGIKKQKKQQEKRFSDMIPRWESLRENGAALSTSRKDDISAYLKNYATFSDKWWKMALRRRESRDNFQRYIGKRKAMDSFWAGIKRNMKLDHPDLRVRIAYGSAIKTMKATGPGEVAVPTGSMFASCKRLFKEEVHVTDEFKTTLMSWETGAKKECVYKIPSVQITTEGQIRLGYELLGHTPLKETPKVSYRDQLAVRVYCTRKKIQEKHRRGGLAPSLVDNKSIKRYPEVRGLRFSPETSTYSDRDRSSALTIARLHCMELLGQGRPLPFCRDACC

SEQ ID NO: 856 - protein, 277 aa, Chlamydomonas sp.
ESVFDVENICSIGKGVLTCTIDTDGVMACTHFLRAEKKKISIKDDGTAIKKQTKTLREFSESDPNVVVVANDPGRCNIAFLTWKKNKVEEKDKGGRKRKRHCEFGSKRLTRERYYVESGVFKSRGPTKKWLSNIQDCLDDLKDNSPKRTSLVSFDAYVTVMVNHWDSRWGEMSKSRWGAQRLRLYGGKKRVLARFFNEVHADVGERKTIVVACGSAKFAPGGKGEISVPTTSAFKAFSDRFKGRVAVTDEFRTTQIWHKDSTTVLQSVQSKKEGRTV

SEQ ID NO: 857 - protein, 735 aa, Chlamydomonas sp.
NAPLKKAMSLDDEEFGKFREHVDQLVNVVSRMLRRSSLVLTFHITSLLEKGLEIPDLYNMKDTYWKDWLRIGVDGIFPDEESKISYEAVKDSIGDVIGNDDADYIKSYPIYFDQVLNYAGHTLSTVVSNNAWVPLIPRLARLTSTTLNKLNAPKTLDTSKIIRGYEVMQAIQQEVQNMEGWPESVQEYVNEVREMLSVPDGSRVYDNYGKDIDFPTMVLFNYWIQTRLEDMDARRIRLMPIFNVQRVHVRLDLKTLVNLFRHMFPNDQNIVELSKWEHVKNPDSFMLSQRPAQKKKRSCGPGEWEAYKSVMKQYDDDVKDIKATDEYRHAKGLYDTLVNARKTVAGSFFRKPPVKNGWVFDCSICTDGVSLSMQYSKTVQVLVSDLKKTCKNPRKEEGIKIAEKYDGSLKTILPDMGIVVLGVDPGRSNIATVPYLADDKNKTWKLTRGAFYHKSGIKKQTRQKELRFADMIPMWEALRENGAALSTSRTDNISAYLSNYAKFSEEWWRLALRRRESRDNLQRYIGKRKVKESFWAGIKRCMMKELPDMKVCVAYGSAITKLKPTGPGEVAVPTGAMFASCKRIFKEDVSVTDEFKTTLMSWETGKEKERVYKIPSVCSADVKLRLGGERFGHTKSKTMPKVADCDHLGVRLYNKRKGAQEKHRRGGFATSLVDSQKSIERYPKVRGLRFSPETCIYSDRDRSSALTIARLHCMELMGLGRPLPFSHSSSVVVDE

SEQ ID NO: 858 - protein, 409 aa, Chlamydomonas sp.
KRKQQKKRPRLFSILPRKSGFTISYVPISSMTLMKLLSMGDSPLESFRGDGRHENHSMLWRKYFNVQGLETKGSRFDNRILSDGKGVSVQMKHQASEDVAVEGGDNAGYPKDAILEDCQDASLRVGVDPGMTDIVTVASSAGRVESFSSARFSEAAGYNTSNRRTNKWNVDTQDLVKSIPSPTTSSMHDMQDHVRGYLSALPTLLQHRASRGYRSMRFFRYVGKQKTIEKVCDLIAPKAQKKTIEEKVCDVIAPKAQKTIVGFGNWSNQGYGISRSCSGPVKEIRKCLSRRQNVLFKNVDERNTFCTCHGCFQKLINMKADSVVWRRVQNEPPSLINGAPTTTTTTTLWCNLEPRRERCQEPSSASDDVDGRERATGDILCALIIAHPKNHSFRRGKCGRSTNRPTWVS

SEQ ID NO: 859 - protein, 813 aa, Chlamydomonas sp.
PRMEHVCDVCIKSSVMYKLCKMATKPPTVAKLKELLKLAEVAYSSKDKKDDIVRLCEDNGLIARPPPEYKTVEKMCVVKCALKKAMSLDDEEFGKFREHVDQLVNVVSRMLRRSSLVLTFHITSLLEKGLDIPDLYNMKDTYWKDWLRIGVDGIFSDEESKISYEAVKDSIGDVIGNDDADYIKSYPIYFDQVLNYAGHTLSTVVSNNAWVPLIPRLARLTSTTLNKLNAPKTLDTSKIIRGYDVMQAIQQEVQNMEGWPESVQEYVNEVREMLSVPDGSRVYDNYGKDMDFPTMVRFNYWIQTRLEDMDARRIRLMPIFNVQRVHVRLDLKTLVNLFRHMFPNDQNIVELSKWEHVKNPDSFMLSQRPAQKKKKSCGPGEWEAYKSVMKQYDDDVKDIKATDEYRHAKGLYDTLVNARKTVAGSFFRKPPVKNGWVFECSICTDGVSLSMQYSKTVQVLVSDLKKTCKNPRKEEGIKIAEKYDGSLKTIFPDMGIVVLGVDPGRSNIATVTYLADDKNKTWKLTRGAFYHKSGIKKQTRQKELRFADMIPMWESLRENGAALSTSRTDNISAYLSNYAKFSDEWWRLALRRRESRDNLQRYIGKRKVKDSFWAGIKRCMMKELPDMKVCVAYGSAITKLKPTGPGEVAVPTGAMFASCKRIFKEDVSVTDEFKTTLMSWETGKEKERVYKIPSVCSADVKLRLGGERFGHTKSKTMPKVADCDHLGVRLYNKRKGAQEKHRRGGFATSLVDSQKSIERYPEVRGLRFSPETCIYSDRDRSSALTIARLHCMELMGLGRPLPFAHSSSVVVDE

SEQ ID NO: 860 - protein, 590 aa, Chlamydomonas sp.
RLTWKWKYPQIAKRLRSDIVAAVIKCPTKNLDVIFKMSPHTTKLPTKLPTTRLRSAKSAVALAKKRVGRKEPEGSPLRVRLTKLQERLEKLSESWLSSKNIRVDADNAKRFFARDMAFCLRGVLPLPSGNTFASRAHMTLPLYHKILSETIEEKRKTKNEKHRTFSLLPYKSGFTLSHIPISKMAFFYMVNECHFDSCKADVASKNHQGIWERFANLKKVETVSRKFGYRIVTDGFAVSILMNKPTCLTCSMPADAFSTRAHEYVTTDEGGIVSFLDNVVVAAVDPGVTDIVTVTGLNGGTRSYSSAQYYRKGLIFKSQRQTDVWNLETADIVGGIIPDRDSSSSEQIGAYARFYMGAAPILLAHRASRGYRNLRFRRYCKKQKLIVEIADFVAPREKSAKVLVGFGDWKGLGATPISRRTCGPLQAIRFELRSRENVIMEDIDEFRTSQRCSCCENHLCNMVALTHRKKQDGTGWECTEGRKRIHKILHCKSSQSGAPRQQSGGMLHCGKTWDRDVNASRNILMLTLHQVFGRERPLAFRRDAPRSSSTTPPPDTDMGTQTVERFTKEATRNIFENLFNLSHAIACLPT

SEQ ID NO: 861 - protein, 686 aa, Chlamydomonas sp.
METIVNKEPPDKRTRPDRAAKIKDRKNGEENVVKCTLSRIIADKDNKDVITKVIKERVDSVSKRTYLAGVAVNRILKEVFEGVPDAQLHTVSVPSVDQNFIRQLMVGSRQAHMETRDATVERFFHNNYWFREKIEGREVIVKKKKQYVGAIARYDGDRNLYSHASKKYLTNFNNHYRVHLSTWIKKFVYSKENRILAKEFKDEHGIDETVFHRYLLYDIHSWGVKEDLIAIHSLLPERTKMLLKIQHSIIGRDEINRQWLKSVSNSAKMIRYNVFINRYLEATEDEGYAKLVNIAPIPTVKHSFITIDTDGLLGVLKDVGLVESLEKTLTNKEHWESVFDVENIRSTGKGVFTCTIDTDGVMACTHFLRAEKKKISIKDDGTAIKKQTKTLREFSESDPNVVVVANDPGRCNIAFLTWKKNKVEEKDNGGRKRKRHCEFGSKRLTRERYYVESGVFKSRGPTKKWLSNIQDCLDDLKDNSPKRTSLESFDAYVTVMVNHWDSRWGEMSKSRWGAQRLRLYGGKKRVLARFFNEVQADVGERKTIVIAYGSSKFAPGGKGELSVPTTSAFNAFRDRFKGRVAVIDEFRTTKIWHKDNTTVLQSVQSEKKGRTVRGLLWCSSTMENSKLFVNRDLNAAINIHNCFTMYPTRPGILARPKKYCKLEVVVGRTIDYKLTGSLQNAVSSEV

SEQ ID NO: 862 - protein, 786 aa, Chlamydomonas sp.
ECSREPVCRSRLHQNVFGVQFVMENGIGESSSLVHEADQHDDVAELVDYEGEEDGECAPGRAICVVKMKLSTFIPHDWLRNKIDTLVLDMNKLLGEGYIFANFHIARLFENGIAVPPVNRNFFYRCLIAVSTNKCKGSTLGEDFESSRLLFDLLREPGQSKVDIRGSVKNQIIADLSILMATMASNHLWTNLERRITTYLKWKYPQIAKRLRSDIVAALIKCPTKNLDVIFKMSPHTTKLPTKLPTSRLRSAKSAVALAKKRVGRKEPEGSPLRVRLTKLQERLEKLSEAWLSSKNLRVDADNAKLFFAREVAFCLRGVLPLPSGNTFASRAHMTLPLYHKILSETIEEKRKTKNEKHRTFSLLPYKSGFTLSHIPISKMAFFYMVNECHFDSCKADIASKNHQGIWERFANLKKVETVSRKFGYRIVTDGFAVSILMNKPTCLTCSMPADAFSTRAHEYVTTDEGGIVSFLDNVVVAAVDPGVTDIVTVTGLNGGTRSYSSAKYYRKGLIFKSQRQTDVWNLETADIVGGIIPDRDSSSSEQIGAYARFYMGAAPILLAHRASRGYRNLRFRRYCKKQKLIVEIADFVAPRKKSAKVLVGFGDWKGLGATPISRRTCGPLQAIRFELRSRENVIMEDIDEFRTSQRCSCCENHLCNMVALTHRKKQDGTGWECTEGRKRIHKILHCKSSQSGAPRQQSGGMLHCGKTWDRDVNASRNILMLTLHQVFGRERPLAFRRDAPRSSSTTPPPDTDMGTQTVERFTKEATRNIFENLFNLSHAIACLPT

SEQ ID NO: 863 - protein, 307 aa, Chlamydomonas sp.
RSSRVFQLCPRVSESSWVQYQQSSHKWNADTQDLVKSIPSPTTSSMQDHVRGYLSALPTLLQHRANRGYRSMRFFRYVGKQKTIEKVCDLIAPKAQKKTIEEKGCDVIAPKAKKTVVGFGNWSNQGYGISRSCSGPVKEIRKCLSRRQNVLFKNVDERNTSCTCHGCFQKLVNMKADSVVWRRVQNEPSALIDGAPTTTTTIEKQKTVVKNVKVHKVLHCRNSVKSASSNVRCGATWNRDVNAAKNLLLLLTTWMDGKERPAAFCVPSSSPPPKTTVSGEENVGAQQTDPPGSVSSLQLLSSGQLKC

SEQ ID NO: 864 - protein, 793 aa, Chlamydomonas sp.
KMATKPPTVAKLKELLKLAEVPYSSKSNKDDLVRLCEDNGLIARPPPEYKTVEKMCVVKCALKKAMSLDDEEFGKFREHVDQLVNVVSRMLRRSSLVLTFHITSLLEKGLDIPDLYNMKDTYWKDWLRIGVDGIFPDEESKISYEAVKDSIGDVIGNDDADYIKSYPIYFDQVLNYAGHTLSTVVSNNAWVPLIPRLARLTSTTLNKLNAPKTLDTSKIIRGYDVMQAIQQEVQNMEGWPESVQEYVNEVREMLSVPDGSRVYDNYGKDMDFPTMVRFNYWIQTRLEDMDARRIRLMPIFNVQRVHVRLDLKTLVNLFRHMFPNDQNIVELSKWEHVKNPESFMLPQRPAQKKKKSCGPGEWDAYKSVLKQYDDDVKDIKATDEYRHAKGLYDTLVNARKTVAGSFFRKPPVKNGWVFDCSICTDGVSLSMQYSKTVQVLVSDLKKTCKKPRKEEGIKIAEKYDGSLKTILPDMGIVVLGVDPGRSNIATVTYLADDKNKTWKLTRGAFYHKSGIKKQTRQKELRFADMIPMWESLRENGAALSTSRTDKISAYLSNYAKFSDEWWRLALRRRESRDNLQRYIGKRKVKDSFWAGIKRCMMKELPDMKVCVAYGSAITKLKPTGPGEVAVPTGAMFESCKRIFKEDVSVTDEFKTTLMSWETGKEKERVYKIPSVCSADVKLRLGGERFGHTKSKTMPKVADCDHLGVRLYNKRKGAQEKHRRGGFATSLVDSQKSIERYPEVRGLLFSPETCIYSDRDRSSALTIARLHCMELMGLGRPLPFAHSSSVVVDE

SEQ ID NO: 865 - protein, 686 aa, Chlamydomonas sp.
METIVNKEPPDKRTRPDRAAKIKDRKNGEENVVKCTLSRIIADKDNKDVITKVIKERVDSVSKRTYLAGVAVNRILKEVFEGVPDAQLHTVSVPSVDQNFIRQLMVGSRQAHMETRDATVERFFHNNYWFREKIEGREVIVKKKKQYVGAIARYDGDRNLYSHASKKYLTNFNNHYRVHLSTWIKKFVYSKENRILAKEFKDEHGIDETVFHRYLLYDIHSWGVKEDLIAIHSLLPERTKMLLKIQHSIIGQDEINRQWLKSVSNSAKMIRYNVFINRYLEATEDEGYAKLVNIAPIPTVKHSFITIDTDGLLGVLKDVGLVESLEKTLTNKEHRESVFDVENIRSTGKGVFTCTIDTDGVMACTHFLRAEKKKISIKDDGTAIKKQTKTLREFSESDPNVVVVANDPGRCNIAFLTWKKNKVEEKDNGGRKRKRHCEFGSKRLTRERYYVESGVFKSRGPTKKWLSNIQDCLDDLKDNSPKRTSLESFDAYVTVMVNHWDSRWGEMSKSRWGAQRLRLYGGKKRVLARFFNEVQADVGERKTIVIAYGSSKFAPGGKGELSVPTTSAFNAFRDRFKGRVAVIDEFRTTKIWHKDSTTVLQSVQSEKKGRTVRGLLWCSSTMENSKLFVNRDLNAAINIHNCFTMYPTRPGILARPKKYCKLEVVVGRTIDYKLTGSLQNAVSSEV

SEQ ID NO: 866 - protein, 621 aa, Chlamydomonas sp.
QCIRNLHVLNIRMPCMATNASVKLARPPMPLVSPGPSSVDGRIMAQSERSGLQATNVSLTQAASKATSSSRKKNPAVVKSFSTHVCPHTNNNPTCSDSNCSCKPIFLTNIPDASKSLKSRTSDQGSTSSAQDFYEYWDSSQQDLYRQLLWLPKTGSQGLVSSSLNGFARSTPARSSFSITKTEPLKTSLEKTSCPSFKYIVADGTVEDATKSNAKPKLRTLKLKLNPTKAQKSMLVEFAGCSRFMYNKAVAARLGVGSTHKSVFRIRDRYVTNKVRGEGKMPNPYFKNRQWLLQCPKSVRQSAIKAALANIKACFSNLKAGNIKQFSAPFRRKKTELERGWAIEMDQKNVSKDGDKLFIFKDILGNMRYFGSKQLHKLMPEENPTHDPKVKKSRFGEYFLVLSVAARDRRAERKPVHPDKVATASIDPGVRKTMVTYSPENEESFMLGQGQASDLVKLLLVHDKLQSRLDTEKNLRSKERMKIKMQMIRIRKRIFYLKKEFRDQTTNFLAARYDVLLVPQLETAKMTISAERELTTKVARQMLTLSHSVLFNRLKEKCEEYGTVFLHVLEHYTSQTCPMCGFLNKCGETYTCKNCQFTCFRDIVGAAGIFLKAVRTENPCS

SEQ ID NO: 867 - protein, 794 aa, Chlamydomonas sp.
ECSREPVCRSRLHQNVFGVQFVMENGIGVSSSLVHEADQHDEVAELVDYEGEEDEECAPGRAICVVKMKLSTFTPHDWLRNKIDTLILDMNKLLGEGYIFSNFHIARLFENGIAVPPVNRNFFYRCLIAVSTNKCKGSTLGEDFESSRLLFDLLREPGQSKVDIRGNVKNQIIADLSILMATMASNHLWTNLERRITTYLKWKYPQIAKRLRSDIVAALIKCPTKNLDVIFKVSPHTTKLPTKLPTARLRSAKSAVALAKKRVGRKEPEGSPLRVRLTKLQERLEKLSEAWLSSKNIRVDADNAKRFFARDVAFCLRGGLPLPSGNTFASRAHMTLPLYHKILSETIEEKRKTKNEKHRTFSLLPYKSGFTLSHIPISKMAFFYMVNECHFDSCKADVASKNHQGIWERFANLKKVETVSRKFGYRIVTDGFAVSILMNKPTCLTCSMPADAFSTRAHEYVTTDEGGIVSFLDNVVVAAVDPGVTDIVTVTGLNGGTRSYSSAQYYRKGLIFKSQRQTDVWNLETADIVGGIIPDRDSSSSEQIGAYARFYMGAAPILLAHRASRGYRNLRFRRYCKKQKLIVEIADFVAPREKSAKVLVGFGDWKGLGATPISRRTCGPLQAIRFELRSRENVIMEDIDEFRTSQRCSCCENHLCNMVALTHRKKQDGTGWECTEGRKRIHKILHCKSSQSGAPRQQSGGMLHCGKTWDRDVNASRNILMLTLHQVFGRERPLAFRRDAPRSSSTTPPPPPDTDMGTQTVERFTKEATRNIFENLFNLLHPPTLPKSNDLQSG

SEQ ID NO: 868 - protein, 278 aa, Chlamydomonas sp.
ETWYKSGIKKQKKQQEKRFSDMIPRWESLRENGAALSTSRTDDISAYLKNYATFSDEWWRMALLRRESRDNFQRYIGKRKAMDSFWAGIKRNMKLDHPDLRVRVAYGSAITTLKATGPGEVAVPTGSMFASCKEEVHVTDEFKTTLMSWETGAKKECVYKIPSVQITTEGQIRLGYELLGHTPLKETPKVSYRDQLAVRVYCARKQIQEKHRRGGLAPSLVDNNSIKRYPEVRGQRFSPETSTYSDRDRSSALTIARLHCMELLGQGRPLPFCRDACC

SEQ ID NO: 869 - protein, 310 aa, Chlamydomonas sp.
FKRVHMNTSEKTLHLGNTQFIFQQKNKKFPTNPYFKRVHTEPPLKGLSHLGNNNYFKQKIRNHQSIPILWKRLCLCLVPWVGKQKTIEKVCDLIAPKAQKKTIEEKVCDVIAPKAKKTVVGFGNWSNQGYGISRSCSGPVKEIRKCLSRRQNVLFKNVDERNTSCTCHGCFQKLVNMKADSVVWRRVQNEPSALIDGAPTTTTTTTFEKQKTVVKNVKVHKVLHCRNSVKSASSNVRCGATWNRDVNAAKNLLLLLTTWMDGKERPAAFCVPSSSPTPKTTVSGEANVGAQPTDPPGSVSSLQLLSSGPA

SEQ ID NO: 870 - protein, 446 aa, Chlamydomonas sp.
KRKQQKKRPRLFSILPRKSGFTISYVPISSMTLMKLLSMGDSPLESFRGDGRHENHSMLWRKYFNVQGLETKGSRFDNRILSDGKGVSVQMKHQASEDVAVDNAGYPKDAILENCQDASLRVGVDPGMTDIVTVASSDGRVESVSSARFSEAAGYNTSNRRTNKWNVDTQDLVKSIPSPTTSSMHDMQDHVRGYLSALPTLLQHRASRGYRSMRFFRYVGKQKTIEKVCDLIAPKAQKKTIEEKVCDVIAPRAQTTVVGFGNWSNQGYGISRSCSGPIKEIRRCLSRRKNVLFKNVDERNTSCTCHGCFQKLVNMKADSVVWRRVQNEPPSLINGAPTTTTTIEKQKTVVKNVKVHKVLHCRNSVKSASSKVRCGATWNRDVNAAKNLLLLLTTWMDGKERPATFCVPSSSPTPKTTVSGEANVGAQPTDPLGSVSSLQLLSSGPA

SEQ ID NO: 871 - protein, 701 aa, Chlamydomonas sp.
YQDKKRTLPPSISMGVVTNNGDDDDDLDIMVVKKTLNSLCMDVSRQQICSRIQSMVLVINHAVAEAYLFANFHITRCLDDVDFDVKQLPHLDRNFYYRCILAVSTSNVRKDTLGQSLKDSMVAFDALRPAGYLKVDVRQWGQVIADVSIQMATMACNSVWANVDRVVIKYLRLKHPSLKKHFNKIVKAVVQYPESDIDKIIPASLVHANLIKDVVRRLRDLLPLPRGKQFNTRAHLTMRLFHHVLTELGADLKEKTTKKRPRLFSILPRKSGFTISYVPISSMTLMKLLSMGDLPLESFRGDGRHENHSMLWRKYFNVQGLETKGSRFDNRILSDGKGVSVQMKHQASEDVAVEGGDNAGYPKDASIEDCQDASLRVGVDPGMTDIVTVASSAGRVESFSSACFSEAAGYNTSNRRTNKWNVDTQDLVKSIPSPTTSSMHDMQDHVRGYLSALPTLLQHRASRGYRSMRFFRYVGKQKTIEKVCDLIAPKAQKKTIEEKVCDVIAPKAQKTIVGFGNWSNRGYGISRSCSGPVKEIRKCLSRRQNVLFKNVDERNTSCTCHGCFQKLINMKADSVVWRRVQNEPPSLINGAPTTTTTIEKQKTVVKNVKVHKVLHCRNSVKSASSNVRCGATWNRDVNAANNLLLLLTTWMDGKERPATFCVPSSSPTPKTTVSGEANVGAQPTDPPGSVSSLQLLSSGPA

SEQ ID NO: 872 - protein, 637 aa, Chlamydomonas sp.
ISSRIQSMVLLINHAVAEAYLFANFHITRCLDDGDFDVKQLPHLDRNFYYRCLLAVSTSNVRKDTLGQSFNDTMVAFDALRPAGYVKVDVRPWGQVIADVSIQMATMACNSVWANVDRVVIKYLRLKHPSLKKHFKKIVKAVVQYPESKIDTIIPEGLLHAIHIKEVVSHLRALFPMPRGKQFNTRAHLTMRLFHHVLTELGEVGRVDPKDKKTRKSHPRLFSILPRKNGFTISYVPISSMTFMKLLSMGDSPLESVSGDGRYENHTMLWRKYFNVQGLETKRSRFDNRILSDGKGVSVQMKQKGKEEVVEEGENAGYPKDANIVECNDAVGALRVGVDPGMTDIVTVAFSAGRIESFSSARFSEVAGYNTSKRRTYKWNDETQDLVKSIPSPNTSNMSDLQDHVRAYLKALPILLQHRANKGYRSMRFFRYVGKQKTIEKVCDVIAPRAQTTVVGFGNWSNQGYGISRSCSGPIKEIRRCLSRRKNVLFKNVDERNTSCKCHGCFQRLVNMKADSVVWRGVCKESPIDGSIIVEKQKMVVKNVKVHKVLHCRDSVKSASSNVRCGATWNRDVNAAKNLLLLLTTWMDGRERPEAFCVPSPPPKTTVSIEASVSAKPTNPPGFVSSLPCYPLGQLKC

SEQ ID NO: 873 - protein, 509 aa, Chlamydomonas sp.
VGYRQNHPSESRACEPHQRRCQTPERSLAAAKGEAVQHSSAPDNETVSSRAYRVGSGSKRENKKKRPRLFSILPRKSGFTISYVPISSMTLMKLLSMGDSPLESFRGDGRHENHSMLWRKYFNVQGLETKGSRFDNRILSDSKGVSVQMKHQASEDVAVEGGDNAGYPKDAILEDCQDASLRVGVDPGMTDIVTVASSAGRVESFSSARFSEAAGYNTSYRRTNKWNVDTQDLVKSIPSPTTSSMHDMQDHVRGYLSALPTLLQHRASRGYQSMRFFRYVGKQKTIEKVCDLIAPKAQKKTIEEKVCDVIAPKAQKTIVGFGNWSNQGYGISRSCSGPVKEIRKCLSRRQNVLFKNVDERNTSCTCHGCFQKLVNMKADSVVWRRVQNEPPSLINGAPTTTTTTTIEKQKTVVKNVKVHKVLHCRNSVKSASSNVRCGATWNRDVNAAKNLLLLLTTWMDGKERPATFCVPSSSPTPKTTVSGEANVGAQPTDSPGSVSSLQLLSSGPA

SEQ ID NO: 874 - protein, 549 aa, Chlamydomonas sp.
METIVNKEPPDKRTRPDRAAKIKDRKNGEENVVKCTLSRIIADKDNKDVITKVIKERVDSVSKRTYLAGVAVNRILKEVFEGVPDAQLHTVSVPSVDQNFIRQLMVGSRQAHMETRDATVERFFHNNYWFREKIEGREVIVKKKKQYVGAIARYDGDRNLYSHASKKYLTNFNNHYRVHLSTWIKKFVYSKENRILAKEFKDEHGIDETVFHRYLLYDIHSWGVKEDLIAIHSLLPEQTKMLLKIQHSIIGRDEINRQWLKSVSNSAKMIRYNVFINRYLEATEDEGYANLVNIAPIPTVKHAFITIDTDGLLGVLKDVGLVESLEKTLTNKEHWESVFDVENIRSTGKGVFTCTIDTDGVMSCTHFLRAEKKKISIKDDGTAIKKQTNTLREFSESDPNVVVVANDPGRCNIAFLTWKKNKVEEKDKGGRKRKRHCEFGSKRLTRERYYVESGVFKSRGPTKKWLSNIQDCLDDLKDNSPKRTSLESFDAYVTVMVSHWDSRWGEMSKSRWGAQRLRLYGGKKRVLARFFNEVQADVGERKTIVIRFF

SEQ ID NO: 875 - protein, 598 aa, Chlamydomonas sp.
ATYLKWKYPQIAKRLRSDIVAAVIKCPTKNLDVIFKMSPHTTKLPTKLPTARLRSAKSAVALAKKRVGRKEPEGSPLRVRLTKLQARLEKLSEAWLSSKNLRVDADNAKRFFARDVAFCLRGVLPLPPGNTFASRAHMTLPLYHKILSETIEEKRKTKNEKHRTFSLLPYKSGFTLSHIPISKMAFFYMVNECHFDSCKADVASKNHQGIWERFANLKKVETVSRKFGYRIVTDGFAVSILMNKPTCLTCSMYADAFSTRAHEYVTTDESGIVSFRDNVVVAAVDPGVTDIVTVTGLDGGTRSYSSAQYYRKGLIFKSQRQTDVWNLETADIVGDIIPDRDSSRSEQIGAYARFYMGAAPILLAHRASRGYRNLRFRRYCKKQKLIVEIADFVAPKEKRAKVLVGFGDWNGLGATPISRRTCGPLQAIRFELRSRENVIMEDVDKFRTSQRCSCCENRLCNMVALTHRKKQDGTGWDCTEGRNRIHKILHCKSSQSGAPRQQSGGRLHCGKTWDRDVNASRNILMLTLHQVFGRERPLAFRRDAPRSSSKTPPPPPDTDMGTQTVERFTKEATRNIFENLFNLLHLPTLPKSNDLQSG

SEQ ID NO: 876 - protein, 660 aa, Chlamydomonas sp.
CFTTAMGDDDSCIMVVKTTLNSLCRDTSRQQLCSRIREMVGTMNKVVAEAYLFANFHVTRCLDNPTFDVEFLPKLDRNFYYRCLLAVSRSNIRKGSLGESLTASMDAFDGLRPEGCPKTDVRPWGQVVADLSIQMATMACNSVWSNLSKIVVKYLRLKYPSLKKHFDRIVKAVVQFPKSDINNFVPSNIGNAVEVKSVINHLWSLLPTSTGNQFNTRAHLTMRLFHSVLSELVSSSSSEPNRRAPRLFSLLPRKIGFTISYIPISSMIFMKILSMGNTPLEKIRGDGRLEDHDRLWRKYFNIGSVETKVSRFDCRIITDGKGVSIQMRRELGQCLMETSGYPKDSSIGECIDATTHRNARCAGVDPGMTDIATVAFSGGGGTQSFSSSHFSHTAGYKTSKRRTDKWNVETSELVKSIPTSMTTSMDGMERHVQAYLVALPTLLQHRTNKGYRSMRFFRYVGKQKAIEEVCDMIAPRDTPTIVGFGNWSNQGNGISRPCSGPVKEFRKRLSHMGNVLFKNIDERNTSCTCHGCFERLVNMKANSVRWRRGQIGQLGVAVKEKVMVKNVKVHKKLHCCNSVGSAPSVRCGTTWNRDVNASKNILLLLMTWVAGQERPAAFCVPSKNKITTSREATEMLRPVDPSLGSIGHTRLLSSVHQLKC

SEQ ID NO: 877 - protein, 512 aa, Chlamydomonas sp.
QDRREVSTPKVSFIKKHFDRIVKAVVQFPKSDINNFVPSNIGNAVEVKSVINHLWSLLPTSTGNQFNTRAHLTMRLFHSVLSELVSSSSSEPNRRAPRLFSLLPRKIGFTISYIPISSMIFMKILSMGNTPLEKIRGDGRLEDHDRLWRKYFNIGSVETKVSRFDCRIITDGKGVSIQMRRELGQCLMETSGYPKDSSIGECIDATTHRNARCAGVDPGMTDIATVAFSGGGGTPSFSSSHFSHTAGYKTSKRRTDKWNVETSELVKSIPTSMTTSMDGMERHVQAYLVALPTLLQHRTNKGYRSMRFFRYVGKQKAIEEVCDMIAPRDTPTIVGFGNWSNQGNGISRPCSGPVKEIRKRLSHRGNVLFKNIDERNTSCTCHGCFERLVNMKANSVRWRRGQIGQLGVAVKEKVMVKNVKVHKILHCCNSVGSAPSVRCGTTWNRDVNASKNILLLLMTWVAGQERPAAFCVPSKNKITTSREATEMLRPVDPSLGSIGHTRLLSSVHQLKC

SEQ ID NO: 878 - protein, 343 aa, Chlamydomonas sp.
CFTTAMGDDDSCIMVVKTTLNSFCRDTSRQQLCSRIREMVSTMNQVVAEAYLFANFHVTRCLDDPTFEVECLPKLDRNFYYRCLLAVSRSNIRKGTLGESLTTSMDAFDGLRPEGCPKTDVRPWGQVASDLSIQMATMACNSVWSNLSKIIVKYLRLKYPSLKKHFDRIVKAVVQFPKSDINNFVPSIRKRLSQRGNVLFKNIDERNTSCICHGSFERLVNMKANSVRWRRGQIGQLGVSVKEKVMVKNVKVHKILHCCNSVGSAPSVRCGTTWNRDVNASKNILLLLMTWVAGQERPAAFCVPSKNKITTSREATEMLRPVDPPLGSIGHTRFLSSEHQLKC

SEQ ID NO: 879 - protein, 238 aa, Chlamydomonas sp.
AIAYHVRAYLEALPILLQHRANKGYRSMQFFRYVGKQKTIEKVCDVIAPRAQTTVVGFGNWSNQGYGISRSCSGPIKEIRRCLSRRNNVLFKNVDERNTSCKCHGCFQRLVNMKADSVVWRGVCKESPIDGSITVEKQKMVVKNVKVHKVLHCRDSVKSASSNVRCGATWNRDVNAAKNLLLLLTTWMDGTERPEAFRVPSPPPKTAVSIEASVSAKPTDPPGFVSSLPCYPLGQLKC

SEQ ID NO: 880 - protein, 688 aa, Chlamydomonas sp.
GNVGAILYHQKKKNTHPLLMGVVQDKGDDDINISVVKKTLNSLCMDVSGHQISSRIQSMVLLINHAVAEAYLFANFHITRCLDDGDFDVKQLPHLDRNFYYRCLLAVSTSNVRKDTLGQSFNDTMVAFDALRPAGYVKVDVRPWGQVVADVSIQMATMACNSVWANVDRVVIKYLRLKHPSLKKHFKKIVKAVVQYPESKIDTIIPEGLVHAIHIKEVVSHLRALFPLPRGKQFNTRAHLTMRLFHHVLTELGEVGRVDPKDKKTKKSHPRLFSILPRKNGFTISYVPKSSMTFMKLLSMGDSPLESVSGDGRYENHTMLWRKYFNVQGLETKRSRFDNRILSDGKGVSVQMKQKGKEEVVEEGENAGYPKDANIVECKDAVGALRVGVDPGMTDIVTVASSACRIESFSSARFSEVAGYNTSKRRTYKWNDETQDLVKSIPSPNTSNMVDLQDHVRAYLKALPILLQHRANKGYRSMRFFRYVGKQKTIEKVCDVIAPRAQTTVVGFGNWSNQGYGISRSCSGPIKEIRRCLSRRKNVLFKNVDERNTSCKCHGCFQRLVNMKADSVVWRGVCKESPINGSITVEKQKMVVKNVKVHKVLHCRDSVKSASSNVRCGATWNRDVNAAKNLLLLLTTWMDGRERPEAFCVPSHPTKTTVSIEASVSAKPTDPPGFVSSLPCYPLGQLKC

SEQ ID NO: 881 - protein, 249 aa, Chlamydomonas sp.
GHSIPSPNTSNMVDLQDHVRAYLKALPILLQHRANKGYRSMRFFRYVGKQKTIEKVCDVIAPRAQTTVVGFGNWSNQGYGISRSCSGPIKEIRRCLSRCKNVLFKNVDERNTFCKCHGCFQRLVNMKADSVVWRGVCKESPIDGSITVEKQKMVVKNVKVHKVLHCRDSVKSASSNVRCGATWNRDVNAAKNLLLLLTTWMDGRERPEAFCVPSPPPKTTVSIEASVSAKTDRPTWVCQQLALLSFGPA

SEQ ID NO: 882 - protein, 568 aa, Chlamydomonas sp.
ATNVSLTQAASKATSSSRKKNPAVVKSFSTHVCPHTNNNPTCSDSNCSCKPIFLTNILDASKSLKSRTSDQGSTSSAQDFYEYWDSSRQDLYRQLLWLPKTGSQGLVSSSLNGFARSTPARSSFSITKTEPLKTSLEKTSCPSFKYIVADGTVEDATKSNDKPKLRTLKLKLNPTEAQKSMLAEFAGCSRFMYNKAVAARLGVGSTHKSVFRIRDRYVTNKVRGKGKKPNPYFKNRPWLLQCPKSVRQSAIKSALANIKACFSNLKAGYIKQFSAPFRRKKTELERGWAIEMDQKNVSKDGDKLFIFKYILGNMRYFGSKQLHKLMPEENPTHDPKVQKSRFGEYFLVLSVAARDRRAERKPVHPDKVATASIDPGVRKTMVTYSPENEESFMLGQGQASDLVKLLMVHDKLQSRLDTEKTLRSKERMKIKKQMIPIRKRIFYLKKEFRDQTTNFLSARYDVLLVPQLETAKMTISAERELTTKVARQMLTLSHSVLFNRLKEKCEEYGTVFLHVLEHYTSQTGPMCGFLNKCGETYTCKNCQFTCDRDIVGAAGIFLKAVRTENPCS

SEQ ID NO: 883 - protein, 793 aa, Chlamydomonas sp.
KMATKPPTVAKLKELLKLAEVPYSSKSNKDDLVRLCEDNGLIARPPPEYKTVEKMCVVKCALKKAMSLDDEEFGKFREHVDQLVNVVSRMLRRSSLVLTFHITSLLEKGLDIPDLYNMKDTYWKDWLRIGVDGIFPDEESKISYEAVKDSIGDVIGNDDADYIKSYPIYFDQVLNYAGHTLSTVVSNNAWVPLIPRLARLTSTTLNKLNSPKTLDTSKIIRGYDVMQAIQQEVQNMEGWPESVQEYVNEVREMLSVPDGSRVYDNYGKDMDFPTMVRFNYWIQTRLEDMDARRIRLMPIFNVQRVHVRLDLKTLVNLFRHMFPNDQNIVELSKWEHVKNPDSFMLPQRPAQKKKKSCGPGEWEAYKSVLKQYDDDVKDIKATDGYRHAKGLYDTLVNARKTVAGSFFRKPPVKNGWVFDCSICTDGVSLSMQYSKTVQVLVSDLKKTCKKPRKEEGIKIAEKYDGSLKTILPDMGIVVLGVDPGRSNIATVTYLADDKNKTWKLTRGAFYHKSGIKKQTRQKELRFADMIPMWESLRENGAALSTSRTDKISAYLSNYAKFSDEWWRLALRRRESRDNLQRYIGKRKVKDSFWAGIKRCMMKELPDMKVCVAYGSAITKLKPTGPGEVAVPTGAMFASCKRIFKEDVSVTDEFKTTLMSWETGKEKERVYKIPSVCSADVKLRLGGERFSHTKSKTMPKVADCDHLGVRLYNKRKGAQEKHRRGGFATSLVDSQKSIERYPEVRGLRFSPETCIYSDRDRSSALTIARLHCMELMGLGRPLPFAHSSSVVVDE

SEQ ID NO: 884 - protein, 695 aa, Chlamydomonas sp.
LRRKCVQGNVGAVLYHQKKKNTHPLLMGVVQDKGDDDINISVVKKTLNSLCMDVLRHQISSRIQSMVLLINHAVAEAYLFANFHITRCLDDGDFDVKQLPHLDRNFYYRCLLAVSTSNVRKDTLGQSFNDTMVAFDALRPAGYVKVDVRPWGQVIADVSIQMATMACNSVWANVDRVVIKYLRLKHPSLKKHFKKIVKAAVQYPESKIDTIIPEGLVHAIHIKEVVSHLRALFPLPRGKQFNTRAHLTMRLFHHVLTELGEVGRVDPKDKKTKKSHPRLFSILPRKNGFTISYVPISSMTFMKLLSMGDSPLESVSGDGRYENHTMLWRKYFNVQGLETKRSRFDNRILSDGKGVSVQMKQKGKEEVVEEGENAGYPKDANIVECKDAVGALRVGVDPGMTDIVTVASSAGRIESFSSARFSEVAGYNTSKRRTNKWNDETQDLVKSIPSPNTSNMVDLQDHVRAYLKALPILLQHRANKGYRSMRFFRYVGKQKTIEKVCDVIAPRAQTTVVGFGNWSNQGYGISRPCSGPIKEIRRCLSRHKNVLFNNVDERNTSCKCHGCFQRLVNMKADSVVWRGVCKESPIDESITVEKQKMVVKNVKVHKVLHCRDSVKSASSNVRCGATWNRDVNAAKNLLLLLTTWMDGRERPEAFCVPSPPPKTTVSIEASVSAKPTDPPGFVSSLPCYPLGQLKC

SEQ ID NO: 885 - protein, 307 aa, Chlamydomonas sp.
STMLWRKYFNVQGLETKRSRFDNRLLSDGKGVSVQMKQKGKEEVVEEGENAGYPKDANIVECKDAVGALRVGVDPGMTDIVTVASSAGRIESFSSARFSEVAGYNTSKRRTYKWNDETQDLVKSIPSPNTSNMSDLQDHVRAYLKALPILLQHRANKGYRSMRFFRYVGKQKTIEKVCDVIAPRAQTTVVGFGNWSNQGYGISRSCSGPIKEIRRCLSRRKNVLFKNADERNTSCKCHGCFQRLVNMKADSVVWRGVCKESPIDGSITVEKQKMVVKTSRSTKYCTLETVSKAHHPMCAVVQPGIKT

SEQ ID NO: 886 - protein, 646 aa, Chlamydomonas sp.
SSSVRLVKRAGQSKVDIRGKVKNQIVADLSILMATMSSNHLWTNLERRITTYLKWKYPQIAKRLRSDIVAAVIKCPTKNLDVIFKMSPHVAKLPTKLPTARLRSAKSAVALAKKRVGRKEPEVSPLRVRLTKLQARFEKLSEAWLSSKNLRVDEDNAKRFFARDVAFCLRGVLPLPSGNTFASRAHMTLPLYHKILSETIEEKRKTKNEKLRTFSLLPYKSGFTLSHIPISKTAFFYMVNECQFDSCKADVASKNHQGIWERFANLKKVETVSRKFGYRIVTDGFAVSILMNKPTCLTCSMPADSFSTRAHEYVTTDEGGIVSFRDNVVVAAVDPGVTDIVTVTGLDGGTRSYSSAQYYRKGLIFKSQRQTDVWNLETADIVNDIIPDRDSSRSEQIGAYARFYMGAAPILLAHRASRGYRNLRFRRYCKKQKLIVEIADFVAPREKSAKVLVGFGDWKGLGATPISRRTCGPLQAIRFELRSRGNVIMEDVDEFRTSQRCSCCENRLCNMVALTHRKKQDGTGWECTEGRKRIHKILHCKSSQSGAPRQQSGGRLHCGKTWDRDVNASRNILMLTLHQVFGRERPLAFRRDAPRSSSKTPPPPDTDMGTQTVERFTKEATRNIFENLFNLLHPPTLPKRNDLQSG

SEQ ID NO: 887 - protein, 621 aa, Chlamydomonas sp.
QCIRNLHVLNIRMPCMATNASVKLARPPMPLVSPGPSSVDGRIMARSERSGLQATNVSLTQAASKATSSSRKKNPAVVKSFSTHVCPHTNNNPTCSDSNCSCKPIFLTNIPDASKSLKSRTSDQGSTSSAQDFYEYWDSSRQDLYRQLLWLPKTGTQGLVSSSLNGFARSTPARASFSITKTGPLKTSLEKTSCPSFKYIVAGGTVEDATKSNAKPKLRTLKLKLNPTKAQKSMLAEFAGCSRFMYNKAVAARLGVGSTHKSVFRIRDRYVTNKVRGEGKMPNPYFKNRQWLLQCPKSVRQSAIKGALANIKACFSNLKAGNIKQFSAPFRRKKTELERGWAIEMDQKNVSKDGDKLFIFKEILGNMRYFGSKQLHKLMPEENPTHDPKVQKSRFGEYFLVLSVAARDRRAEWKPVHPDKVATTSIDPGVRKTMVTYSPENEESFMLGQGQASDLVKLLLVHDKLQSRLDTEITLRSKERMKIKMQMIRIRKRMFYLKKEFRDQTTNFLAARYDVLLVPQLETAKMTISAERELTTKVARQMLTLSHFVLFNRLKEKCEEYGTVFLHVLEHYTSQTCPMCGFLNKCGETYTCKNCQFTRDRDIVGAAGIFLKAVRTENPCS

SEQ ID NO: 888 - protein, 657 aa, Chlamydomonas sp.
GRMRRGAMLLKEVKIQSIVQSIVQRIQSMVLLINHAVAEAYLFANFHITRCLDDGDFDVKQLPHLDRNFYYRCLFAVSTSNVRKDTLGQSFNDTMVAFDALRPAGYVKVDVRPWGQVIADVSIQMATMACNSVWANVDRVVIKYLRLKHPSLKKHFKKIVKAVVQYPESKIDTIIPEGLVHAIHIKEVVSHLRALFPLPRGKQFNTRAHLTMRLFHHVLTELGEVGRVDPKDKKTRKSHPRLFSILPRKNGFTISYVPISSMTFMKLLSMGDSPLESVSGDGRYENHTMLWRKYFNVQGLETKRSRFDNRILSDGKGVSVQMKQKGKEEVVEEGENAGYPKDANIVECKDAVGALRVGVDPGMTDIVTVASSAGRIESFSSARFSEVAGYNTSKRTYKWNDETQDLVKSIPSPNTSNMSDLQDHVRAYLKALPILLQHRANKGYRSMRFFRYVGKQKTIEKVCDVIAPRAQTTVVGFGNWSNQGYGISRSCSGPIKEIRRCLSRRKNVLFKNVDERNTSCKCHGCFQRLVNMKADSVVWRGVCKESPIDGSITVEKQKMVVKNVKVHKVLHCRDSVKSASSNVRCGATWNRDVNAAKNLLLLLTTWMDGRERPEAFCVPSPPPKTTVSIEASVSAKPTDPPGFVSSLPCYPLGQLKC

SEQ ID NO: 889 - protein, 686 aa, Chlamydomonas sp.
METIVNKEPPDKRTRPDRAAKIKDRKNGEENVVKCTLSRIIADKDNKDVITKVIKERVDSVSKRTYLAGVAVNRILKEVFEGVPDAQLHTVSVPSVDQNFIRQLMVGSRQAHMETRDATVERFFHNNYWFREKIEGREVIVKNKKQYVGAIARYDGDRNLYSHASKKYLTNFNNHYRVHLSTWIKKFVYSKENRILAKEFKDEHGIDETVFHRYLLYDIHSWGVKEDLIAIHSLLPERTKMLLKIQHSIIGRDEINRQWLKSVSNTAKMIRYNVFINRYLEATEDEGYAKLVNIAPIPTVKHSFITIDTDGLLGVLKDVGLVESLEKTLTNKEHWESVFDVENIRSTGKGVFTCTIDTDGVMACTHFPRAEKKKISIKDDGTAIKKQTKTLLEFSESDPNVVVVANDPGRCNIAFLTWKKNKVEEKDKGGRKRKRHCEFGSKRLTRERYYVESGVFKSRGPTKKWLSNIQDCLDELKDNSPKRTSLELFDAYVTVMVNHWDSRWGEMSKSRWGAQRLRLYGGKKRVLARFFNEVQADVGERKTIVIAYGSSKFAPGGKGELSVPTTSAFYAFSDRFKGRVAVIDEFRTTKIWHKDSTTVLQSVQSEKEGRTVRGLLWCSSTMENSKLFVNRDLNAAINIHNCFTMYPTRPGILARPKKYCKLEVVVGRTIDYKLTGSLQNAVSSEV

SEQ ID NO: 890 - protein, 280 aa, Chlamydomonas sp.
AIEMDQKNVSKDGDKLFIFKDILGNMRYFGSKQLHKLMPEENPTHDPKVQKSRFGEYFLVLSVAARDRRAERKPVHPDKVATASIDPGVRKTMVTYSPENEESFMLGQGQASDLVKLLLVHEKLQTRLDTEKTLRSKERMKIKMQMIRIRKRIFYLKKEFRDQTTNFLAARYDVSLVPQLETAKMTISAERELTTKVARQMLTFSHSVLFNRLKEKCEEYGTVFLHVLEHYTSQTCPMCGFLNKCGETYTCKNCQFTCDRDIVGAAGIFLKAVRTENPCS

SEQ ID NO: 891 - protein, 534 aa, Chlamydomonas sp.
MATMACNSVWANVDRVVIKYLRLKHPSLKKHFKKIVKAVVQYPESKIDTIIPEGLVHAIHIKEVVSHLRALFPLPRGKQFNTRAHLTMRLFHHVLTELGEVGLVDPKDKKTKKSHPRLFSILPRKNGFTISYVPISSMTFMKLLSMGDSPLESVSGDGRYENHTMLWRKYFNVQGLETKRSRFDNRILSDGKGVSVQMKQKGKEEVVEEGENAGYPKDANIVECKDAVGALRVGVDPGMTDIVTVASSAGRIESFSSARFSEVAGYNTSKRRTYKWNDETQDLVKSIPSPNTSNMVDLQDHVRAYLKALPILLQHRANKVYRSMRFFRYVGKQKTIEKVCDVIAPRAQTTVVGFGNWSNQGYGISRSCSGPIKEMRRCLSRRKNVLFKNVDERNTSCKCHGCFQRLVNMKADSVVWRGVSKESPIDGSITFEKQKMVVKNVKVHNVLHSRDSVKSASSNVRCGATWNRDVNAAKNLLLLLTTWMDGRERPEAFCVPSPPPQTTVSNEASVSAKPTDPPGFVSSLPCYPLGQLKC

SEQ ID NO: 892 - protein, 793 aa, Chlamydomonas sp.
KMATKPPTVAKLKELLKLAEVPYSSKSNRDDLVRLCEDNGLIATPPPEYKTVEKMCVVKCALKKAMSLDDEEFGKFREHVDQLVNVVSRMLRRSSLVLTFHITSLLEKGLDIPDLYNMKDTYWKDWLRIGVDGIFPDEESKISYEAVKDSIGDVIGNDDADYIKSYPIYFDQVLNYAGHTLSTVVSNNAWVPLIPRLARLTSTTLNKLNAPKTLDTSKIIRGYDVMQAIQQEVQNMEGWPESVQEYVNEVREMLSVPDGSRVYDNYGKDMDFPTMVRFNYWIQTRLEDMDARRIRLMPIFNVQRVHVRLDLKTLVNLFRHMFPNDQNIVELSKWEHVKNPDSFMLPQRPAQKKKKSCGPGEWEAYKSVLKKYDDDVKDINATDEYRHAKGLYDTLVNARKTVAGSFFRKPPVKNGWVFDCSICTDGVSLSMQYSKTVQVLVSDLKKTCKKPRKEEGIKIAEKYDGSLKTILPDMGIVVLGVDPGRSNIATVTYLADDKNKTWTLTRGAFYHKSGIKKQTRQKELRFADMIPMWESLRENGAALSTSRTDKISAYLSNYAKFSDEWWRLALRRRESRDNLQRYIGKRKVKDSFWAGIKRCMMKELPDMKVCVAYGSAITKLKPTGPGEVAVPTGAMFASCKRIFKEDVSVTDEFKTTLMSWETGKEKERVYKIPSVCSADVKLRLGGERFGHTKSKTMPKVADCDHLGVRLYNKRKGAQEKHRRGGFATSLVDSQKSIERYPEVRGLRFSPETCIYSDRDRSSALTIARLHCMELMGLGRPLPFAHSSSVVVDE

SEQ ID NO: 893 - protein, 801 aa, Chlamydomonas sp.
PRMEHVCDVCIKSSVMYKLCKMATKPPTVAKLKELLKLAEVAYSSKDKKDDIVRLCEDNGLIARPPPVYKTVEKMCVVKCALKKAMSLDDEEFGKFREHVDQLVNVVSRMLRRSSLVLTFHVTRLMEGDLPIPNMYDMKDTYWKDWLRIGVDGVFPDEESRISYESVKDVIGKVLGSDDPDYINSYPIYFDQVLNYAGHTLSTVVSNNAWVPLVPRLTRLTKATLNALEAPKTIRVYDVMRVIQQEIQEMESWPESVQEYVREVRVRLKVPDGSRLYDDYGKYMDFPTMVRFNYWMQTRLEAIGARRIRLMPIFNVQRAHVRLDMKTLVNLFRHVFPKDPNIVELSKWKDVKDPDRFMLPLKPAVKKKKSCGPGELEAYKLAQQKYDADVNDIKDTDEYRHAKGRYDTLVNARKTVAGSFFKKPPVKTGWVFDCSICTDGVSLSMQYSKTVQVRVSDLKKTSKRSRDDEGMSVSEQYDHKLKTTLPDMGIVVLGVDPGRSNIATVTYLADDKSKTWKLTRGAFYHKSGIKKQKKQQEKRFSDMIPRWESLRENGAALSTSRTIDISAYLKNYDTFSDEWWRMALLRRESRDNFQRYIGKRKAMDSFWAGIKRNMKLDHPDLRVRVAYGSAITTLKATGPGEVAVPTGSMFASCKRLFKEEVHVTDEFKTTLMSWETGAKKECVYKIPSVQITTEGQIRLGYELLGHTPLKETPNVSYRDQLAVRVYCTRKQIQEKHRRGGLAPSLVDNNSIKRYPEVRGLRFSPETSTYSDRDRSSALTIARLHCMELLGQGRPLPFCRDA

SEQ ID NO: 894 - protein, 803 aa, Chlamydomonas sp.
PRMEHVCDVCIKSSVMYKLCKMATKPPTVAKLKELLKLAEVAYSSKDKKDDIVRLCEDNGLIASPPPEYKTVEKMCVVKCALKKAMSLDDEEFGKFRGHVDQLVNVVSRMLRRSSLVLTFHVTRLMEGDLPIPNMYDMKDTYWKDWLRIGVDGVFPDEESRISYESVKDVIGKVLGSDDPYYINSYPIYFDQVLNYAGHTLSTVVSNNAWVPLVPRLTRLTKATLNALGAPKTIRAYDVMRVIQQEIQEMESWPESVQEYVREVRVRLKVPDGSRLYDDYGKDMDFPTMVRFNYWMQTRLESIGARHIRLMPIFNVQRAHVRLDMKTLVNLFRHVFPKDPNIVELSKWKNVKDPDRFMLPPKPAVKKKKSCGPGEWEAYKLAQQKYDADVNDIKDTDEYRHAKGRYDTLVNARKTVAGSFFKKPPVKTGWVFDCSICTDGVSLSMQYSKTVQVRVSDLKKTSKRSRDDEGMSVSEQYDHKLKTTLLDMGIVVLGVDPGRSNIATVIYLADDKSKTWKLTRGAFYHKSGIKKQKKQQEKRFSEMIPRWESLRENGAALSTSRTDDISAYLKNYATFSDEWWRMALLRRESRDNFQRYIGKRKAMDSFWAGIKRNMKLDHPDLRVRVAYGSAITTLKATGPGEVAVRTGSMFASCKRLFKEEVHVTDEFKTTLMSCETGAKKECVYKIPSVQITTEGQIRLGYELLGHTPLKETPKVSYRDQLAVRVYCTRKQIQEKHRRGGLAPSLVDNNSIKRYPEVRGLRFSPETSTYSDRDRSSALTIARLHCMELLGQGRPLPFCRDACC

SEQ ID NO: 895 - protein, 795 aa, Chlamydomonas sp.
LWKMATKPPTVAKLKELLKLAEVPYSSKSNKDDLVRLCEDNGLIARPPPEYKTVEKMCVMKCALKKAMSLDDEEFGKFRGHVDQLVNVVSRMLRRSSLVLTFHITSLLEKGLEIPDLYNMKDTYWKDWLRIGVDGIFPDEESKISYEAVKDSIGDVIGNDDADYIKSYPIYFDQVLNYAGHTLSTVVSNNAWVPLIPRLARLTSTTLNKLNAPKTLDTSKIIRGYDVMQAIQQEVQNMEGWPESVQEYVNEVREMLSVPDGSRVYDNYGKDMDSPTMVRFNYWIQTRLEDMDARRIRLMPIFNVQRVHVRLDLKTLVNLFRHMFPNDQNIVELSKWEHVKNPDSFMLPQRPAQKKKKSCGPGEWEAYKSVLKQYDDDVKDIKATDEYRHAKGLYDTLVNARKTVAGSFFRKPPVKNGWVFDCSICTDGVSLSMQYSKTVQVLVSDLKKTCKNPRKEEGIKIAEKHDGSLKTILPDMGIVVLGVDPGRSNIATVTYLADDKNKTWTLTRGAFYHKSGIKKQTRQKELRFADMIPMWESLRENGAALSTLRTDKISAYLSNYAKFSDEWWRLALRRRESRDNLQRYIGKRKVKDSFWAGIKRCMMKELPDMKVCVAYGSAITKLKPTGPGEVAVPTGAMFASCKRIFKEDVSVTDEFKTTLMSWETGKEKERVYKIPSVCSADVKLRLGGERFGHTKSKTMPKVADCDHLGVRLYNKRKGAQEKHRRGGFATSLVDSQKLIERYPEVRGLRFSPETCIYSDRDRSSALTIARLHCMELMGLGRPLPFAHSSSVVVDE

SEQ ID NO: 896 - protein, 332 aa, Chlamydomonas sp.
RIWVTWWQANHHLQYRCGDIPPFVCWARDIVNGGIRSYSSAQYYRKGLIFKSQRQTDVWNLETADIVGGIIPDRDSSSSEQIGAYARFYMGAAPILLAHRASRGYRNLRFRRYCKKQKLIVEIADFVAPREKSAKVLVGFGDWKGLGATPISRRTYGPLQAIRFELRSLENVIMEDIDEFRTSQRCSCCENHLCNMVALTHRKKQDGTGWECTEGRKRIHKILHCKSSQSGAPRQHSGGMLHCGKTWDRDVNASRNILMLTLHQVFGRERPLAFCRDAPRSSSTTPPPPPDTDMGTQTVERFTKEATRNIFENLFNLLHPPTLPKSNDLQSG

SEQ ID NO: 897 - protein, 711 aa, Chlamydomonas sp.
GNCPLVWYHQNNNHSLSMGVVTNNGDDDDLDIMVVKKTLNSLCMDVSRQQICSRIQSMVLVINHAVAEAYLFAIFHITRCLDDGDFDVKQLPHLDRNFYYRCILAVSISTVRNDTLDQSLKDSMVAFDALRPAGYLKVDVCQWGQVIADVSIQMATMACNSVWANVDRVVIKYLRLKHPSLKKHFNKIVKAVVQYPDSDIDKIIPAGLVHANLIKDVVRRLRDLLPLPRGKQFNTRAHLTMRLFHHVLTELGADLKEKTTKKRPRLFSILPRKSGFTISYVPISSMTLMKLLSMGDSPLESVRGDGRHENHSMLWRKYFNVQGLETKGSRFDYRILSDGKGVSVQMKHQVGKDIAGEGGGDNAGYPKDASIEDCQDASLRQGALRVGIDPGMTDIVTIASSDGRVESFSSARFSEAAGYNTSNHRTNKWNADTQDLVKSIPSPTTSSMHDMQDHVRGYLSALPTLLQHRANRGYRSMRFFRYVGKQKTIEKVCDLIAPKAQKTTIEKVCDVIAPKAKKTVVGFGNWSNQGYGISRSCSGPVKEIRKCLSRRQNVLFKNVDERNTSCTCHGCFQKLVNMKADSVVWRRVQNEPSALIDGAPTTTTTTTFEKQKTVVKNVKVHKVLHCRNSVKSASSNVRCGATWNRDVNAAKNLLLLLTTWMDGKERPAAFCVPSSSPTPKTTVSGEANVGAQPTDPPGSVSSLQLLSSGPA

SEQ ID NO: 898 - protein, 794 aa, Chlamydomonas sp.
ECSREPVCRSRLHQNVFGVQFVMENGIGESSSLVHEADQHDDVAELVDYEGEEDGECAPGRAICVVKMKLSTFIPHDWLRNKIDTLVLDMNKLLGEGYIFANFHIARLFENGIAVPPVNRNFFYRCIIAVSTNKCNGSTLGEDFESSRLLFDLLREPGQSKVDIRGRVKNQIIADLSILMATMASNHLWTNLERRITTYLKWKYPQIAKRLRSDIVAALIKCPTKNIDDIFKMSPHTTKLPTKLPTSRLRSAKSAVALAKKRVGRKEPEGSPLRVRLTKLQERLEKLSEAWLSSKNLRVDADNAKRFFAREVAFCLRGVLPLPSGNTFASRAHMTLPLYHKILSETIEEKRKTKNEKHRTFSLLPYKSGFTLSHIPISKMAFFYMVNECHFDSCKADVASKNHQGIWERFANLKKVETVSRKFGYRIVTDGFAVSILMNKPTCLTCSMPADAFSTRAHEYVTTDEGGIVSFLDNVVVAAVDPGVTDIVTVTGLNGGTRSYSSAQYYRKGLIFKSQRQTDVWNLETADIVGGIIPDRDSSSSEQIGAYARFYMGAAPILLAHRASRGYRNLRFRRYCKKQKLIVEIADFVAPRKKSAKVLVGFGDWKGLGATPISRRTCGPLQAIRFELRSRENVIMEDIDEFRTSQRCSCCENHLCNMVALTHRKKQDGTGWECTEGRKRIHKILHCKSSQSGAPRQQSGGMLHCGKTWDRDVNASRNILMLTLHQVFGRERPLAFRRDAPRSSSTTPPPPLDTDMGTQTVERFTKEATRNIFENLFNLLHPPKLPKSNDLQSG

SEQ ID NO: 899 - protein, 304 aa, Chlamydomonas sp.
LNGGTRSYSSAKYYRKGLIFKSQRQTDVWNLETADIVGGIIPDRDSSSSEQIGAYARFYMGAAPILLAHRASRGYRNLRFRRYCKKQKLIVEIADFVAPRKKSAKVLVGFGDWKGLGATPISRRTCGPLQAIRFELRSRENVIMEDIDEFRTSQRCSCCENHLCNMVALTHRKKQDGTGWECTEGRKRIHKILHCKSSQSGAPRQQSGGMLHCGKTWDRDVNASRNILMLTLHQVFGRERPLAFRRDAPRSSSTTPPPPPDTDMGTQTVERFTKEATRNIFENLFNLLHPPTLPKSNDLQSGLL

SEQ ID NO: 900 - protein, 298 aa, Chlamydomonas sp.
ATPHVFFLDFPSAGRIESFSSARFSEVAGYNTSKRRTYKWNDETQDLVKSIPSPNTSNMVDLQDHVRAYLKALPILLQHRANKGYRSMRFFRYVGKQKTIEKVCDMIAPREQTTVVGFGNWSNQGYGISRSCSGPIKEIRRCLSRRKNVLFKYVDERNTSCKCHGCFQRLVNMKADSVVWRGVCKESPIDGSITVEKQKMVVKNVNVHKVLHCRDSVKSVSSNVRCGATWNRDVNAAKNLLLLLTTWMDGRERPEAFCVPSPPPKTTVSIEASVSAKPTDPPGFVSSLPCYPLGQLKC

SEQ ID NO: 901 - protein, 273 aa, Chlamydomonas sp.
RSCGYNTSKRRTYKWNDETQDLVKSIPSPYTSNMVDLQDHVRAYLKALPILLQHRANKGYRSMRFFRYVGKQKTIEKVCDMIAPREQTTVVGFGNWSNQGYGISRSCSGPIKEIRRCLSRRKNVLFKYVDERNTSCKCHGCFQRLVNMKADSVVWRGVCKESPIDGSITVEKQKMVVKNVNVHKVLHCRDSVKSASSNVRCGATWNRDVNAAKNLLLLLTTWMDGRERPEAFCVPSPPPKTTVSIEASVSAKPTDPPGFVSSLPCYPLGQLKC

SEQ ID NO: 902 - protein, 485 aa, Chlamydomonas sp.
KMSTALTRPYSTDTSSTISTLGGVKEDLIAIHSLLPERTKMFLKIQHSIIGRDEINRQWLKSVSNSAKMIRYNVFINRYLEATEDEGYAKLVNIAPIPTVKHSFITIDTDGLLGVLKDVGLVESLEKTLTNKEHWESVFDVENIRSTGKGVFICTIDTDGVMACTHFLRAEKKKISIKDDGTAIKKQTKTLREFSESDPNVVVVANDPGRCNIAFLTWKKNKVEEKDKGGRKRKMHCEFGSKRLTRERYYVESGVFKSRGPTKKWLSNIQDCLDDLKDNSPKRTSLESFDAYVTVMVNHWDSRWGEMSKSRWGPRLRLYGGKKRVLARFFNEVQADVGERKTIVIAYGSSKFAPGGKGELSVPTTSAFNAFSDRFKGRVAVIDEFRTEKIWHKDSTTVLQSVQSEKEGRTVRGLLWCSSTMENSKLFVNRDLNAAINIHNCFTMYPTRPGILARPKKYCKLEVVVGRTIDYKLTGSLQNAVSSEV

SEQ ID NO: 903 - protein, 615 aa, Chlamydomonas sp.
QCIRNLHVLNIRMPCMATKASVKLARPPMPLVSPGPSSVDGQIMARSGLQATNVSLTQAASKATSSSRKKKPAVVKSFSTHVCPHTNNNTTCSDSNCSCKPIFLTNIPDASKSRTSDQGSTSSALDFYEYWDSSRQDMYRQLLWLPKTGTQGLVSSSFNGFAHSTPTRSSFSITKTEPLKTSLEKTSCPSFKYIVTDGTVEDATKSNAKPKLRTLKLKLNPTKAQKSMLAEFAGCSRFMYNKAVAARLGVGSTHKSVFRIRDRYVTNKVRGEGKMPNPYFKNRQWLLQCPKSVRQSAIKSALANIKACFSNLKAGNIKQFSAPFRRKKTELERGWVIEMDQKNVSKDGDKLFIFKEILGNMRYFGSKQLHKLMPEENPTHDPKVQKSRFGEYFLVLSVAARDRRAERKPVNPDKVATASIDPGVRKTMVTYSPENEESFMLGQGQASDLVKLLLVHDKLQSRLDTEKTLRSKERMKIKKLMIRIRKTIFYLKKEFRDQTTNFLAARYDVLLVPQLETAKMTISAERELTTKVARQMLTLSHSVLFNRLKEKCEEYGTVLLHVLEHYTSQTCPMCGFLNKCGETYTCKNCQFTCDRDIVGAAGIFLKAVRTENPCS

SEQ ID NO: 904 - protein, 801 aa, Chlamydomonas sp.
PRMEHVCDVCIKSSVMYKLCKMATKPPTVAKLKELLKLAEVAYSSKDKKDDIVRLCEDNGLIARPPPEYKTVEKMCVVKCALKKAMSLDDEEFGKFREHVDQLVNVVSRMLRRSSLVLTFHVTRLMEGDLPIPNMYDMKDTYWKDWLRIGVDGVFPDEESRISYEAVKDVIGKVLGSDDPDYINSYPIYFDQVLNYAGHTLSTVVSNNAWVPLVPRLTRLTKATLNALKAPKTIRVYDVMRVIQQEIQEMESWPESVQEYVREVRVRLKVPDGSRLYDDYGKDMDFPTMVRFNYWMQTRLEDMDARRIRLMPIFNVQRAHVRLDMKTLVNLFRHVFPKDPNIVELSKWKDVKDPDRFMLPLKPAFKKKKSCGPGEWEAYKLAQQKYDADVNDIKDTDEYRHAKGRYDTLVNARKTVAGSFFKKPPVKTGWVFDCSICTDGVSLSMQYSKTVQVRVSDLKKTSKRSRDDEGMSVSEQYDHKLKTTLPDMGIVVLGVDPGRSNIATVTYLADDKSKTWKLTRGAFYHKSGIKKQKKQQEKRFSDMIPRWESLRENGAALSTSRTDDISAYLKNYDTFSDDWWRMALLRRESRDNFQRYIGKRKAMDSFWAGIKRNMKLDHPDLRVRVAYGSAITTLKATGPGEVAVPTGSMFASCKRLFKEEVHVTDEFKTTLMSWETGAKKECVYKIPSVQITTEGQIRLGYELLGHTPLKETPNVSYRDQLAVRVYCTRKQIQEKHRRGGLAPSLVDNNSIKRYPEVRGLRFSPETSTYSDRDRSSALTIARLHCMELLGQGRPLPFCRDA

SEQ ID NO: 905 - protein, 801 aa, Chlamydomonas sp.
PRMEHVCDVGIKSSVMYKLCKMATKPPTVAKLKELLKLAEVAYSSKDKKDDIVRLCEDNGLIAKPPPEYKTVEKMCVVKCALKKAMSLDDEEFGKFREHVDQLVNVVSRMLRRSSLVLTFHVTRLMEGDLPIPNMYDMKDTYWKDWLRIGVDGVFPDEESRISYEAVKDVIGKVLGSDDPDYINSYPIYFDQVLNYAGHTLSTVVSNNAWVPLVPRLTRLTKATLNALKAPKTIRVYDVMRVIQQEIQEMESWPESVQEYVREVRVRLKVPDGSRLYDDYGKDMDFPTMVRFNYWMQTRLEAIGARRIRLMPIFNVQRAHVRLDMKTLVNLFRHVFPKDPNIVELSKWKDVKDPDRFMLPLKPAFKKKKSCGPGEWEACKLAQQKYDADVNDIKDTDEYRHAKGRYDTLVNARKTVAGSFFKKPPVKTGWVFDCSICTDGVSLSMQYSKTVQVRVSDLKKTSKRSRDDEGMSVSEQYDHKLKTTLPDMGIVVLGVDPGRSNIATVTYLADDKSKTWKLTRGAFYHKSGIKKQKKQQEKRFSDMIPRWESLRENGAALSTSRTDDISAYLKNYDTFSDEWWRMALLRRESRDNFQRYIGKRKAMDSFWAGIKRNMKLDHPDLRVRVAYGSAITTLKATGPGEVAVPTGSMFASCKRLFKEEVHVTDEFKTTLMSWETGAKKECVYKIPSVQITTEGQIRLGYELLGHTPLKETPKVSYRDQLAVRVYCTRKQIQEKHRRGGLSPSLVDNNSIKRYPEVRGLRFSPETSTYSDRDRSSALTIARLHCMELLGQGRPLPFCRDA

SEQ ID NO: 906 - protein, 788 aa, Chlamydomonas sp.
ECSREPVCRSRLHQNVFGVQFVMENEVRESSSLVHEADQHDDVAELVDYDGEEDEECAPGRAICVVKMKLSTFIPHDWLRRKIDTLVLDMNKLLGEGYIFANFHIARLFENGIAVPPVNLNFFYRCLLAVSTNKCMGSTLGEDFENSRLLFDLLREQGQSKVDIRGRVNNQIVADLSILMATMASNHLWTNLERRITTYLKWKYPKIAKRLRSDIVAAVIKCPTKNLDVIFKMSPHTTKLPTKLPTARLRSAKSAVALAKKRVGRKEPEGSPLRVRLTKLQARLEKLSEAWLSSKNLRVDEDNAKRFSAREVAFCLRGVLPLPSGKTFASRAHMTLPLYHKILSETIASENDRLRTFLLLPYKSGFTLSHIPISKMAFFYMVNECHFDSCKADVASKNHQGIWERFANLKIVETVSRKFGYRIVTDGFAVSILMNKPTCLTCSMPGDAFSTRAHEYMTTDEGGILSFRDNVVVAAVDPGVTDIVTVTGLDGSTNSYSSAQYYRKGLIFKSQRQTDVWNLETADIFGDVIPDRDSPISQHIGANARFYMGAAPILLAHRASRGYRNLRLRRYCKKQKLIVEIADFVAPREKSTKVLVGFGDWKGLGATPISRRTCGPLQAIRFELRSRENVIMEDVDEFRTSQRCSCCETRLCNMVALTHRKKQDGTWECTEGRKRIHKILHCKSSQSGAPRQQSGGRLHCGKTWDRDVNASRNIQMLTLHQVFGRERPLAFRRDAPRGSSKNPPIPDTDMGTQTVERFTTEATRNIFENLFNLLHPPTLPKRNDLQSG

SEQ ID NO: 907 - protein, 620 aa, Chlamydomonas sp.
QCIRNLHVLNIRMPCMATTSVKLARPPMPLVSPGPSFVDGRIMARSERSGLQATNVSLTQAASKATSSSRKKKPAVVKSFSTHVCPHTNNNPTCSDSNCSCKPIFLTNIPDASKSLKSMTSDQGSTSSAQDFYEYWDSSRQDLYRQLLWLPKTGSQGLVSSSLNGFARSTLARSSFSITKTEPLKTSLENTSCPSFKYIVADGTVEDDTKSDAKPKLGTLKLKLNPTKAQKSMLAEFAGCSRFMYNKAVAARLGVGSTHKSVFRIRDRYVTNKVRGKGKMPNPYFKNRQWLLQCPKSVRQSAIKAALANIKACFSNMKAGNIKQFSAPFRRKKTELERGWAIEMDQKNVSKDGDKLFIFKDILGNMRYFGSKQLHKLMPEENPTHDPKVQKSRFGEYFLVLSVASRDRRAERKPVHPDKVATASIDPGVRKTMVTYSPENEESFMLGQGQASDLVKLLLVHDKLQSRLDTEKTLRSKERMKIKKQMIRIRKIIFYLKKEFRDQTTNFLAARYDVLLVPQLETAKMTISAERELKTKVARQMLTLSHSVLFNRLKEKCAEYGTVFLHVLEHYTSQTCPMCGFLNKCGETYTCKNCQFTCDRDIVGAAGIFLKAVRTENPCS

SEQ ID NO: 908 - protein, 637 aa, Chlamydomonas sp.
PRMEHVCDVCIKSSVMYKLCKMATKPPTVAKLKELLKLAEVAYSSKDKKDDIVRLCEDNGLIARPPPEYKTVEKMCVVKCALKKAMSLDDEEFGKFRGHVDQLVNVVSRMLRRSSLVLTFHVTRLMEGDLPIPNMYDMKDTYWKDWLRIGVDGVFPDEESRISYEAVKDVIGKVLDSDDPDYINSYPIYFDQVLNYAGHTLSTVVSNNAWVPLVPRLTRLTKATLKALGAPKTIRVYDVMRVIQQEIQEMESWPESVQEYVREVRVRLKVPDGSRLYDDYGKDMDFPTMVRFNYWMQTRLEAIGERRIRLMPIFNVQRAHVRLDMKTLVNLFRHVFPKDPNIVELSKWENVKDPDRFMLPLKPAVKKKKSCGPGEWEAYKLAQQKYDADVKDIKATDEYRHAKGRYDTLVNARKTVAGSFFKKPPVKTGWVFDCSICTDGVSLSMQYSKTVQVRVSDLKKTSKRSRDEEGMSVSEQYDHKLKTTLPDMGIVVLGVDPGRSNIATVTYLADDKSKTWKLTRGAFYHKSGIKKQKKQQEKRFSDMIPRWESLRENGAALSTSRKDDISAYLKNYATFSDEWWRMALRRRESRDNFQRYIGKRKAMDSFWAGIKRNMKLDHPDLRVRIAYGSAIKTMKAT

SEQ ID NO: 909 - protein, 803 aa, Chlamydomonas sp.
PRMEHVCDVCIKSSVMYKLCKMATKPPTVAKLKELLKLAEVAYSSKDKKDDIVRLCEDNDLIARPPPEYKTVEKMCVVKCALKKAMSLDDEEFGKFRGHVDQLVNVASRMLRRSSLVLTFHVTRLMEGDLPIPNMYDMKDTYWKDWLRIGVDGVFPDEENRISYESVKDVIGKVLGSDDPDYINSYPIYFDQVLNYAGHTLSTVVSNNAWVFLVPRLTRLTKATLNALGAPKTIRVYDVMRVIQQEIQEMESWPESVQEYVREVRVRLKVPDGSRLYDDYGKDMDFPTMVRFNYWMQTRLEAIGARCIRLMPIFNVQRAHVRLDMKTLVNLFRHVFPKDPNIVELSEWKNVKDPDRFMLPLKPAFKKKKSCGPGEWEAYKLAQQNYDADVKDIKAPNEYRHAKGRYDTLVNARKTVAGSFFKKPPVKTGWVFDCTICTDGVSLSMQYSKTVQVRVSDMKKTSKRSRDDEGMSVSEQYDHKLKTTLPDMGIVVLGVDPGRSNIATVTYLADDKSKTWKLTRGAFYHKSGIKKQKKQQEKRFLDMIPRWESLRENGAALSTSRKDDISAYLKNYATFSDEWWRMALRRRESRDNFQRYIGKRKAMDSFWAGIKRNMKLDHPDLRVRVAYGSAITKLKATGPGEVAVPTGSMFASCKRLFKEEVHVTDEFKTTLMSWETGAKKECVYKIPSVQITTEGQIRLGYELLGHTPLKETPKVSYRDQLAVRVYCTRKKIQEKHRRGGLAPSLVDNNSIKRYPEVRGLRFSPEISTYSDRDRSSALTIARLHCMELLGQGRPLPFCRDACC

SEQ ID NO: 910 - protein, 260 aa, Chlamydomonas sp.
FLDGSLFVKMEAALSTSRKDDISAYLKNYATFSDEWWRMALRRRESRDNFQRYIGKRKAMDSFWAGIKRNMKLDHPDLRVRVAYGSAITTLKATGPGEVAVPTGSMFASCKRLFKDEVHVTDEFKTTLMSWETGAKKECVYKIPSVQITTEGQIRLGYELLGHTPLKETPKVSYRDQLAVRVYCTRKQIQEKHRRGGLAPSLVNNNSIKRYPEVRGLRFSPETSTYSDRDRSSALTIARLHCMELLGQGRPLPFCRDACC

SEQ ID NO: 911 - protein, 617 aa, Chlamydomonas sp.
GTACTKYQNAMYGNHLFCKIGKASDALGVSRTVLRRWADNGTIRTIRTPGNQRLFDPSSIQGYLIEQEKQPSSRQVILYARVSSHENNPTCSDSNCSCKPIFLTNIPDASKSLKSRTSDQGSTSSAQDFYEYWDSSRQDLYRQLLWLPKTGSQGLVSSSLNEFARSTPARSSFSITKTEPLKTSLEKTSCPSFKYIVADGTVEDATKSNAKPKLRTLKLKLNPTKAQKSMLAEFAGCSRFMYNKAVAARLGVGSTHKSVFRIRDRYVTNKVRGKGKMPNPYFKNRQWLLQCPKSVRQNAIKSALANVKACFSNLKAGNIKQFSALFRRKKTELERGWAIEMDQKNVSKDGDKLFIFKDILGNMRYFGSKQLQKLMPEENPTHDPKVHKSRFGEYFLVLSVATRDRRAERKPVHTGRVATASIDPGVRKTMVTYSLENEESFMLGQGQASDLVKLLLVHDKLQSRLDTEKTLRSKERMKIKKQMIRIRKRIFYLKKEFRDQTTHFLAARYDVLLVPQLETAKMTISVERELTTKASRQMLTLSHSVLFNRLKEKCAEYGTVFLHVLEHYTSQTCPMCGCLNKCVDTYTCKNCQFTCNRDIVGAAGIFLKAVRTENPCS

SEQ ID NO: 912 - protein, 273 aa, Chlamydomonas sp.
NLETADIVGGIIPDRDSSSSEQIGAYARFYMGAAPILLAHRASRGYRNLRFRRYCKKQKLIVEIADFVAPREKSAKVLVGFGDWKGLGATPISRRTCGPLQAIRFELRSRENDIMEDIDEFRTSQRCSCCENHLCNMVALTHRKKQDGTSWECTEGRKRIHKILHCKSSQSGAPRQQSGGMLHCGKTWDRDVNASRNILMLTLHQVFGRERPLAFRRDAPRSSSTTPPPPPDTDMGTQTVERFTKEATRNIFENLFNLLHPPTLPKSNDLQSG

SEQ ID NO: 913 - protein, 803 aa, Chlamydomonas sp.
PRMEHVCDVCIKSSVMYKLCKMATKPPTVAKLKELLKLAEVAYSSKDKKDDIVRLCEDNGLIARPPPEYKTVEKMCVVKCALKKAMSLDDEEFGKFREHVDQLVNVLSRMLRRSSLVLTFHVTRLMEGDLPIPNMYDMKDTYWKDWLRIGVDGVFPDEESRISYESVKDVIGKVLGSDDPDYINSYPIYFDQVLNYAGHTLSTVVSNNAWVPLVPRLTRLTKATLNALGAPKTIRVYDVMRVIQQEIQEMESWPESVQEYVREVRVRLKVPDGSRLYDDYGKDMDFPTMVRFNYWMQTRLEAIGARRIRLMPIFNVQRAHVRLDMKTLVNLFRHVFPKDPNIVELSKWKDVKDPDRFMLPLKPAVKKKKSCGPGEWEAYKLAQQKYDADVNDIKDTDEYRHAKGRYDTLVNARKKVAGSFFKKPPVKTGWVFDCSICTDGVSLSMQYSKTVQVRVSDLKKTSKRSRDDEGMSVSEQYDHKLKTTLPDMGIVVLGVDPGRSNIATVTYLADDKSKTWKLTRGAFYHKSGIKKQKKQQEKRFSGMIPRWESLRENGAALSTSRTDDISAYLKNYATFSDEWWRMALLRRESRDNFQRYIGKRKAMDSFWAGIKRNMKLDHPDLRVRVAYGSAITTLKATGPGEVAVPTGSMFASCKRLFKEEVHVTDEFKTTLMSWETGAKKECVYKIPSVQITTEGQIRLGYELLGHTPLKETPNVSYRDQLAVRVYCTRKQIQEKHRRGGLAPSLVDNNSIKRYPEVRGLRFSPETSTYSDRDRSSALTIARLHCMELLGQGRPLPFCRDACC

SEQ ID NO: 914 - protein, 509 aa, Chlamydomonas sp.
YPESDIYKIIPASLVHANLIKDVVRRLRDLLPLPRGKQFNTRAHLTMRLFHHVLTELGADLKEKTTKKRPRLFSILPRKSGFTISYVPISSMTLMKLLSMGDSPLESFRGDGRHENHSMLLWRKYFNVQGLETKGSRFDNRILSDGKGVSVQMKHQASEDVAVDNAGYPKDAILEDCQDASLRVGVDPGMTDIVTVASSAGRVESFSSARFSEAAGYNTSNRRTNKWNVDTQDLVKSIPSPTTSSMHDMQDHVRGYLSALPTLLQHRASRGYRSMRFFRYVGKQKTIEKVCDLIAPKAQKKTIEEKVCDVIAPRAQTTVVGFGNWSNQGYGISRSCSGPVKEIRKCLSRRQNVLFKNVDERNTSCTCHGCFQKIVNMKADSVVWRRVQNEPPSLINGAPTTTTTTFEKQKTVVKNVKVHKVLHCRNSVKSASSNVRCGATWNRDVNAAKNLLLLLTTWMDGKERPAAFCVPSSSPTPKTTVSGEANVGAQQTDPPGSVSSLQLLSSGPA

SEQ ID NO: 915 - protein, 793 aa, Chlamydomonas sp.
KMATKPPTVAKLKELLKLAEVPYSSKSNKDDLVRLCEDNGLIARPPPEYKTVEKMCVVKCALKKAMSLDDEEFGKFREHVDQLVNVVSRMLRRSSLVLTFHITSLLEKGLDIPDLYNMKDTYWKDWLRIGVDGIFPDEESKISYEAVKDSIGDVIGNDDADYIKSYPIYFDQVLNYAGHTLSTVVSNNAWVPLIPRLTRLTSTTLNKLNAPKTLDTSKIIRGYDVMQAIQQEVQNMEGWPESVQEYVNEVREMLSVPDGSRVYDNYGKDMDFPTMVRFNYWIQTRLEDMDARRIRLMPIFNVQRVHVRLDLKTLVNLFRHMFPNDQNIVELSKWEHVKNPDSFMLPQRPAQKKKKSCCPGEWDAYKSVLKQYDDDVKDIKATDEYRHAKGLYDTLVNAQKTVAGSFFRKPPVKNGWVFDCSICTDGVSLSMQYSKTVQVLVSDLKKTRKKPRKEEGIKIAEKYDGSLKTILPDMGIVVLGVDPGRSNIATVTYLADDKNKTWKLTRGAFYHKSGIKKQTRQKELRFADMIPMWESLRENGAALSTSRTDKISAYLSNYAKFSDEWWRLALRRRESRDNLQRYIGKRKVKDSFWAGIKRCMMKELPDMKVCVAYGSAITKLKPTGPGEVAVPTGAMFASCKRIFKEDVSVTDEFKTTLMSWETGKEKERVYKIPSVCSADVKLRLGGERFGHTKSKTMPKVADCDHLGVRLYNKRKRAQEKHRRGGFATSLVDSQKSIERYPEVRGLRFSPETSTYSDRDRSSALTIARLHCMELMGLGRPLPFAHSSSVVVDE

SEQ ID NO: 916 - protein, 226 aa, Chlamydomonas sp.
LALRRRESRDNLQRYIGKRKVKDSFWAGIKRCMMKELPDMKVCVAYGSAITKLKPTGPGEVAVPTGAMFASCKRIFKEDVSVTDEFKTTLMSWETGKEKERVYKIPSVCSADVKLRLGGERFGHTKSKTMPKVADCDHLGVRLYNKRKGAQEKHRRGGFATSLVDSQKSIERYPEVRGLRFSPETCIYSDRDRSSALTIARLHCMELMGLGRPLPFAHSSSVVVDE

SEQ ID NO: 917 - protein, 686 aa, Chlamydomonas sp.
METIVNKEPPDKRTRPDRASKIKDRRNGEENVVKCTLSRIIADKDNKDVIIKVIKERVDSVSKRTYLAGVAVNRILKEVFEGVPDAQLHTVSVPSVDQNFIRQLMVGSRQANMETRDATVERFFHNNYWFREKIEGREVIVKKKKQYVGAIARYDGDRNLYSHASKKYLTNFNNHYRVHLSTWIKKFVYSKENRILAKEFKDEHGIDETVFQRYLLYDIHSWGVKEDLIAIHSLLPERTKMLLKIQHSIIGRDEINRQWLKSVSNSAKMIRYNVFINRYLEATEDEGYAKLVNIAPIPTVKHAFITIDTDGLLGVLKDVGLVESLEKTLTNKEHWESVFDVENIRSTGKGVFTCTIDTDGVMACTHFLRAEKKKISIKDDGTAIKKQTNTLREFSESDPNVVVVANDPGRCNIAFLTWKKNKVEEKDKGGRKRKRHCEFGSKRLTRERYYVESGVFKSRGPTKKWLSNIQDCLDDLKDNSPKRTSLESFDAYVTVMVNHWDSRWGEMSKSRWGAQRLRLYGGKKRVLARFFNEVQADVGERKTIVIAYGSSKFAPGGKGELSVPTTSAFNAFSDRFKGRVAVIDEFRTTKIWHKDSTTVLQSVQSEKEGRTVRGLLWCSSTMENSKLFVNRDLNAAINIHNCFTMYPTRPGILARPKKYCKLEVVVGRTIDYKLTGSLQNAVSSEV

SEQ ID NO: 918 - protein, 246 aa, Chlamydomonas sp.
YVGKQKTIEKVCDLIAPKALNKTIEEKVCDVIAPKAKKTVVGFGNWSNQGYGISRSCSGPVKEIKKFLSRRQNVLFKNVDERNTSCTCHGCFQKLVNMKADSVVWRRVQNEPSALIDGAPTTTTTTTFEKQKTVVKNVKVHKVLHCRNSVKSASSNVRCGATWNRDVNAAKNLLLLLTTWMDGKERPATFCVPSSSPTPKTTVSGEANVGAQPTDPPGSVSSLQLLSSGPSLNAEIRDEGHEGLGP

SEQ ID NO: 919 - protein, 813 aa, Chlamydomonas sp.
PRMEHVCDVCIKSSVMYKLCKMATKPPTVAKLKELLKLAEVAYSSKDKKDDIVRLCEDNGLIARPPPEYKTVEKMCVVKCALKKAMSLDDEEFGKFREHVDQLVNVVSRMLRRSSLVLTFHITSLLEKGLDVPDLYNMKDTYWKDWLRIGVDGIFPDKESKISYEAVKDSIGDVIGNDDADYIKSYPIYFDQVLNYAGHTLSTVVSNNAWVPLIPRLARLTSTTLNKLNAPKTLDTSKIIRGYDVMQAIQQEVQNMEGWPESVQEYVNEVREMLSVPDGSRVYDNYGKDMDFPTMVRFNYWIQTRLEDMDARRIRLMPIFNVQRVHVRLDLKTLVNLFRHMFPNDQNIVELSKWEHVKNPDSFMLSQRPAQKKKKSCGPGEWDAYKSVMKQYDDDVKDIKATDEYRHAKGLYDTLVNARKTVAGSFFRKPPVKNGWVFDCSICTDGVSLSMQYSKTVQVLVSDLKKTCKNPRKEECIKIAEKYDGSLKTILPDMGIVVLGVDPGRSNIATVTYLADDKNKTWKLTRGAFYHKSGIKKQTRQKELRFADMIPMWESLRENGAALSTSRTDKISAYLSNYAKFSDEWWRLALRRRESRDNLQRYIGKRKVKDSFWAGIKRCMMKELPDMKVCVAYGSAITKLKPTGPGEVAVPTGAMFASCKRIFKEDVSVTDEFKTTLMSWETGKEKERVYKIPSVCSADVKLRLGGERFGHTKSKTMPKVADCDHLGVRLYNKRKGAQEKHRRGGFATSLVDSQKSIERYPEVRGLRFSPETCIYSDRDCSSALTIARLHCMELMGLGRPLPFAHSSSVVVNE

SEQ ID NO: 920 - protein, 408 aa, Chlamydomonas sp.
RHAKGLYDTLVNARKTVAGSFFRKPPVKNGWVFDCSICTDGVSLSMQYSKTVQVLVSDLKKTCKNPRKEEGIKIAEKYDGSLKTILPDMGIVVLGVDPGRSNIATVTYLADDKNKTWKLTRGAFYHKSGIKKQTRQKELRFADMIPMWESLRENGAALSTSRTDKISAYLSNYAKFSDEWWRLALRRRESRDNLQRYIGKRKVKDSFWAGIKRCMMKELPDMKVCVAYGSAITKLKPTGPGEVAVPTGAMFASCKRIFKEDVSVTDEFKTTLMSWETGKEKERVYKIPSVCSADVKLRLGGERFGHTKSKTMPKVADCDHLGVRLYNKRKGAQEKHRRGGFATSLVDSQKSIERYPEVRGLRFSPETCIYSDRDCSSALTIARLHCMELMGLGRPLPFAHSSSVVVDE

SEQ ID NO: 921 - protein, 794 aa, Chlamydomonas sp.
ECSREPVCRSRLHQNVFGVQFVMENGIGESSSLVHEADQHDDVAELVDYEGEEDGECAPGRAICVVKMKLSTFIPHDWLRNKIDTLVLDMNKLLGEGYIFANFHIARLFENGIAVPPVNRNFFYRCLIAVSTNKCKGSTLGEDFESSRLLFDLLREPGQSKVDIRGSVKNQIIADLSILMATMASNHLWTNLERRITTYLKWKYPQIAKRLRSDIVAALIKCPTKNLDVIFKMSPHTTKLPTKLPTSRLRSAKSAVALAKKRVGRKEPEGSPLRVRLTKLQERLEKLSEAWLSSKNLRVDADNAKRFFAREVAFCLRGVLPLPSGNTFASRAHMTLPLYHKILSETIEEKRKTKNEKHRTFSLLPYKSGFTLSHIPISKMAFFYMVNECHFDSCKADVASKNHQGIWERFANLKKVETVSRKFGYRIVTDGFAVSILMNKPTCLTCSMPADAFSTRAHEYVTTDEGGIVSFLDNVVVAAVDPGVTDIVTVTGLNGGTRSYSSAKYYRKGLIFKSQRQTDVWNLETADIVGGIIPDRDSSSSEQIGAYARFYMGAAPILLAHRASRGYRNLRFRRYCKKQKLIVEIADFVAPRKKSAKVLVGFGDWKGLGATPISRRTCGPLQAIRFELRSRENVIMEDIDEFRTSQRCSCCENHLCNMVALTHRKKQDGTGWECTEGRKRIHKILHCKSSQSGAPRQQSGGMLHCGKTWDRDVNASRNILMLTLHQVFGRERPLAFRRDAPRSSSTTPPPPPDTDMGTQTVERFTKEATRNIFENLFNLLHPPTLPKSNDLQSG

SEQ ID NO: 922 - protein, 418 aa, Chlamydomonas sp.
SFSAWAIRRSRASVAMDVTRIIPCCGESTSMSKDLRRKGLVLTTESSATAKGVQMKHQVGKDIAGEGEGGGDNAGYPKDASIEDCQDASLRQGALRVGIDPGMTDIVTIASSDGRVESFSSARFSEAAGYNTSNHRTNKWNADTQDLVKSIPSPTTSSMQDHVRGYLSALPTLLQHRANRGYRSMRFFRYVGKQKTIEKVCDLIAPKAQKKTIEEKGCDVIAPKAKKTVVGFGNWSNQGYGISRSCSGPVKEIRKCLSRRQNVLFKNVDERNTSCTCHGCFQKLVNMKADSVVWRRVQNEPSALIDGAPTTTTTIEKQKTVVKHVKVHKVLHCRNSVKSASSNVRCGATWNRDVNAAKNLLLLLTTWMDGKERPAAFCVPSSSPPPKTTVSGEANVGAQPTDPPGSVSSLQLLSSGPA

SEQ ID NO: 923 - protein, 304 aa, Chlamydomonas sp.
EQHRYSHVSGRRQKQDMEAYTRSFLPQVWYQETEKTARKRFSDMIPRWESLRENGAALSTPRKDDISAYLKNYATFSDEWWRMALRRRESRDNFQRYIGKRKAMDSFWAGIKRNMKLDHPDLRVRVAYGSAITKLKATGPGEVAVPTGFMFASCKRLFKEEVHVTDEFKTTLMSWETGAKKECVYKIPSVQITTEGQIRLGYELLGHTPLKETPRVSYRDQLAVRVYCTRKKIQENHRRGGLAPSLVDNNSIKRYPEVRGLRFSPETSTYSDRDRSSALTIARLHCMELLGQGRPLPFCRDACC

SEQ ID NO: 924 - protein, 293 aa, Chlamydomonas sp.
SVKDPDRHSCLPLKPAFKKKKSCGPGEWEAYKLAQQKYDADVNDIKDTDEYRHAKGRYDTLVNARKTVAGSFFKKPPVKTGWVFDCSICTDGVSLSMQYSKTVQVRVSDLKKTSKRSRDDEGMSVSEQYDHKLKTTLPDMGIIVLGVDPGRSNIATVTYLADDKSKTWKLTRGAFYHKSGIKKQKKQQEKRFSDMIPRWESLRENGAALSTSRTDDISAYLKNYDTFSDEWWRMALLRRESRDNFQRYIGKRKAMDSFWAGIKRNMKLDHPDLRVRVAYGSAITTLKATDQER

SEQ ID NO: 925 - protein, 801 aa, Chlamydomonas sp.
PRMEHVCDVCIKSSVMYKLCKMATKPPTVAKLKELLKLAEVAYSSKDKKDDIVRLCEDNGLIARPPPEYKTVEKMCVVKCALKKAMSLDDEEFGKFREHVDQLVNVVSRMLRRSSLVLTFHVTRLMEGDLPIPNMYDMKDTYWKDWLRIGVDGVFPDEESRISYEAVKDVIGKVLGSDDPDYINSYPIYFDQVLNYAGHTLSTVVSNNAWVPLVPRLTRLTKATLNALKSPKTIRVYDVMRVIQQEIQEMESWPESVQEYVREVRVRLKVPDGSRLYDDYGKDMDFPTMVRFNYWMQTRLESIGARRIRLMPIFNVQRAHVRLDMKTLVNLFRHVFPKDPNIVELSKWKDVKDPDRFMLPLKPAVKKKKSCGPGEWEAYKLAQQKYDADVNDIKDTDEYRHAKGRYDTLVNARKTVAGSFFKKPPVKTGWVFDCSICTDGVSLSMQYSKTVQVRVSDLKKTSKRSRDDEGMSVSEQYDHKLKTTLPDMGIVVLGVDPGRSNIATVTYLADDKSKTWKLTRGAFYHKSGIKKQKKQQEKRFSDMIPRWESLRENGAALSTSRTDDISAYLKNYDTFSDEWWRMALLRRESRDNFQRYIGKRKAMDSFWAGIKRNMKLDHPDLRVRVAYGSAITTLKATGPGEVAVPTGSMFASCKRLFKEEVHVTDEFKTTLMSWETGAKKECVYKIPSVQITTEGQIRLGYELLGHTPLKETPKVSYRDQLAVRVYCTRKKIQEKHRRGGLAPSLVDNNSIKRYPEVRGLRFSPETSTYSDRDRSSALTIARLHCMELLGQGRPLPFCRDA

SEQ ID NO: 926 - protein, 793 aa, Chlamydomonas sp.
KMATKPPTVAKLKELLKLAEVPYSSKSNKDDLVRLCEDNGLIARPPPEYKTVEKMCVVKCALKKAMSLDDEEFGKFREHVDQLVNVVSRMLRRSSLVLTFHITSLLEKGLDIPDLYNMKDTYWKDWLRIGVDGIFPDEESKISYEAVKDSIGDVIGNVDADYIKSYPIYFDQVLNYAGHTLSTVVSNNAWVPLIPRLTRLTSTTLNKLNAPKTLDTSKIIRGYDVMQAIQQEVQNMEGWPESVQEYVNEVREMLSVPDGSRVYDNYGKDMDFPTMVRFNYWIQTRLEDMDARRIRLMPIFNVQRVHVRLDLKTLVNLFRHMFPNDQNIVELSKWEHVKNPDSFMLPQRPAQKKKKSCGPGEWEAYKSVLKQYDDDVKDIKATDEYRHAKGLYDTLVNARKTVAGSFFRKPPVKNGWVFDCSICTDGVSLSMQYSKTVQVLVSDLKKTCKKPRKEEGIKIAEKYDGSLKTILPDMGIVVLGVDPGRSNIATVTYLADDKNKTWKLTRGAFYHKSGIKKQTRQKELRFADMIPMWESLRENGADLSTSRTDKISAYLSNYAKFSDEWWRLALRRRESRDNLQRYIGKRKVKDSFWAGIKRCMMKELPDMKVCVAYGSAITKLKPTGPGEVAVPTGAMFASCKRIFKEDVSVTDEFKTTLMSWETGKEKERVYKIPSVCSADVKLRLGGERFGHTKSKTMPKVADCDHLGVRLYNKRKGAQEKHRRGGFATSLVDSQKSIERYPEVRGLRFSPETCIYSDRDRSSALTIARLHCMELMGLGRPLPFAHSSSVVVDE

SEQ ID NO: 927 - protein, 795 aa, Chlamydomonas sp.
LWKMATKPPTVAKLKELLKLAEVPYSSKSNKDDLVRLCEDNGLIARPPPEYKTVEKMCVVKCALKKAMSLDDEEFGKFREHVDQLVNVVSRMLRRSSLVLTFHITSLLEKGLEIPDLYNMKDTYWKDWLRIGVDGIFPDEESKISYEAVKDSIGDVIGNDDADYIKSYPIYFDQVLNYAGHTLSTVVSNNAWVPLIPRLARLTSTTLNKLNAPKTLDTSKIIRGYEVMQAIQQEVQNMEGWPESVQEYVNEVREMLSVPDGSRVYDNYGKDMDFPTMVRFNYWIQTRLEDMDARRIRLMPIFNVQRVHVRLDLKTLVNLFRHMFPNDQNIVELSKWEHVKNPDSFMLSQRPAQKKKKSCGPGEWEAYKSVMKQYDDDVKDIKATDEYRHAKGLYDTLVNARKTVAGSFFRKPPVKNGWVFDCSICTDGVSLSMQYSKTVQVLVSDMKKTCKNPRKEEGIKIAEKYDGSLKTILPDMGIVVLGVDPGRSNIATVTYLADDKNKTWKLTRGAFYHKSGIKKQTRQKELRFADMIPMWESLREIGAALSTSRTDKISAYLSNYAKFSEEWWRLALRRRESRDNLQRYIGKRKVKDFFWAGIKRCMMKELPDMKVCVAYGSAITKLKPTGPGEVAVPTGAMFASCKRIFKEDVSVTDEFKTTLMSWETGKEKERVYKIPSFCSADVKLRLGGERFGHTKSKTMPKVADCDHLGVRLYNKRKGAQEKHRRGGFATSLVYSQKSIERYPEVRGLRFSPETCIYSDRDRSSALTIARLHCMELMGLGRPLPFAHSSSVVVDE

SEQ ID NO: 928 - protein, 713 aa, Chlamydomonas sp.
QDRHTGTGHEQVAWRGLYFRKFPHCSSFENGIAVPPVNRNFFYRCLIAVSTNKCKGSTLGEDFESSRLLFDLLREPGQSKVDIRGNVKNQIIADLSILMATMASNHLWTNLERRITTYLKWKYPQIAKRLRSDIVAALIKCPTKNLDVIFKMSPHTTKLPTKLPTSRLRSAKSAVALAKKRVGRKEPEGSPLRVRLTKLQERLEKLSEAWLSSKNLRVDADNAKRFFAREVAFCLRGVLPLPSGNTFASRAHMTLPLYHKILSETIEEKRKTKNEKHRTFSLLPYKSGFTLSHIPISKMAFFYMVNECHFDSCKADVASKNHQGIWERFANLKKVETVSRKFGYRIVTDGFAVSILMNKPTCLTCSMPADAFSTRAHEYVTTDEGGIVSFLDNVVVAAVDPGVTDIVTVTGLNGGTRSYSSAQYYRKGLIFKSQRQTDVWNLETADIVGGIIPDRDSSSSEQIGAYARFYMGAAPILLAHRASRWYRNLRFRRYCKKQKLIVEIADFVAPREKSAKVLVGFGDWKGLGATPISRRTCGPLQAIRFELRSRENVIMEDIDEFRTSQRCSCCENHLCNMVALTHRKKQDGTGWECTEGRKRIHKILHCKSSQSGAPRQQSGGMLHCGKTWDRDVNASRNILMLTLHQVFGRERPLAFRRDAPRSSSTTPPPPPDTDMGTQTVERFTKEATRNIFENLFNLLHPPTLPKSNDLQSG

SEQ ID NO: 929 - protein, 394 aa, Chlamydomonas sp.
KTVAGSFFRKPPVKNGWVFDWSICTDGVSLSMQYSKTVQVLVSDLKKTCKKPRKEEGIKIAEKYDGSLKTILPDMGIVVLGVDPGRSNIATVTYLADDKNKTWTLTRGAFYHKSGIKKQTRQKELRFADMIPMWESLRENGAALSTSRTDKISAYLSNYAKFSDEWWRLALRRRESRDNLQRYIGKRKVKDSFWAGIKRCMMKELPDMKVCVAYGSAITKLKPTGPEEVAVPTGAMFASCKRIFKEDVSVTDEFKTTLMSWETGKEKERVYKIPSVCSADVKLRLGGERFGHTKSKTMPKVADCDHLGVRLYNKRKGAQEKHRKGGFATSLVDSQKSIERYPEVRGLRFSPETCIYSDRDRSSALTIARLHCMELMGLGRPLPFAHSSSVVVDE

SEQ ID NO: 930 - protein, 803 aa, Chlamydomonas sp.
PRMEQVCDVCIKSSVMYTLCKMATKPPTVAKLKELLKLAEVAYSSKDKKDDIVRLCEDNGLIARPPPEYKTVEKMCVVKCALKKAMSLDDEEFGKFRGHVDQLVNVVCRMLRRSSLVLTFHVTRLMEGDLPIPNMYDMKDTYWKDWLRIGVDGVFPDEESRISYESVKDVIGKVLGSDDPDYINSYPIYFDQVLNYAGHTLSTVVSNNAWVPLVPRLTRLTKATLNALGAPKTIRVYDVMRVIQQEIQEMESWPESVQEYVREVRVRLKVPDGSRLYDDYGKDMDFPTMVRFNYWMQTRLEAIGARRIRLMPIFNVQRAHVRLDMKTLVNLFRHVFPKDPNIVELSKWENVKDPDRFMLPLKPSIKMKKSCGPGEWEAYKLAQHKYDADVKDIKATDEYRHSKGRYDTLVNARKTVAGSFFKKPPVKTGWVFDCSICTDGVSLSMQYSKTVQVRVSDLKKTSKRSRDEEGMSVSEQYDHKLKTTLPDMGIVVLGVDPGRSNIATVTYLADDKSKTWKLTRGAFYHKSGIKKQKKQQEKRFSDMIPRWESLRENGAALSTSRKDDISAYLKNYATFSDEWWRMALRRRESRDNFQRYIGKRKAMDSFWAGIKRNMKLDHPDLRVRVAYGSAITKLKATGPGEVAVPTGSMFASCKRLFKEEVHVTDEFKTTLMSWETGAKKECVYKIPSVQITAEGQIRLGYELLGHTPLKETPKVSYRDQLAVRVYCTRKKIQEKHRRGGLAPSLVDNNSIKRYPEVRGLRFSPETSTYSDRDRSSALTIARLHCMELLGQGRPLPFCRDACC

SEQ ID NO: 931 - protein, 795 aa, Chlamydomonas sp.
LWKMATKPPTVAKLKELLKLAEVPYSSKSNKDDLVRLCEDNGLIARPPPEYKTVEKMCVVKCALKKAMILDDEEFGKFREHVDQLVTVVSRMLRRSSLVLNFHITSLLEKGLEIPDLYNMKDTYWKDWLRIGVDGIFPDEESKISYEAVKDSIGDVIGNDDADYIKSYPIYFDQVLNYAGHTLSTVVSNNAWVPLIPRLARLTSTTLNKLNAPKTLDTSKIIRGYEVMQAIQQEVQNMEGWPESVQEYVNEVREMLSVPDGSRVYDNYGKDMDFPTMVRFNYWIQTRLEDMDARRIRLMPIFNVQRVHVRLDLKTLVNLFRHMFPNDQNIVELSKWEHVKNPDSFMLSQRPAQKKKKSCGPGEWEAYKSVMKQYDDDVKDIKATDEYRHAKGLYDTLVNARKTVAGSFFRKPPVKNGWVFYCSICTDGVSLSMQYSKTVQVLVSDLKKTCKKPRKEEGIKIAEKYDGSLKTILPDMGIVVLGVDPGRSNIATVTYLADDKNKTWKLTRGAFYHKSGIKKQTRQKELRFADMIPMWESLRENGAALSTSRTDKISAYLSNYAKFSDEWWRLALRRRESRDNLQRYIGKRKVKDSFWAGIKRCMMKELPDMKVCVAYGSAITKLKPTGPGEVAVPTGAMFASCKRIFKEDVSVTDEFKTTLMSWETGKEKERVYKIPSVCSADVKLRLGGERFGHTKSKTMPKVADCDHLGVRLYNKRKGAQEKHRRGGFATSLVDSQKSIERYPEVRGLRFSPETCIYSDRDRSSALTIARLHCMELMGLGRPLPFAHSSSVVVDE

SEQ ID NO: 932 - protein, 400 aa, Chlamydomonas sp.
HACERPKTVAGSFFRKPPVKNGWVFYCSICTDGVSLSMQYSKTVQVLVSDLKKTCKKPRKEEGVKIAEKYDGSLKTILPDMGIVVLGVDPGRSNIATVTYLADDKNKTWKLTRGAFYHKSGIKKQTRQKELRFADMIPMWESLRENGAALSTSRTDKISAYLSNYAKFSDEWWRLALRRRESRDNLQRYIGKRKVKDSFWAGIKRCMMKELPDMKVCVAYGSAITKLKPTGPGEVAVPTGAMFASCKRIFKEDVSVTDEFKTTLMLWETGKEKERVYKIPSVCSADVKLRLGGERFGHTKSKTMPKVADCDHLGVRLYNKRKGAQEKHRRGGFATSLVDSQKSIERYPEVRGLRFSPETCIYSDRDRSSALTIARLHCMELMGLGRPLPFAHSSSVVVDE

SEQ ID NO: 933 - protein, 400 aa, Chlamydomonas sp.
HACERPKTVAGSFFRKPPVKNGWVFYCSICTNGVSLSMQYSKTVQVLVSDLKKTCKKPRKEEGIKIAEKYDGSLKTILPDMGIVVLGVDPGRSNIATVTYLADNKNKTWKLTRGAFYHKSGIKKQTRQKELRFADMIPMWESLRENGAALSTSRTDKISAYLSNYAKFSDEWWRLALRRRESRDNLQRYIGKRKVKDSFWAGIKRCMMKELPDMKVCVAYGSAITKLKPTGPGEVAVPTGAMFASCKRIFKEDVSVTDEFKTTLMSWETGKEKERVYKIPSVCSADVKLRLGGERFGHTKSKTMPKVADCDHLGVRLYNKRKGAQEKHRRGGFATSLVDSQKSIERYPEVRGLRFSPETCIYSDRDRSSALTIARLHCMELMGLGRPLPFAHSSSVVVDE

SEQ ID NO: 934 - protein, 237 aa, Chlamydomonas sp.
SMRFFRYVGKQKTIEKVCDLIAPKAQKKTIEEKVCDVIAPKAQKTIVGFGNWSNQGYGISRSCSGPVKEIRKCLSRRQNVLFKNVDERNISCTCHGCFQKLVNMKADSVVWRRVQNEPPSLINGAPTTTTTTTIEKQKTVVKNVKVHKVLHCRNSVKSASSNVRCGATWNRDVNAAKNLLLLLTTWMDGKERPATFCVPSSSPTPKTTVSGEANVGAQPTDPPGSVSSLQLLSSGPA

SEQ ID NO: 935 - protein, 795 aa, Chlamydomonas sp.
LWKMATKPPTVAKLKELLKLAEVPYSSKSNKDDLVRLCEDNGLIARPPPEYKTVEKMCVVKCALKKAMSLDDEEFGKFREHVDQLVNVVSRMLRRSSLVLTFHIASLLEKGLEIPDLYNMKDTYWKDWLRIGVDGIFPDEESKISYEAVKDSIGDVIGNDDADYIKSYPIYFDQVLNYAGHTLSTVVSNNAWVPLIPRLARLTSTTLNKLNAPKTLDTSKIIRGYDVMHAIQQEVQNMEGWPESVQEYVNEVREMLSVPDGSRVYDNYGKDMDFPTMVRFNYWIQTRLEDMDARRIRLMPIFNVQRVHVRLDLKTLVNLFRHMFPNDQNIVELSKWEHVKNPDSFMLPQRPAQKKKKSCGPGEWEAYKSVLKQYDDDVKDIKATDEYRHAKGLYDTLVNARKTVAGSFFRKPPVKNGWVFESSICTDGVSLSMQYSKTVQVLVSDLKKTCKNPRKEEGIKIAEKYDGSLKTILPDMGIVVLGVDPGRSNIATVTYLADDKNKTWTLTRGAFYHKSGIKKQTRQKELRFDDMIPMWESLRENGAALSTSRTDKISAYLSNYAKFSEEWWRLALRRRESRDNLQRYIGKRKVKDSFWAGIKRCMMKELPDMKVCVAYGSAITKLKPTGPGEVAVPTGAMFASCKRIFEEDVSVTDEFKTTLMSWETGKEKERVYKIPSVCSADVKLRLGGERFGRTKSKTMPKVADCDHLGVRLYNKRKGAQEKRRGGGFATSLVDSQKSIEQYPEVRGLRFSPETCIYSDRDRSSALTIARLHCMELMGLGRPLPFAHSSSVVVDE

SEQ ID NO: 936 - protein, 789 aa, Chlamydomonas sp.
ECSREPVCRSRLYQNVVGVQFVMEHGVVLVHEADQHDDVAELVDYEGDEDEERAPGRAICVVKMKLSTFIPHDWLRKKIDTLVLDMNKLLAEGYIFANFHIARLFENGIAVPPVNRNFFYRCLLAVSTNKCKGSTLGEDFESSRLLFDLLREPGQSKVDIRGNVKNQMIADLSILMATMSSNHLWTNLERRITPYLKWKYPQIAKRLQSDIVAAVIKCPTKNLDVIFKMSPHVAKLPTKLPTARLRSAKSAVALAKKRVGRKESEVSPLRVMLTKLQARFEKLSEAWLSSKNLRVDEDNAKRFFARDVAFCLRGVLPLPSGNTFASRAHMTLPLYHKILSETIEEKRKTKNEKLRTFSLLPYKSGFTLSHIPISKTAFFYMVNECHFDSCKADVASKNHQGIWERFANLKKVETVSRKFGYRIVTDGFAVSILMNKPTCLTCSMPADSFSTRAHEYVTTDEGGIVSFRDNVVVAAVDPGVTDIVTVTGLDGGTRSYSSAQYYRKGLIFKSQRQTDVWNLETADIVGDIIPDRDSSRSEQIGAYARFYMGAAPILLAHRASRGYRNLRFRRYCKKQKLVVEIADFVAPREKSAKVLVGFGDWKGLGATPISRRTCGPLQAIRFELRSRGNVIMEDVDEFRTSQRCSCCENRLCNMVALTHRKKQDGTGWECTEGRKRIHKILHCKSSQSGAPRQQSGGRLHCGKTWDRDVNASRNILMLTLHQVFGRERPLAFRRDAPRISSKTPPPPDTDMGTQTVERFTKEATRNIFENLFNLLHPPTLPKRNDLQSG

SEQ ID NO: 937 - protein, 686 aa, Chlamydomonas sp.
METIGNKEPPDKRTRPDRASKIKDRKNGEENVVKCTLSRIIADKDNKDVIIKVIKERVDSVSKRTYLAGVAVNRILKEVFEGVPDAQLHTVSVPSVDKNFIRQLMVGSRQAHMETRDATVERFFHNNYWFREKIEGREVIVKKKKQYVGAIARYDGDQNLYSHALKKYLTNFNNHYRVHLSTWIKKFVYSKENRILAKEIKDEHGIDETVFHRYLLYDIHSWGVMADLIAIHSLLPERTKMLLKIQHSILGRDEINRQWLKSVSNSAKMIRYNVFINRYLEATEDEGYAKLVNIAPIPTVKHAFITIDTDGLLGVLKDVGLIESLEKTLTNKEHWESVFDVENIRSAGKGVFTCTIDTDGVMACTHFLRAEKKKISIKDDGTAIKKQTKTLREFSESDPNVVVVANDPGRCNIAFLTWKKNKVEEKDKGGRKRKRHCEFESKRLTRERYYVESGVFKSRGPTKKWLSNIQDCLDDLKDNSPKRTSLVSFDAYVAVMVNHWDSRWGEMSKSRWGAQRLRLYGGKKRVLARFFNEVQEAVGERKTIVVAYGSAKFAPGGKGELSVPTTSAFKSFSDRFKGRVAVIDEFRTTKIWHKDSTTVLQSVQSEKEGRTVQGLLWCSSTMEKSKFFVNRDLNAAINIHNCFTMYPIRPGILARPKKYCKLEVVVGRKIDYKLTGSLQNAVSSEV

SEQ ID NO: 938 - protein, 458 aa, Chlamydomonas sp.
PQLDRNFYYRCLLAVSTSNVRKDTLGQSFNDTMVAFDALRPAGYVKVDIRPWGQIIADVSIQMATMACNSVWANVDRVVIKYLRLKHPSLKKHFKKIAKAVVQYPESKIDTIIPEGLLHAIHIKEVVSHLRALFPLPKGKQFNTRAHLTMRLFHHVLTELGEVGRVDPKDKKTKKSHPRLFSILPRKNGFTVLYVPISSMTFMKLLSMGDSPLESVSGDGRYENHTMLWRKYFNVQGLETKRSRFDNRILSDGKGVSVQMKQKGKEEVVEEGENAGYPKDANIVECKDAVGALRVGVDPGMTDIVTVASSAGRIESFSSARFSEVAGYNTSKRRTYKWNEETQDLVKSIPSPNTSNMVDLQDHVRAYLKALPILLQHRANKGYRSMRFFRYVGKQKTIEKVCDVIAPRAQTTVVGFGNWSNQGYGISRSCSGPIKEIRRCLSRRKNVLFKNVDERNTL

SEQ ID NO: 939 - protein, 647 aa, Chlamydomonas sp.
GNVGAILYHQKKKNTHPLLMGVVQDKGDDDINISVVKKTLNSLCMDVSRHQISSRIQSMVLLINHAVAEAYLFANFHITRCLDDGDFDVKQLPHLDRIFYYRCLLAVSTSNVRKDTLGQSFNDTMVAFDALRPAGYVKEDIRPWGQIIADVSIQMATMACNSVWANVDRVVIKYLRLKHPSLKKHFKKIVKAVVQYPESKIDTIIPEGLVHAIHIKEVVINLRALFPLPKGKQFNTRAHLTMRLFHHVLTELGEVGRVDPKDKKTKKSHPRLFSILPRKNGFTISYVPISSMTFMKLLSMGDSPLESVFGNGRYENHTMLWRKYFNVQGLETKRSRFDNRILSDGKGVSVPMKQKGKEEVVEEGENAGYPKDANIVECKDAVGALRVGVDPGMTDIVTVASSAGRIESFSSARFSEVAGYNTSKRRTYKWNDETQYLVKSIPSPNTSNMVVLQDHVRAYLKALPILLQHRANKGYRSMRFFRYVGKQKTIGKVCDMIAPRAQTTVVGFGNWSNQGYGISRSCSGPIKEIRRCLSRRKNVLFKNVDERNTSCKCHGCFQRLVNMKADSVVWRGVCKESPIDGSITVEKQKMVVKNVKVHKVLHCRDSVKSASSNVRCGATWNRDVNAAKNLLLLLTTCMDGRERPEAF

SEQ ID NO: 940 - protein, 287 aa, Chlamydomonas sp.
KTKKSHPRLFSILPRKNGFTISYVPISSMTFMKLLSMGDSPLESVFGNGRYENHTMLWRKYFNVQGLETKRSRFDNRILSDGKGVSVPMKQKGKEEVVEEGENAGYPKDANIVECKDAVGALRVGVDPGMTDIVTVASSAGRIESFSSARFSEVAGYNTSKRRTYKWNDETQYLVKSIPSPNTSNMVDLQDHVRAYLKALPILLQHRANKGYRSMRFFRYVGKQKTIEKVCDVIAPRAQTTIVGFGNWSNQGYGISRSCSGPIKEIKRCLSRRKNVLFKNVDERNTL

SEQ ID NO: 941 - protein, 278 aa, Chlamydomonas sp.
HLCWFDHIVSCFRINDDLRKGRGPFFCVREQLLQVLVLSHDMAVAGTVVAVAALIKSPRIESVATLVVSTFAVVKATKSTLDKILSFRIKESVQMKQKGKEEVVEEGENAGYPKDANIVECKDAVGALRVGVDPGMTDIVTVASSAGRIESFSSARFSEVAGYNTSKRRTYKWNDETQYLVKSIPSPNTSNMVDLQDHVRAYLKALPILLQHRANKGYRSMRFFRYVGKQKTIEKVCDVIAPRAQTTVVGFGNWSNQGYGISRSCSGPIKSQEVPLTS

SEQ ID NO: 942 - protein, 550 aa, Chlamydomonas sp.
GNVGAILYHQKKKNTHPLLMGVVQDKGDDDINISVVKKTLNSLCMDVSRHQISSRIQSMVLLINHAVAEANLFANFHITRCLDDGYFDVKQLPHLDRNFYYRCLLAVSTSNVRKDTLGQSFNDTMVAFDALRPAGYVKVDIRPWGQVIADVSIQMATMACNSVWANVDRVVIKYLRLKHPSLKKHFKKIVKAVVQYPESKIDTIIPEGLVHAIHITEVVSHLRALFPLPKGKQFNTRAHLTMRLFHHVLTELGEVGRVDPKDKKTKKSHPRLFSILPRKNGFTISYFPISSMTFMKLLSMGDSPLESVSGNGRYENHTMLWRKYFNIQGLETKRSRFDNRILSDGKGVSVQMKQKGKEEVVEEGENAGYPKDANIVECKDAVGALRVGVDPGMTDIVTVASSAGRIESFSSARFSEVAGYNTSKRRTYKWNDETQDLVKSIPSPNTSNMVDLQDHVRAYLKALPILLQHRANKGYRSMRFFRYVGKQKTIEKVCDVIAPRAQTTVVGFGNWSNQGYGISRSCSGPIKEIRRCLSRRNNVLFKNVDERNTL

SEQ ID NO: 943 - protein, 639 aa, Chlamydomonas sp.
DISTNESQFRSIPCFATSQNRPGGRNAHYVLNIRMPCMATNASVKLARPPMPLVSPGLSSVDGRIMARSERSGLQATNVSLTQAASKATSSSRKKNPAVVKSFSTHVCPHTNNNPTCSDSNCSCKPIFLTNIPDASKSLKSRTSDQGSTSSAQDFYEYWDLSRQDLYRQLLWLPKTGSQGLVSSSLNGFARSTPARSSFSITKTEPLKTSLEKTSCPSFKYIVADGTVEDATKSNAKPKLRNLKLKLNPTKAQKSMLAEFAGCSRFMYNKAVATRLGVGSTHKSVFRIRDRYVTNKVRGEGKMPNPYFKNRQWLLQCPKSVRQSAIKAALANIKACFSNLKAGNIKQFSAPFRRKKTELERGWAIEMDQKNVSKDGDKLFIFKDILGNMRYFGSKQLHKLMPEENPTHDPKVQKSRFGEYFLVLSVAARDRRAERKPVHPDKVATASIDKTMVTYSPENEESFMLGQGQASDLVKLLLVHDKLQSRLDTEKNLRSKERMKIKMQMIRIRKRIFYLKKEFRDQTTNFLAARYDVLFVPQLETAKMTIRAERELTTKVARQMLTLSHSVLFNRLKEKCEEYGTVFLHVLEHYTSQTCPMCGFLNKCGETYTCKNCQFTCDRDIVGAVGIFLKAVRTENPCS

SEQ ID NO: 944 - protein, 204 aa, Chlamydomonas sp.
LRGRRARRYSSVLVIGKVWGRRQSLGGLVALSKLFVSSFVAEENVIMEDVDEFRTSQRCSCCENRLCNMVALTHRKKQDGTGWESTEGRKRIHKILHCKSSQSGAPRQQSGGRLHCGKTWDRDVNASRNILMLTLHQVFGRERPLAFRRDAPRSSSRTPPPPDTDMGTQTVERFTKEATRNIFENLFNLLHPPTLPKSNDLQSG

SEQ ID NO: 945 - protein, 618 aa, Chlamydomonas sp.
QCIRNLHVLNIRMPCMATNASVKLARPPMPVVSPGPSSVDGRIMARSGLQATNVSLTQAASKATSSSRKKKPAVVKSFSTHVCPHTNNNPTCSDSNCSCKPIFLTNIPDASKSLKSRTSDQGSTSSALDFYEYWDSSRQDLYRQLLWLPKTGTQGLVSSSFNGFAHSTPTRSSFSITKTEPLKTSLEKTSCPSFKYIVTDGTVEDATKSNAKPKLRTLKLKLNPTKAQKSMLAEFAGCSRFMYNKAVAARLGVGSTHKSVFRIRDRYVTNKVRGKGKMPNPYFKNRQWLLQCPKSVRQSAIKSALANIKACFSNLKAGNIKQFSAPFRRKKTELERGWVIEMDQKNVSKDGDKLFIFKEILGNMRYFGSKQLHKLMPEENPTHDPKVQKSRFGEYFLVLSVAARDRRAERKPVNPDKVATASIDPGVRKTMVTYSPENEESFMLGQGQASDLVKLLLVHDKLQSRLDTEKTLRSKERMKIKKLMIRIRKTIFYLKKEFRDQTTNFLAARYDVLLVPQLETAKMTISAERELTTKVARQMLTLSHSVLFNRLKEKCEEYGTVFLHVLEHYTSQTCPMCGFLNKCGETYTCKNCQFTCDRDIVGAAGIFLKAVRTENPCS

SEQ ID NO: 946 - protein, 801 aa, Chlamydomonas sp.
PRMEHVCDVCIKSSVMYKLCKMATKPPTVAKLKELLKLAEVAYSSKDKKDDIVRLCEVNGLIARPPPEYKTVEKMCVVKCALKKAMSLDDEEFGKFREHVDQLVNVVSRMLRRSSLVLTFHVTRLMEGDLPIPNMYDMKDTYWKDWLRIGVDGVFPDEESRISYEAVKDVIGKVLGSDDPDYINSYPIYFDQVLNYAGHTLSTVVSNNAWVPLVPRLTRLTKATLNALKAPKTIRVYDVMRVIQQEIQEMESWPESVQEYVREVRVRLKVPDGSRLYDDYGKDMDFPTMVRFNYWMQTRLEAIGARRIRLMPIFNVQRAHVRLDMKTLVNLFRHVFPKDPNIVELSKWKDVKDPDRFMLPLKPAVKKKKSCGPGEWEAYKLAQQKYDADVNDIKDTDEYRHAKGRYDTLVNARKTVAGSFFKKPPVKTGWVFDCSICTDGVSLSMQYSKTVQVRVSDLKKTSKRSRDDEGMSVSEQYDHKLKTTLPDMGIVVLGVDPGRSNIATVTYLADDKSKTWKLTRGAFYHKSGIKKQKKQQEKRFSDMIPRWESLRENGAALSTSRTDDISAYLKNYDTFSDEWWRMALLRRESRDNFQRYIGKRKAMDSFWAGIKRNMKLDHPDLRVRVAYGSAITTLKATGPGEVAVPTGSMFASCKRLFKEEVHVTDEFKTTLMSWETGAKKECVYKIPSVQITTEGQIRLGYELLGHTPLKETPKVSYRDQLAVRVYCTRKQIQEKHRRGGLAPSLVNNNSIKRYPEVQGLRFSPETSTYSDRDRSSALTIARLHCMELLGQGRPLPFCRDA

SEQ ID NO: 947 - protein, 362 aa, Chlamydomonas sp.
RSLIEHAVQQDSTARVSDLKKTSKRSRDDEGMSVSEQYDHKLKTTLPDMGIVVLGVDPGRSNIATVTYLADDKSKTWKLTRGAFYHKSGIKKQKKQQEKRFSDMIPRWESLRENGAALSTSRTDDISAYLKNYDTFSDEWWRMALLRRESRDNFQRYIGKRKAMDSFWAGIKRNMKLDHPDLRVRVAYGSAITTLKATGPGEVAVPTGSMFASCKRLFKEEVHVTDEFKTTLMSWETGDKKECVYKIPSVQITTEGQIRLGYELLGHTPLKETPKVSYRDQLAVRVYCTRKQIQEKHRRGGLAPSLVDNNSIKRYPEVRGLRFSPETSTYSDRDRSSALTIARLHCMELLGQGRPLPFCRDA

SEQ ID NO: 948 - protein, 616 aa, Chlamydomonas sp.
GQQGRVPSVDQNFIRQLMVGSRQAHMETRDATVERFFHNNYWFREKIEGREVIVKKKKQYVGAIARYDGDRNLYSHASKKYLTNFNNHYRVHLSTWIKKFVYSKENRILAKEFKDEHGIDETVFHRYLLYDIHSWGVKEDLIAIHSLLPERTKMLLKIQHSIIGRDEINRQWLKSVSNSAKMIRYNVFINRYLEATEDEGYANIAPIPTVRGRGLRQHRSHTNIAPIPTVKHSFITIDTDGLLGVLKDVGLVESLEKTLTNNEHWELVFDVENIRSTGKGVFTCTIDTDGVMACTHFLRAEKKKISIKDDGTAIKKQTKTLREFSESDPNVVVVANDPGRCNIAFLTWKKNKVEEKDKGGRKRKRHCEFGSKRLTRERYYVESGVFKSRGPTKKWLSNIQDCLDDLKDNSPKRTSLESFDAYVTVMVNHWDSRWGEMSKSRWGAQRLRLYGGKKRVLARFFNEVQADVGERKTIVIAYGSSKFAPGGKGELSVPTTSAFNAFSDRFKGRVAVIDEFRTTKIWHKDSTTVLQSVQSEKEGRTVRGLLWCSSTMENSKLFVNRDLNAAINIHNCFTMYPTRPGILARPKKYCKLEVVVGRTIDYKLTGSLQNAVSSEV

SEQ ID NO: 949 - protein, 832 aa, Chlamydomonas sp.
SVTLLTVVVAGPRDISPRGVRKMRSRWDPPRSSIRCTPTGAAAPLYRLAERIVSRSVCRSTVAKLKELLKLAEVAYSSKDKKDDIVRLCEDHGLIARPPPEYKTVEKMCVVKCALKKAISLDDEEFGKFRGHVDQLVNVVSRMLRRSSLVLTFHVTRLMEGDLPIPNMYDMKDTYWKDWLRIGVDGVFPDEESRISYEAVKDVIGKVLGSDDPDYINSYPIYFDQVLNYAGHTLSTVVSNNAWVPLVPRLTRLTKATLNALGAPKTIRVYDVMRVIQQEIQEMESWPESVQVYVREVRVRLKVPDGSQLYDDYGKDMDFPTMVWFNYWMQTRLEAIGARRIRLMPIFNVQRAHVRLDMKTLVNLFRYVFPKDPNIVELSKWENVKDPDRFMLPLKPSVKKKKSCGPGEWDAYKLAQQKYDADVKDIKATDEYRHAKGRYDTLVNARKTVAGSFFKKPPVKTGWVFDCSICTDGVSLSMQYSKTVQVRVSDLKNKSKRSRDEEGMSVSEQYDQKLKTTLPDMGIVVLGVDPGRSNIATVTYLADDKSKTWKLTSGAFDHKSGIKKQKKQQENMIPRWESLRENGAALSTSRKDDISAYLKNYATFSDEWWRMALRRRESRDNFQRYIGKRKAMDSFWAGIKRNMKLDHPDLRVRVAYGSAITKLKATGPGEVAVPTGSMFASCKRLFKEEVHVTDEFKTTLMSWETGAKKECVYKIPSVQITTEDQIRLGYELLGHTPLKETPKVSYRDQLAVRVYCTRKKIQEKHRRGGLAPSLADNNSIKRYPEVRGLRFSPETSTYSDRDRSSALTIARLHCMELLGQGRLLPFCRDACC

SEQ ID NO: 950 - protein, 347 aa, Chlamydomonas sp.
QHFKAPSSSRKRRNTVSSSHQSSSSIGVHTHTVQSSSSSSSHMHGGLRIPLFVHQRRWADNGTIRTIRTPDNQRLFDPSSIQGYLIEQEKKPSSRQVILYARVSSHNNNLTHDPKVQKSRFGEYFLVLSVASRHRRAERKPVHLDMVATASIDPGVRKTMVTYSPENEESFMLGQGQASDLVKLLLVHDKLQSRLDTEKTLRSKERKKIKKQMIRIRKRIFYLKKEFRDQTTNFLAARYDVLLVPQLETAKMTISAERELTTKVARQMLTLSHSVLFNRLKEKCAEYGTVFLHVLEHYTSQTCPMCGFLNKCGETYTCKNCQFTCDRDIVGAAGIFLKAVRTENPCS

SEQ ID NO: 951 - protein, 793 aa, Chlamydomonas sp.
KMATKPPTVAKLKELLKLAEVPYSSKSNKDDLVRLCEDNGLITSPPPEYKTVEKICVVKCALKKAMSLDDEEFGKFREHVDQLVNVVSRMLRRSSLVLTFHITSLLEKGLEIPDLYNMKDTYWKDWLRIGVDGIFPDEESKISYEAVKDSIGNVIGNDDADYIKSYPIYFDQVLNYAGHTLSTVVSNNAWVPLIPRLARLTSTTLNKLNAPKTLDTSKIIRGYDVMRAIQQEVQNMEGWPESVQEYVNEVREMLSVPDGSRVYDNYGKDMDFPTMVRFNYWIQKRLEDMDARRIRLMPIFNVQRVHVRLDLKTLVNLFRHMFPTDQNIVELSKWEHVKNPDSFMLPQRPAQKKKKSCGPGEWEAYKSVLKQYDDDVKDIKATDEYRHAKSLYDTLVNARKTVAGSFFRKPPVKNGWVFDCSICTDGVSLSMQYSKTVQVLVSDLKKTCKKSRKEEGIKIAEKYDSSLKTILPDMGIVVLGVDPGRSNIATVTYLADGKNKTWKLTRGAFYHKSGIKKQTRQKELRFADMIPMWESLRENGKALSTSRTDNISAYLSNYAKFSDEWWRLALRRRESRDNFQRYIGKRKVKDSFWAGIKRCMMKELPDMKVCVAYGSAITKLKPTGPGEVAVPTGPMFASCKRIFKEDVSVTDEFKTTLMSWETGKEKERVYKIPSVCSADVKLRLGGERFGHTKSKTMPKVADCDHLGVRLYNKRKRAQEKHRRGGFATSLVDSQKSIERYPEVRGLRFSPETCIYSDRDRSSALTIARLHCMELMGLGRPLPFAHSSYVVVDE

SEQ ID NO: 952 - protein, 460 aa, Chlamydomonas sp.
AKWEHVKNPDSFMLPQRPAQKKKKSCCPGEWEAYKSVLKQYDDDVKDIKATDEYRHAKGLYDTLVNAQKTVAGSFFRKPPVKNGWVFDCSICTDGVSLSMQYSKTVQVLVSDLKKTCKKPRKEEGIKIAEKYDGSLKTILPDMGIVVLGVDPGWSNIATVTYLADDKNKTWKLTRGAFYHKSGIKKQTRQKELRFADMIPMWESLRENGAALSTSRTDNISAYLSNYAKFSDEWWRLALRRRESHDNLQRYIGKRKVKDSFWAGIKRCMMKELPDMKVCVAYGSAITKLKPTGPGEVAVPTGAMFASCKRIFKEDVSVTDEFKTTLMSWETGKEKERVYKIPSVCSADVKLRLGGERFGHTKSKTMPKVADCDHLGVRLYNKRKRAQEKHRWGGFATSLVDSQKSIERYAEVRGLRFSPETCIYSDRDRSSALTIARLHCMELMGLGRPLPFAHSSSVDE

SEQ ID NO: 953 - protein, 685 aa, Chlamydomonas sp.
EWYRCPSPVNRNFFYRCLIAVSTNKCKGSTLGEDFESSRLLFDLLREPGQSKVDIRGNVKNQIIADLSILMATMASNHLWTNLERRITNYLKWKYPQIAKRLRSDIVAAVIKCPTKNLDVIFKMSPHTTKLPTKLPTARLRSAKSAVALAKKRVGRKEPEGSPLRVRLTKLQERLEKLSEAWLSSKNLRVDADNAKRFFARDVAFCLRRVLPLPSGNTFASRAHMTLPLYHKILSETIEEKRKTKNEKHRTFSLLPYKSGFTLSHIPISKMAFFYMVNECHFDSCKADVASKNHQGIWERFANLKKVETVSRKFGYRIVTDGFAISILMNKPTCLTCSMPADAFSTRAHEYVTTDEGGIVSFLDNVVVAAVDPGVTDIVTVTGLNGGTRSYSSAQYYRKGLIFKSQRQTDVWNLETADIVGGIIPDRDSSSSEQIGAYARFYMGAAPILLAHRASRGYRNLRFRRYCKKQKLIVEIADFVAPREKSAKVLVGFGDWKGLGATPISRRTCGPLQAIRFELRSRENVIMEDIDEFRTSQRCSCCENHLCNMVALTHRKKQDGTGWECTEGRKRIHKILHCKSSQSGAPRQQSGGMLHCGKTWDRDVNASRNILMLTLHQVFGRERPLAFRRDAPRSSSTTPPPPPDTDMGTQTVERSTKEATRNIFENLFNLLHPPTLPKSNDLQSG

SEQ ID NO: 954 - protein, 669 aa, Chlamydomonas sp.
NELCWKDWLRIGVDGVFPDEESRISYEAVKDVIGKVLGSDDPDYINSYPIYFDQVLNYAGHTLSTVVSNNAWVPLVPRLTRLTKATLKALGAPKTIRVYDVMRVIQQEIQEMESWPESVQEYVREVRVRLKVPDGSRLYDDYGKDMDFPTMVRFNYWMQTRLEAMGARRIRLMPIFNVQRAHVRLDMKTLVNLFRHVFPKDPNIVELSKWENVKDPDRFMLPLKHAVKKKKSCGPGEWEAYKLAQQKYDADVKDIKATDEYRHAKGRYDTLVNARKTVACSFFKKPPVKTGWVFDCSICTDGVSLSMQYSKTVQVRVSDLKKTSKRSRDEEGMSVAEQYDHKLKTTLPDMGIVVLGVDPGRSNIATVTYLADDKSKTWKLTRGAFYHKSGIKKQKRQQEKRFTDMIPMWASLRENGAALSTSRMDDISVYLSNYATFSDEWWRLALRCRESRDNLQRYIGKRKAMDSFWAGIKRNMMMDHPDLRVRVAYGSAITKLKATGPGEVAVPTGSMFASCKRIFKEEVRVTDEFKTTLMSWETGAKKECVYKIPSVSLNAEGQIRLGDEWLFCHTLLKKPPKVAERDQSAVRVYCTRKKKQEKHRRGGLATSLVDVNKLIKRYPEVRGLRFSPETSTYSDRDRSSALTIARLHCMELLGLGRPLPFSRCKAACC

SEQ ID NO: 955 - protein, 684 aa, Chlamydomonas sp.
METIVNKEPPDKRTRPDRAAKIKDRKNGKENVVKCTLSRIIADKDNKDVIIKVIKERVDSVSKKTYLAGVAVNRILKEVFEGVPDAQLHTVSVPSVDQNFIRQLMVGSRQAHMETRDATVERFFHNNYWFREKIEGREVIVKKKKQYVGAIARYDGDRNLYSHASKKYLTNFNSHYRVHLSTWIKKFVYSKENRILAKEFKDEHGIDETVFHRYLLYDIHSWGVKEDLIAIHSLLPERTKMLLKIQHSILGRDKINRQWLKCVSNSAKMIRYNVFINRYLEATEDEGYAKLVNIAPIPTVKHAFITIDTDGLLGVLKDVGLIESLEKTLTNKEHWESVFDVENIRSTGKGVFTCTIDTDGVMACTHFLRAEKKKISIKDDGTAIKTKTLREFSESDPNVVVVANDPGRCNIAFLTWKKNKVEEKDKGGRKRKRHCEFGSKRLTRERYYVESGVFKSRGPTKKWLSNIQDCLDDLKDNSPKRTSLVSFDAYVTVMVNHWDSRWGEMSKSRWGAQRLRLYGGKKRVLARFFNEVQADVGERKTIVVAYSSANFAPGGKGELSVPTTSAFNAFSDRFKGRVAVIDEFRTTKIWHKESTTVLQSVQSEKEGRTVRGLLWCSSTMENSKLFVNRDLNAAINIHNCFTMNPIRPGILARPKKYCKLEVVVGRKIDYKLTGSLQNAVSSEV

SEQ ID NO: 956 - protein, 316 aa, Chlamydomonas sp.
YHGCFRRPKTCRLREGGHSSLGTSNRRRLNTNRIESFSSARFSEVAGYNTSKRRTYKWNDETQDLVKSIPSPNTSNMVDLQDHVRAYLKALPILLQHRANKGYRSMRFFRYVGKQKAIGKVCDMIAPRAKTTVVGFGNWSNQGYGISRSCSGPIKEIRRCLSRRKNVLFKNVDERNTSCKCHGCFQRLVNMKADSGVWSGVCKESPIDGSITVEKQKMVVKNVKVHKVLHCRDSVKSASSNVRCGATWNRDVNAAKNLLLLLTTWMDGRERPEAFCVPSPPPKTTVSIEASVSAKPIYPPGFVSSLPCYPLGQLKC

SEQ ID NO: 957 - protein, 258 aa, Chlamydomonas sp.
GGRKRKRHCEFGSKRLTRERYYVESGVFKSRGPTKKWLSNIQDCLDDLKDNSPKRTSLVSFDAYVTVMVNHWDSRWGEMSKSRWGAQRLRLYGGKKRVLARFFNEVQEDVGERKTIVVAYGSAKFAPGGKGELSVPTTSAFNAFSDCFKGRVAVIDEFRTTKIWHKDSTTVLQSVQSEKEGRTVRGLLYCSSTMENSKLFVNRDLNAAINIHNCFTMYPIRPGILARPKKYCKLEVVVGRKIDYKLTGSLQNAVSSEV

SEQ ID NO: 958 - protein, 254 aa, Chlamydomonas sp.
MPADAFSTRAHEYVTTDEGGIVSFRDNVVVAAVDPGVTDIVTVTGLDGGTRSYSSAQYYRKGLIFKSQRQTDVWNLETADIVGDIIPDRDSSRSEQIGAYARFYKGAAPILLAHRASRGYRNLRFRRYCKKQKLIVEIADFVATREKKVWGRRQSLGGLVALSKLFVSSFVAEKTSSWRTSMSSEHLNDAAAVRTAFATWWHSLIVRSKTVLVGNVQKDASGFTRFSTAKAVKAERHANRAVVGSTAGRLGTAM

SEQ ID NO: 959 - protein, 500 aa, Chlamydomonas sp.
WKYPQIAKRLRSDIVAAVIKCPTKNLDVIFKMSPHVAKLPTKLPTARLRSAKSAMALAKQRVGRKEPEVSPLRVRLTKLQARFEKLSEAWLSSKNLRVDEDNAKRFFARDVAFCLRGVLPLPSGNTFAPRAHMTLPLYQKILSETIKEKRKTKNEKLRTFSLLPYKSGFTLSHIPISKMAFFYMVNECHFDSCKADVASKNHQGIWERFANLKKVETVSRKFGYRIVTDGFAVSILMNKPTCLTCSMPADAFSTRAHEYVTTDEGGILSFRDNVVVAAVDPGVTDIVTVTGLDGGTRSYSSAQYYRKGLIFKSQRQTDVWNLETVDIVGDIIPDRDSSRSEQIGAYARFYKGAAPILLAHRASRGYRNLRFRRYCKKQKLIVEIADFVATREKKVWGRRQSLGGLVALSKLFVSSFVAKKTSSWRTSMSSEHLNDAAAVRTAFATWWHSLIVRSKTVLVGNVQKDASGFTRFSTAKAVKAERHANIAVVGSTAGRLGTAM

SEQ ID NO: 960 - protein, 286 aa, Chlamydomonas sp.
DGSEERFQGWRQTLHLQRHIGQHALLSVAKQLHKLMLRKTRPTIPRSKNPASANISSSCLSLPGTGGQIGSLSIQTRFATASIDPGVRKTMVTYSPENEESFMLGQGQASDLVKLLLVHDKLQSRLDTEKTLRSKERMKIKMQMIRIRKRIFYHKKEFRDQTTNFLAARYDVLLVPQLETAKMTISAERELTTKVARQMLTLSHSVLFNRLKEKCEEYGTVFLHVLEHYTSQTCHMCGFLNKCGETYTCKNCQFTCDRDIVGAAGIFLKAVRTEIPVCKGQHPRGS

SEQ ID NO: 961 - protein, 291 aa, Chlamydomonas sp.
LGAILSQGSDLQISASNCVWNLETADIFGDVIPDRDSPMSQHIGAYARFYMGAAPILLAHRASRGYRNLRFRRYCKKQKLIVEIAAFVAPREKSTKVLVGFGDWKGLGATPISRRTCGPLQAIRFELRSRENVIMEDVDEFRTSQRCSCCETRLCNMVAHTHRKKQDGTWECTEGRKRIHKILHCKSSQSGAPRQQSGGRLHCGKTWDRDVNASRNILMLTLHQVFGRERPLAFRRDAPRGSSKNPPIPDTDMGTQTVERFTTEATRNIFENLFNLLHPPTLPKRNDLQSG

SEQ ID NO: 962 - protein, 695 aa, Chlamydomonas sp.
LWKMASKPPTVAKLKELLKLAEVPYSSKSNKDDLVRLCEDNGLIARPPPEYKTVEKMCVVKCALKKAMSLDDEEFGKFREHVDQLVNVVSRMLRRSSLVLTFHITSLLEKGLEIPDLYNMKDTYWKDWLRIGVDGIFPDEESKISYEAVKDSIGDVIGNDDTDYIKSYPIYFDQVLNYAGHTLSTVVSNNAWVPLIPRLARLTSTTLNKLNAPKTLDTSKIIRGYDVMQAIQQEVQNMEGWPESVQEYVNEVREMLSVPDGSRVYDNYGKDMDFPTMVRFNYWIQTRLEDMDARRIRLMPIFNVQRVHVRLDLKTLVNLFRHMFPNDQNIVELSKWEHVKNPDSFMLPQRPAQKKKKSCGPGEWEAYKSVLKQYDDDVKDIKATDEYRHAKGLYDTLVNARKTVAGSFFRKPPAKNGWVFDCSICTDGVSLSMQYSKKVQVLVSDLKKTCKKPRKEEGIKIAEKYDGSLKTILSDMGIVVLGVDPGRSNIATVKIDDKNKTWTLTRGAFYHKLGIKKQTRQKELRFADMIPMWESLRENGAALSTSRTDKISAYLSNYAKFSEEWWGLALRRRESRDTLQRYIGKRKVKDSFWAGIKRCMMKELPDMKVCVAYGSAITKLKPTGPGEVAVPTGAMFASCKRIFKEDVSVTDEFKTTLMSWETGKEKERVYKIPSVCSADVKLRLGGERFGHTKSP

SEQ ID NO: 963 - protein, 301 aa, Chlamydomonas sp.
EADQDSPRVFRVRPQCGGRCKRPWPLQHCLFDLEENKVEEKDKGGRKRKRHCEFGSKRLTRERYYVESGVFKSRGPTKKWLSNIQDCLDDLKDNSPKRTSLVSFDAYVTVMVNHWDSRWGEMSKSRWGAQRLRLYSGKKRVLARFFNEVQADVGERKTIVVAYGSGKFAPGGKGELSVPTTSAFNAFSDRFKGRVAVIDEFGTTKIWHKDSTTALQSVHSEKEGRTVRGLLWCSSTMENSKLFVNRDLNAAINIHNCFTMYPTRPGILARPKKYCKLEVVVGRTIDYKLTGSLQNVVSSEV

SEQ ID NO: 964 - protein, 801 aa, Chlamydomonas sp.
PRMEHVCDVCIKSSVMYKLCKMATKPPTVAKLKELLKLAEVAYSSKDKKDDIVRLCEDNGLIARPPPEYKTVEKMCVVKCALKKAMSLDDEEFGKFREHVDQLVNVVSRMLRRSSLVLTFHVTRLMEGDLPIPNMYDMKDTYWKDWLRIGVDGVFPDEESRISYEAVKDVIGKVLGSDDPDYINSYPIYFDQVLNYAGHTLSTVVSNNAWVPLVPRLTRLTKATLNALKSPKTIRVYDVMRVIQQEIQEMESWPESVQEYVREVRVRLKVPDGSRLYDDYGKDMDFPTMVRFNYWMQTRLESIGARRIRLMPIFNVQRAHVRLDMKTLVNLFRHVFPKDPNIVELSKWKDVKDPDRFMLPLKPAVKKKKSCGPGEWEAYKLAQQKYDADVNDIKDTDEYRHAKGRYDTLVNARKTVAGSFFKKPPVKTGWVFDCSICTDGVALSMQYSKTVQVRVSDLKKTSKRSRDDEGMSVSEQYDHKLKTTLPDMGIVVLGVDPGRSNIATVTYLADDKSKTWKLTRGAFYHKSGIKKQKKQQEKRFSDMIPRWESLRENGAALSTSRTDDISAYLKNYDTFSDEWWRMALLRRESRDNFQRYIGKRKAMDSFWAGIKRNMKLDHPDLRVRVAYGSAITTLKATGPGEVAVPTGSMFASCNRLFKEEVHVTDEFKTTLMSWETGAKKECVYKIPSVQITTEGQIRLGYELLGHTPLKETPKVSYRDQLAVRVYCTRKQIQEKHRRGGLAPSLVDNNSIKRYPEVRGLRFSPETSTYSDRDRSSALTIARLHCMELLGQGRPLPFCRDA

SEQ ID NO: 965 - protein, 721 aa, Chlamydomonas sp.
PRMEHVCDVGIKSSVMYKLCKMATKPPTVAKLKELLKLAEVAYSSKDKKDDIVRLCEDNGLIARPPPEYKTVEKMCVVKCALKKAMSLDDEEFGKFREHVDQLVNVVSRMLRRSSLVLTFHITSLLEKGLDIPDLYNMKDTYWKDWLRIGVDGIFPDEESKISYEAVKDSIGDVIGNDDADYIKSYPIYFDQVLNYAGHTLSTVVSNNAWVPLIPRLARLTSTTLNKLNAPKTLDTSKIIRGYDVMQAIQQEVQNMEGWPESVQEYVNEVREMLSVPDGSRVYDNYGKDMDFPTMVRFNYWIQTRLEDMDARRIRLMPIFNVQRVHVRLDLKTLVNLFRHMFPNDQNIVELSKWEHVKNPDSFMLPQRPAQKKKKSCGPGEWDAYKSVLKQYDDDVKDIKATDEYRHAKGLYDTLVNARKTVAGSFFRKPPVKNGWVFDCSICTDGVSLSMQYSKTVQVLVSDLKKTCKKPRKEEGIKIAEKYDGSLKTILPDMGIVVLGVDPGRSNIATVTYLADDKNKTWKLTRGAFYHKSGIKKQTRQKELRFADMIPMWESLRENGAALSTSRTDKISAYLSNYAKFSDEWWRLALRRRESRDNFQRYIGKRKVKDSFWAGIKRCMMKELPGMKVCVAYGSAITKLKPTGPGEVAVPTGAMFASCKRIFKEDVSVTDEFKTTLMSWETGKEKERVYKIPSVCSADVNLRLGGERFGHTKSKNDAKGR

SEQ ID NO: 966 - protein, 801 aa, Chlamydomonas sp.
PRMEHVCDVGIKSSVMYKLCKMATKPPTVAKLKELLKLAEVAYSSKDKKDDIVRLCEDNGLIAKPPPEYKTVEKMCVVKCALKKAMSLDDEEFGKFREHVDQLVNVVSRMLRRSSLVLTFHVTRLMEGDLPIPNMYDMKDTYWKDWLRIGVDGVFPDEESRISYEAVKDVIGKVLGSDDPDYINSYPIYFDQVLNYAGHTLSTVVSNNAWVPLVPRLTRLTKATLNALKAPKTIRVYDVMRVIQQEIQEMESWPESVQEYVREVRVRLKVPDGSRLYDDYGKDMDFPTMVRFNYWMQTRLEAIGARRIRLMPIFNVQRAHVRLDMKTLVNLFRHVFPKDPNIVELSKWKDVKDPDRFMLPLKPAFKKKKSCGPGEWEACKLSQQKYDADVNDIKDTDEYRHAKGRYDTLVNARKTVAGSFFKKPPVKTGWVFDCSICTDGVSLSMQYSKTVQVRVSDLKKTSKRSRDDEGMSVSEQYDHKLKTTLPDMGIVVLGVDPGRSNIATVTYLADDKSKTWKLTRGAFYHKSGIKKQKKQQEKRFSDMIPRWESLRENGAALSTSRTDDISAYLKNYDTFSDEWWRMALLRRESRDNFQRYIGKRKAMDSFWAGIKRNMKLDHPDLRVRVAYGSAITTLKATGPGEVAVPTGSMFASCKRLFKEEVHVTDEFKTTLMSWETGAKKECVYKIPSVQITTEGQIRLGYELLGHTPLKETPNVSYRDQLAVRVYCTRKQIQEKHRRGGLSPSLVDNNSIKRYPEVRGLRFSPETSTYSDRDRSSALTIARLHCMELLGQGRPLPFCRDA

SEQ ID NO: 967 - protein, 686 aa, Chlamydomonas sp.
METIVNKEPPDKRTRPDRAAKIKDRKNGEENVVKCTLSRIIADKDNKDVITKVIKERVDSVSKRTYLAGVAVNRILKEVFEGVPDAQLHTVSVPSVDQNFIRQLMVGSRQALMETRDATVERFFHNNYWFREKIEGREVIVKKKKQYVGAIARYDGDRNLYSHASKKYLTNFNNHYRVHLSTWIKKFVYSKENRILAKEFKDEHGIDETVFHRYLLYDIHSWGVKEDLIAIHSLLPERTKMLLKIQHSIIGQDEINRQWLKSVSNSAKMIRYNVFINRYLEATEDEGYAKLVNIAPIPTVKHSFITIDTDGLLGVLKDVGLVESLEKTLTNKEHWESVFDVENIRSTGKGVFTCTIDTDGVMACTHFLRAEKRKISIKDDGTAIKKQTKTLREFSESDPNVVVVANDPGRCNIAFLTWKKNKVKEKDNGGRKRKRHCEFGSKRLTRERYYVESGVFKSRGPTKKWLSNIQDCLDDLKDNSPKRTSLESFDAYVTVMVNHWDSRWGEMSKSRWGAQRLRLYGGKKRVLARFFNEVQADVGERKTIVIAYGSSKFAPGGKGELSVPTTSAFNAFSDRFKGRVAVIDEFRTTKIWHKDSTTVLQSVQSEKKGRTVRGLLWCSSTMENSKLFVNRDLNAAINIHNCFTMYPTRPGILARPKKYCKLEVVVGRTIDYKLTGSLQNAVSSEV

SEQ ID NO: 968 - protein, 713 aa, Chlamydomonas sp.
GNCPLVWYHQNNNHSLSMGVVTNNGDDDDLDIMVVKKTLNSLCMDVSRQKICSRIQRMVLVINHAVAEAYLFANFHITRCLDDGDFDVKQLPHLDRNFYYRCILAVSISNVRNDTLDQSLKDSMVAFDALRPAGYLKVDVCQWGQVIADVSIQMATMACNSVWANVDRVVIKYLRLKHPSLKKHFNKIVKAVVQYPDSDIDKIIPAGLVHANLIKDVVRRLRDLLPLPRGKQFNTRAHLTMRLFHHVLTELGADLKEKTTKKRPRLFSILPRKSGFTISYVPISSMTLMKLLSMGDSPLESVRGDGRHDNHSMLWRKYFNVQGLEKKGSRFDNRILSDGKGVSVQMKHQVGKDIAGEGGGDNAGYPKDASIEDCQDASLRQGALRVGIDPGMTDIVTIASSDGRVEYFSSARFSEAAGYNTSNRRTNKWNADTQDLVKSIPSPTTSSMHDMQDHVRGYLSALPTLLQHRANRGYRSMRFFRYVGKQKTIEKVCDLIAPKAQKKTIEEKVCDVIAPKAKKTVVGFGNWSNQGYGISRSCSGPVKEIRKCLSRRQNVLFKNVDERNTSCTCHGCFQKLANMKADSVVWRRVQNEPSALIDGAPTTTTTTTTFEKQKTVVKNVKVHKVLHCRNSVKSASSNVRCGATWNRDVNAAKNLLLLLTTWMDGKERPAAFCVPSSSPTPKTTVSGEANVGAQPTDPPGSVSSLQLLSSGPA

SEQ ID NO: 969 - protein, 226 aa, Chlamydomonas sp.
RSDQEVSNIQDCLDDLKDNSPKRTSLESFDAYVTVMVNHWDSRWGEMPKSRWGAQRLRLYGGKKRVLARFFNEVQADVGERKTIVIAYGSSKFAPGGKGELSVPTTSAFNAFSDRFKGRVAVIDEFRTTKIWHKDSTTVLQSVQAEKEGRTVRGLLWCSSTMENSKLFVNRDLNAAINIHNCFTMYPTRPGILARPKKYCKLEVVVGRTIDYKLTSSLQNAVSSEV

SEQ ID NO: 970 - protein, 794 aa, Chlamydomonas sp.
ECSREPVCRSRLHQNVFGVQFVMENGIGESSSLVHEADQHDDVAELVDYEGEEDEECAPGRAICVVKMKLSTFIPHDWLRNKIDTLVLDMNKLLGEGYIFANFHIARLFENGIAVPPVNRNFFYRCLIAVSTNKCKGSTLGEDFESSRLLFDLLREPGQSKVDIRGNVKNQIIADLSILMATMASNHLWTNLERRITTYLKWKYPQIAKRLRSDIVAALIKCPTKNLDVIFKMSPHTTKLPTKLPTARLRSAKSAVALAKKRVGRKEPEGSPLRVRLTKLQERLEKLSEAWLSSKNLRVDADNAKRFFAREVAFCLRGVLPLPSGNTFASRAHMTLPLYHKILSETIEEKRKTKNEKHSTFSLLPYKSGFTLSHIPISKMTFFYMVNECHFDSCKADVASKNHQGIWERFANLKKVETVSRKFGYRIVTDGFAVSVLMNKPTCLTCSMPADAFSTRAHEYVTTDEGGIVSFLDNVVVAAVDPGVTDIVTVTGLNGGTRSYSSAQYYRKGLIFKSQRQTDVWNLETADIVGGIIPDRDSSSSEQIGAYARFYMGAAPILLAHRASRGYRNLRFRRYCKKQKLIVEIADFVAPREKSAKVLVGFGDWKGLGATPISRRTCGPLQAIRFELRSRENVIMEDIDEFKTSQRCSCCENHLCNMVALTHRKKQDGTGWECTEGRKRIHKILHCKSSQSGAPRQQSGGMLHCGKTWDRDVNASRNILMLTLHQVFGRERPLAFRRDAPRSSSTTPPPPPDTDMGTQTVERFTKEATRNIFENLFNLLHPPTLPKSNDLQSG

SEQ ID NO: 971 - protein, 794 aa, Chlamydomonas sp.
ECSREPVCRSRIHQNVFGVQFVMENGIGESSSLVHEADQHDDVAELVDYEGEEDEECAPGRAICVVKMKLSTFIPHDWLRKKIDTLVLDMNKLLGEGYIFANFHIARLFENGIAVPPVNRNFVYRCLIAVSTNKCKGSTLGEDFESSRLLFDLLREPGQSKVDIRGKVKNQIIANLSILMATMASNHLWTNLERRITTYLKWKYPQIAKRLRSDIVAAVIKCPTKNIDVIFKMCPHTTKLPTKLPTTRLRSAKSAVALAKKRVGRKEPEGSPLRVRLTKLQERLEKLSEAWLSSKNIRVDADNAKRFFARDVAFCLRGGLPLPSGNTFASRAHMTLPLYHKILSETIEEKRKTKNEKHSTFSLLPYKSGFTLSYIPISKMAFFYMVNECHFDSCKADVASKNHQGIWERFANLKKVETVSRKFGYRIVTDGFAVSVLMNKPTCLTCSMPADAFSTRAHEYVTTDEGGIVSFLDNVVVAAVDPGVTDIVTVTGLNGGTRSYSSAQYYRKGLIFKSQRQTDVWNLETADIVGGIIPDRDSSSSEQIGAYARFYMGAAPILLAHRASRGYRNLRFRRYCKKQKLIVEIADFVAPREKSAKVLVGFGDWKGLGATPISRRTCGPLQAIRFELRSRENVIMEDIDEFKTSQRCSCCENHLCNMVALTHRKKQDGTGWECTEGRKRIHKILHCKSSQSGAPRQQSGGMLHCGKTWDRDVNASRNILMLTLHQVFGRERPLAFRRDAPRSSSTTPPPPPDTDMGTETVERFTKEATRNIFENLFNLLHPPTLPKSNDLQSG

SEQ ID NO: 972 - protein, 658 aa, Chlamydomonas sp.
QCIRNLHVLNIRMPCMATKASVKLARPPMPLVSPGPSSVDGRIMARSERSGLQATNVSLTQAASKATSLSRKNNPAVVKSFSTHVCPHTNNNPTCSDSNCSCKPIFLTNIPDASKSLKSRTSDQGSTSSAQDFYEYWDSSRQDLYRQLLWLPKTGSQGLVSSSLNGFARSTPARSSFSITKTEPLKTSLEKTSCPSFKYIVADGTVEDATKSNAKPKLRTLKLKLNPTKAQKSMLAEFAGCSRFMYNKAVAARLGVGSTHKSVFRIRDRYVTNKVRGKGKMPNPYFKNRQWLLQCPKSVRQSAIKSALANIKACFSNLKAGNIKQFSAPFRRKKTELERGWVIEMDQKNVSKDGDKLFIFKDILGNMRYFGSKQLHKLMPEENPTHDPKVQKSRFGEYFLVLSVAARDRRAERKPVNPDKVATASIDPGVRKTMVTYSPENEESFMLGQGQASDLVKLLLVHDKLQSRLDTEKTLRSKERMKIKKLMIRIRKTIFYLKKEFRDQTTNFLAARYDVLLVPQLETAKMTISAERELTTKVARQMLTLSHSVLFNRLKEKCEEYGTVFLHVLEHYTSQTCPMCGFLNKCGETYTCKNCQFTCDRDIVGAAWHLPEGCSNRKSLFVKDSIPWGVDPCDTPMENSLSFLLHVPRAPGCLVRNS

SEQ ID NO: 973 - protein, 813 aa, Chlamydomonas sp.
PRMEHVCDVCIKSSVMYKLCKMATKPPTVAKLKELLKLAEVAYSSKDKKDDIVRLCEDNGLIAIPPPEYKTVEKMCVVKCALKKAMSLDDEEFGKFREHVDQLVNVVSRMLRRSSLVLTFHITSLLEKGLDIPDLYNMKDTYWKDWLRIGVDGIFPDEESKISYEAVKDSIGDVIGNDDADYIKSYPIYFDQVLNYAGHTLSTVVSNNAWVPLIPRLARLTSTTLNKLNAPKTLDTSKIIRGYDVMQAIQQEVQNMEGWPESVQEYVNEVREMLSVPDGSRVYDNYGKDMDFPTMVRFNYWIQTRLEDMDARRIRLMPIFNVQRVHVRLDLKTLVNLFRHMFPNDQNIVELSKWEHVKNPDSFMLPQRPAQKKKKSCGPGEWEAYKSVMKQYDDDVKDIKATDEYRHAKGLYDTLVNARKTVAGSFFRKPPVKNGWVFDCSICTDGVSLSMQYSKTVQVLVSDLKKTCKKPRKEEGIKIAEKYDGSLKTILPDMGIVVLGVDPGRSNIATVTYLADDKNKTWKLTRGEFYHKSGIKKQTRQKELRFADMIPMWESLRENGAALSTSRTDKISAYLSNYAKFSDEWWRLALRRRESRDNFQRYIGKRKVKDSFWAGIKRCMMKELPDMKVCVAYGSAITKLKPTGPGEVAVPTGAMFASCKRIFKEDVSVTDEFKTTLMSWETGEEKERVYKIPSVCSADVKLRLGGERFGHTKSKTMPKVADCDHLGVRLYNKRKGAQEKHRRGGFATSLVDSQKSIERYPEVRGLRFSPETCIYSDRDRSSALTIARLHCMELMGLGRPLPFAHSSSVVVDE

SEQ ID NO: 974 - protein, 223 aa, Chlamydomonas sp.
MYDIAVSNLQRYIGKRKVKDSFWAGIKRCMMKELPDMKVCVAYGSAITKLKPTGPGEVAVPTGAMFASCKRIFKEDVSVTDEFKTTLMSWETGKEKERVYKIPSVCSADVKLRLGGERFGHTKSKTMPKVADCDHLGVRLYNKRKGAQEKHRRGGFATSIVDSQKSIERYPEVRGLRFSPETCIYSDRDRSSALTIARLHCMELMGLGRPLPFAHSSSVVVDE

SEQ ID NO: 975 - protein, 793 aa, Chlamydomonas sp.
KMATKPPTVAKLKELLKLAEVPYSSKSNKDDLVRLCEDNGLIARPPPEYKTVEKMCVVKCALKKAMSLDDEEFGKFREHVDQLVNVVSRMLRRSSLVLTFHITSLLEKGLDIPDLYNMKDTYWKDWLRIGVDGIFPDEESKISYEAVKDSIGDVIGNDDADYIKSYPIYFDQVLNYAAHTLSTVVSNNAWVPLIPRLARLTSTTLNRLNAPKTLDTSKIIRGYDVMQAIQQEVQNMEGWPESVQEYVNEVREMLSVPDGSRVYDNYGKDMDFPTMVRFNYWIQTRLEDMDARRIRLMPIFNVQRVHVRLDLKTLVNLFRHMFPNDQNIVELSKWEHVKNPESFMLPQRPAQKKKKSCSPGEWEAYKSVLKQYDDDVKDIKATDEYRHAKGLYDTLVNARKTVAGSFFRKPPVKNGWVFDCSICTDGVSLSMQYSKTVQVLVSDLKKTCKKPRKEEGIKIAEKYDGSLKTILPDMGIVVMGVDPGRSNIATVTYLADDKNKTWKLTRGAFYHKSGIKKQTRQKELRFADMIPMWESLRENGAALSTSRTDNISAYLSNYAKFSDEWWRLALRRRESRDNLQRYIGKRKVKDSFWAGIKRCMMKELPDMKVCVAYGSAITKLKPTGPGEVAVPTGAMFASCKRIFKEDVSVTDEFKTTLMSWETGKEKERVYKIPSVCLADVKLRLGGERFGHTKSKTMPKVADCDHLGVRLYNKRKGAQEKHRRGGFATSLVDSQKSIERYPEVRGLRFSPETCIYSDRDRSSALTIARLHCMELMGLGRPLPFAHSSSVVVDE

SEQ ID NO: 976 - protein, 244 aa, Chlamydomonas sp.
ILIINLKKSAGRQERPLCACQSRQGCNCLSIQTRLQLPVNPDKVATASIDPGVRKTMVTYSPENEESFMLGQGQASDLVKLLLVHDKMQSRLDTEKTLRSKERMKIKKLMIRIRKTIFYLKKEFRDQTTNFLAARYDVLLVPQLETAKMTISAERELTTKVARQMLTLSHSVLFNRLKEKCEEYGTVFLHVLEHYTSQTCPMCGFLNQCGETYTCKNCQFTCDRDIVGAAGIFLKAVRTENPCS

SEQ ID NO: 977 - protein, 801 aa, Chlamydomonas sp.
PRMEHVCDVCIKSSVMYKLCKMATKPPTVAKLKELLKLAEVAYSSKDKKDDIVRLCEDNGLIARPPPEYKTVEKMCVVKCALKKAMSLDDEEFGKFREHVDQLVNVVSRMLRRSSLVLTFHVTRLMEGDLPIPNMYDMKDTYWKDWLRIGVDGVFPDEESRISYEAVKDVIGKVLGSDDPDYINSYPIYFDQVLNYAGHTLSTVVSNNAWVPLVPRLTRLTKATLNALKAPKTIRVYDVMRVIQQEIQEMESWPESVQEYVREVRVRLKVPDGSRLYDDYGKDMDFPTMVRFNYWMQTRLESIGARRIRLMPIFNVQRAHVRLDMKTLVNLFRHVFPKDPNIVELSKWKDVKDPDRFMLPLKPAVKKKKSCGPGEWEAYKLAQQKYDADVNDIKDTDEYRHAKGRYDTLVNARKTVAGSFFKKPPVKTGWVFDCSICTDGVSLSMQYSKTVQVRVSDLKKTSKRSRDDEGMSVSEQYDHKLKTTLPDMGIVVLGVDPGRSNIATVTYLADDKSKTWKLTRGAFYHKSGIKKQKKQQEKRFSDMIPRWESLRVNGAALSTSRTDDISAYLKNYDTFSDEWWRMALLRRESRDNFQRYIGKRKAMDSFWAGIKRNMKLDHPDLRVRVAYGSAITTLKATGPGEVAVPTGSMFASCKRLFKEEVHVTDEFKTTLMSWETGAKKECVYKIPSVQITTEGQIRLGYELLGHTPLKETPKVSYRDQLAVRVYCTRKQIQEKHRRGGLAPSLVDNNSIKRYPEVRGLRFSPETSTYSDRDRSSALTIARLHCMELLGQGRPLPFCRDA

SEQ ID NO: 978 - protein, 802 aa, Chlamydomonas sp.
ECSREPVCRSRLHQKVFGVQFVMENGIGESSSLAHEADQHDDVAELVDYEGEEDEECAPGRAICVVKMKLSTFIPHDWLRKKIDTLVLDMNKLLGEGYIFANFHIARLFENGIAVPPVNRNFFYRCLIAVSTNKCKGSTLGEDFESSRLRFDLLREPGQSKVDIRGNVKNQIIADLSILMATMASNHLWTNLERRITTYLKWKYPQIAKRLRSDIVAAVIKCPTKNLDVIFKMSPHTTKLPTKLPTARLRSAKNAVALAKKRVGRKEPEGSPLRVRLTKLQERLEKLSEAWLSSKNLRVDADNAKRFFARDVAFCLRGVLPLPSGNTFASRAHMTLPLYHKILSETIEEKRKTKNEKHRTFSLLPYKSGFTLSHIPISKMAFFYMVNECHFDSCKADVASKNHQGIWERFANLKKVETVSRKFGYRILTDGFAVSILMNKPTCLTCSMPADAFSTRAHEYVTTDEGGIVSFLDNVVVAAVDPGVTDIVTVTGLNGGTRSYSSAQYYRKGLIFKSQRQTDVWNLETADIVGGIIPDRDSSSSEQIGAYARFYMGAAPILLAHRASRGYRNLRFRRCCKKQKLIVEIADFVAPREKSAKVLVGFGDWKGLGATPISRRTCGPLQAIRFELRSRENVIMEDIDEFRTSQRCSCCENHLCNMVALTHRKKQDGTGWECTEGPKRIHKILHCKSSQSGAPRQQSGGMLHCGKTWDRDVNASRNILMLTLHQVFGRERPLAFRRTRREVPRQPHPHPLILIWGHRRLNGLPKRLLGISSRTSSTCCTPQRCPKATICSLDDYKVSHFI

SEQ ID NO: 979 - protein, 712 aa, Chlamydomonas sp.
GNCPLVWYHQNNNHTLSMGVVTNNGDDDDLDIMVAKKTLNSLCMDVSRQQICSRIQSMVLVINHAVAEAYLFANFHITRCLDDGDFDVKQLPHLDRNFYYRCILAVSISNVRNDTLDQSLKDSMVAFDALRPAGYLKVDVCQWGQVIADVSIQMATMACNSVWENVDRVVIKYLRLKHPSLKKHFNKIVKAVVQYPDSDIDKIIPAGLVHANLIKDVVRRLRDLLPLPRGKQFNTQAHLTMRLFHHVLTELGADLKEKTTKKRPRLFSILPRKSGFTISYVPISSMTLMKLLSMGDSPLESVSGDGRHENHSMLWRKYFNVQGLETKGSRFDNRILSDGKGVSVQMKHQVGKDIAGEGGGDNAGYPKDASIEDCRDASLRQGALRVGIDPGMTDIVTIASSDGRVESFSSARFSEAAGYNTSNRRTNKWNADTQDLVKSIPSLTTSSMHDMQDHVRGYLSALPTLLQHRANRGYRSMRFFRYVGKQKTIEKVCDLIAPKAQKKTIEEKVCDVIAPKAKKTVVGFGNWSNQGYGISRSCSGPVKEIRKCLSRRQNVLFKNVNERNTSCTCHGCFQKLVNMKADSVVWRRVQNEPSALIDGAPTTTTTTTFEKQKMVVKNVKVHKVLHCCNSVKSASSNVRCGATWNRDVNAAKNLLLLLTTWMDVKERPAAICVPSSSPTPKSTVSGEANVGAQPTDPPGSVSSLQLLSSGPA

SEQ ID NO: 980 - protein, 422 aa, Chlamydomonas sp.
KNKKSHPRLFSILPRKNGFTISYVPISSMTFMKLLSMGDSPLQSISGDGRYENHTMLWRKYFDVQGLETKRSRFDNRILSDGKGVSVQMKQKAKEEVVEEGENAGYPKNANIVECKDAVGALRVGVDPGMTDIVTVASSAGRIEYFSFSEVAGYNTSKRRTYKWNDETQDLVKSIPSPNTSNMVDLQDHVRAYLKALPILLQHRANKGYRSMRFFRYVGKQKTIEKVCDVIAPRAQTTVVGFGNWSNQGYGISRSCSGPIKEIRRCLSRRKNVLFKNVDERNTSCKCHGCFQRLVNMKADSVVWRGVCKESPIDGSITVEKQKMVVKNVKVHKVLHCRDSVKSASSNVRCGATWNRDVNAAKNLLLLLTTWMDGRERPEAFCVPSPPPKTTVSIEASVSAKPTDPPGFVSSLPCYPLGQLKC

SEQ ID NO: 981 - protein, 351 aa, Chlamydomonas sp.
PFLCTTRYCRRPSKNEKRKRKTSHILVVALQIWIHSVAHSDFENGLFLYGQRVPPSIHARQTFAYKNHQEYGSASQTSRKWRQFLGSSVTRIVTDGFAVSILMNKPTCLTCSMPADSFSTRAHEYVTTDKGGIVSFRDNVVVAAVDPGVTDIVTVTGLDGGTRSYSSAQYYRKGLIFKSQRQTDVWNLETADIVGDIIPDRDSSRSEQIGAYARIYMGAAPILLAHRASRGYRNLRFRRYCKKQKLIVEIADFVGPREKSAKVLVGFGDWKGLGATPITRRTCGPLQAIRFELRSRGNVIMEDVDEFRTSQRCSCCENRLCNMVALTHRKKQDGTGWECTEGRMRIHKILH

SEQ ID NO: 982 - protein, 304 aa, Chlamydomonas sp.
EQHRYSHVSGRRQKQDMEAYTRSFLPQVWYQETEKQQEKRFSDMIPRWESLRENGAALSTSRTDDISAYLKNYATFSDEWWRMALRRRESRDKFQRYIGKRKAMDSFWAGIKRNMKLDHPDLRVRVAYGSAITTLKATGPGEVAVPTGSMFASCERLFKEEVHVTDEFKTTLMSWETGAKKECVYKIPSVQITTEGQIRLGYELLGHTPLKETPKVSYRDQLAVRVYCTRKQIQEKHRRGGLAPSLVDNNSIKRYPEVRGLRFSPETSTYSDRDRSSALTIARLHCMELLGQGRPLPFCRDACC

SEQ ID NO: 983 - protein, 693 aa, Chlamydomonas sp.
RRKWYKEMWVQYYHQKKKNTHPLLMGVVQDKGDDDINISVVKKTLNSLCMDVSRHQISSRIQSMVLLINHAVAEAYLFANFHITRCLDDGDFDVKQLPHLDRNFYYRCLLAVSTSNVRRDTLGQSFNDTMVDFDALRPEGYVKVDVRPWGQVIADVSIQMATMACNSVWANVDRVVIKYLRLKHPSLKKHFKKIVKAVVHYPESKIDTIIPEGLVHAIHIKEVVSHLRALFPLPRGKQFNTRAHLTMRLFHHVLTELGEVGRVDPKDKNTRKSHPRLFSILPRKNGFTISYVPISSMTFMKLLSMGDSPLESVSGDGRYENHTMLWRKYFNVQGLETKRSRFDNRILSDGKGVSVQMKQKGKEEVVEEGENAGYPKDANIVECKDGVGALRVGVDPGMTDIVTVASSAGRIESFSSARFSEVAGYNTSKRRTYKWNDETQDLVKSIPSPNTSNMSDLQDHVRAYLKALPILLQHRANKGYRSMRFFRYVGKQKTIEKVCDVISPRAQTTVVGFGNWSNQGYGISRSCSGPIKEIRRCLSRRKNVLFKNVDERNTSCKCHGCFQRLVNMKADSVIWRGVCKESPIDGSITVEKQKMVVKNVKVHKVLHCRDSVKSASSNVRCGATWNRDVNAAKNLLLLLTTWMDGRERPEAFCVPSPPPKTTVSIEASVSAKPTDPPGFVSSFPCYPLGQLKC

SEQ ID NO: 984 - protein, 792 aa, Chlamydomonas sp.
ECSREPVCRSRLHQNVFGVQFVMENGIGESSSLVHEADQHDDVAELVDYEGEEDGECAPGRAICVVKMKLSTFIPHDWLRNKIDTLVLDMNKLLGEGYIFANFHIARLFENGLAVPPVNRNFFYRCLIAVSTNKCNGSTLGEDFESSRLLFDLLREPGQSKVDIRGRVKNQIIADLSILMATMASNHLWTNLERRITTYLKWKYPQIAKRLRSDIVAALIKCPTKNLDVIFKMSPHTTKLPTKLPTSRLRSAKSAVALAKKRVGRKEPEGSPLRVRLTKLQERLEKLSEAWLSSKNLRVDADNAKRFFAREVAFCLRGVLPLPSGKTFASRAHMTLPLYHKILSETIEEKRKTKNKKHRTFSLLPYKSGFTLSHIPISKMAFFYMVNECHFDSCKADVASKNHQGIWERFANLKKVETVSRKFGYRIVTDGFAVSILMNKPTCLTCSMPADAFSTRAHEYVTTDEGGIVSFLDNVVVAAVDPGVTDIVTVTGLNGGTRSYSSAKYYRKGMIFKSQRQTDVWNLETADIVGGIIPDRDSSSSEQIGAYARFYMGAAPILLAHRASRGYRNLRFRRYCKKQKLIVEIADFVAPRKKSAKVLVGFGDWKGLGATPISRRTCGPLQAIRFELRRRENVIMEDIDEFRTSQRCSCCENHLCNMVALTHRKKQDGTGWECTEGRKRIHKILHCKSSQSGAPRQQSDGMLHCGKTWDRDVNASRNILMLTLHQVFGRERPLAFRRDAPRSSSTTPPPDTDMGTQTVERFTKEATRNIFENLFNLLHPPTLPKSNDLQSG

SEQ ID NO: 985 - protein, 665 aa, Chlamydomonas sp.
METIVNKEPPDKRTRPDRAAKIKDRKNGEENVVKCTLSRIIADKDNKDVITKVIKERVDSVSKRTYLAGVAVNRILKEVFEGVPDAQLHTVSVPSVDQNFIRQLMVGSRQAHMETRDATVERFFHNNYWFREKIEGREVIVKKKKQYVGAIARYDGDRNLYSHASKKYLTNFNNHYRVHLSTWIKKFVYSKENRILAKEFKDEHGIDETVFHRYLLYDIHSWGVKEDLIAIHSLLPERTKMLLKIQHSIIGRDEINRQWLKSVSNSAKMIRYNVFINRYLEATEDEGYAKLVNIAPIPTVKHSFITIDTDGLLGVLKDVGLVESLEKTLTNKEHWESVFDVENIRSTGKGVFTCTIDTDGVMACTHFLRAEKKKISIKDDGTAIKKQTKTLREFSESDPNVVVVANDPGRCNIAFLTWKKNKVEEKDKGGRKRKRHCEFGSKRLTRERYYVESGVFKSRGPTKKWLSNIQDCLDDLKDNSPKRTSLESFDAYVTVMVNHWDSRWGEMSKSRWGAQRLRLYGGKKRVLARFFNEVQADVGERKTIVIAYGSSKFAPGGKGELSVPTTSAFNAFRDRFKGRVAVIDEFRTTKIWHKDSTTVLQSVQSEKKGRTVRGLLWCSSTMENSKLFVNRDLMQPLTSTIALQCTQPAPEFLRGQRNIANWKLW

SEQ ID NO: 986 - protein, 803 aa, Chlamydomonas sp.
PRMEHVCDVCIKSSVMYKLCKMATKPPTVAKLKELLKLAEVAYSSKDKKDDIVRLCEDNGLIARPPPEYKTVEKMCVVKCALKKAMSLDDEEFGKFREHVDQLVNVVSRMLRRSSLVLTFHVTRLMEGDLPIPNMYDMKDTYWKNWLRIGVDGVFPDEESRISYESVKDVIGKVLGSDDPDYINSYPIYFDQVLNYAGHTLSTVVSNNAWVPLVPRLTRLTKATLNALKAPKTIRVYDVMRVIQQEIQEMESWPESVQEYVREVRVRLKVPDGSRLYDDYGKDMDFPTMVRFNYWMQTRLEAIGARRIRLMPIFNVQRAHVRLDMKTLVNLFRHVFPKDPNIVELSKWKDVKDPDRFMLPLKPAVKKKKSCGPGEWEAYKLAQQKYDADVNDIKDTDEYRHAKGRYDTLVNARKTVAGSFFKKPPVKTGWVFDCSICTDGVSLSMQYSKTVQVRVSDLKKTSKRSRDDEGMSVSEQYDHKLKTTLPDMGIVVLGVDPGRSNIATVTYLADDKSKTWKLTRGAFYHKSGIKKQKKQQEKRFSDMIPRWEFLRENGAALSTSRTDDISAYLKNYATFSDEWWRMALLRRESRDNFQRYIGKRKAMDSFWAGIKRNMKLDHPDLRVRVAYGSAITTMKATGPGEVAVPTGSMFASCKRLFKEEVHVTDEFKTTLMSWETGAKKECVYKNPSVQITTEGQIRLGYELLGHTPLKETPNVSYRDQLAVRMYCTRKQIQEKHRRGGLAPSLVDNNSIKRYPEVRGLRFSPETSTYSDRDRSSALTIARLHCMELLGQGRPLPFCRDACC

SEQ ID NO: 987 - protein, 688 aa, Chlamydomonas sp.
GNVGAILYHQKKKNTHPLLMGVVQDKGDDDINISVVKKTLNSLCMDVSRHQISSRIQSMVLLINHAVAEAYLFANFHITRCLDDGDFDVKQLPHLDRNFYYRCLLAVSTSNVRKDTLGQSFNDTMVAFDALRPAGYVKVDVRPWGQVIADVSIQMATMACNSVWANVDRVVIKYLRLKHPSLKKHFKKIVKAVVQYPESKIDTIIPEGLVHAIHIKEVVSHLRALFPLPRGKQFNTRAHLTMRLFHHVLTELGEVGRVDPKDKKTRKSHPRLFSILPRKNGFTISYVPISSMTFMKLLSMGDSPLESVSGDGRYENHTMLWRKYFNVQGLETKRSRFDNRILSDGKGVSVQMKQKGKEEVVEEGENAGYPKDANIVECKDAVGALRVGVDPGMTDIVTVASSAGRIESFSSARFSEVAGYNTSKRRTYKWNDETQDLVKSIPSPNTSNMSDLQDHVRAYLKALPILLQHRANKGYRSMRFFRYVGKQKTIEKVCDVIAPRAQTTVVGFGNWSNQGYGISRSCSGPIKEIRRCLSRRKNVLFKNVDERNTSCKCHGCFQRLVNMKADSVVWRGVCKESPIDGSITVEKQKMVVKNVKVHKVLHCRDSVKSASSNVRCGATWNRDVNAAKNLLLLLTTWMDGRERPEAFCVPSPPPKTTVSIKASVSAKPTDPPGFVSSLPCYPLGQLKC

SEQ ID NO: 988 - protein, 701 aa, Chlamydomonas sp.
YQDKKRTLPPSISMGVVTNNGDDEDDLDIMVVKKTLNSLCMDVSRQQICSRIQSMVLVINHAVVEAYLFANFHITRCLDDVDFDVKQLPHLDRNFYYRCILAVSTSNVRKDTLGQSLKDSMVAFDALRPAGYLEVDVRQWGQVIADVSIQMATMACNSVWANVDRVVIKYVHLKHPSLKKHFNKIVKAVVQYPESDIDKIIPASLVHANLIKDVVRRLRDLLPLPRGKQFNTRAHLTMRLFHHVLTELGADLKEKTTKKRPRLFSILPRKSGFTVSYVPISSMTLMKLLSMGDSPLESFRGDGRHENHSMLWRKYFNVQGLETKGSRFDNRILSDGKGVSVQMKHQASEDVAVEGGDNAGYPKDAILEDCQDASLRVGVDPGMTDIVTIASSDGRVESFSSAHFSEAAGYNTSNRRTNKWNADTQDLVKSIPSPTTSSMHDMQDHVRGYLSALPTLLQHRANRGYRSMRFFRYVGKQKTIEKVCDLITPKAQKKTIEEKVCDVIAPKAKKTVVGFGNWSNQGYGISRSCSGPVKEIRKCLSRRQNVLFKNVDERNTSCTCHGCFQKLVNMKADSVAWRRVKNEPSALIDGAPTTTTTFEKQKTVVKNVKVHKVLHCRNSVKSASSNVRCGATWNRDVNAAKNLLLLLTTWMDGKERPAAFCVPSSSPTPKTTVSGEANVGAQPTDPPGSVSSLQLLSSGPA

SEQ ID NO: 989 - protein, 619 aa, Chlamydomonas sp.
AYLFAHFHITRCLDDGDFDVKQLPHLDRNFYYRCLLAVSTSNVRKDTLGQSFNDTMVAFDALRPAGYVKVDVRPWGQVIADVSIQMATMACNSVWANVDRVVIKYLRLKHPSLKKHFKKIVKAVVQYPESKIDTIIPEGLVHAIHIKEVVSHLRTLFPLPRGKQFNTRAHLTMRLFHHVLTELGEVGRVDPKDKKTKKSHPRLFSILPRKNGFTISYVPILSMTFMKLLSMGDSPLKSVSGDGRYENHTMLWRKYFNVQGLETKRSCFDNRILSDGKGVSVQMKQNGKEEVVEEGENAGYPKDANIVECKDAVGALRVGVDPGMTDIITIASSACRIESFSSARFSEVAGYNTSKRRTYKWNDETQDLVKSIPSPNTSNMVDLQDHVRAYLKALPILLQHRANKGYRSMRFFRYVGKQKTIEKVCDVIAPRAQTTVVGFGNWSNQGYGISRSCSGPIKEIRRCLSRRKNVLFKNDDERNTSCKCHGCFQRLVNMKADSVVWRGVCKESPIDGSITVEKQKMVVKNVKVHKVLHCRDSVKSASSNVRCGATWNRDVNAAKNLLLLLTTWMDGRERPEAFCVPSPPPKTTVSIEASVSAKPTDPPGFVSSLPCYPLGQLKC

SEQ ID NO: 990 - protein, 390 aa, Chlamydomonas sp.
NSTVRCPTIFVVSCNMLWRKYFNVRAVETQSVRFGGRILTDGKAVSIQMKRDTADIFEDAEGFPKDATVNACNEAVTYKGARRVGVDPGMTDIVTIASDNTKKEIRSFSSAKFSEMAGYNTSKRCTNRWNKEHEKLISEIPTSNTTDLEGHVKSYLAALPVLLTHRFDKGYRSMRFLRFMGKQKTIEEVCNTIAPRNEVTVVGFGNWSNQGYGIRLSCSGPIKEIRQRLSRRENVLFKNVDEYKTSCTCHGCFNRLVNMKATSTLWRWRKVTENGVEVNRRVKEVVNNNKVHKVLHCCNSVPSVTSRCGATWNRDVNASKNLLLLLVVWMDEKERPANFCRSLRNTVSEEAAESFNHVHPGVDSHETQMLSFGPTSKVEIQHLEEYSGPS

SEQ ID NO: 991 - protein, 341 aa, Chlamydomonas sp.
RETLLCTRRGILSQGGSPFTIRKHFCVSGSHDPASVPQDIVGDHRRKTKNEKLRTLSLLPYKSGFTMSHIPISKMAFFYMVNECHFDSCKADVASKNHQGIWERFANLKKVDTVSRKFGYRIVTDGFAVSILMNKPTCLTCSMPADSFSTRAHEYVTTDEGGIVSFRDNVVVAAVDPGVTDIVTVTGLDGGTRSYSSAQYYRKGLIFKSQRQTDVWNLETADIVGDIIPDRDSSRSEQIGAYARFYMGAAPILLAHRASRGYRNLRFRRYCKKQKLIVEIADFVAPREKSAKVLVGFGDWKGLGATPISRRTCGPLQAIRFELRSRGNVIMEDVDEFRTSQ

SEQ ID NO: 992 - protein, 851 aa, Chlamydomonas sp.
KLLFTPPYCPRANAIEQIFGSMKRDYRASCPLTSTCNFDYLMQICCVLEMWRYKDFSKYMINTREPVCRSRLHQNVFGVQFVMENGIGESSSLVHEADQHDDVAELVDYEGEEDEECAPGQAICVVKMKLSTFIPHDWLRKKIDTLVLDMNKLLGEDYIFANFHIARLFENGIAVPPVNRNFFYRCLIAVSTNKCKGSTLGEDFESSRLLFDLLREPGQSKVDIRGKVKNQIIADLSILMATMASNHLWTNLERRITTYLKWKYPQIAKRLRSDIVAAVIKCPTKNLDVIFKMSPHTTKLPTKLPTARLRSEKSAVALAKKRVGRKEPEGSPLRVRLTKLQERLEKLSEAWLSSKNLRVDAKRFFARDVAFCLRGVLPLPSGNTFASRAHMTLPLYHKILSETIEEKRKTKNEKHRTFSLLPYKSGFTLSHIPISKMAFFYMVNECHFDSCKADVASKNHQGIWERFANLKKVETVSRKFGYRIVTDGFAVSILMNKPTCLTCSMPADAFSTRAHEYVTTDEGGIVSFLDNVVVAAVDPGVTDIVTVTGLNGGTRSYSSAQYYRKGLIFKSQRQTDVWNLETADIVGGIIPDRDSSSSEQIGAYARFYMGAAPILLAHRASRGYRNLRFRRYCKKQKLIVEIADFVAPREKSAKVLVGFGDWKGLGATPISRRTCGPLQAIRFELRSRENVIMEDIDEFRTSQRCSCCENHLCNMVALTHRKKQDGTGWECTEGRKRIHKILHCKSSQSGAPRQQSGGMLHCGKTWDRDVNASRNILMLTLHQVFGRERPLAFRRDAPRSSSTTPPPPPDTDMGTQTVERFTKEATRNIFENLFNLLHPPTLPKSNDLQSG

SEQ ID NO: 993 - protein, 307 aa, Chlamydomonas sp.
FPCPSVPHCYLGHWLPVPRFRGADLRTRILFPRLHEGLGTHEGVLRSCLKAWVAHDCNKMARTVHGGRVHENHTMLWRKYFNVQGLETKRSRFDNRILSDGKGVSVQMKQKGTEEVVEEGEHAGYPKDANIVECKDAVGALRVGVDPGTTDIVTVASSAGRIESFSSARFSEVAGYNTSKRRTYKWNAETQDLVKSIPSPNTSNVVDLQDHVRAYLKALPILLQHRASKGYRSMRFFRYVGKQKTIEKVCDVIAPREQTTVVGFGNWSNQGYGISRSCSGPIKEIRKCLSRRKNVYVQKRRRTQHFL

SEQ ID NO: 994 - protein, 331 aa, Chlamydomonas sp.
RGVSQRRKSRRLCAWVRCESVSTRVSMTDIVTVASSDGRVESFSSARFSEAAGYNTSNRRTNKWNVDTQDLMKSIPSPTTSNMPDMQDHVRGYLSALLQHRASRGYRSKRFFRYVGKQKTIEKVCDLIAPKAQKTIEKVCDVIAPKAQKTVVGFGNWSNQGYGISRSCSGPMKEIRKFLSRRQNVLFKNVDERNTSCICHSCFQKLVNMKADSVVWRRVHKEPPALIDGATTTTTTMFEKQKTVVKNVKVHKVLHCRNSVKSASSNVRCGRCNLESRRERCQEPSSASDDVDGLERATGGILCALLITHPKNHSFRRGKCGRSTNRPTWVS

SEQ ID NO: 995 - protein, 773 aa, Chlamydomonas sp.
KMATKPLTVAKLKELLKLAEVPYSSKSNKDDLVRLCEDNGLIARPPPEYKTVEKMYVVKCALKKAMSLDDEEFGKFREHVDQLVNVVSRMLRRSSLVLTFHITSLLEKGLDIPDLYNMKDTYWKDWLRIGVDGIFPDEESKISYEAVKDSIGDVIGNDDADYIKSYPIYFDQVLNYAGHTLSTVVSNNAWVPLIPRLARLTSTTLNKLNAPKTLDTSKIIRGYDVMQAIQQEVQNMEGWPESVQEYVNEVREMLSVPDGSRVYDNYGKDMDFPTMVRFNYWIQTRLEDMDARRIRLMPIFNVQRVHVRLDLKTLVNLFRHMFPNDQNIVELSKWEHVKNPDSFMLPQRPAQKKKKSCGPGEWEAYKSVLKQYDDDIKDIKATDEYRHAKGLYDTLVNARKTVAGSFFRKPPVKNGWVFDCSICTDGVSLSMQYSKTVQVLVSDLKKTCKKPRKEEGIKIAEKYNGSLKTILPDMGIVVLGVDPGRSNIATVTYLADDKNKTWTLTRGAFYHKSGIKKQTRQKELRFADMIPMWESLRENGAALSTSRTDKISAYLSNYAKFSDEWWRLALRRRESRDNLQRYIGKRKVKDSFWAGIKRCMMKELPDMKVCVAYGSAITKLKPTGPGEVAVPTGAMFASCKRIFKEDVSVTDEFKTTLMSWETGKEKERVYKIPSVCSADVKLRLGGERFGHTKSKTMPKVADCDHLGVRLYNKRKGAQDKHRRGNFATSLVDSQKSIERYPEVRGLRLSLETCIIWTGIALLLSQSQGCTAWN

SEQ ID NO: 996 - protein, 794 aa, Chlamydomonas sp.
GHLIVGHLLFWGFDQFKFCNRSCQYRYCLQEIYTKHSRPVKTQKLHDQSSLTSQRVGLHRAHQYVNNHAMSYLCIDHDNVRVLWYKEIVVHDDIKTRKEHSLPPSISMGVVTNNGDDDDDLDIMVVKKTLNSLCMDVSRQQICSRIQSMVLVINHAVAEAYLFANFHITRCLDDVDFDVKQLPHLDRNFYYRCILAVSTSNVRKDTLGQSLKDSMVAFDALRPAGYLKVDVRQWGQVIADVSIQMATMACNSVWANVDRVVIKYLRLKHPSLKKHFKKIVKAVVQYPESDIDKIIPASLVHANLIKDVVRRLRDLLPLPRGKQFNTRAHLTMRLFHHVLTELGADLKEKTTKKRPRLFSILPRKSGFTISYVPISSMTLMKLLSMGDSPLESFRCDGRHENHSMLWRKYFNVQGLETKGSRFDNRILSGGKGVSVQMKHQASEDVAVDNAGYPKDAILEDCQDASLRVGVDPGMTDIVTVASSDGRVESFSSARFSEAAGYNTSNRRTNKWNVDTQDLVKSIPSPTTSSMHDMQDHVRGYLSALPTLLQHRASRGYRSMRFFRYVGKQKTIEKVCDLIAPKAQKKTIEEKVCDVIAPRAQTTVVGFGNWSNQGYGISRSCSGPIKEIRRCLSRRKNVLFKNVDERNTSCTCHGCFQKLVNMKADSVVWRRVQNEPPSLINGAPTITTTTTIEKQKTVVKNVKVHKVLHFRNSVKSASSKVRCGATWNRDVNAAKNLLLLLTTWMDGKERPATFCVPSSSPTPKTTVSGEANVGAQPTDPPGSVSSLQLLSSGPA

SEQ ID NO: 997 - protein, 686 aa, Chlamydomonas sp.
METIVNKEPPDKRTRPDRAAKIKDRKNGEENVVKCTLSRIIADKDNKDVITKVIKERVESVSKRTYLAGVAVNRILKEVFEGVPGAQLHTVSVPSVDQNFIRQLMVGSRQAHMETRDATVERFFHNNYWFREKIEGREVIVKKKKQYVGAIARYDGDRNLYSHASKKYLTNFNNHYRVHLSTWIKKFVYSKENRILAKEFKDEHGIDETVFHRYLLYDIHSWGVKEDLIAIHLLLPERTKMLLKIQHSIIGRDEINRQWLKSVSNSAKMIRYNVFINRYLEATEDEGYAKLVNIAPIPTVKHSFITIDTDGLLGVLKDVGLVESLEKTLTNKEHWESVFNVENIRSTGKGVFTCTIDTDGVMACTHFLRAEKKKISIKDDGTAIKKQTKTLREFSESDPNVVVVANDPGRCNIAFLTWKKNKVGEKDKGGRKRKRHCEFGSKRLTRERYYVESGVFKSRGPTKKWLSNIQDCLDDLKDNSPKRTSLESFDAYVTVMVNHWDSRWGEMSKSRWGAQRLRLYGGKKRVLARFFNEVQADVGERKTIVIAYGSSKFAPGGKGELSVPTTSAFNAFSDRFKGRVAVIDEFRTTKIWHKDSTTVLQGVQSEKEGRTVRGLLWCSSTMENSKLFVNRDLNAAINIHNCFTMYPTRPGILARPKKYCKLEVVVGRTIDYKLTGSLQNAVSSEV

SEQ ID NO: 998 - protein, 618 aa, Chlamydomonas sp.
QCIRNLHVLNIRMPCMATKASVKLARPPMPLVSPGPSSVDGQIMARSERSGLQATNVSLTQAASKATSSSRKKKPAVVKSFSTHVCPHTNNNTTCSDSNCSCKPIFLTNIPDASKSRTSDQGSTSSALDFYEYWDSSRQDMYRQLLWLPKTGTQGLVSSSFNGFAHSTPTRSSFSITKTEPLKTSLEKTSCPSFKYIVTDGTVEDATKSNAKPKLRTLKLKLNPTKAQKSMLAEFAGCSRFMYNKAVAARLGVGSTHKSVFRIRDRYVTNKVRGEGKMPNPYFKNRQWLLQCPKSVRQSAIKSALANIKACFSNLKAGNIKQFSAPFRRKKTELERGWVIEMDQKNVSKDGDKLFIFKEILGNMRYFGSKQLHKLMPEENPTHDPKVQKSRFGEYFLVLSVAARDRRAERKPVNPDKVATASIDPGVRKTMVTYSPENEESFMLGQGQASDLVKLLLVHDKLQSRLDTEKTLRSKERMKIKKLMIRIRKTIFYLKKEFRDQTTNFLAARYDVLLVPQLETAKMTISAERELTTKVARQMLTLSHSVLFNRLKEKCEEYGTVFLHVLEHYTSQTCPMCGFLNKCGETYTCKNCQFTCDRDIVGAAGIFLKAVRTENPCS

SEQ ID NO: 999 - protein, 794 aa, Chlamydomonas sp.
ECSREPVCRSRLHQNVFGVQFVMENGIGESSSLVHEADQHDDVAELVDYEGEEDGECAPGRAICVVKMKLSTFIPHDWLRNKIDTLVLDMNKLLGEGYIFANFHIARLFENGIAVPPVNRNFFYRCLIAVSTNKCNGSTLGEDFESSRLLFDLLREPGQSKVDIRGRVNNQIIADLSILMATMASNHLWTNLERRITTYLKWKYPQIAKRLRSDIVAALIKCPTKNLDVIFKMSPHTTKLPTKLPTSRLRSAKSAVALAKKRVGRKEPEGSPLRVRLTKLQERLEKLSEAWLSSKNLRVDADNAKRFFAREVAFCLRGVLPLPSGNTFASRAHMTLPLYHKILSETIEEKRKTKNEKHRTFSLLPYKSGFTLSHIPISKMAFFYMVNECHFDSCKADVASKNHQGIWERFANLKKVETVSRKFGYRIVTDGFAVSILMNKPTCLTCSMPAGAFSTRAHEYVTTDEGGIVSFLDNVVVSAVDPGVTDIVTVTGLNGGTRSYSSAKYYRKGLIFKSQRQTDVWNLETADIVVGIIPDRDSSSSEQIGAYARFYMGAAPILLAHRASRGYRNLRFRRYCKKQKLIVEIADFVAPRKKSAKVLVGFGDWKGLGATPISRRTCGPLQAIRFELRSRENVIMEDIDEFRTSQRCSCCENHLCNMVALTHRKKQDGTGWECTEGRKRIHKILHCKSSQSGAPRQQSGGMLHCGKTWDRDVNASRNILMLTLHQVFGRERPLAFRRDAPRSSSTTPPPPPDTDMGTQTVERFTKEATRNIFENLFNLLHPPTLPKSNDLQSG

SEQ ID NO: 1000 - protein, 303 aa, Chlamydomonas sp.
EADQDSLASFPESDPNVVVVLQTTPGRSNIAFLTWKKNKVEEKDKGGRKRKRHCEFGSKRLTRERYYVESGVFKSRGPTKKWLSNIQDCLDDLKDNSPKRTSLVSFDAYVTVMVNHWDSRWGEMSKSRCGAQRLRLYGSKKRVLARFFNEVQEDVGERKTIVVAYGSAKFAPGGKGELSVPTTSVFKAFSDRFKGRVAVIDEFRTTKIWHKDSTTVLQSVQSEKEGRTVRGLLWCSSTMENSKLFVNRDLNAAINIHNCFTMYPIRPGILARPKKYCKLEVVVGRKIDYKLTGSLQNAVSSEV

SEQ ID NO: 1001 - protein, 615 aa, Chlamydomonas sp.
QCIRNLHVLDIRMPCMATNASVKLARPPMPLVSPGPSSVDGRIMARSGLQATNVSSTQAASKATSSSRKKNPAVVKSFSTHVCPHTNNNPTCSDSNCSCKPIFLTNIPDASKSRTSDQGSTSSAQDFYEYWNSSRQDLYRQLLWRPKTGTQGLVSSSFNGFAHSTPTRSSFSITKTEPLKTSLEKTSCPSFKYIVTDGTVEDATKSNAKPKLRTLKLKLNPTKAQKSMLAEFAGCSRFMYNKAVAARLGVGSTHKSVFRIRDRYVTNKVRGEGKMPNPYFKNCQWLLQCPKSVRQSAIKAALANIKACFSNLKAGNIKQFSAPFRRKKTELERAWAIEMDQKNVSKDGDKLFIFKDILGNMRYFGSKQLHKLMPEENPTHDPKVHKSRFGEYFLVLSVAARDRRAERKPVHPDKVATASIDPGVRKTMVTYSPENEESFMLGQGQASDLVKLLLVHDKLQSRLDTEKTLRSKERMKIKMHMIRIRKRIFYLKKEFRDQTTNLLAARYDVLLVPQLETAKMTISAERELTTKVARQMLTLSHSVLFNRLKEKCAEYGTVFLHVLEHYTSQTCPMCGFLNKCGETYTCKNCQFTCDRDIVGAAGIFLKAVRTENPCS

SEQ ID NO: 1002 - protein, 803 aa, Chlamydomonas sp.
PRMEHVCDVCIKSSVMYKLCKMATKPPTVAKLKELLKLAEVAYSSKDKKDDIVRLCEDNGLIARPPPEYKTVEKMCVVKCALKKAMSLDDEEFGKFREHVDQLVNVVSRMLRRSSLVLTFHVTRLMEGDLPIPNMYDMKDTYWKDWLRIGVDGVFPDEESRISYESVKDVIGKVLGSDDPDYINSYPIYFDQVLNYAGHTLSTVVSNNAWVPLVPRLTRLTKATLNALGAPKTIRVYDVMRVIQQEIQEMESWPESVQEYVREVRVRLKVPDGSRLYDDYGKDMDFPTMVRFNYWMQTRLEAIGARRIRLMPIFNVQRAHVRLDMKTLVNLFRHVFPKDPNIVELSKWKNVKDPDRFMLPMKPAVKKKKSCGPGEWEAYKLAQQKYDADVNDIKDTDEYRHAKGRYDTLVNARKTVAGSFFKKPPVKTGWVFDCSICTDGVSLSMQYSKTVQVRVSDLKKTSKRSRDDEGMSVSEQYDHKLKTTLPDMGIVVLGVDPGRSNIATVTYLADDKSKTWKLTRGAFYHKSGIKKQKKQQEKRFSNMIPRWESLRENGAALSTSRTDDISAYLKNYATFSDEWWRMALLRRESRDNFQRYIGKRKAMDSFWAGIKRNMKLDHPDLRVRVAYGSALTTLKATGPGEVAVPTGSMFASCKRLFKEEVHVTDEFKTTLMSWETGAKKECVYKIPSVQITTEGQIRLGYELLGHTPLKETPKVSYRDQLAVRVYCTRKQIQEKHRRGGLAPSLVDNNSIKRYPEVRGLRFSPETSTYSDRDRSSALTIARLHCMELLGQGRPLPFCRDACC

SEQ ID NO: 1003 - protein, 329 aa, Chlamydomonas sp.
CFILALVTQRWNTHPLLMGVVQDKGDDDINISVVKKTLNSLCMDVSRHQISSRIQSMVLLINHAVAEAYLFANFHITRCLDDGDFDVKQLPHLDRNFYYRCLLAVSTSNVRKDTLGQSFQRYIGKRKAMDSFWAGIKRNMELDHPDLRVRVAYGSAITKLKATGPGEVAVPTGSMFASCKRLFKEEVHVTDEFKTTLMSWETGAKKECVYKIPSVQITTEGQIRLGYELLGHTPLKETPKVSYRDQLAVRVYCTRKQIQEKHRRGGLAPSLVDNNSIKRYPEVRGLRFSPETSTYSDRDRSSALTIARLHCMELLGQGRPLPFCRDACC

SEQ ID NO: 1004 - protein, 343 aa, Chlamydomonas sp.
KRKTTKKRPRLFSILPRKSGFTISYVPISSMTLMKLLSMGDSPLESFRGDGRHENHSMLWRKYFNVQGLETKGSRFDNRILSDGKGVSVQMKHQASEDVAVDNAGYPKDAILEDCQDASLRVGVDPGMTDIVTVASSDGRVESFSSARFSEAAGYNTSNRRTNKWNVDTQDLVKSIPSPTTSSMHDMQDHVRGYLSALPTLLQHRASRGYRSMRFFRYVGKQKTIEKVCDLIAPKAQKKTIEEKVCDVIAPRAQTTVVGFGNWSNQGYGISRSCSGPIKEIRRCLSRRKNVLFKNVDERKHFLYLPRLLPEARQHEGRQRRLAQSSKRAPLPHQRGSYNNNND

SEQ ID NO: 1005 - protein, 617 aa, Chlamydomonas sp.
YVTVTHVHLQCQMSGNKKHFTLQLERLLSLQDSTPKRFGKWLTRRKFFATEHLPDKEELICKIFKKCVIIIFMIKRSKLFKKKISSMLEYPLKSKWTIFLDKLNSSEDQNTIAIYLFKIFVQESISREKVLQPFWTPAYKIISETLLLPIETGYVDSGSSSSNHWSQKQEDKSQFLTVQTRKLVNKSSQKIYCQSSMSSLAGKWAKEAILEERIKPLKTIQMKIFPTKKQKTILDEFINTSRYVSNKAIECVENGHKPHFPSLRDLLVTSNTKKHSGTYKKLSKEIEDLHTLKHNTVDKLDKQKIIQEINTKNSTMRDEMKEIAYEKNHNLQGFETITPKKIRANAVKSVCDAYKSAFTNLNNGILKILPRTFKDDCILKISNKNTKKHKNLTIENNVDIVRYKGEYFAHILDVVVKNVKNESKDYTMCGIDPGVRSFATVYSCSILDNGKVSSYNTGDYTHRIDLLKKLNKKKSDMMTRRVVRKKQYNKMEKKKKDVVDCLHWETINHVLNHHDIVFYGDIKSQDITKGNKNKTLNQDLNDLKFYIFKNRLEYKASVLQKKVVIMNECYTTKTCSSCGTLNDDVGNKKAFTCPICNLVTGRDANASKNILMKGLLS

SEQ ID NO: 1006 - protein, 737 aa, Chlamydomonas sp.
PRMEHVCDVCIKSSVMYKLCKMATKPPTVAKLKELLKLAEVAYSSKDKKDDIVRLCEDNGLIARPPPEYKTVEKMCVVKCALKKAMSLDDEEFGKFREHVDQLVNVVSRMLRRSSLVLTFHITSLLEKGLDIPDLYNMKDTYWKDWLRIGVDGIFPDEESKISYEAVKDSIGDVIGNDDADYIKSYPIYFDQVLTYAGHTLSTVVSNNAWVPLIPRLARLTSTTFNKLNAPKTLDTSKIIRGYDVMQAIQQEVQNMEGWPESVQEYVNEVREMLSVPDGSRVYDNYGKDMDFPTMVRFNYWIQTRLEDMDARRIRLMPIFNVQRVHVRLDLKTLVNLFRHMFPNDQNIVELSKWEHVKNPDSFMLSQRPAQKKKKSCGPGEWEAYKSVMKQYDDDVKDIKATDEYRHAKGLYDTLLNARKTVAGSFFRKPPVKNGWVFDCSICTDGVSLSMQYSKTVQVLVSDLKKTCKNPRKEEGIKIAEKYDGSLKTILPDMGIVVLGVDPGRSNIATVTYLADDKNKTWKLTRGAFYHKSGIKKQTRQKELRFADMIPMWESLRENGAALSTSRTDKISAYLSNYAKFSDEWWRLALRRRESRDNLQRYIGKRKVKDSFWAGIKRCMMKELPDMKVCVAYGSAITKLKPTGPGEVAVPTGAMFASCKRIFKEDVSVTDEFKTTLMSWETGKEKERVYKIPSVCSADVKLRLGGERFGHTKSKTMPKVADCDHLGVRLYNKRKGA

SEQ ID NO: 1007 - protein, 348 aa, Chlamydomonas sp.
FTWTCRAPSCSRAHEYVTTDEGGIVSFLDNVVVAAVDPGVTDIVTVTGLNGGTRSYSSAKYYRKGLIFKSQRQTDVWNLETADIVGGIIPDRDSSSSEQIGAYARFYMGAAPILLAHRASRGYRNLRFRRYCKKQKLIVEIADFVAPRKKSAKVLVGFGDWKGLGATPISRRTCGPLQAIRFELRSRENVIMEDIDEFRTSQRCSCCENHLYNMVALTHRKKQDGTGWECTEGRKRIHKILHCKSSQSGAPRQQSGGMLHCGKTWDRDVNASRNILMLTLHQVFGRERPLAFRRDAPRSSSTTPPPDTDMGTQTVERFTKEATRNIFENLFNLLHPPTLPKSNDLQSG

SEQ ID NO: 1008 - protein, 621 aa, Chlamydomonas sp.
QCIRNLHVLNIRMPCMATKASVKLARPPMPLVSPGPSSVDGQIMARSERSGLQATNVSLTQAASKATSLSRKNNPAVVKSFSTHVCPHTNNNPTCSDSNCSCKPIFLTNIPDASKSLKSRTSDQGSTSSAQDFYEYWDSSRQDLYRQLLWLPKTGSQGLVSSSLNGFARSTPARSSFSITKTEPLKTSLEKTSCPSFKYIVADGTVEDATKSNAKPKLRTLKLKLNPTKAQKSMLAEFAGCSRFMYNKAVAARLGVGSTHKSVFRIRDRYVTNKVRAKGKMPNPYFKNRQWLLQCPKSVRQSAIKSALANIKACFSNLKAGNIKQFSAPFRRKKTELERGWVIEMDQKNVSKDGDKLFIFKEILGNMRYFGSKQLHKLMPEENPTHDPKVQKSRFGEYFLVLSVAARDRRAERKPVNPDKVATASIDPGVRKTMVTYSPENEESFMLGQGQASDLVKLLLVHDKLQSRLDTEKTLRSKERMKIKKLMIRIRKTIFYLKKEFRDQTTNFLAARYDVLLVPQLETAKMTISAERELTTKVARQMLTLSHSVLFNRLKEKCEEYGTVFLHVLEHYTSQTCPMCGFLNKCGETYTCKNCQFTCDRDIVGAAGIFLKAVRTENPCS

SEQ ID NO: 1009 - protein, 794 aa, Chlamydomonas sp.
ECSREPVCRSRLHQNVFGVQFVMENGIGESSSLVHEADQHDDVAELVDYEGEEDGECAPGRAICVVKMKLSTFIPHDWLRNKIDTLVLDMNKLLGEGYIFANFHIARLFENGIAVPPVNRNFFYRCLIAVSTNKCKGSTLGEDFESSRLLFDLLREPGQSKVDIRGSVKNQIIADLSILMATMASNHLWTNLERRITTYLKWKYPQIAKRLRSDIVAALIKCPTKNLDVIFKMSPHTTKLPTKLPTSRLRSGKSAVALAKKRVGRKEPEGSPLRVRLTKLQERLEKLSEAWLSSKNLRVDADNAKRFFAREVAFCLRGVLPLPSGNTFASRAHMTLPLYHKILSETIEEKRKTKNEKHRTFSLLPYKSGFTLSHIPISKMAFFYMVNECHFDSCKADVASKNHQGIWERFANLKKVETVSRKFGYRIVTDGFAVSILMNKPTCLTCSMPADAFSTRAHEYVTTDEGGIVSFLDNVVVAAVDPGVTDIVTVTGLNGGTRSYSSAKYYRKGLIFKSQRQTDVWNLETADIVGGIIPDRDSSSSEQIGAYARFYMGAAPILLAHRASRGYRNLRFRRYCKKQKLIVEIADFVAPRKKSAKVLVGFGNWKGLGATPISRRTCGPLQAIRFELRSRENVIMEDIDEFRTSQRCSCCENHLCNMVALTHRKKQDGTGWECTEGRKRIHKILHCKSSQSGAPRQQSGGMLHCGKTWDRDVNASRNILMLTLHQVFGRERPLAFRRDAPRSSSTTPPPPPDTDMGTQTVERFTKEATRNIFENLFNLLHPPTLPKSNDLQSG

SEQ ID NO: 1010 - protein, 794 aa, Chlamydomonas sp.
ECSREPVCRSRLHQNVFGVQFVMENGIGESSSLVHEADQHDDVAELVDYEGEEDGECAPGRAICVVKMKLSTFIPHDWLRNKIDTLVLDMNKLLGEGYIFANFHIARLFENGIAVPPVNRNFFYRCLIAVSTNKCKGSTLGEDVESSRLLFDLLREPGQSKVDIRGRVKNQIIADLSILMATMASNHLWTNLERRITTYLKWKYPQIAKRLRSDIVAALIKCPTKNLDVIFKMSPHTTKLPTKLPTSRLRSAKSAVALAKKRVGRKEPEGSPLRVRLTKLQERLEKLSEAWLSSKNLRVDADNAKRFFAREVAFCLRGVLPLPSGNTFASRAHMTLPLYHKILSETIEEKRKTKNEKHRTFSLLPYKSGFTLSHIPISKMAFFYMVNECHFDSCKADVASKNHQGIWERFANLKKVETVSRKFGYRIVTDGFAVSILMNKPTCLTCSMPADAFSTRAHEYVTTDEGGIVSFLDNVVVAAVDPGVTDIVTVTGLNGGTRSYSSAQYYRKGLIFKSQRQTDVWNLETADIVGGIIPDRDSSSSEQIGAYARFYMGAAPILLAHRASRGYRNLRFRRYCKKQKLIVEIADFVAPRKKSAKVLVGFGDWKGLGATPISRRTCGPLQAIRFELRSRENVIMEDIDEFRTSQRCSCCENHLCNMVALTHRKKQDGTGWECTEGRKRIHKILHCKSSQSGAPRQKSGGMLHCGKTWDRDVNASRNILMLTLHQVFGRERPLAFRRDAPRSSSTTPPPPPDTDMGTQTVERFTKEATRNIFENLFNLLHPPTLPKSNDLQSG

SEQ ID NO: 1011 - protein, 651 aa, Chlamydomonas sp.
YINKVTVTNILLQCQMSGKKKQFTFQLERLLSLQGSTPKQFGKWLTRRKFFATEHLPGKEELICKIFKKCVVIIFMIKRSKLFKKKISSMLEYPLKSNWTIFLDKLNSSEDQNMIAIYLFKIYVQESISREKALQPFWTPAYKTISETLLLPIETDCVDSGLSSSNHWSQKQEEKSQFLTVQTKKLVNKSSQKIYCQSSMSSLVGKWANEAILEEKIKPLKTIQMKLFPTKKQKQILDEFINTSRYVSNKAIEYVDKGHKPHFQTLRDLLVTSNTKKNSNTYKKLSKEIEDLHTLKQDTVDQSDKQKIIEEIKTKNKIMRDEMKEIAYEKNHNLQGFETFTPKEIRANAVKSVCDAYKSAFTNLKNGNIKFFKMKYKTKKNSRQTVELAPSSISFNNGILRILPNTFKDDCVLKISNKNRKKHKNLTIKNNVDIVRHKGQYVIHILDTILNNIDNETNEYTMCGVDPGVRCFATTYSCSIKNNGEVSSYNTRDYTHRIDLLKKLNKKRRDIMERKAVRKKQYNKIEKKKKNIVDCLHWETIHHVLKHNDFVFYGDIKSQDITKGNKNNTLNQDFNDLKFYIFKTRLEYKASVLKRKVVIMNECYTTKTCSNCGTLNNDVGSKKVFTCPICNLVAGRDANASKNILMKGLLS

SEQ ID NO: 1012 - protein, 650 aa, Chlamydomonas sp.
KMATKPPTVAKLKELLKLAEVPYSSKSNKDDLVRLCEDNGLIARPPPEYKTVEKMCVVKCALKKAMSLDDEEFGKFREHVDQLVNVVSRMLRRSSPVLTFHITSLLEKGLEIPDLYNMKDTYWKDWLRIGVDGIFPDEESKISYEAVKDSIGDVIGNDDADYIKSYPIYFDQVLNYAGHTLSTVVSNNAWVPLIPRLARLTSTTLNKLNAPKTLDTSKIIRGYDVMQAIQQEVQNMEGWPESVQEYVNEVREMLSVPDGSRVYDNYGKDMDFPTMVRFNYWIQKRLEDMDARRIRLMPIFNVQRVHVRLDLKTLMNLFRHMFPTDKNIVELSKWEHVKNPDSFMLPQRPAQKKKKSCCPGEWEAYKSVLKQYDDDVKDIKATDEYRHAKGLYDTLVNARKTVAGSFFRKPPVKNGWVFDCSICTDGVSLSMQYSKTVQVLVSDLKKTCKKPRKEEGIKIAEKYDGSLKTIFPDMGIVVLGVDPGRSNIATVTYLADDKNKTWKLTLGAFYHKSGIKKQTRQKELRFADIIPMWESLRENGAALSTSRTDDISAYLSNYAKFSDEWWRLALRRRESRDNLQRYIGKRKVKDSFWAGIKRCMMKELPDMKVCVAYGSAITKLKPTGPGEVAVNGRSCFRTDFQSYDHFLGVF

SEQ ID NO: 1013 - protein, 648 aa, Chlamydomonas sp.
AVKDSIGDVIGNDDADYIKSYPIYFDQVLNYAGHTLSTVVSNNAWVPLIPRLARLTSTTLNKLNAPKTLDTSKIIRGYDVMQAIQQEVQNMEGWPESVQEFVNEVREMLSVPDGSRVYDNYGKDMDFPTMVRFNYWIQTRLEDMDARRIRLMPIFNVQRVHVRLDLKTLVNLFRHMFPNDQNIVELSKWEHVKNPDSFMLPQRPAQKKKKSCGPGEWEAYKSVMKQYDDDVKDIKATDEYRHAKGLYDTLVNARKTVAGSSFRKPPVKNGWVFDCSICTDGVSLSMQYSKTVQVLVSDLKKTCKKPRKEEGIKIAEKYDGSLKTLLPDMGIVVLGVDPGRSNIATVTYLADDKNKTWTLTRGAFYHKSGIKKQTRQKELRFADMIPMWESLRENGAALSTSRTDKISAYLSNYAKFSDEWWRLALRRREYCDNLQRYIGKRKVKDSFWAGIKRCMMKELPDMKVCVAYGSAITKLKPTGPGEVAVPTGAMFASCKRIFKEDVSVTDEFKTTLMSWETGKEKERVYKIPSVCSADVKLRLGGERFGHTKSKTMPKVADCDHLGVRLYNKRKGAQEKHRRGGFATSLVDSQKSIERYPVVRGLRFSPETCIYSDRDRSSALTIARLHCMELMGLGRPLPFAHSSSVVVDE

SEQ ID NO: 1014 - protein, 615 aa, Chlamydomonas sp.
QCIRNLHVLDIRMPCMATNASVKLARPPMPVVSPGPSSVDGRIMARSGLQETNVSLTQAASKATSLSRKKKTAVVKSFSTHVCPHTNNNPTCSDSNCSCKPIFLTNIPDASKSRTSDQGSTSSAQDFYEYWDSSRQDLYRQLLWLPKTGTQGLVSSSFNGFAHSTLTRSSFSITKTEPLKTSLEKTSCPSFKYIVTDGTVEDATKSNAKPKLRTLKLKLNPTKAQKSMLAEFAGCSRFMYNKAVAARLGVGSTHKSVFRIRDRYVTNKVRGEGKMPNPYFKNRQWLLQCPKSVRQSAIKAALANIKACFSNLKAGNIKQFSAPFRRKKTELERGWAIEMDQKNVSKDGDKLFIFKDILGNMRYFGSKQLHKLMPEENPTHDPKVHKSRFGEYFLVLSVAATDRRAERKPVHPDKVATASIDPGVRKTMVTYSPENEESFMLGQGQASDLVKLLLVHDKLQSRLDTEKTLRSKERMKIKKHMIRIRKRIFYLKKEFRDQTTNFLAARYDVLLVPQLETAKMTISAERELTTKVARQMLTLSHSVLFNRLKEKCAEYGTVFLHVLEHYTSQTCPMCGFLNKCGETYTCKNCQFTCDRDIVGAAGIFLKAVRTENPCS

SEQ ID NO: 1015 - protein, 813 aa, Chlamydomonas sp.
PRMEHVCDVCIKSSVMYKLCKMATKPPTVAKLKELLKLAEVAYSSKDKKDDIVRLCEDNGLIARPPPEYKTVEKMCVVKCALKKAMSLDDEEFGKFREHVDQLVNVVSRMLRRSSLVLTFHITSLLEKGLDIPDLYNMKDTYWKDWLRIGVDGIFPDEESKISYEAVKDSIGDVIGNDDADYIKSYPIYFDQVLNYAGHTLSTVVSNNAWVPLIPRLARLTSTTLNKLNAPKTLDTSKIIRGYDVMQAIQQEVQNMEGWPESVQEYVNEVREMLSVPDGSRVYDNYGKDMDFPTMVRFNYWIQTRLEDMDARRIRLMPIFNVQRVHVRLDLKTLVNLFRHMFPNDQNIVELSKWEHVKNPESFMLSQRPAQKKKKSCGPGEWEAYKSVMKQYDDDVKDIKATDEYRHAKGLYDTLVNARKTVAGSFFRKPPVKNGWVFDCSICTDGVSLSMQYSKTVQVLVSDLKKTCKNPRKEEGIKIAEKYDGSLKTILPDMGIVVLGVDPGRSNIATVTYLADDKNKTWKLTRGAFYHKSGIKKQTRQKELRFADMIPMWESLRENGAALSTSRTDKISAYLSNYAKFSDEWWRLALRRRESRDNLQRYIGKRKVKDSFWAGIKRCMMKELPDMKVCVAYGSAITKLKPTGPGEVAVPTGAMFASCKRIFKEDVSVTDEFKTTLMSWETGKEKERVYKIPSVCSADVKLRLGGERFGHTKSKTMPKVADCDHLGVRLYNKRKGAQEKHRRGGFATSLVNSQKSIERYPEVRGLRFSPETCIYSDRDRSSALTIARLHCMELMGLGRPLPFAHSSSVVVDK

SEQ ID NO: 1016 - protein, 341 aa, Chlamydomonas sp.
TCVYNACKRTGWSIAFYLISQLIIYTLNHFIHRRYSNLKAGNIKQFSAPFRRKKTELERGWVIEMDQKNVSKDGDKLFIFKEILGNMRYFGSKQLHKLMPEENPTHDPKVQKSRFGEYFLVLSVAARDRRAERKPVNPDKVATASIDPGVRKTMVTYSPENEESFMLGQGQASDLVKLLLVHDKLQSRLDTEKTLRSKERMKIKKLMIRIRKTIFYLKKEFRDQTTNFLAARYDVLLVPQLETAKMTISAERELTTKVARQMLTLSHSVLFNRLKEKCEEYGTVFLHVLEHYTSQTCPMCGFLNKCGETYTCKNCQFTCDRDIVGAAGIFLKAVRTENPCS

SEQ ID NO: 1017 - protein, 655 aa, Chlamydomonas sp.
ISNQDLEPPERLASLRHKHQGITNPLHTMFRNQSKSAGSQERPLCTKYQNAMYGNQSFCKIGKASDALGVSRTVLRRWADNGTIRTIRTPGNQRLFDPSSIQGYLIEQEKKTSSRQVILYARVSSHKQQHDLLRQQLFLQTHISDKHSGCEQVKDVGSGLNFKRPGLYEYWDSSRQDMYRQLLWLPKTGTQGLVSSSFNGFAHSTPTRSSFSITKTEPLKTSLENTSCPSFKYIVTDGTVEDATKSNAKPKLRTLKLKLNPTKAQKSMLAEFAGCSRFMYNKAVAARLGVGSTHKSVFRIRDRYVTNKVRGEGKMPNPYFKNRQWLLQCPKSVRQSAIKSALANIKACFSNLKAGNIKQFSAPFRRKKTELERGWVIEMDQKNVSKDGDKLFIFKEILGNMRYFGSKQLHKLMPEENPTHDPKVQKSRFGEYFLVLSVAARDRRAERKPVNPDKVATASIDPGVRKTMVTYSPENEESFMLGQGQASDLVKLLLVHDKLQSRLDTEKTLRSKERMKIKKLMIRIRKTIFYLKKEFRDQTTNFLAARYDVLLVPQLETAKMTISAERELTTKVARQMLTLSHSVLFNRLKEKCEEYGTVFLHVLEHYTSQTCPMCGFLNKCGETYTCKNCQFTCDRDIVGAAGIFLKAVRTENPCS

SEQ ID NO: 1018 - protein, 793 aa, Chlamydomonas sp.
KMATKPPTVAKLKELLKLAEVPYSSKSNKDDLVRLCDDNGLIARPPPEYKTVEKMCVVKCALKKAMSLDDEEFGKFREHVDQLVNVVSRMLRRSSLVLTFHITSLLEKGLDIPDLYNMKDTYWKDWLRIGVDGIFPDEESKISYEAVKDSIGDVIGNDDADYIKSYPIYFDQVLNYAGHTLRTVVSNNAWVPLIPRLARLTSTTLNKLNAPKTLDTSKIIRGYDVMQAIQQEVQNMEGWPESVQEYVNEVREMLSVPDGSRVYDNYGKDMDFPTMVRFNYWIQTRLEDMDARRIRLMPIFNVQRVHVRLDLKTLVNLFRHMFPNDQNIVELSKWEHVKNPDSFMLPQRPAQKKKKSCGPGEWEAYKSVLKQYDDDVKDIKATDEYRHAKGLYDTLVNARKTVAGSFFRKPPVKNGWVFDCSICTDGVSLSMQYSKTVQVLVSDLKKTCKKPRKEEGIKIAEKYDGSLKTILPDMGIVVLGVDPGRSNIATVTYLADDKNKTWTLTRGAFYHKSGIKKQTRHKELRFADMIPMWESLRENGAALSTSRTDKISAYLSNYAKFSDEWWRLALRRRESRDNLQRYIGKRKVKDSFWAGIKRCMMKELPDMKVCVAYGSAITKLKPTGPGEVAVPTGAMFASCKRIFKEDVSVTDEFKTTLMSWETGKEKERVYKIPSVCSADVKLRLGGERFGHTKSKTMPKVADCDHLGVRLYNKRKGAQEKHRRGGFATSLVDSQKSIERYPEVRGLRFSPETCIYSDRDRSSALTIARLHCMELMGLGRPLPFAHSSSVVVDE

SEQ ID NO: 1019 - protein, 793 aa, Chlamydomonas sp.
KMATKPPTVAKLKELLKLAEVPYSSKSNKDDLVRLCEDNGLISRPPPEYKTVEKMCVVKCALKKAMSLDDEEFGKFREHVDQLVNVVSRILRRSSLVLTFHITSLLEKGLEIPDLYNMKDTYWKDWLRIGVDGIFPDEESKISYEAVKDSIGDVIGNDDADYIKSYSIYFDQVLNYAGHTLSTVVSNNAWVPLIPRLARLTSTTLNKLNSPKTLDTSKIIRGYDVMQAIQQEVQNMEGWPESVQEYVNEVREMLSVPDGSRVYDNYGKDMDFPTMVRFNYWIQTRLEDMDARRIRLMPIFNVQRVHVRLDLKTLVNLFRHMFPNDQNIVELSKWEHVKNPDSFMLPQRPAQKKKKSCGPGEWEAYKSVLKQYDDDVKDIKATDEYRHAKCLYDTLVNARKTVAGSFFRKPPVKNGWVFDCSICTDGVSLSMQYSKTVQVLVSDLKKTCKKPRKEEGIKIAEKYDGSLKTILPDMGIVVLGVDPGRSNIATVTYLADDKNKTWKLTRGAFYHKSGIKKQTRQKELRFADMIPMWESLRENGAALSTSRTDKISAYLSNYAKFSDEWWRLALRRRESRDNLQRYIGKRKVKDSFWAGIKRCMMKELPDMKVCVAYGSAITKLKPTGPGEVAVPTGAMFASCKRISKEDVSVTDEFKTTLMSWETGKEKERVYKIPSVCSADVKLRLGGERFGHTKSKTMPKVADCDHLGVRLYKKRKRAQEKHRRGGFATSLVDSQKSIERYPEVRGLRFSPETCIYSDRDRSSALTIARLHCMELMGLGRPLPFAHSSSVVVDE

SEQ ID NO: 1020 - protein, 239 aa, Chlamydomonas sp.
CYSILNQLQFSMYNLDRRSIVVHMYTLLQSLRSPKRTSLESFDAYVTVMVNHWDSRWGEMSKSRWGAQRLRLYGGKKRVLARFFNEVQADVGERKTIVIAYGSSKFAPGGKGELSVPTTSAFNAFRDRFKGRVAVIDEFRTTKIWHKDSTTVLQSVQSEKKGRTVRGLLWCSSTMENSKLFVNRDLNAAINIHNCFTMYPTRPGILARPKKYCKLEVVVGRTIDYKLTGSLQNAVSSEV

SEQ ID NO: 1021 - protein, 688 aa, Chlamydomonas sp.
GNVGAILYHQKKKNTHPLLMGVVQDKGDDDINISVVKKTLNSLCMDVSRHQISSRIQSMVLLINHAVAEAYLFANFHITRCLDDGDFDVKQLPHLDRNFYYRCLLAVSTSNVRKDTLGQSFNDTMVAFDALRPAGYVKVDVRPWGQVIADVSIQMATMACNSVWANVDWVVIKYLRLKHPSLKKHFKKIVKAVVQYPESKIDTIIPEGLVHAIHIKEVVSHLRALFPLPRGKQFNTRAHLTMRLFHHVLTELGEVGRVDPKDKKTKQSHPRLLSILPRKNGFTISYVPISSMTFMKLLSMGDSPLESVSGDGRYENHTMLWRKYFNVQGLETKRSRFDNRILSDGKGVSVQMKKKGKEEVVEEGENAGYPKDANIVECKDAVGALRVGVDPGMTDIVTVASSAGRIESFSSARFSEVAGYNTSKRRTYKWNDETQDLVKSIPSPNTSNMVDLQDHVRAYLKALPILLQHRANKGYRSMRFYRYVGKQKTIEKVCDVIAPRAQTTVVGFGNWSNQGYGISRSCSGPIKEIRRCLSRRKNVLFKNVDERYTSCKCHGCFQRLVNMKAGSVVWRGVCKESPIDGSITVEKQKMVVKNVKVHKVLHCRDSVKSASSNVRCGATWNRDVNAAKNLLLLLTTWMDGRERPEAFCVPSPPPKTTVSIEASVSAIPTDPPGFVSSLPCYPLGQLKC

SEQ ID NO: 1022 - protein, 760 aa, Chlamydomonas sp.
HTHQRTRRTILSVYAKTMVSSPDPLHEYKTVEKMCVVKCALKKAMSLDDEEFGKFREHVDQLVNVVSRMLRRSSLVLTFHVTRLMEGDLPIPNMYDMKDTYWKDWLRIGVDGVFPDEESRISYESVKDVIGKVLGSDDPDYINSYPIYFDQVLNYAGHTLSTVVSNNAWVPLVPRLTRLTKATLNALEAPKTIRVYDVMRVIQQEIQEMESWPESVQKYVREVRVRLKVPDGSRLYDNYGKDMDFPTMVRFNYWMQTRLEAIGARRIRLMPIFNVQRAHVRLDMKTLVNLFRHVFPKDPNIVELSKWKDVKDPDRFMLPLKPAFKKKKSCGPGEWEAYKLAQQKYDADVNDIKDTDEYRHAKGRYDTLVNARKTVAGSFFKKPPVKTGWVFDCSICTDGVSLSMQYSKTVQVRVSDLKKTSKRSRDDEGMSVSEQYDHKLKTTLPDMGIVVLGVDPGRSNIATVTYLADDKSKTWKLTRGAFYHKSGIKKQKKQQEKRFSDMIPRWESLRENGAALSTSRTDDISAYLKNYDTFSDEWWRMALLRRESRDNFQRYIGKRKAMDSFWAGIKRNMKLDHPDLRVRVAYGSAITTLKATGPGEVAVPTGSMFASCKRLFKEEVHVTDEFKTTLMSWETGAKKECVYKIPSVQITTEGQIRLGYELLGHTPLKETPNVSYRDQLAVRVYCTRKQIQEKHRRGGLSPSLVDNNSIKRYPEVRGLRFSPETSTYSDRDRSSALTIARLHCMELLGQGRPLPFCRDA

SEQ ID NO: 1023 - protein, 801 aa, Chlamydomonas sp.
PRMEHVCDVCIKSSVMYKLCKMATKPPTVAKLKELLKLAEVAYSSKDKKDDIVRLCEDNGLIARPPPEYKTVEKMCVVKCALKKAMSLDDEEFGKFREHVDQLVNVVSRMLRRSSLVLTFHVTRLMEGDLPIPNMYDMKDTYWKDWLRIGVDGVFPDEESRISYESVKDVIGKVLGSDDPDYINSYPIYFDQVLNYAGHTLSTVVSNNAWVPLVPRLTRLTKATLNALEAPKTIRVYDVMRVIQQEIQEMESWPESVQKYVREVRVRLKVPDGSRLYDNYGKDMDFPTMVRFNYWMQTRLEAIGARRIRLMPIFNVQRAHVRLDMKTLVNLFRHVFPKDPNIVELSKWKDVKDPDRFMLPLKPAFKKKKSCGPGEWEAYKLAQQKYDADVNDIKDTDEYRHAKGRYDTLVNARKTVAGSFFKKPPVKTGWVFDCSICTDGVSLSMQYSKTVQVRVSDLKKTSKRSRDDEGMSVSEQYDHKLKTTLPDMGIVVLGVDPGRSNIATVTYLADDKSKTWKLTRGAFYHKSGIKKQKKQQEKRFSDMIPRWESLRENGAALSTSRTDDISAYLKNYDTFSDEWWRMALLRRESRDNFQRYIGKRKAMDSFWAGIKRNMKLDHPDLRVRVAYGSAITTLKATGPGEVAVPTGSMFASCKRLFKEEVHVTDEFKTTLMSWETGAKKECVYKIPSVQITTEGQIRLGYELLGHTPLKETPKVSYRDQLAVRVYCTRKQIQEKHRRGGLAPSLVDNNSIKRYPEVRGLRFSPETSTYSDRDRSSALTIARLHCMELLGQGRPLPFCRDA

SEQ ID NO: 1024 - protein, 801 aa, Chlamydomonas sp.
PRMEHVCDVGIKSSVMYKLCKMATKPPTVAKLKELLKLAEVAYSSKDKKDDIVRLCEDNGLIAKPPPEYKTVEKMCVVKCALKKAMSLDDEEFGKFREHVDQLVNVVSRMLRRSSLVLTFHVTRLMEGDLPIPNMYDMKDTYWKDWLRIGVDGVFPDEESRISYESVKDVIGKVLGSDDPDYINSYPIYFDQVLNYAGHTLSTVVSNNAWVPLVPRLTRLTKATLNALKAPKTIRVYDVMRVIQQEIQEMESWPESVQEYVREVRVRLKVPDGSRLYDDYGKDMDFPTMVRFNYWMQTRLESIGARRIRLMPIFNVQRAHVRLDMKTLVNLFRHVFPKDPNIVELSKWKDVKDPDRFMLPLKPAFKKKKSCGPGEWEACKLAQQKYDADVNDIKDTDEYRHAKGRYDTLVNARKTVAGSFFKKPPVKTGWVFDCSICTDGVSLSMQYSKTVQVRVSDLKKTSKRSRDDEGMSVSEQYDHKLKTTLPDMGIVVLGVDPGRSNIATVTYLADDKSKTWKLTRGAFYHKSGIKKQKKQQEKRFSDMIPRWESLRENGAALSTSRTDDISAYLKNYDTFSDEWWRMALLRRESRDNFQRYIGKRKAMDSFWAGIKRNMKLDHPDLRVRVAYGSAITTLKATGPGEVAVPTGSMFASCKRLFKEEVHVTDEFNTTLMSWETGAKKECVYKIPSVQITTEGQIRLGYELLGHTPLKETPKVSYRDQLAVRVYCTRKQIQEKHRRGGLSPSLVDNNSIKRYPEVRGLRFSPETSTYSDRDRSSALTIARLHCMELLGQGRPLPFCRDA

SEQ ID NO: 1025 - protein, 351 aa, Chlamydomonas sp.
HNKPSKNARRIRLMPIFNVQRVHVRLDLKTLVNLFRHMFPTDKNIIELSKWEHVKNPDSFMLPQRPAQKKKKSCCPGEWEAYKSVLKQYDDDVKDIKATDEYRHAKGLYDTLVNARKTVAGSFFRKPPVKNGWVFDCSICTDGVSLSMQYSKTVQVPVSDLKKTCKKPRKEEGIKIAEKYDGSLKTILPDMGIVVLGVDPRRSNIATVTYLADDKNKTWTLTRGAFYHKSGIKKQTRQKELRFADMIPMWESLRENGAALSTSRTDNISAYLSNYAKFSDEWWRLALRRRESRDNLQRYIGKRKVKDSFWAGIKRCMMKELSDMKVCVAYGSAITKLKPTGPGEVSKRTFL

SEQ ID NO: 1026 - protein, 617 aa, Chlamydomonas sp.
YHQKKKNTHPLLMGVVQDKGDDDINISVVKKTLNSLCMDVSRHQISSRIQSMVLLINHAVAEAYLFANFHITRCLDDGDFDVKQLPHLDRNFYYRCLLAVSTSNVRKDTLGQSFNDTMVAFDALRPAGYVKVDVRPWGQVIADVSIQMATMACNSVWANVDRVVIKYLRLKHPSLKKHFKKIVKAVVQYPESKIDTIIPEGLVHAIHIKEVVSHLRALFPLPRGKQFNTRAHLTMRLFHHVLTELGEVGRVDPKDKKTRKSHPRLFSILPRKNGFTISYVPISSMTFMKLLSMGDSPLESVSGDGRYENHTMLWRKYFNVQGLETKRSRFDNRILSDGKGVSVQMKKKGKEEVVEEGENAGYPKDANIVECKDAVGALRVGVDPGMTDIVTVASSAGRIESFSSARFSEVAGYNTSKRRTYKWNDETQDLVKSIPSPNTSNMSDLQDHVRAYLKALPILLQHRANKGYRSMRFFRYVGKQKTIEKVCDVIAPRAQTTVVGFGNWSNQGYGISRSCSGPIKEIRRCLSRRKNVLFKNVDERNTSCKCHGCFQRLVNMKADSVVWRGVCKESPIDGSISVEKQKMVVKNVKVHKVLHCRDSVKSASSNVRCGATPGTET

SEQ ID NO: 1027 - protein, 607 aa, Chlamydomonas sp.
LFANFHVTRCLDDLTFDVKCLPKLDRNFYYRCLLAVSRSNIRKGTLGKSLTDSMDAFDALCPEGWSKTDVRPWGQVIADLSIQMATMACNSVWSNLSKIVVKYLRLKYPSLKKHYGRILKAVVQFPKSVINNFVPSTLGNVVEIKAVINHLRSLLPSFTGTQFNTRAHLTMRLFHSVLAELISFSSSEHNRRAPRLFSLLPRKIGFTISYIPISSMTFMKILSMGSTPLEKIRGDGRLEDHDRLWRNYFNVGSVETKASRFDGRILTEGKGVSIQMRRELGQCLIDTSGYPKDSGIGECLNATTYRNARCVGVDPGMTDIATVAFSRDGGTQSYSSSHFSHKAGYKTSKRRTDKWNVETAELDKSIPTSMTTSMDEMERHIQAYLVALPILLQHRTNKGYRSMRFFRYVGKQKAIEDVCDMIAPRDTPTVVGFGNWLNQGNGISRPCSGPLKEIRKRLSQRKDVLFKNIDERNTSCTCHGCFEPLVNMKANSVRWKRVRQVGVAVKEKVMVKNVKVHKILHCCNSVGSAPSVRCGTTWNRDVNAAKNILLLLMTWVSGQERPAAFCDPSKNNNTTSREATEMLRPVVHPLGSIGHTQLLSSVHQLQC

SEQ ID NO: 1028 - protein, 607 aa, Chlamydomonas sp.
LFANFHVTRCLDDLTFDVKCLPKLDRNFYYRCLLAVSRSNIRKGTLGKSLTDSMDAFDALCPEGWSKTDVRPWGQVIADLSIQMATMACNSVWSNLSMIVVKYLRLKYPSLKKHYGRILKAVVQFPKSVINNFVPSTLGNVVEIKAVINHLRSLLLSFTGTQFNTRAHLTMRLFHSVLAELISFSSSEHNRRAPRLFSLLPRKIGFTISYIPISSMTFMKILSMGSTPLEKIRGDGRLEDHDRLWRNYFNVGSVETKASRFDGRILTDGKGVSIQMRRELGQCLIDTSGYPKDSSIGECLNATTYRNAICVGVDPGMTDIATVAFSRDGGTQSYSSSHFSHKAGYKTSKRRTDKWNVETAELDKSIPTSMTTSMDEMERHIQAYLVALPILLQHRTNKGYRSMRFFRYVGKQKAIEDVCDMIAPRDTPTVVGFGNWLNQGNGISRPCSGPLKEIRKRLSQRKDVLFKNIDERNTSCTCHGCFEPLVNMKANSVRWKRVRQVGVAVEEKVMVKNVKVHKILHCCNSVGSAPSVRCGTTWNRDVNAAKDILLLLMTWVSGQERPAAFCDPSKNNNTTSREATEMLRPVVHPLGSIGHTQLLSSVHQLQC

SEQ ID NO: 1029 - protein, 532 aa, Chlamydomonas sp.
TSHKASTDVIMYEWMVLQNGPSSKETSFHDALHINKDPVFFWATVLGKNLRVDADNAKRFFARDVAFCLRGVLPLPSGNTFASRAHMTLPLYHKILSETIEEKRKTKSEKHRTFSLLPYKSGFTLSHIPISKMAFFYMVNECHFDSCKADVASKNHQGIWERFANLKKVETVSRKFGYRIVTDGIAVSILMNKPTCLTCSMPADAFSTRAHEYVTTDEGGIVSFLDNVVVAAVDPGVTDIVTVTGLNGGTRSYSSAQYYRGGLIFKSQRQTDFGTSRRLISSVVSFRIETLRVLNRLVRTPDSTWVPPQSFLPIVLRGYRFRRYCKKQKLIVEIADFVAPREKSAKVLVGFGDWKDLQAIRFELRSRENVIMEDIDEFRTSQRCSCCENHLCNMVALTHRKKQDGTGWECTEGRKRIHKILHCKSSQSGAPRQQSGGRLHCGKTWDRDVNASRNILMLTLHQVFGRERPLAFRRDAPRSSSTPPPPPPPPDTDMGTQTVERFTKEATRNIFENLFNLLHPPTLPKSNDLQSG

SEQ ID NO: 1030 - protein, 621 aa, Chlamydomonas sp.
QCIRNLHVLNIRMPCMATKASVKLARPPMPLVSPGPSSVDGRIMARSERSGLQATNVSLTQAASKATSSSRKKKPAVVKSFSTHVCPHTNNNPTCSDSNCSCKPIFLTNIPDASKSLKSRTSDQGSTSSAQDFYEYWDSSRQDLYRQLLWLPKTGSQGLVSSSLNGFARSTPARSSFSITKTEPPKTSLEKTSCPSFKYIVADGTVEDATKSNAKPKLRTLKLKLNPTKAQKSMLAEFAGCSRFMYNKAVAARLGVGSTHKSVFRIRDRYVTNKVKGAGKMPNPYFKNRQWLLQCPKSVRQSAIKSALANIKACFSNLKAGNIKQFSAPFRRKKTELERGWFIEMDQHNISKDGDKLFIFKDTLGNMRYFGSKQLQKLLPEKNPTHDPKVQKSRFGEYFLVLSVAASDRREERKPVHPGKVATASIDPGVRKTMVTYSPENEESFMLGQGQASDLVKLLLVHDKLQSRLDTEKTLRSKERMKIKKLMIRIRKRIFYLKKEFRDQTTNFLAARYDVLLVPQLETAKMTISAERELTTKVARQMLTLSHSVLFNRLKEKCEEYGTVFLHVLEHYTSQTCPMCGFLNKCGETYTCKKCQFTCDRDIVGAAGIFLKAVRTENPCS

SEQ ID NO: 1031 - protein, 917 aa, Chlamydomonas sp.
KRFGVNRKRREFVSKLFETNKDLLKSFLLSTKCTTAIGVVAFFKSTHNLRLSTKTVYRFIKLLRFTRKRSKLRGQCKGDLVPLVNEFCSRYKETINAGKILVSVDECGFSERLKPHYGYSPVGKPVIVKTTGGWVHHSLLMAVFSDGRKEFVVKKGSVKKTDFASFIDSLSLCNNSVISHPYRVQGGGKDVRREMCSEKGMSLDEEEFGVFRGHVDQLVNIVSRMFRRSSLVLAFHVTRLMEDDLPIPDMYEMEDTYWKDWLRIGVDGVFPDEESRISYESVKDVIGKVLDSDDTEYIKSYPIYFDQVLNYACHTLSTVVSNNAWVPLVPRLTRLTKATLKALKAPTTIRLYDVMRVIRQEVQEMEYWPDSVQKYVREVRVRLKVPDGDRLYDDYGKCVDFQTMVRFNYWMQTRLETMEERRIRLMPIFSVHRVHVRLDLKTLVNMFRHYFPKDPNIAELSKWNHAKNPDNFMLPQRPAQKKKKSCGPGEWEVYKSALKQYDDDVKDIKATEEYRHAKGLYDTLVNVWKTVAGSFFKNPPVKNGWVFDCSICTDRVSLSMQYSKQVKVRVSDLKKTSMSSRDNEGLIIAEQYDRKLETTLTEMGIVVLGVDPGRSNIATVTYLAKGKSKTWKLTLGAFYHKSGIKKQKKQQEKRFSDMIPRWESLRENGAALSTSRKDDISAYLTNYATFSDEWWRMALRRRESRDNFQRYIGKRKTMDSFWAGIKRNMKLDHPDLRVRIAYGSAIKTMKATGPGEVAVPTGSMFASCKRLFKEDVHVTDEFKTTLMSWETGAKKECVYKIPSVQITTAGQIRLGYELLGHTPLKEPPQVSYRDQVAVRMYCTRKQIQEKHRRGGFAPSLVDNKLIKRYPEVRGLRFSPETSTYSDRDRSSALTIARLHCMELLGQGRPLPFCRDAA

SEQ ID NO: 1032 - protein, 424 aa, Chlamydomonas sp.
IDYIDKYIVADGTVEDATKSNAKPKLRTLKLKLNPTKAQKSMLAEFAGCSRFMYNTAVAARLGVGSTHKSVFRIRDRYVTNKVRGKGKMPNPYFKNRQWLLQCPKSVRQSAIKSALANIKACFSNLKAGNIKQFSAPFRRKKTELERGWAIEMDQKNVSKDGDKLFIFKEILGNMRYFGSKQLHKLMPEENPTHDPKVQKSRFGEYFLALSVAARDRRAERKPVHPDNVATASIDPGVQKTMVTYSPENEESFMLGQGQASDLVKLLLVHDKLQSRLDTEKTLRSKERMKIKKLMIRIRKTIFYLKKEFRDQTTNFLAARYDVLLVPQLETAKMTISAERELTTKVSRQMLTLSHYVLFNRLKEKCEEYGTVFLHVLEHYTSQTCPMCGFLNKCGETYTCKNCHFTCDRDIVGAAGIFLKAVRS

SEQ ID NO: 1033 - protein, 575 aa, Chlamydomonas sp.
KWDTLSSGASEKLTGVVNNRAVSDLCINHDDAALLLWGIRKLWCIMISQQETNTHSLSMGVVTNNGDDDDLGIMVVKKTLNSLCMDVSRQQLCSRIQSMVLVINHAVAEAYLFANFHITRCLDDGDFDVKQLPHLDRNFYYRCILAVSISNVRNDTLDQSLKDSMVAFDALRPAGYAKVDVRPWGQVIADVSIQMATMACNSVGANVDRIVIKYLSLKHPSLKRHFNKIVKAVVQYPESDIDKIIPASRVHANLIKDVVRRLRALLPLPRGKKFNTRAHLTMRLFHHVLTELGADLKEKTTKKRPRLFSILPRKSGFTISYVPISSVTLMKLLSMGDSPLESVRGDGRHENHSMLWRKYFNVQGLETKRSRFDNRILSDGKGVSVQMKHQVGEDVAGEGGDNAGYPKDASIEDCQDASLRLGALRVGVDPGMTDIVTVASSDGRVESFSSARFSEAAGYNTSNRCTNKWIADTQDLVKSIPSPTTSSMPDMQDHVRGYLSALPTLLQHRASRGYRSMRFFRYVGKQKTIEKVCDVIATKAKKTVVGFGNWSNQGYGISRLCSGPVKEIRKCLSRR

SEQ ID NO: 1034 - protein, 624 aa, Chlamydomonas sp.
VNLTVYKEFACTKYQNAMYGNQSFCKIGKASDALGVSRTVLRRWADNGTIRTIRTPGNQRLFDPSSIQGYLIEQEKKPSSRQVILYARVSSHKQQPNLLRQQLFLQTHILTNIPDASKLLKSRTSDQGSTSSGQDFYEYWDSSRQDLYRQLMWLPKTGSQGLVLSSLNGFARSTPVRLSFSITKTEPPKTSLEKTSCPSFKYIVADGTVEDATKSNAKPKLRTLKLKLNPTKAQKSMLAEFAGCSRFMYNKAVAARLGVGSTHKSVFRIRDRYVTNKVKGAGKMPNPYFKNRQWLLQCPKSVRQSAIKSALANIKACFSNLKAGNIKQFSAPFRRKKTELERGWAIEMDQHNISKDGEKLFIFKDTLGNMRYFGSKQLQKLMPEKNPTHDPKVQKSRFGEYFLVLSVSARDRREERKPVHSGKVATASIDPGVRKTMVTYSPENEESFMLGQGQASDLVKLLLVHDKLQSRLDTEKTLRSKERMKIKTQMIRIRKRIFYLKKEFRDQTTNFLAARYDVLLVPQLETAKMTISAERELTTKVARQMLTLSHSVLFNRLKEKCEEYGTVFLHVLEHYTSQTCPMCGFLNKCGETYTCKNCQFTCDRDIVGAAGIFLKAVRTENPCS

SEQ ID NO: 1035 - protein, 795 aa, Chlamydomonas sp.
LWKMATKPPTVAKLKELLKLAEVPYSSKSNKDDLVRLCEDNGLIARPPPEYKTVEKMCVVKCALKKAMSLDDEEFGKFREHVDQLVNVVSRMLRRSSLVLTFHITSLLEKGLEIPDLYNMKDTYWKDWLRIGVDGIFPDEETKISYEAVKDSIGDVIGNDDADYIKSYPIYFDQVLNYAGHTLSTVVSNNAWVPLIPRLARLTSTTLNKLNAPKTLDTSKIIRGYDVMRAIQQEVQNMEGWPESVQEYVNEVREMLSVPDGSRVYDNYGKDMDFPTMVRFNYWIQTRLEDMDARRIRLMPIFNVQRVHVRLDLKTLVNLFRHMFPNDQNIVELSKWEHVKNPDSFMLPQRPAQKKKKSCGPGEWEAYMSVLKQYDDDVKDIKATDEYRHAKGLYDTLVNARKTVAGSFFRKPPVKNGWVFDCSICTDGVSLSMQYSKTVQVLVSDLKKTCKKPRKEEGIKIAEKYDGSLKTILPDMGIVVLGVDPGRSNIATVTYLADDKNKTWTLTRGAFYHKSGIKKQTRQKELRFADMIPMWESLRENGAALSTSRTDKISAYLSNYAKFSDEWWRLALRRRESRDNLQRYIGKRKVKDSFWAGIKRCMMKELPDMKVCVAYGSAITKLKPTGPGEVAVPTGAMFASCKRIFKEDVSVTDEFKTTLMSWETGKEKERVYKIPSVCSADVKLRLGGERFGHTKSKTMPKVADCDHLRVRLYNKRKGAQEKHRRGGFSTSLVDSQKSIERYPEVRGLRFFPETCIYSDRDRSSALTIARLHCMELMGLGRTLPFAHSSSVVVDE

SEQ ID NO: 1036 - protein, 280 aa, Chlamydomonas sp.
KTVAGSFFRKPPIKNGWVFDCSICTDGVSLSMQYSKTVQVLVSDLKKTCKKPRKEEGIKIAEKYDGSLKTILPDMGIVVLGVDPGRSNIATVTYLADDKNKTWTLTRGAFYHKSGIKKQTRQKELRFADMIPMWESLRENGAALSTSRTDKISAYLSNYAKFSDEWWRLALRRRESRDNLQRYIGKRKVKDSFWAGIKRCMMKELPDMKVCVAYGSAITKLKPTGPGEVAVPTGAMFASCKRIFKEDVSVTDEFKTTLMSWETCKEKNVFTRSQAFVKQT

SEQ ID NO: 1037 - protein, 390 aa, Chlamydomonas sp.
KTVAGSFFKKPPVKTGWVFDCSICTDGVSLSMQYSKTVQVRVSDLKKTSKRSRDEEGMSVSEQYDHKLKTTLPDMGIDVLGVDPGRSNIATVTYLADDKSKTWKLTRGAFYHKSGIKKQKKQQEKRFSDMIPRWESLPENGAALSTSRKDDISAYLKNYATFSDEWWRMALRRRESRDNFQRFIGKRKAMDSFWAGIKRNMELDHPDLRVRVAYGSAITKLKATGPGEVAVPTGSMFASCKRLFKEEVHVTDEFKTTLMSWETGAKKVCVCKIPSVQITTEGQIRLGYELLGHTPLKETPKVSYRDQLAVRVYCTRKKIQENHRRGGLAPSLVDNNSIKRYPEVRGLRFSPETSTYSDRDRSSALTIARLHCMELLGQGRPLPFCRDACC

SEQ ID NO: 1038 - protein, 640 aa, Chlamydomonas sp.
DISTKESQIRSIPCFATSQNQPGGRNAHYITRCLDDGDFDVKQLPHLDRNFYYRCLLAVSTSNVRKDTLGQSFNDTMVAFDALRPAGYVKVDVRPWGQVIADVSLQMATMACNSVWANVDRFVIKYLRLKHPSLKKHFKKIVKAVVQYPESKIDTIIPEGLVHAIHIKEVVSLLRALFPLPRGKQFNTRAHLTMRLFHHVLTELGEVGRVDPKDKKTKKSHPRLFSILPRKNGFTISYVPISSMTFMKLLSMGDSPLESVSGDGRYENHTMLWRKYFNVQGLETKRSRFDNRILSDGKGVSVQMKQKGKEEVVEEGENAGYPKDANIVECKDAVGALRVGVDPGMTDIVTVASSAGRIESFSSARFSEVAGYNTSKRRTYKWNDETQDLVKSIPSPNTSNMVDLQDHVRAYLKALPILLQHRANKGYRSMRFFRYVGKQKTIEKVCDVIAPRAQTTVVGFGNWSNQGYGISRSCSGPIKEIRRCLSRRKNVLFKNVDKRNTSCKCHGCFQRLVNMKADSVVWRGVCKESPIDGSITVEKQKMVVKNVKVHKVLHCRDSVKSASSNVRCGATWNRDVNAAKNLLLLLTTWMDGRERPEAFCVPSPPPKTTVSIEASVSAKPTDPPGFVSSLPCYPLGQLKC

SEQ ID NO: 1039 - protein, 688 aa, Chlamydomonas sp.
GSVGAILYHQKKKNTHPLLMGVVQDKGDDDINISVVKKTLNSLCMDVSRHQISSRIQSMVLLINHAVAEAYLFANFHITRCLDDGDFDVKQLPHLDWNFYYRCLLAVSTSNVRKDTLGQSFNDTMVAFDALRPAGYVKVDVCPWGQVIADVSIQMATMACNSVWANVDRVVIKYLRLKHPSLKKHFKKIVKAVVQYPESKIDTIIPEGLVHAIHIKEVVSHLRALFPLPRGKQFNTRAHLTMRLFHHVLTELGEVGRVDPKDKKTRKSHPRLFSILPRKNGFTISYVPISSMTFMKLLSMGDSPLESVSGDDGYENHTMLWRKYFNVQGLETKRSRFDNRILSDGKGVSVQMKQKGKEEVVEEGENAGYPKDANIVECKDAVGALRVGVDPGMTDIVTVASSAGRIESFSSARFSKVAGYNTSKRRTYKWNDETQDLVKSIPSPNTSNMSDLQDHVRAYLKALPILLQHRANKGYRSMRFFRYVGKQKTIEKVCDVIAPRAQTTVVGFGNWSNQGYGISRSCSGPIKEIRRCLSRRKNVLFKNVDERNTSCKCHGCFQRLVNMKADSVVWRGVCKESPIDGSITVEKQKMVVKNVKVHKVLHCRDSVKSASSNVRCGATWNREVTPAKNLLLLLTTWMDGRERPEAFCVPSPPPKTTVSIEASVSAKPTDPPGFVSSLPCYPLGQLKC

SEQ ID NO: 1040 - protein, 341 aa, Chlamydomonas sp.
SFSAWVIRHSRASLAMDVTRTIQCCGESTLMSKVLRRKGFRFDNRILSDGKGVSVQMKQKGKEEVVEEGENAGYPKDANIVECKDAVGALRVGVDPGMTDIVTVASSAGRIESFSSARFSKVAGYNTSKRRTYKWNDETQDLVKSIPSPNTSNMSDLQDHVRAYLKALPILLQHRANKGYRSMRFFRYVGKQKTIEKVCDVIAPRAQTTVVGFGNWSNQGYGISRSCSGPIKEIRRCLSRRKNVLFKNVDERNTSCKCHGCFQRLVNMKADSVVWRGVCKESPIDGSITVEKQKMVVKNVKVHKVLHCRDSVKSASSNVRCGATWNRDVNAAKNLLLLLTT

SEQ ID NO: 1041 - protein, 238 aa, Chlamydomonas sp.
GIKRVESGVFKSRGPTKKWLSNIQDCLEDLKDNSPKRTSLVSYDAYVTVMVNHWDSRWGEMSKSRWGAQRLRLYGGKKRVLSRFFNEVQADVGERKTIVVAYGSAKFAPGGKGELSVPTTSAFKAFSDRFKGRVAVIDEFRTTKIWHKDSTTVLQSVQSEKEGRAVRGLLWCSSTMENSKLFVNRDLNAAINIHNCFTMYPIRPGILARPKKYCKLEVVVGRKIDYKLTGSLQNAVSS

SEQ ID NO: 1042 - protein, 528 aa, Chlamydomonas sp.
PCLCTTRYCRRPSKKNEKHRTFSLLPYKYGFTLSHIPISKMAFFYMVNECHFDSCKADVASKNHQGIWERFANLKKVETISRKFGYRIVTDGFAVSILMNKPTCVTCSIPADAFSTRAHEYVTTDEGGIVSFRDNVVVAAVDPGVTDIVTVTGLDGGTRSYSSAQYYRKGLIFKSQRQTDVWNLETAGIVGGIIPDRDSSSSEQIGAYARFYMGAAPILLAHCASRGYRNLRFRRYCKKHIVEIADFVAPREKSAKVLVGFGDWKGLGATPISRRTCGPLQAIRFELRSRENVIMEDIDEFRTSQRCSCCENHLCNMVALTHRKKQDGTGWECTEGRKRIHKMLHCKSSQSGAQRQQSGGRLHCGKTWDRDVNASRNILMLTLHQVFGRERPLAFRRDAPRSSSKTPPPPPDTEMGTQTVERFTKEATRNIFENLFNLPTLFENNCNTPPHQNIGNEKQEVPSRHSHTRSTIQREKVDTPPLRDDNVRSSPTSYDPDLLMLSMPPKPKKSRGTHLKKKKNKKGTLKQV

SEQ ID NO: 1043 - protein, 382 aa, Chlamydomonas sp.
QQTRVALYPSLTMWSWPAVDPGVTDIVTVTGLNGGTRSYSSAQYYRKGLIFKSQRQTDVWNLETADIVGGIIPERDSSSSEQIGAYARFYMGAAPILLAHRASRGYRNLRFRRYCKKQKLIVEIADFVSPREKSAKVLVGFGDWKGLGATPISRRTCGPLQAIRFELRSRENVIMEDIDEFRTSQRCSCCENHLCNMVALTHRKKQDGTGWECTEGRKRIHKILHCKSSQSGAPRQQSGGMLHCGKTWDRDVNASRNILMLTLHQVFGRERPLAFRRDAPRSSSTTPPPPPPPDTDMGTQTVERFTKEACISSVVNSTSTTVAASSSAVKSSYDLANAALPKNGGSHESRQQDGNNVHFNKMGYPARIFILRVNVCCGYAPM

SEQ ID NO: 1044 - protein, 692 aa, Chlamydomonas sp.
RNVGATLYHQKKKNTHPLLMGVVQDKGDDDINIRVVKKTLNSLCMDVSRHQISSRIQSMVLLINHAVAEAYLFANFHITRCLDDGDFDVKQLPHLDRNFYYRCILAVSTSNVRKDTLGQSLKDSMVAFDALRPAGYVKVDVRPWGQVIADVSIQMATMACNSIWANVDRVVIKYLRLKHPSLKKHFKKIVKAVVQYPESKIDTIIPEGLVHAIHIKEVVSHLRALFPLPRGKQFNTRAHLTMRLFHHVLTELGEVGRVDPKDKKTRKSHPRLFSILPRKNGFTISYVPISSMTFMKLLSMGDSPLESVSGDGRYENHTMLWRKYFNVQGLETKRSRFDNRILSDGKGVSVQMKQKGKEEVVEEGENAGYPKDANIVECNDAVGALRVGVDPGMTDIVTVASSAGRIESFSSARFSEVAGYNTSKRRTYKWNDETQDLVKSIPSPNTSNMSDLQDHVRAYLKALPILLQHRANKGYRSMRFFRYVGKQKTIEKVCDVIAPRAQTTVVGFGNWSNQGYGISRSCSGPIKEIRRCLSRRKNVLFKNVDERNTSCTCHGCFQKLVNMKADSVVWRRVQNEPPSLINGAPTTTIEKQKTVVKNVKVHKVLHCRNSVKSASSNVRCGATWNRDVNAAKNLLLLLTTWMDGKERPATFCVPSSSPTPKTTVSGEANVGAQPTDPPGSVSSLQLLSSGPA

SEQ ID NO: 1045 - protein, 423 aa, Chlamydomonas sp.
KTRKSHPRLFSILPRKNGFTISYVPISSMTFMKLLSMGDSPLESVSGDGRYENHTMLWRKYFNVQGLETKRSRFDNRILSDGKGVSVQMKQKGKEEVVEDGENADYPKDANIVECKDAVGALRVGVDPGMTDIVTVASSAGRIESFSSARFSEVAGYNTSKRCTYKWNDETQDLVKSIPSPNTSNMVDLQDHVRAYLKALPILLQHRANKGYRSMRFFRYVGKQKTIEKVCDVIAPRAQTTVVGFDNWSNQGYGISRSCSGPIKEIRRCLSRRKNVLFKNVDERNTSCKYHGCFQRLVNMKADSVVWRGVCKESPIDGSITVEKQKMVVKNVKVHKVLHCRDSVKSASSNVRCGATWNRDVNAAKNLLLLLTTWMDGRERHEAFCVPSPPPKTTVSIEASVSAKPTDPPGFVSSLQLLSFGPA

SEQ ID NO: 1046 - protein, 688 aa, Chlamydomonas sp.
GNVGAILYHQKKKNTHPLLMGVVQDKGDDDINISVVKKTLNSLCMDVSRHQISSRIQSMVLLINHAVAEAYLFANFHTTRCLDDGDFDVKQLPHLDRNFYYRCLLAVSTSNVRKDTLGQSFNDTMVAFDALRPAGYVKVDVRPWGQVIADVSIQMATMACNSVWANVDRVVIKYLRLKHPSLKKHFKKIVKAVVQYPESKIDTIIPEGLVHAIHIKEVVSHLRALFPLPRGKQFNTRAHLTMRLFHHVLTELGDVGRVDPKYKKTRKSHPRLFSILPRKNGFTISYVPISSMTFMKLLSMGDSPLESVSGDGRYENHTMLWRKYFNVQGLETKRSRFDNRILSDGKGVSVQMKQKGKEEVVDEGENAGYPKDANIVECKDAVGALRVGVDPGMTDIVTVASSARRIESFSSARFSEVAGYNTSKRRTYKWNDETQDLVKSIPSPNTSNMSDLQDHVRAYLKALPILLQHRANKGYRSMRFFRYVGKQKTIEKVCDVIAPRAQTTVVGFGNWSNQGYGISRSCSRPIKEIRRCLSRRKNVLFKNVDERNTSCKCHGCFQRLVNMKADSVVWRGVCKESPMDGSITVEKQKMVVKNVKVHKVLHCRDSVKSASSNVRCGATWNRDVNAAKNLLLLLTTWMDGRERPEAFCVPSPPPKTTVSTEASVSAKPTDPPGFVSSLPCYPLGQLKC

SEQ ID NO: 1047 - protein, 579 aa, Chlamydomonas sp.
GNVGAILYHQKKKNTHPLLMGVVQDKGDDDINISVVKKTLNSLCMDVSRHQISSRIQSMVLLINHAVAEAYLFANFHITRCLDDGDFDVKQLPHLDRNFYYRCLLAVSTSNVRKDTLGQSFNDTMVAFDALRPAGYVKVDVRPWGQVIADVSIQMATMACNSVWANVDKVVIKYLRLKHPSLKKHFKKIVKAVVQYPESKIDTIIPEGLVHAIHIKEVVSHLRALFPLPRGKQFNTRAHLTMRLFHHVLTELGDVGRVDPKYKKTRKSHPRLFSILPRKNGFTISYVPISSMTFMKLLSMGDSPLESVSGDGRYENHTMLWRKYFNVQGLETKRSRFDNRILSDGKGVSVQMKQKGKEEVVEEGENAGYPKDANIVECKDAVGALRVGVDPGMTDIVTVASSARRIESFSSARFSEVAGYNTSKRRTYKWNDETQDLVKSIPSPNTSNMSDLQDHVRAYLKALPILLQHRANKGYRSMRFFRYVGKQKTIEKVCDVIAPRAQTTVVGFGNWSNQGYGISRSCSGPIKEIRRCLSRRKNVLFKNVDERNTSCKCHGCFQRLVNMKARSLQRVPNRRVYNC

SEQ ID NO: 1048 - protein, 782 aa, Chlamydomonas sp.
DGNETSDSREIEGATKIGRSSILLKGQEGRYCPFMRRQWLIARPPPEYKTVEKMCVVKCALKKAMSLDDEEFGKFRGHVDQLVNVVSRMLRRSSLVLTFHVTRLMEGDLPIPNMYDMKDTYWKDWLRIGVDGVFPDEESRISYEAVKDVIGKVLGSDDPDYINSYPIYFDQVLNYAGHTLSTVVSNNAWVPLVPRLTRLTKATLNVLGAPKTIRVYDVMRVIRQEIQEMESWPESVQEYVREVRVRLKVPDGSRLYDDYGKDMDFPTMVRFNYWMQTRLEAMGARRIRLMPIFNVQRAHVRLDMKTLVNLFRHVFPKDPNIVELSKWENVKDPDRFMLPLKPAVKKKKSCGPGEWEAYKLAQQKYDADVKDIKATDVYRHAKGRYDTLVNARKTVAGSFFKKPPVKTGWVFDCSICTDGVSLSMQYSKTVQVRVSDLKKNSKRSRDEEGMSVAEQYDHKLKTTLPDMDVVVLGVDPGRSNIATVTYLADNKSKTWKLTRGAFYHKSGIKKQKKQQEKSFSDMIPRWESLRENGAALSTSRKDDISTYLKNYATFSDEWWRMALRRRESRDNFQRYIGKRKAMDSFWAGIKRNMKLDHPDLRVRVAYGSAITKLKATGPGEVAVPTGSMFASCKRLFKEEVHVTDEFKTTLMSWETGAKKECVYKIPSVQITTEGQIRLGYELLGHIPLKETPKVSYRDQLAVRVYCTRKKIQEKHRRGGLAPSLVNNKSIERYPEVRGLRFSPETSTYSDRDRSSALTIARLHCMELLGQGRPLPFCRDACC

SEQ ID NO: 1049 - protein, 219 aa, Chlamydomonas sp.
LHQGHRRPLLASANWSNQGYGISRSCSGPIKEIRRCLSRRKNVLFKNVDERNTSCKCHGCFQRLVNMKADSVVWRGVCKESPIDGSITVEKQKMVVKNVKVHKVLHCRDSVKSASSNVRCGATWNRDVNAAKNLLLLLTTWMDGRERPEAFCVPSPPPKTTLHYITLHVKVYLTPRGCMRLCALNKKKKHPQSKKPHYIRGVSRTNKPNSQPPFWWRRY

SEQ ID NO: 1050 - protein, 793 aa, Chlamydomonas sp.
ECSREPVCRSRLHQNVFGVQFVMENEVGESSSLEHEADQHDDVAELVDYEGDEDEERAPGRAICVVKMKLSTFIPHDWLRRKIDTLVLDMNKLLGEGYIFANFHIARLFENGIAVPPVNRNFFYRCLLAVSTNKCMGSTLGEDFENSRLLFDLLREPGQSKVDIRGRVNNQIIADLSILMATMASNHLWTNLERRITTYLKWKYPQITKRLRSDIVAAVIKCPTKNLDVIFKMSPHVAKLPTKLPTARLRSAKSAVALAKKRVGRKEPEVSPLQVRLTKLQARFEKLSEAWLSSKNLRVDEDNAKRFFACDVAFCLRGVLPLPSGNTFASRAHMTLPLYHKILSETIEEKRKTKNEKLRTFSLLPYKSGFTLSHIPISKMAFFYMVNECHFDSCKADVASKNHQGIWERFANLKKVETVSRKFGYRIVTDGFAVSILMNKPTCLTCSMPADAFSTRAHEYVTTDEGGIVSFRENVVVAAVDPGVTDIVTVTGLDGGTRSYSSAQYYRKGLIFKSQRQTDVWNLETADIVGDIIPDRDSSRSEQIGAYARFYMGAAPILLAHRASRGYRNLRFRRYCKKQKLIVEIADFVAPREKSAKVLVGFGDWKGLGATPISRRTCGLLQAIRFELRSRENVIMEDVDEFRTSQRCSCCETRLCNMVALTHRKKQDGTGWECTEGRKRIHKILHCKSSQSGAPRQQSGGRLHCRKTWDRDVNASRNILMLTLHQVFGRERPLAFRRDAPRGSSKNPPTPDTDMGTQTVERFTKEATRNIFENLFNLLHPPTLPKSNDLQSG

SEQ ID NO: 1051 - protein, 663 aa, Chlamydomonas sp.
GRKNGEENVVKCTLSRIIADKDNKDSIIKVIGERVDSVSKRTYIAGVAVNRILKEVFEGVPDSQLHTVGVPNVGQNFIRQLMLGSRQAQKETRDATVANFFHNNAWFREKIEGRDVIVANKKMYVGSIARHDGDRNLYCHASKKYLTNFNNHYRVHLSTWIKKFVYSTENRRWAKEIKDEHGIEETVFHRYLLYDLHSWGVKDDLLVVHSVLPERTKMLLNVQHSIIGRDEINRKWLKSVSNSAKMIRYNVFVNRYLETTEDEGYAKLVNIAPIPTVKHAFITIDTDGLLGVLKDVGLIKSLVKTLTNKEYWESVFDVENLRSEGKGVFTGTIDTDGVMACTHFLRAEKRAISIKDDGAAIKKHTKALRDFLESDPNVVVVANDPGRCNIAFLTWKKNKVDGKEAGSRKRKRHCEFGSKRLTRERYYVESGVFKSRGSIKKWLSNIQEYLDDLKDNSPKRTSLASFDTFVAVVVNHWDSRWGEMSKTRWGAQRMRLYGGKKRVFARFFNEVQKDVGVRKKIVIAYGSAKFAPGGKGELCVPTTGAFKAFTDRFNGRVAAIDEFRTTKVWHKDSTTVLQGVHSKKEGCTVRGLLWCSSTMENSKLFVNRDLNAAINIHNCFTMYPTRPGILARPNKYCKLEVKVGRMIDYKLTGSLQNAVSSEV

SEQ ID NO: 1052 - protein, 622 aa, Chlamydomonas sp.
QCIRNLHVLNIRMPCMANNAFVKLARPPMPLVSPGPSSVDGRIMARSERSGLQATNVSLTQAASKATSSSRKKNQAVVKSFSTHVCPHTNNNPTCSDSNCSCKPIFLTNIPDASKSLKSRTSDQGSTSSAQDFYEYWDSSRQDLYRQLLWLPKTGSQGLMSSSLNGFARSTPARSSFSITKTDPLKTSLEKTSCPSFKYIVADGTVEYATKSNAKPKLRTLKLKLNPTKAQKSMLAEFAGCSRFMYNKAVAARLGVGSTHKSVFRIRDRYVTNKVRGEGKMPNPYFKNRQWLLQCPKSVRQSAIKAALANIKACFSNLKAGNIKQFSAPFRRKTTEIERGWAIEMDQKNVSKDGDKLFIFKNILGNMRYFGSKQLHKLMPEENPTHDPKVQKSRFGEYFLVLSVAARDRRAERKPVHPDKVATASIDPGVRKTMVTYSPENEESFMLGQGQASDLVKLLLVHDKLQSRLDTEKTLRSKERMKIKKQMIRIRKRIFYLKKEFRDQTTNFLAARYDVLLVPQLETAKMTISAERELTTKVARQMLTLSHSVLFIRLKEKCEEYGTVFLHVLEHYTSQTCPMCGFLNKCGGETYTCKNCQFTCDRDIVGAAGIFLKAVRTENPCS

SEQ ID NO: 1053 - protein, 300 aa, Chlamydomonas sp.
RHCSIFCRSRRVESFSSARFSEAAGYNTSNRRTNKWNADTQDLVKSIPSPTTSSMPDMQDHVRGYLSALPTLLQHRASRGYRSMRFFRYVGKQKTIEKVCDVIAPKAQKTVVGFGNWSNQGYGISRSCSGPVKEIRKCLSRRQNVLFKNVDERNTSCTCHGCFQKLVNMKANSVVWRRVHNESPALIDGAITTTTTFEKQKTVVKNVKVHKVLHCRNSVKSASSNVRCGATWNRDVNAAKNILLLLTTWMDGKERPVAFCVPSSSPTPKTTVSGEANVSAQPTDPPGSVGSLQLLSFGPA

SEQ ID NO: 1054 - protein, 806 aa, Chlamydomonas sp.
PRMELVCDVGIKCSVMYKLRTMATKPPTVAKLKELLKLAEVKYSSKDKKDDLVRLCEDNGLIARPPPEYKTVEKMCVVKCALKKAMSLEDEEFGKFRGHVDQLVNVVSRMLRRSNLVLTFHVTRLMEGDLPIPNMYDMKDTYWKDWLRIGVDGVFPDEESRISYEAVKDVIGKVLGSDDPDYINSYPIYFDQFLNYAGHTLSTAVSNNAWVPLVPRLTRLTKATLNALGSPKTIRVYDVMRVIQQETQEMESWPESVQEYVREVRGRLKVPHGSRLYDDCGKDMDFPTMVRFNYWMQTRLEAMGARRIRLMPIFNVQRAHVRLDMKTLVNLFRHMFPKDPNIVELSKWENVKDPDRFMLPLKPAVEKKKSCGPGEWEAYKLVQQKYDADVKDIKATEEYIHAKGRYDTLVNARKTVAGSFFKKPPIKTGWVFDCSICTDGVSLSRQYSKTVQVRVSDLKKTSKRSRDDEGMRVAEQYDHKLKTTLPDMGIVVLGVDPGRSNIATVTYMADDKSKTWKLTRGAFYHKSGIKKQKRQQEKRFADMIPMWASLRENGAALSTSKMDDISVYLSNYATFSDEWWRLALRRRESRDNLQRYIGKRKAMDSFWAVIKRNMMVDHPDLRVRVAYGSAITKLKATGPGEVAVPTGSMFASCKHIFKEEVRVTDEFKTTLMSWETGAKKECVYKIPSVSLNAEGQIRIGECLLCHTLLKRPPNVAERDQLSVRVYCVRKKIQEKHRRGGLATFLVDVNQSIKQYPEVRGLRFSPETSTYSDRDRSSALTIARLHCMELLGLGRPLPFSRCKTACC

SEQ ID NO: 1055 - protein, 714 aa, Chlamydomonas sp.
TTAWCLTSASIMMPRSYCGIRKLWFIMISQQETNSHSLSMGVVINNGDDEDLGIMVVKKTLNSLCMDVSRQQLCSRIQSMVLVINHAVAEAYLFANFHITRCLDDGDFDVKQLPHLDRNFYYRCILAVSTSNVRKDTLGQSLKDSMVAFDALRPTGYAKVDVRPWGQVIADVSIQMATMACNSVWANVDRIVIKYLRLKHPSLKRHFKKIVKAVVQFPESDMDKIIPASLVHANLIKDVVRRLRALLPLPRGKQFNTQAHLTMRLFHHVLTELGADLKEKTTKKRPRLFSILPRKSGFTISYVPISSMTLMKLLSMGDSPLESVRGDGRHENHSMLWRKYFNVQGLETKRSRFDNRILSDGKGVSVQMKHQAGEDVAGEGGDNAGYPKDASIEDCQDASLRLGALRVGVDPGMTDIVTVASSAGRVESFSSARFSEAAGYNTSNRRTNKWNTDTQDLVKSIPSPTTSSMPDMQDHVRGYLSALPTLLQHRASRGYRSMRFFRCVGKQKTIEKVCDVIAPKAQKTVVGFGNWSNQGYGISRSCSGPVKEIRKCLSRRQNVLFKNVDERNTSCTCHGCFQKLVNMKANSVVWRRVHNESPALIDGAITTTTTFEKQKTVVKNVKVHKVLHCRNSVKSASSNVRCGATRNRDVNAAKNLLLLLTTWMDGKERPVAFCVPSSSPTPKTTVSGEANVSAQPTDPPGSVGSLQLLSFGPA

SEQ ID NO: 1056 - protein, 686 aa, Chlamydomonas sp.
METSDQKKPPDKRTRPDRAAKLQGRKNGEENVVKCTLSRIIADKDNKDAIIKVIGERVDSVSKRTYIAGVAVNRILKEVFEGVPDSQLHTVGVPNVDQNFIRQLMLGSRQAQKETRDATVANFFHNNAWFREKIEGRDVIVANKKMYVGSIARHDGDRNLYCHASKKYLTNFNNHYRVHLSTWIKKFVYSTENRRLAKEIKDEHGIEETVFHRYLLYDLHSWGVKDDLLVVHSVLPERTKMLLKVQHSIIGRDEINRKWLKSVSNSAKMIRYNVFVNRYLEATEDEGYAKLVNIAPIPTVKHAFITINTDGLLGVLKDVGLIKSLVKTLTNKEYWESVFDVENLRSEGKGVFTGTIDTDGVMACTHFLRAEKRAISIKDDGAAIKKQTKALRDFSESDPNVVVVANDPGRCNIAFLTWKKNKVDGKEEGSRKRKRHCEFGSKRLTRERYYVESGVFKSRGSTKKWLSNIQECLDDLKDNSPKRTSLASFDTFVAVVVNHWDSRWGEMSKTRWGAQRMRLYGGKKRVFARFFNEVQKDVGVRKKIVIAYGSAKFAPGGKGELCVPTTGAFKAFTDRFKGRVAAIDEFRTTKVWHKDSTTVLQGVHSKKEGCTVRGLLWCSSTMENSKLFVNRDLNAAINIHNCFTMYPTLPGILARPKKYCKLEVKVGRMIDYKLTGSLQNAVSSEV

SEQ ID NO: 1057 - protein, 243 aa, Chlamydomonas sp.
CLRKTRPTIRRSKKSRFGEYFLVLSVAARDRRAERKPVNPDKVATASIDPGVRKTMVTYSPENEESFMLGQGQASDLVKLLLVHDKLQSRLDTEKTLRSKERMKIKKLMIRIRKTIFYLKKEFRDQTTNFLAARYDVLLVPQLETAKMTISAERELTTKVARQMLTLSHSVLFNRLKEKCEEYGTVFLHVLEHYTSQTCPMCGFLNKCGETYTCKNCQFTCDRDIVGAAGIFLKAVRTENPCS

SEQ ID NO: 1058 - protein, 535 aa, Chlamydomonas sp.
VNLTVYKEFACTKYQNAMYGNQRFCKIGKASDALGVSRTVLRRWADNGTIRTIRTPGNQRLFDPSSIQGYLIEQEKKPSSRQVILYARVSSHKQQPDLLRQQLFLQTHISDKHSGCEQVIEVNDVGSGLNFKRPGLLRVLGLVTAGIVSSIVVASKDRLARFGFELIEWICSQHSCSIIVLDHQYGAPEDVFGKDLMSIVQVYCCRWNGRRRCKVKCQTQVEDLKAEAEPNQGSEIDAGSAPFRRKKIELERGWAIEMDQKNVSKDGDKLFIFKDILGNMRYFGSKQLHKLMPEENPTHDPKVQKSRFGEYFLVLSVVARDRRAERKPVHPDKVATASIDPGVRKTMVTYSPENEESFMLGQGQASDLVKLLLVHDKLQSRLDTEKTLRSKERMKIKKQMIRIRKRIFYLKKEFRDQTTNFLAARYDVLLVPQLETAKMTIRAERELTTKVARQMLTLSHSVLFNRLKEKCVEYGTVFLHVLEHYTSQTCPMCGFLNKCGGETYTCKNCQFTCDRDIVGAAGIFLKAVRTENPCS

SEQ ID NO: 1059 - protein, 325 aa, Chlamydomonas sp.
TQNDISRYGYRRSGCGRSNIATVTYLADDKGKTWKLTRGAFYHKSGIKKQKRQQEKRFTDMIPMWACLRENGAALSTSRMDDISVYLSNYATFSDEWWRLALRRRESRDNLRRYIGKRKAMDSFWAGIKRNMMMDHPDLRVRVAYGSAITKLKATGPGEVAVPTGSMFASCKRIFKEEVRVTDEFKTTLMSWETGAKKECVYKIPSVSLNAEGQISIGDEWLLCHTLLKKPPKVAERDLSAVRVYCTRKKIQEKHRRGGLATSLVDVNKSIKRYPEVRGLRFSPETSTYSDRDRSSALTIARLHCMELLGLGRPLPFSRCKAACC

SEQ ID NO: 1060 - protein, 621 aa, Chlamydomonas sp.
QCIRNLHVLNIRMPCMATNASVKLARPPMPLVSPGPSSVDGRIMAQSERSGLQATNVSLTQAASKATSSSRKKNPAVVKSFSTHVCPHTNNNPTCSDSNCSCKPIFLTNIPDASKSLKSRTSDQGSTSSAQDFYEYWDSSRQDLYRQLLWLPKTGSQGLVSSSLNGFARSTPARSSFSITKTEPLKTSLEKTSCPSFKYIVADGTVEDATKSNAKPKLRTLKLKLNPTKAQKSMLAEFAGCSRFMYNKAVAARLGVGSTHKSVFRIRDRYVTNKVRGEGKMPNPSFKNRQWLLQCPKSVRQSAIKAALANIKACFSNLKAGNIKQFSAPFRLKKTELERGWAIEMDQKNVSKDGDKLFIFKDILGNMRYFGSKQLHKLMPEENPTHDPKVQKSRFGEYFLVLSVAARGRRAERKPVHPDKVATASIDPGVRKTMVTYSPENEESFMLGQGQASDLVKLLLFHDKLQSRLDTEKTLRSKERMKIKMQMIRIRKRIFYPKKEFRDQTTNFLAARYDVLLVPQLETAKMTISAERELTTKVARQMLTLSHSVLFNRLKEKCEEYGTVFLHVLEHYTSQTCPMCGFLNKCGETYTCKNCQFTCDRDIVGAAGIFLKAVRTENPCS

SEQ ID NO: 1061 - protein, 701 aa, Chlamydomonas sp.
NNNHSLSMGVVTNNGDDDDLDIMVVKKTLNSLCMDVSRQQICSRIQSMVLVINQAVAEAYLFANFHITRCLDDGDFDVNQLPHLDRNFYYRCILAVSTSNVRKDTLGQSLKDSMVAFDALRPAGYLKVDVRQWGQVIADVSIQMATMACNSVWANVDRVVIKYLRLKHPSLKKHFNKIVKAVVQYPDSDIDKIIPAGLVHANLIKDVVRRLRDLLPLPRGKQFNTRAHLTMRLFHHVLTELGADLKEKTTKKRPRLFSILPRKSGFTISYVPISSMTLMKLLSMGDSPLESVRGDGRHENHSMLWRKYFNVQGLETKGSRFDNRILSDGKGVSIQMKHQVGKDIAGEGEGGGDNAGYPKDASIEDCQDASLRQGALRVGIDPGMTDIVTIASSDGRVESFSSARFSEAAGYNTSNRRTNKWNADTQDLVKSIPSPTTSSMQDHVRGYLSALPTLLQHRANRGYRSMRFFRYVGKQKTIEKVCDLIAPKAQKKTIEEKGCDVIAPKAKKTVVGFGNWSNQGYGISRSCSGPVKEIRKCLSRRQNVLFKNVDERNTSCTCHGCFQKLVNMKADSVVWRRVQNEPSTLIDGAPTTTTTTTFEKQKTVVKNVKVHKKLHCRNSVKSASSNVRCGATWNRDVNAAKNLLLLLTTWMDGKERPAAFCVPSSSPTPKTTVSGEANVGAQPTDPPGSVSSLQLLSSGPA

SEQ ID NO: 1062 - protein, 803 aa, Chlamydomonas sp.
PRMEHVCDVCIKSSVMYKLCKMATKPPTVAKLKELLKLAEVAYSSKDKKDDIVRLCEDNGLIARPPPEYKTVEKMCVVKCALKKAMSLDDEEFGKFREHVDQLVNVVSRMLRRSSLVLTFHVTRLMEGDLPIPNMYDMKDTYWKDWLRIGVDGVFPDEESRISYESVKDVIGKVLGSDDPDYINSYPIYFDQVLNYAGQTLSTVVSNNAWVPLVPRLTRLTKATLNALGAPKTIRVYDVMRVIQQEIQEMESWPESVQEYVREVRVRLKVPDGSRLYDDYGKDMDFPTMVRFNYWMQTRLEAIGARRIRLMPIFNVQRAHVRLDMKTLVNLFRHVFPKDPNIVELSKWKNVKDPDRFMLPLKPAVKKKKSCGPGECEAYKLAQQKYDADVNDIKDTDEYRHAKGRYDTLVNARKTVAGSFFKKPPVKTGWVFDCSICTDGVSLSMQYSKTVQVRVSDLKKTSKRSRDDEGMSVSEQYDHKLKTTLPDMGIVVLGVDPGRSNIATVTYLADDKSKTWKLTRGAFYHKSGIKKQKKQQEKRFSDMIPRWESLCENGAALSTSRTDDISAYLKNYATFSDEWWRMALLRRESRDNFQRYIGKRKAMDSFWAGIKRNMKLDHPDLRVRVAYGSAITTLKATGPGEVAVPTGSMFASCKRLFKEEVHVTDEFKTTLMSWETGAKKECVYKIPSVQITTEGQIRLGYELLGHTPLKETPKVSYHDQLAVRVYCTRKQIQEKHRRGGLAPSLVDNNSIKRYPEVRGLRFSPETSTYSDRDRSSALTIARLHCMELLGQGRPLPFCRDACC

SEQ ID NO: 1063 - protein, 683 aa, Chlamydomonas sp.
YYITKRKRILTPLLMGVVQDKGDDDINISVVKKTLNSLCMDVSRHQISSRIQSMVLLINHAVAEAYSFANFHITRCLDDGDFDVKQLPHLDRNFYYRCLLAVSTSNVRKDTLGQSFNDTMVAFDALRPAGYVKVDVRPWGQVIADVSIQMATMACNSVWENVDRVVIKYLRLKHPSLKKHFKKIVKAVVQYPESKIDTIIPEGLVHAIHIKEVVSHLRALFPLPRGKQFNTRAHLTMRLFHHVLTELGEVGRVDPKDKKTRKSHPRLFSILPRKNGFTISYVPISSMTFMKLLSMGDSPLESVSGDGRYENHTMLWRKYFNVQGLETKRSRFDNRILSDGKGVSVQMKQKGKEEVVEEGENAGNPKDANIVECKDAVGALRVGVDPGMTDIVTVASSAGRIESFSSARFSKVAGYNTSKRRTYKWNDETQDLVKSIPSPNTSNISDLQDHVRAYLKALPILLQHRANKGYRSMRFFRYVGKQKTIEKVCDVIAPRAQTTVVGFGNWSKQGYGISRSCSGPIKEIRRCLSRRKNVLFKNVDERNTSCKCHGCFQRLVNMKADSVVWRGVCKESPIDGSITVEKQKMVVKNVKVHKVLHCRDSVKSASSNVRCGATWNRDVNAAKNLLLLLTTWMDGRERPEAFCVPSPPPKTTVSIEASVSAKPTDPPGFVSSLPCYPLGQLKC

SEQ ID NO: 1064 - protein, 713 aa, Chlamydomonas sp.
GNCQLVWYHQNNNHSLSMGVVTNNGDDDDLDIMVVKKTLNSLCMDVSRQQICSRIQSMVLVINHAVAEAYLFAIFHITRCLDDGDFDVKQLPHLDRNFYYRCILAVSISNVRNDTLDQSLKDSMVAFDALRPAGYVKVDVRPWGQVIADVSIQMATMACNSVWANVDRIVIKYLRLKHPSLKKHFKKIVKAVVQYPDSDIDKIIPAGLVHANLIKDVVRRLRDLLPLPRGKQFNTRAHLTMSLFHHVLTELGADLKEKTTKKRPRLFSILPRKSGFTISYVPISSMTLMKLLSMGDSPLESVRGDGRHENHSMLWRKYFNVQGLETKGSRFDNRILSDGKGVSVQMKHQVGKDIAGEGGGDNAGYPKDASIEDCQDASLRQGALRVGIDPGMTDIVTIASSDGRVESFSSARFSEAAGYNTSNRRTNKWNADTQDLVKSIPSPTTSSMHDMQDHVRGYLSALPTLLQHRANRGYRSMRFFRYVGKQKTIEKVCDLIAPKAQNKTIEEKVCDVTTPKAKKTVVGFGNWSNQGYGISRSCSGPVKEIRKCLSRRQNVLFKNVDERNTSCTCHGCFQKLVNMKADSVVWRRVQNEPSALIDGAPTTTTTTTSFEKQKTVVKNVKVHKVLHCRNSVKSASSNVRCGATWNRDVNAAKNLLLLLTTWMDGKERPAAFCVPSSSPTPKTTVSGEANVGAQPTDPPGSVSSLQLLSSGPA

SEQ ID NO: 1065 - protein, 933 aa, Chlamydomonas sp.
GPSPRQGPLLKENYSRRNSKMKHISDGRKEFVVKKTDFAAFIDSLSLCNNSVVIMDNASIHKNLVLRSPVNICYTPPYSPEFNAIDLCFAKVKKDFRRLNYIPNDTNTHVSDMISLAFSNLTDKIIMGCFDHVWNTYEICIKSSVMYKLCKMATKPPTVAKLKELLKLAEVAYSSKDKKDDIVRLCEDNGLIARPPPEYKTVEKMCVVKCALKKAMSLDDEEFGKFRGHVDQLVNVVSRMLRRSSLVLTFHVTRLMEGDLPIPNMYDMKDTYWKDWLRIGVDGVFPDEESRISYEAVKDVIGKVLGSDDPDYINSYPIYFDQVLNYAGHTLSTVVSNNAWVPLVPRLTRLTKATLNAMGAPKTIRVYDVMRVIQQEIQEMESWPESVQEYVREVRVRLKVPDGSRLYDDYGKDMDFPTMVRFNYWMQTRLEAIGARRIRLMPIFNVQRAHVRLDMKTLVNLFRHVFPKDPNIVELSKWKNVKDPDRFMLPLKPAFKKKKSCGPGEWEAYKLAQQKYDADVNDLKDTDEYRHAKGRYETLVNAQKTVAGSFFKKPPVKTGWVFDCSICTDGVSLSMQYSKTVQVRVSDLKKTSKRSRDDEGMSVSEQYDHKLKTTLPDMGIVVLGVDPGRSNIATVTYLADDKSKTWKLTRGAFYHESGIKKQKKQQEKRFSDMIPRWESLRENGAALSTSRKDDISAYLKNYATFSDEWWRMALRRRESRDNFQRYIGKRKAMDSFWAGIKRNMKLDHPDLRVRVAYGSAIMTLKATGPGEVAVPTGSMFASCKRLFKEEVHVTDEFKTTLMSWETGAKKECVYKIPSVQITTEGQIRLGYELLGHTPLKETPKVSYRNQLAVRVYCTRKQIQEKHRRGGLAPSLVDNNSIKRYPEVRGLRFSPETSTYSDRDRSSALTIARLHCMELLGQGRPLPFCRDACC

SEQ ID NO: 1066 - protein, 688 aa, Chlamydomonas sp.
RNVGTILYHQKKKNTHPLLMGVVQDKGDDDINIRVVKKTLNSLCMDVSRHQISSRIQSMVLLINHAVAEAYLFANFHITRCLDDGDFDVKQLPHLDRNFYYRCLLAVSTSNVRKDTLGQSFNDTMVAFDALRPAGYVKVDVRPWGHVIADVSIQMATMACNSVWANVDRVVIKYLRLKHPSLKKNFKKIVKAVVQYPESKIDTIIPEGLVHAIHIKEVVIHLRALFPLPRGKQFNTRAHLTMRLFHHVLTELGEVGRVDPKDKKTRKSHPRLFSILPRKNGFTISYVPISSMTFMKLHSMGDSPLESVSGNGRYENHTMLWRKYFNVQGLETKRSRFDNRILSDGKGVSVQMKQKGKEEVVEEGENAGYPKDANIVECKDAVGALRVGVDPGMTDIVTVASSAGRIESFSSARFSEVAGYNTSKRRTYKWNDETQDLVKSIPSPNTSNMSDLQDHVRAYLKALPILLQHRANKGYRSMRFFRYVGKQKTIEKVCDVIAPRAQTTVVGFGNWSNQGYGISRSCSGPIKEIRRCLSRRKNVLFKNVDERNTSCKCHGCFQRLVNMKADSVVWRGVCKESPIDGSITVEKQKMVVKNVKVHKVLHCRDSVKSASSNVRCGATWNRDVNAAKNLLLLLTTWMDGRERPEAFCVPSPPPKTTVSIEASVSAKPIDPPGFVSSLHCYPLGQLKC

SEQ ID NO: 1067 - protein, 711 aa, Chlamydomonas sp.
CPKILSLLDESEENVPRLISCCVHFFLLRRSDGSSKNHQGIWERFANLKKVETVSRKFGYRIVTDGFAVSILMNKPTCLTCSMPADAFSTRAHEYVTTDEGGIVSFLDNVVVAAVDPGVTDIVTVTGLNGGTRSYSSAQYYRKGLIFKSQRQTDVWNLETADIVGGIIPDRDSSSSEQIGAYARFYMGAAPILLAHRASRGYRNLRFRRYCKKQKLIVEIADFVAPRKKSAKVLVGFGDWKGLGATPISRRTCGPLQAIRFELRSRENVIMEDIDEFRTSQRCSCCENHLCNMVALTHRKKQDGTGWECKEGRKRIHKILHCKSSQSGAPRQQSGGMLHFENLFILLHPPTLPKSNDLDAVWMIIKFPTLFKNNCMHRKKKLKCLDLFSGIGGNALALRSICKTIAYCEIDPFARDVLEANMKRKNLDKAPIFEDVTTLKAVDVPELPDVITASFPCQDISSAGKGAGITGEHSGLYKHIFRLVKEFRRHRNHRISVIVMENSPMIKNRGLEKIESDLRSLGFRFQSVYRKASDFGARHERRRWCMVAIDKQSDLDLPCTYFRHNFDNLDNIPVLLKREGKASANFIRYGALGNAVVPKFIASVWDELICSVPFDSQDINRYPLLSYNTPHVTATRRLWPTPLYSRQQWTMRPFIRVGRREWSNMANRVFHEEGVMRKYNYNDANQAYHTYMINPEWVEALMGYPTGWTGT

SEQ ID NO: 1068 - protein, 415 aa, Chlamydomonas sp.
AKFLWILALSIITTELLHKLNESINAAKSVAGSFFKKPPVKTGWVFDCSICTDGVSLSMQYSKTVQVRVSDLKKTSKRSRDDEGMSVSEQYDHKLKTTLPDMGIVVLGVDPGRSNIATVTYLADDKSKTWKLTRGAFYHKSGIKKQKKQQEKRFSDMIPRWESLRENGAALSTSRTDDISAYLKNYDTFSDEWWRMALLRRESRDNFQRYIGKRKAMDSFWAGIKRNMKLDHPDLRVRVAYGSAITTLKATGPGEVAVPTGSMFASCKRLFKEEVHVTDEFKTTLMSWETGAKKECVYKIPSVQITTEGQIRLGYELLGHTPLKETPKVSYRDQLAVRVYCTRKQIQEKHRRGGLAPSLVDNNSIKRYPEVRGLRFSPETSTYSDRDRSSALTIARLHCMELLGQGRPLPFCRDA

SEQ ID NO: 1069 - protein, 355 aa, Chlamydomonas sp.
SYSISARYERRLTPDGKGFPISVVSYVGTLQHVGHGPHRGKSGACTELDQKLSMQHRSQPSISLEPPQRELERGWVIEMDQKNVSKDGDKLFIFKEILGNMRYFGSKQLHKLMPEENPTHDPKVQKSRFGEYFLVLSVAARDRRAERKPVNPDKVATASIDPGVRKTMVTYSPENEESFMLGQGQASDLVKLLLVHDKLQSRLDTEKTLRSKERMKIKKLMIRIRKTIFYLKKEFRDQTTNFLAARYDVLLVPQLETAKMTISAERELTTKVARQMLTLSHSVLFNRLKEKCEEYGTVFLHVLEHYTSQTCPMCGFLNKCGETYTCKNCQFTCDRDIVGAAGIFLKAVRTENPCS

SEQ ID NO: 1070 - protein, 792 aa, Chlamydomonas sp.
ECSREPVCRSRLNQNVFGVQFVMENGIGESSSLVHEADQHDDVAELVDYEGEEDGECAPGRAICVVKMKLSTFIPHDWLRNKIDTLVLDMNKLLGEGYIFANFHIARLFENGIAVPPVNRNFFYRCLIAVSTNKCKGSTIGEDFESSRLLFDLLREPGQSKVDIRGNVKNQIIADLSILMATMASNHLWTNLERRITTYLKWKYPQIAKRLRSDIVAALIKCPTKNLDVIFKMSPHTTKLPTKLPTSRLRSAKSAVALAKKRVGRKEPEGSPLRVRLTKLQERLEKLSEAWLSSKNLRVDADNAKRFFAREVAFCLRGVLPLPSGNTFASRAHMTLPLYHKILSETIEEKRKTKNEKHRTFSLLPYKSGFTLSHIPISKMAFFYMVNECHFDSCKADVASKNHQGIWERFANLKKVETVSRKFGYRIVTDGFAVSILMNKPTCLTCSMPADAFSTRAHEYVTTNEGGIVSFLDNVVVAAVDPGVTDIVTVTGLNGGTRSYSSAQYYRKGLIFKSQRQTDVWNLETADIVGGIIPDRDSSSSEQIGAYARFYMGAAPILLAHRASRGYQNLRFRRYCKKQKLIVEIADFVAPREKSAKVLVGFGDWKGLGATPISRRTCGPLQAIRFELRSRENVIMEDIDEFRTSQRCSCCENHLCNMVALTHRKKQDGTGWECTEGRKRIHKILHCKSSQSGAPRQQSGGMLHCGKTWDRDVNASRNILMLTLHQVFGRERPLAFRRDAPRSSSTTPPPDTDMGTQTVERFTKEATRNIFENLFNLLHPPTLPKSNDLQSG

SEQ ID NO: 1071 - protein, 455 aa, Chlamydomonas sp.
RIPTASCFPRGLHRRRKNHGPGEWEAYKSVLKQYDDDVKDIKATDEYRHAKGLYDTLVNARKTVAGSFFRKPPVKNGWVFDCSICTDGVSLSMQYSKTVQVLVSDLKKTCKKPRKEEGIKIAEKYDGSLKTILPDMGIVVLGVDPGRSNIATVTYLADDKNKTWKLTRGAFYHKSGIKKQTRQKELRFADMIPMWESLRENGAALSTSRTDKISAYLSNYAKFSDEWWRLALRRRESRDNLQRYIGKRKVKDSFWAGIKRCMMKELPDMKVCVAYGSAITKLKPTGPGEVAVPTGAMFASCKRIFKEDVSVTDEFKTTLMSWETGKEKERVYKIPSVCSADVKLRLGGERFGHTKSKTMPKVADCDHLGVRLYNKRKGAQEKHRRGGFATSLVDSQKSIERYPEVRGLRFSPETCIYSDRDRSSALTIARLHCMELMGLGRPLPFAHSSSVVVDE

SEQ ID NO: 1072 - protein, 792 aa, Chlamydomonas sp.
ECSIKPVCRSRLHQNVFGVQFVMENGIGESSSLVHEADQHDDVAELVDYEGEEDGECAPGRAICVVKMKLSTFIPHDWLRNKIDTLVLDMNKLLGEGYIFANFHIARLFENGIAVPPVNRNFFYRCLIAVSTNKCKGSTLGEDFESSRLLFDLLREPGQSKVDIRGSVKNQIIADLSILMATMASNHLWTNLERRITTYLKWKYPQIAKRLRSDIVAALIKCPTKNLDVIFKMSPHTTKLPTKLPTSRLRSAKSAVALAKKRVGRKEPEGSPLRVRLTKLQERLEKLSEDWLSSKNLRVDADNAKLFFAREVAFCLRGVLPLPSGNTFASRAHMTLPLYHKILSETIEEKRKTKNEKHRTFSLLPYKSGFTLSHIPISKMAFFYMVNECHFDSCKADIASKNHQGIWERFANLKKVETVSRKFGYRIVTDGFAVSILMNKPTCLTCSMPADAFSTRAHEYVTTDEGGIVSFLDNVVVAAVDPGVTDIVTVTGLNGGTRSYSSAKYYRKGLIFKSQRQTDVWNLETADIVGGIIPDRDSSSSEQIGAYARYYMGAAPILLAHRASRGYRNLRFRRYCKKQKLIVEIADFVAPRKKSAKVLVGFGDWKGLGATPVSRRTCGPLQAIRFELRSRENVIMEDIDEFRTSQRCSCCENHLCNMVALTHHKKQDGTGWECTEGRKRIHKILHCKSSQSGAPRQQSGGMLHCGKTWDRDVNASRNILMLTLHQVFGRERPLAFRRDAPRSSSTSPPPDTDMGTQTVERFTKEATRNIFENLFNLLHPPTLPKSNDLQSG

SEQ ID NO: 1073 - protein, 249 aa, Chlamydomonas sp.
QQLHKLMPEENPTHDPKVQKSRFGEYFLVLSVAARDRRAERKPVNPDKVATASIDPGVRKTMVTYSPENEESFMLGQGQASDLVKLLLVHDKLQSRLDTEKTLRSKERMKIKKLMIRIRKTIFYLKKEFRDQTTNFLAARYDVLLVPQLETAKMTISAERELTTKVARQMLTLSHSVLFNRLKEKCEEYGTVFLHVLEHYTSQTCPMCGFLNKCGETYTCKNCQFTCDRDIVGAAGIFLKAVRTENPCS

SEQ ID NO: 1074 - protein, 751 aa, Chlamydomonas sp.
GRNTRAVLLDRLPHDFRLHSAEEQRRPHRGRSLARGRNLSRGNRWRRSCRRHSPRAELSRNQSPQDERDIPDLYNMKDTYWKDWLRIGVDGIFPDEESKISYEAVKDSIGDVIGNDDADYIKSYPIYFDQVLNYAGHTLSTVVSNNAWVPLIPRLARLTSTTLNKLNAPKTLDTSKIIRGYDVMQAIQQEVQNMEGWPESVQEYVNEVREMLSVPDGSRVYDNYGKDMDFPTMVRFNYWIQKRLEDMDARRIRLMPIFNVQRVHVRLDLKTLVNLFRHMFPNDQNIVELSKWEHVKNPDSFMLPQRPAQKKKKSCGPGEWEAYKSVLKQYDDDVKDVKATDEYRHAKGLYDTLVNARKTVAGSFFRKPPVKNGWVFDCSICTDGVSLSMQYSKTVQVLVSDLKKTCKKPRKEEGIKIAEKYDGSLKTILPVMGIVVLGVDPGRSNIATVTYLADDKNKTWTLTRGAFYHKSGIKKQTRQKELRFADMIPMWESLRENGAALSTSRTDKISAYLSNYAKFSDEWWRLALRRRESRDNLQRYIGKRKVKDSFWAGIKRCMMKELPDMKVCVAYGSAITKLKPTGPGEVAVPTGAMFASCKRIFKEDVSVTDEFKTTLMSWETGKEKERVYKIPSVCSADVKLRLGGERFGHTKSKTMPKVADCDHLGVRLYNKRKGAQEKHRRGGFATSLVDSQKSIERYPEVQGLRFSPETCIYSDRDRSSALTIARLHCMELMGLGRPLPFAHSSSVVVDE

SEQ ID NO: 1075 - protein, 793 aa, Chlamydomonas sp.
ECSREPVCRSRLHQNVFGVQFVMENGIGESSSLVHEADQHDDVAELVDYEGEEDEECAPGRAICVVKMKLSTFIPHDWLRKKIDTLVLDMNKLLGEGYIFANFHIARLFENGIAVPPVNRNFFYGCLIAVSTNKCKGSTLGKDFESSRLLFDLLREPGQSKVDIRGNVKNQIIADLSILMATMASNHLWTNLERRITTYLKWKYPQIAKRLRSDIVAPVIKCPTKNLDVIFKMSPHTTKLPTKLPTARRSAKSAVALAKKRVGRKEPEGSPLRVRLTKLQERLEKLSEAWLSSKNLRVDADNAKRFFARDVAFCLRRVLPLPSGNTFASRAHMTLPLYHKILSETIKEKRKTKNEKHRTFSLLPYKSGFTLSHIPISKMAFFYMVNECHFDSCKADVASKNHQGIWERFANLKKVKTVSRKFGYRIVTDGFAVSILMNKPTCLTCSMPADVFSTRAHEYVTTDEGGIVSFLDNVVVAAVDPGVTDIVTVTGLNGGTRSYSSAQYYRKGLIFKSQRQTDVWNLETADIVGGIIPDRDSSSSEQICAYARFYMGAAPILLAHRASRGYRNLRFRRYCKKQKLIVEIADFVAPREKSAKVLVGFGDWKGLGATPISRRTCGPLQAIRFELRSRENVIMEDIDEFRTSQRCSCCENHLCNMVALTHRKKQDGTGWECTEGRKRIHKILHCKSSQSGAPRQQSGGMLHCGKTWDRDVNASRNILMLTLHQVFGRERPLAFRRDAPRSSSTPPPPPPDTDMGTQTVERFTKEATRNIFENLFNLLHPPTLPKSNDLQSG

SEQ ID NO: 1076 - protein, 795 aa, Chlamydomonas sp.
LWKMATKPPTVAKLKELLKLAEVPYSSKSNKDDLVRLCEDNGLIARPPPEYKTVEKMCVVKCALKKAMSLDDEEFGKFREHVDQLVNVVSRMLRRSSLVLTFHITSLLEKGLEIPDLYNMKDTYWKDWLRIGVDGIFPDEESKISYEAVKDSIGDVIGNDDADYIKSYPIYFDQVLNYAGHTLSTVVSNNAWVPLIPRLARLTSTTLNKLNAPKTLDTSKIIRGYDVMQAIQQEVQNMEGWPESVQEYVNEVREMLSVPDGSRVYDNYGKDMDFPTMVRFNYWIQTRLEDMDARRIRLMPIFNVQRVHVRLDLKTLVNLFRHMFPNDQNIVELSKWEHVKNPDSFMLPQRPAQKKKKSCGPGEWEAYKSVLKQYDGDVKDIKATDEYRHAKGLYDTLVNARKTVAGSFFRKPPVKNGWVFDCSICTDGVSLSMQYSKTVQVLVSDLKKTCKNPRKEEGIKIAEKYDGSLKTILPDMGIVVLGVDPGRSNIATVTYLADDKNKTWTLTRGAFYHKSGIKKQTRQKELRFADMIPMWESLRENGAALSTSRTDKISAYLSNYAKFSEEWWRLALRRRESRDNLQRYIGKRKVKDSFWAGIKRCMMKELPDMKVCVAYGSAITKLKPTGPGEVAVPTGAMFASCKRIFKEDVSVTDEFKTTLMSWETGKEKERVYKIPSVCSADVKLRLGGERFGHTKSKTMPKVVDCDHLGVRLYNKRKGAQEKHRRGGFATSLVDSQKSIERYPEVRGLRFSPETCIYSDRDRSSALTIARLHCMELMGLGRPLPFAHSSSVVVDE

SEQ ID NO: 1077 - protein, 579 aa, Chlamydomonas sp.
VLTMKNSVREHVDQLVNVVSRMLRRSSLVLTFHITSLLEKGLDIPDLYNMKDTYWKDWLRIGVDGIFPDEESKISYEAVKDSIGDVIGNDDADYIKSYPIYFDQVLNYAGHTLSTVVSNNAWVPLIPRLARLTSTTLNKLNAPKTLDTSKIIRGYNVMQAIQQEVQNMEGWPESVQEYVNEVREMLSVPDGSRVYDNYGKDMDFPTMVRFNYWIQTRLEDMDARRIRLMPIFNVQRVHVRLDLKTLVNLFRHMFPNDQNIVELSKWEHVKNPDSFMLPQRPAQKKKKSCGPGEWEAYKSVLKQYDDDVKDIKATDEYRHAKGLYDTLVNARKTVAGSFFRKPPVKNGWVFDCSICTDGVSLSMQYSKTVQVLVSDLKKTCKKPRKEEGIKIAEKYDGSLKTILPDMGIVVLGVDPRRSNIATVTYLADDKNKTWTLTRGAFYHKSGIKKQTRQKELRFADMIPMWESLRENGAALSTSRTDKISAYLSNYAKFSDEWWRLALRRRESRDNLQRYIGKRKVKDSFWAGIKRCMMKELPDMKVCVAYGSAITKLKPTGPEEVAVPTGAMFCIVVKRIQSET

SEQ ID NO: 1078 - protein, 643 aa, Chlamydomonas sp.
DISTKESQIRSMPCFATSQNRPGGRNAHYVLNIRMPCMATKASVKLARPPMPLVSPGPSSVDGRIMARSERSGLQATNVSLTQAASKATSLSRKKKPAVVKSFSTHVCPHTNNNPTCSDSNCSCKPIFLTNIPDASKSLKSRTSDQGSTSSAQDFYEYWDSSLQDLYRQLLWLPKTGSQGLVSSSLNGFARSTPARSSFSITKTEPLKTSLEKTSCPSFKYIVTDGTVEDATKSNAKPKLRTLKLKLNPTKAQKSMLAEFAGCSRFMYNKAVAARLGVGSTHKSVFRIRDRYVTNKVRGKGKMPNPYFKNRQWLLQCPKSVRQSAIKSALANIKACFSNLKAGNIKQFSAPFRRKKTELERGWVIEMDQKNVSKDGDKLFIFKEILGNMRYFGSKQLHKLMPEENPTHDPKVHKSRFGEYFLVLSVAARDRRAERKPVHPDKVATASIDPGVRKTMVTYSPENEESFMLGQGQASDLVKLLLVHDKLQSRLDTEKTLRSKERMKIKKHMIRIRKRIFYLKKEFRDQTTNFLAARYDVLLVPQLETAKMTISAERELTTKVARQMLTLSHSVLFNRLKEKCEEYGTVFLHVLEHYTSQTCPMCGFLNKCGETYTCKNCQFTCDRDIVGAAGIFLKAVRTENPCS

SEQ ID NO: 1079 - protein, 242 aa, Chlamydomonas sp.
YEQHVRPAGPCQSLSQSAPNPPTTQSQQRLPIYAILSFGKQKTIEKVCDVIAPRAQTTVVGFGNWSNQGYGISRSCSGPIKEIRRCLSRRKNVLFKNVDERNTSCKCHGCFQRLVNMKADSVVWRGVCKESPIDGSITFEKQKMVVKNVKVHKVLHCRDSVKSASSNVRCGATWYRDVNAAKNLLLLLTTWMDGRERPKAFCVPSPPPKTTVSIEASVSAKPTDPPGFVSSLPCYPLGQLKC

SEQ ID NO: 1080 - protein, 327 aa, Chlamydomonas sp.
CPKSVRQSAIKAALANIKACFSNLKAGNIKQFSAPFRRKKTELERGWAIEMDQKNVSKDGDKLFIFKDILGNMRYFGSKQLHKLMPEENPTHDPKVHKSRFGEYFLVLSVAARDRRAERKPVHPDKVATASIDPGVRKTMVTYSPENEESFMLGQGQASDLVKLLLVHDKLLSRLDTEKTLRSKERMKIIMQMIRIRKIIFYLKKEFRDQTTNFLAARYDVLLVPQLETAKMTISAERELTTKVARQMLTLSHSVLFNRLKEKCEEYGTVFLHVLEHYTSQTCPMCSFLNKCGETYTCKNCQFTCDRDIVGAAGIFLKAVRTENPCS

SEQ ID NO: 1081 - protein, 428 aa, Chlamydomonas sp.
KSVLKLYDDDVKDIKATDEYRHAKGLYDTLVNARKTVAGSFFRKPPVKNGWVFDCSICTDGVSLSMQYSKTVQVLVSDLKKTCKNPRKEEGIKIAEKYDGSLKTILPDMGIVVLGVDPGRSNIATVTYLADDKNKTWTLTRGAFYHKSGIKKQTRQKELRFADMIPMWESLRENGAALSTSRTDKISAYLSNYAKFSEEWWRLALRRRESRDNLQRYIGKRKVKDSFWAGIKRCMMKELPDMKVCVAYGSAITKLKPTGPGEVAVPTGAMFASCKRIFKEDVSVTDEFKTTLMSWETGKEKGRVYKIPSACSADVKLRLGGERFGHTKSKTMPKVADCDHLGVRLYNKRKGAQEKHRRGGFAISLVDSQKSIERYPEVRGLRFSPETCICSDRDRSSALTIARLHCMELMGLGRPLPFAHSSSVVVDE

SEQ ID NO: 1082 - protein, 638 aa, Chlamydomonas sp.
ECSREPVCRSRLHQNVFGVQFVMENGIGESSSLVHEADQHDDVAELVDYEGEEDGECAPGRAICVVKMKLSTFIPHDWLRNKIDTLVLDMNKLLGEGYIFANFHIARLFENGIAVPPVNRNFFYRCLIAVSTNKCKGSTLGEDVESSRLLFDLLREPGQSKVDIRGRVKNQIIADLSILMATMASNHLWTNLERRITTYLKWKYPQIAKRLRSDIVAALIKCPTKNLDVIFKMSPHTTKLPTKLPTSRLRSAKSAVALAKKRVGRKEPEGSPLRVRLTKLQERLEKLSEAWLSSKNLRVDADNAKRFFAREVAFCLRGVLPLPSGNTFASRAHMTLPLYHKILSETIEEKRKTKNEKHRTFSLLPYKSGFTLSHIPISKMAFFYMVNECHFDSCKADVASKNHQGIWERFANLKKVETVSRKFGYRIVTDGFAVSILMNKPTCLTCSMPADAFSTRAHEYVTTDEGGIVSFLDNVVVAAVDPGVTDIVTVTGLNGGTRSYSSAQYYRKGLIFKSQRQTDVWNLETADIVGGIIPDRDSSSSEQIGAYARFYMGAAPILLAHRASRGYRNLRFRRYCKKQKLIVEIADFVAPRKKSAKVLVGFGDWKGLGATPISRRTCGPLQAIRFELRSRENVIMEE

SEQ ID NO: 1083 - protein, 803 aa, Chlamydomonas sp.
PRMEHVCDVCIKSSVMYKLCKMATKPPTVAKLKELLKLAEVAYSSKDKKDDIVRLCEDNGLIARPPPEYKTVEKMCVVKCALKKAMSLDDEEFGKFREHVDQLVNVVSRMLRRSSLVLTFHVTRLMEGDLPIPNMYDMKDTYWKDWLRIGVDGVFPDEESRISYESVKDVIGKVLGSDDPDYINSYPIYFDQVLNYAGHTLSTVVSNNAWVPLVPRLTRLTKATLNALGAPKTIRVYDVMRVIQQEIQEMESWPESVQEYVREVRVRLKVPDGSRLYDDYGKDMDFPTMVRFNYWMQTRLEAIGARRIRLMPIFNVQRSHVRLDMKTLVNLFRHVFPKDPNIVELSKWKDVKDPDRFMLPLKPAVKKKKSCGPGEWEAYKLAQQKYDADVNDIKDTDEYRHAKGRYDTLVNARKTVAGSFFKKPPVKTGWVFDCSICTDGVSLSMQYSKTVQVRVSDLKKTSKRSRDDEGMSVSEQYDHKLKTTLPDMGIVVLGVDPGRSNIATVTYLADDKSKTWKLTRGAFYHKSGIKKQKKQQEKRFSDMIPRWESLRENGAALSTSRTDDISAYLKNYDTFSDEWWRMALLRRESRDNFQRYIGKRKAMDSFWAGIKRNMKLDHPDLRVRVAYGSAITTLKATGPGEVAVPTGSMFASCKRLFKEEVHVTDEFKTTLMSWETGAKKECVYKIPSVQITTEGQIRLGYELLGHTPLKETPKVSYRDQLAVRVYCTRKQIQEKHRRGGLAPSLVDNNSIKRYPEVRGLRFSPETSTYSDRDRSSALTIARLHCMELLGQGRPLPFCRDACC

SEQ ID NO: 1084 - protein, 459 aa, Chlamydomonas sp.
TCLCTTRYCRTIEEKLKTKNEKHRTFSLLPYKSGFTLSHIPISKMAFFYMVNECHFDSCKADVASKNHQGIWERFANLKKVETVSRKFGYRIVTDGFAVSILMNKPTCLTCSMPADAFSTRAHEYVTTDEGGIVSFLDNVVVAAVDPGVTDIVTVTGLNGGTRSYSSAQYYRKGLIFKSQRQTDVWNLETADIVGGIIPDRDSSSSEQIGAYARFYMGAAPILLAHRASRGYRNLRFRRYCKKQKLIVEIADFVAPRKKSAKVLVGFGDWKGLGATPISRRTCGPLQAICFELRSRENVIMEDIDEFRTSQRCSCCENHLCNMVALTHRKKQDGTGWECTEGRKRIHKILHCKSSQSGAPRQQSGGMLHCGKTWNRDVNASRNILMLTLHQVFGRERPLAFRRDAPRSSSTTPPPPPDTDMGTQTVERFTKEATRNIFENLFNLLHPPTLPKSNDLQSG

SEQ ID NO: 1085 - protein, 579 aa, Chlamydomonas sp.
NADEATRSERSGLQATNVSLTQAASKATSLSRKNNPAVVKSFSTHVCPHTNNNPTCSDSNCSCKPIFLTNIPDASKSRTSDQGSTSSALDFYEYWDSSRQDMYRQLLWLPKTGTQGLVSSSFNGFAHSTPTRSSFSITKTEPLKTSLEKTSCPSFKYIVTDGTVEDATKSNAKPKLRTLKLKLNPTKAQKSMLAEFAGCSRFMYNKAVAARLGVGSTHKSVFRIRDRYVTNKVRGEGKMPNPYFKNRQWLLQCPKSVRQSAIKSALANIKACFSNLKAGNIKQFSAPFRRKKTELERGWVIEMDQKNVSKDGDKLFIFKEILGNMRYFGSKQLHKLMPEENPTHDPKVQKSRFGEYFLVLSVAARDRRAERKPVNPDKVATASIDPGVRKTMVTYSPENEESFMLGQGQASDLVKLLLVHDKLQSRLDTEKTLRSKERMKIKKLMIRIRKTIFYLKKEFRDQTTNFLAARYDVLLVPQLETAKMTISAERELTTKVARQMLTLSHSVLFNRLKEKCEEYGTVFLHVLEHYTSQTCPMCGFLNKCGETYTCKNCQFTCDRDIVGAAGIFLKAVRTENPCS

SEQ ID NO: 1086 - protein, 220 aa, Chlamydomonas sp.
RLEPETADIVGGIIPDRDFRVLEQMVRRQILHGCRPVLLAHRASRGYRNLRFRRYCKKQKLIVEIADFVAPREKSAKVLVGFGDWKGLGSTPISRRTCGPLQAIRFELRSRENVIMEDIDEFRTSQRCSCCENHLCNMVALTHRKKQDGTGWECTEGRKRIHKILHCKSSQSGAPRQQSGGMLHCGKTWDRDVNASRNILMLTLHQVFGREVLSRFAERD

SEQ ID NO: 1087 - protein, 801 aa, Chlamydomonas sp.
PRMEHVCDVCIKSSVMYKLCKMATKPPTVAKLKELLKLAEVAYSSKDKKDDIVRLCEDNGLIARPPPEYKTVEKMCVVKCALKKAMSLDDEEFGKFREHVDQLVNVVSRMLRRSSLVLTFHVTRLMEGDLPIPNMYDMKDTYWKDWLRIGVDGVFPDEESIISYESVKDVIGKVLGSDDPDYINSYPIYFDQVLNYAGHTLSTVVSNNAWVPLVPRLTRLTKATLNALGAPKTIRVYDVMRVIQQEIQEMESWPESVQEYVREVRVRLKVPDGSRFYDDYGKDMDFPTMVRFNYWMQTRLEAIGARRIRLMPIFNVQRAHVRLDMKTLVNLFRHVFPKDPNIVELSKWKDVKDPDRFMLPLKPAVKKKKSCGPGEWEAYKLAQQKYDADVNDIKDTDEYRHAKGRYDTLVNARKTVAGSFFKKPPVKTGWVFDCSICTDGVSLSMQYSKTVQVRVSDLKKTSKRSRDDEGMSVSEQYDHKLKTTLPDMGIVVLGVDPGRSNIATVTYLADDKSKTWKLTRGAFYHKSGIKKQKKQQEKRFSDMIPRWESLRENGAALSTSRTDDISAYLKNYDTFSDEWWRMALLRRESRDNFQRYIGKRKAMDSFWAGIKRNMKLDHPDLRVRVAYGSAITTLKATGPGEVAVPTGSMFASCKRLFKEEVHVTDEFKTTLMSWETGAKKECVYKIPSVQITTEGQIRLGYELLGHTPLKETPKVSYRDQLAVRVYCTRKQIQEKHRRGGLAPSLVDNNSIKRYPEVRGLRFSPETSTYSDRDRSSALTIARLHCMELLGQGRPLPFCRDA

SEQ ID NO: 1088 - protein, 813 aa, Chlamydomonas sp.
PRMEHVCDVCIKSSVMYKLCKMATKPPTVAKLKELLKLAEVAYSSKDKKDDIVRLCEDNGLIARPPPEYKTVEKMCVVKCALEKAMSLDDEEFGKFREHVDQLVNVVSRMLRRSSLVLTFHITSLLEKGLDIPDLYNMKDTYWKDWLRIGVDGIFPDEESKISYEAVKDSIGDVIGNDDADYIKSYPIYFDQVLNYAGHTLSTVVSNNAWVPLIPRLARLTSTTLNKLNAPKTLDTSKIIRGYDVMQAIQQEVQNMEGWPESVQEYVNEVREMLSVPDGSRVYDNYGKDMDFPTMVRFNYWIQTRLEDMDARRIRLMPIFNVQRVHVRLDLKTLVNLFRHMFPNDQNIVELSKWEHVKNPESFMLPQRPAQKKKKSCGPGEWEAYKSVLKQYDDDVKDIKATDEYRHAKGLYDTLVNARKTVAGSFFRKPPVKNGWVFDCSICTDGVSLSMQYSKTVQVLVSDLKKTCKKPRKEEGIKIAEKYDGSLKTILPDMGIVVLGVDPGRSNIATVTYLADDKNKTWTLTRGEFYHKSGIKKQTRQKELRFADMIPMWESLRENGAALSTSRTDKISAYLSNYAKFSDEWWRLALRRRESRDNLQRYIGKRKVKDSFWAGIKRCMMKELPDMKVCVAYGSAITKLKPTGPGEVAVPTGTMFASCKRIFKEDVSVTDEFKTTLMSWETGKEKERVYKIPSVCSADVKLRLGGERFGHTKSKTMPKVADCDHLGVRLYNKRKGAQEKHRRGGFATSLVDSQKSIERYPEVRGLRFSPETCIYSDRDRSSALTIARLHCMELMGLGRPLPFAHSSSVVVDE

SEQ ID NO: 1089 - protein, 605 aa, Chlamydomonas sp.
RMGSFDTTSDQTHFHHLKKLNAPKTLDTSKIIRGYDVMRAIQQEVQNMEGWPESVQEYVNEVWEMLSVPDGSRVYDNYGKDMDFPTMVRFNYWIQTRLEDMDARRIRLMPIFNVQRVHVRLDLKTLVNLFRHMFPNDQNIVELSKWEHVKNPDSFMLPQRPAQKKKKSCGPGEWEAYKSVLKQYDDDVKDIKATDVYRHAKGLYDTLVNARKTVAGSFFRKPPVKNGWVFDSSICTDGVSLSMQYSKTVHVLVSDLKKTCKKPRKEEGIKIAEKYDGSLKTILPDMGIVVLGVDPGRSNIATVTYLADDKNKTWTLTRGAFYHKSGIKKQTRQKELRFSDMIPMWESLRENGAALSTSRTDKISVYLSNYANFSDEWWRLALRRRESRDNLQRYIGKRKVKDSFWAGIKRCMMKELPDMKVCVAYGSAITKLKPTGPGEVAVPTGAMFASCKRIFKEDVSVTDEFKTTLMSWETGKEKERVYKIPSVCSADVKLRLGGERFGHTKSKTMPKVADCDHLGVRLYNKRKGAQEKHRRGGFATSLVDSQKSIERYQEVRGLRFSPETCIYSDRDRSSALTIARLHCMELMGLGRPLPFAHSSSVVVDE

SEQ ID NO: 1090 - protein, 615 aa, Chlamydomonas sp.
QCIRNLHVLNIRMPCMATNASVKLARSPMPVVSPGPSSVDGRIMARSGLQATNVSLTQAASKATSSSRKKKPAVVKSFSTHVCPHTNNNPTCSDSNCSCKPIFLTNIPDASKSRTSDQGSTSSSLDFYEYWDSSRQDLYRQLLWLPKTGTQGLVSSSFNGFAHSTPTRSSFSITKTEPLKTSLEKTSCPSFKYIVTDGTVEDATKSNAKPKLRTLKLKLNPTKAQKSMLAEFAGCSQFMYNKAVAARLGVGSTHKSVFRIRDRYVTNKVRGKGKMPNPYFKNRQWLLQCPKSVRQSAIKSALANIKACFSNLKAGNIKQFSAPFRRKKTELERGWVIEMDQKNVSKDGDKLFIFKEILGNMRYFGSKQLHKLMPEENPTHDPKVQKSRFGEYFLVLSVAARDRRAERKPVNPDKVATASIDPGVRKTMVTYSPENEESFMLGQGQASDLVKLLLVHDKLQSRLDTEKTLRSKERMKIKKLMIRIRKTIFYLKKEFRDQTTNFLAARYDVLLVPQLETAKMTISAERELTTKVARQMLTLSHSVLFNRLKEKCEEYGTVFLHVLEHYTSQTCPMCGFLNKCGETYTCKNCQFTCDRDIVGAAGIFLKAVRTENPCS

SEQ ID NO: 1091 - protein, 243 aa, Chlamydomonas sp.
MPEENPTHDPKVQKSRFGEYFLVLSVAARDRRAERKPVHPDKVATASIDPGVRKTMVTYSPENEESFMLGQGQASDLVKLLLVHDKLQSRLDTEKTLRSKERMKIKKHMIRIRKRIFYLKKEFRDRTTNFLAARYDVLLVPQLETAKMTIRAERQLTTKVARQMLTLSHSVLFNRLEEKCAEYGTVFLHVLEHYTSQTCPMCGFLNKCGETYTCKNCQFTCDRDIVGAAGIFLKAVRTENPCS

SEQ ID NO: 1092 - protein, 349 aa, Chlamydomonas sp.
HVMPADAFSTRAHEYVTTDEGGIVSFLDNVVVAAVDPGVTDIVTITGLNGGTRSYSSAQYYRKGLIFKSQRQTDVWNLETADIVGGIIPDRDSSSSEQIGAYARFYMGAAPILLAHRTSRGYRNLRFRRYCKKQKLIVEIADFVAPREKSAMVLVGFGDWKGLGAAPISRRTCGPLQAIRFELRSQENVIMEDIDEFRTSQRCSCCENQLCNMVALTHRKKQDGTGWECTEGRKRIHKIIHCKSSQSGAPRQQSGGMLHCGKTWDRDVNASRNILMLTLHQVFGRERPLAFRRDTPRSSSTTPPPPPDTDMGTQTVERFTKEATRNIFENLFNLLHPPTLPKSNDLQSG

SEQ ID NO: 1093 - protein, 251 aa, Chlamydomonas sp.
GHSIPSPNTSNMVDLQDHVRAYLKALPILLQHRANKGYRSMRFFRYVGKQKTIEKVCDVIAPRAQTTVVGFGNWSNQGYGISRSCSGPIKEIRRCLSRCKNVLFKNVDERNTFCKCHGCFQRLVNMKADSVVWRGVCKESPIDGSITVEKQKMVVKNVKVHKVLHCRDSVKSASSNVRCGATWNRDVNAAKNLLLLLTTWMDGRERPEAFCVPSPPPKTTVSIEASVSAKPTDPPGFVSSLPCYPLGQLKC

SEQ ID NO: 1094 - protein, 630 aa, Chlamydomonas sp.
ECSREPVCRSRLHQNVFGVQFVMEHGVVLVHEADQHDDVAELVDYEGDEDEERAPGRAICVVKMKLSTFIPHDWLRRKIDTLVLDMNKLLGEGYIFANFHIARLFENGIAVPPVNRNFFYRCLLAVSTNKCNGSTLGEDFESIRLLFDLLREPGQSKVDIRGNVKNQIIADLSILMATMASNHLWTNLERRITTYLKWKYPQIAKLLRSDIVAAVIKCPTKNLDVIFKMSPHVAKLPTKLPTARLCLAKSAVALAKKRVGRKEPEVSPLRVRLTKLQARFEKLSEAWLSSKNLRVDEDNAKRFFARDVAFCFRGVLPLPSGNTFASRAHMTLPLYHKILSETIEERKTKNEKLRTFSLLPYKSRFTLSHIPISKMAFFYMVNECHFDSCKADVASKNHQGIWERFANLKKVETVSRKFGYRIVTDGFAVSILMNKPTCLTCSMPADAFSTRAHEYVTTDEGGIVSFRDNVVVAAVDPGVTDIVTVTGLDGGTRSYSSAQYYRKGLIFKSQRQTDVWNLETADIVGDIIPDRDSSRSEQIGAYARFYMGAAPIILAHRASRGYRNLRFRRYCKKQKLIVEIADFVATREKSAKVLVGFGDWKGLGATPISRRTCGPLQAIRFELRYGDTDG

SEQ ID NO: 1095 - protein, 688 aa, Chlamydomonas sp.
GNVGAILYHQKKKNTHPLLMGVVQDKGDDIINISVVKKTLNSLCMDVSRHQISSRIQSMVLLINHAVAEAYLFANFHITRCLDDGDFDVKQLPHLDRNFYYRCLLAVSTSNVRKDTLGQSFNDTMVAFDALRPAGYVKVDVRPWEQVIADVSIQMATMACNSVWANVDRVVIKYLRLKHPSLKKHFKKIVKAVVQYPESKIDTIIPEGLVHAIHVKEVVSHLRALFPLPRGKQFNTRAHLTMRLFHHVLTELGEVGRVDPKDKKTKKSHPRLFSILPRKNGFTIPYVPISSMTFMKLLSMGDSPLESVSGDGRYENHTMLWRKYFNVQGLETKRSRFDNRILSDGKGVSVQMKQKGIEEVVEEGENAGYPKDANIVECKDAVGALRVGVDPGMTDIVTVASSAGRIESFSSARFSEVAGYNTSKRRTYKWNDETQDLVKSIPSPNTSNMVDLQDHVRAYLKALPILLQHRANKGYRSMRFFRYVGKQKTIEKVCDVIAPRAQTTVVGFGNWSNQGYGISRSCSGPIKEIRRCLSRRKNVLFKNVDERNTSCKCHGCFQRLVNMKADSVVWRGVCKESPIDGSITVEKQKMVVKNVKVHKVLHCRDSVKSASSNVRCGATWNRDVNAAKNLLLLLTTWMDGRERPEAFCVPSPPPKTTVSIEASVSAKPTDPPGFVSSLPCYPLGQLKC

SEQ ID NO: 1096 - protein, 686 aa, Chlamydomonas sp.
METIVNKEPPDKRTRPDRAAKIKDRKNGEENVVKCTLSRIIADKDNKDVITKVIKERVDSVSKRTYLAGVAVNRILKEVFEGVPDAQLHTVSVPSVDQNFIRQLMVGSRQAHMETRDATVERFFHNNYWFREKIEGREVIVKKKKQYVGAIARYDGDRNLYSHASKKYLTNFNNHYRVHLSTWIKKFVYSKENRILAKEFKDEHGIDETVFHRYLLYDIHSWGVKEDLIAIHSLLPERTKMLLKIQHSIIGQDEINRQWLKSVSNSAKMIRYNVFINRYLEATEDEGYAKLVNIAPIPTVKHSFITIDTDGLLGVLKDVGLVESLEKTLTNKEHWESVFDVENIRSTGKGVFTCTIDTDGVMACTHFLRAEKKKISIKDDGTAIKKQTKTLREFSESDPNVVVVANDPGRCNIAFLTWKKNKVEEKDKGGRKRKRHCEFGSKRLTRERYYVESGVFKSRGPTKKWLSNIQDCLDDLKDNSPKRTSLESFDAYVTVMVNHWDSRWGEMSKSRWGAQRLRLYGGKKRVLARFFNEVQADVGERKTIVIAYGSSKFAPGGKGELSVPTTSAFNAFRDRFKGRVAVIDEFRTTKIWHKDSTTVLQSVQSEKKGRTVRGLLWCSSTMENSKLFVNRDLNAAINIHNCFTMYPTRPGILARPKKYCKLEVVVGRTIDYKLTGSLQNAVSSEV

SEQ ID NO: 1097 - protein, 615 aa, Chlamydomonas sp.
QCIRNLHVLNIRMPCMATNASVKLARSPMPVVSPGPSSVDGRIMARSGLQATNVSLTQAASQATSSSRKKKPAVVKSFSTHVCPHTNNNPTCSDSNCSCKPIFLTNIPDASKSRTSDQGSTSSSLDFYEYWDSSRQDLYRQLLWLPKTGTQGLVSSSFNGFAHSTPTRSSFSITKTEPLKTSLEKTSCPSFKYIVTDGTVEDATKSNAKPKLRTLKLKLNPTKAQKSMLAEFAGCSRFMYNKAVAARLGVGSTHKSVFRIRDRYVTNKVRGKGKMPNPYFKNRQWLLQCPKSVRQSAIKSALANIKACFSNLKAGNIKQFSAPFRRKKTELERGWVIEMDQKNVSKDGDKLFIFKEILGNMRYFGSKQLHKLMPEENPTHDPKVQKSRFGEYFLVFSVAARDRRAERKPVNPDKVATASIDPGVRKTMVTYSPENEESFMLGQGQASDLVKLLLVHDKLQSRLDTEKTLRSKERMKIKKLMIRIRKTIFYLKKEFRDQTTNFLAARYDVLLVPQLETAKMTISAERELTTKVARQMLTLSHSVLFNRLKEKCEEYGTVFLHVLEHYTSQTCPMCGFLNKCGETYTCKNCQFTCDRDIVGAAGIFLKAVRTENPCS

SEQ ID NO: 1098 - protein, 630 aa, Chlamydomonas sp.
KKLRFTGGTYLAGVAVNRILKEVFEGVPDAQLHTVSVPSVDQNFIRQLMVGSRQAHMETRDATVERFFHNNYWFREKIEGREVIVKKKKQYVGAIARYDGDRNLYSHASKKYLTNFNNHYRVHLSTWIKKFVYSKENRILAKEFKDEHGIDETVFHRYLLYDIHSWGVKEDLIAIHSLLPERTKMLLKIQHSIIGRDEINRQWLKSVSNSAKMIRYNVFINRYLEATEDEGYAKLVNIAPIPTVKHSFITIDTDGLLGVLKDVGLVESLEKTLTNKEHWESVFDVENIRSTGKGVFTCTIDTDGVMACTHFLRAEKKKISIKDDGTAIKKQTKTLREFSESDPNVVVVANDPGRCNIAFLTWKKNKVEEKDNGGRKRKRHCEFGSKRLTRERYYVESGVFKSRGPTKKWLSNIQDCLDDLKDNSPKRTSLESFDAYVTVMVNHWDSRWGEMSKSRWGAQRLRLYGGKKRVLARFFNEVQADVGERKTIVIAYGSSKFAPGGKGELSVPTTSAFNAFRDRFKGRVAVIDEFRTTKIWHKDSTTVLQSVQSEKKGSTVRGLLWCSSTMENSKLFVNRDLNAAINIHNCFTMYPTRPGILARPKKYCKLEVVVGRTIDYKLTGSLQNAVSSEV

SEQ ID NO: 1099 - protein, 680 aa, Chlamydomonas sp.
VPPVNRNFFYRCIIAVSTNKCKGSTLGEDFESSRLLFDLLREPGQSKVDIRGNVKNQIIADLSILMATMASNHLWTNLERRITTYLKWKYPQIAKRLRSDIVAALIKCPTKNLDVIFKMSPHTTKLPTKLPTSRLRSAKSAVALAKKRVGRKEPEGSPLRVRLTKLQERLEKLSEAWLSSKNLRVDADNAKRFFAREVAFCLRGVLPLPSGNTFASRAHMTLPLYHKILSETIEEKRKTKNEKHRTFSLLPYKSGFTLSHIPISKMAFFYMVNECHFDSCKADVASKNHQGIWERFANLKKVETVSRKFGYRIVTDGFAVSILMNKPTCLTCSMPADAFSTRAHEYVTTNEGGIVSFLDNVVVAAVDPGVTDIVTVTGLNGGTRSYSSAQYYRKGLIFKSQRQTDVWNLETADIVGGIIPDRDSSSSEQIGAYARFYMGAAPILLAHRASRGYRNLRFRRYCKKQKLIVEIADFVAPREKSAKVLVGFGDWKGLGAKPISRRTCGPLQAIRFELRSRENVIMEDIDEFRTSQRCSCCENHLCNMVALTHRKKQDGTGWECTEGRKRIHKILHCKSSQSGAPRQQSGGMLHCGKTWDRDVNASRNILMLTLHQVFGRERPLAFRRDAPRSSSTTPPPPPDTDMGTQTVERFTKEATRNIFENLFNLLHPPTLPKSNDLQSG

SEQ ID NO: 1100 - protein, 820 aa, Chlamydomonas sp.
NHYGLFLPRMEHVCDVCIKSSVMYKLCKMATKPPTVAKLKELLKLAEVAYSSKDKKDDIVRLCEDNGLIARPPPEYKTVEKMCVVKCALKKAMSLDDEEFGKFREHVDQLVNVVSRMLRRSSLVLTFHITSLLEKGLDIPDLYNMKDTYWKDWLRIGVDGIFPDEESKISYEAVKDSIGDVIGNDDADYIKSYPIYFDQVLNYAGHTLSTVVSNNAWVPLIPRLARLTSTTLNKLNAPKTLDTSKIIRGYDVMQAIQQEVQNMEGWPESVQEYVNEVREMLSVPDGSRVYDNYGKDMDFPTMVRFNYWIQTRLEDMDARRIRLMPIFNVQRVHVRLDLKTLVNLFRHMFPNDQNIVELSKWEHVKNPESFMLPQRPAQKKKKSCGPGEWDAYKSVLKQYDDDVKDIKATDEYRHAKGLYDTLVNARKTVAGSFFRKPPVKNGWVFDCSICTDGVSLSMQYSKTVQVLVSDLKKTCKKPRKEEGIKIAEKYDGSLKTILPDMGIVVLGVDPGRSNIATVTYLADDKNKTWKLTRGAFYHKSGIKKQTRQKELRFADMIPMWESLRENGAALSTSRTDKISAYLSNYAKFSDEWWRLALRRRESRDNLQRYIGKRKVKDSFWAGIKRCMMKELPGMKVCVAYGSAITKLKPTGPGEVAVPTGAMFASCKRIFKEDVSVTDEFKTTLMSWETGKEKERVYKIPSVCSADVNLRLGGERFGHTKSKTMPKVADCDHLGVRLYNKRKGAQEKHRRGGFATSLVDSQKSIERYPEVRGLRFSPETCIYSDRDRSSALTIARLHCMELMGLGRPLPFAHSSSVVVDE

SEQ ID NO: 1101 - protein, 409 aa, Chlamydomonas sp.
RETLLCTRRGILSQGGSPFTIRKHFCVSGSHDPASVPQDIVGDHQRKTKNEKRKTSHILVVALQIWIHSVAHSDFENGLFLYGQRVPLRFMQGRRCFANLKKVETVSRKFGYRIVTDGFAVSILMNKPTCLTCSMPADSFSTRAHEYVTTDEGGIVSFRDNVVVAAVDPGVTDIVTVTGLDGGTRSYSSAQYYRKGLIFKSQRQTDVWNLETADIVGDIIPDRDSSRSEQIGAYARFYMGAAPILLAHRASRGYRNLRFRRYCKKQKLIVEIADFVAPREKSAKVLVGFGDWKGQSLGGLVALSKLFVSSFVAEETSSWRTSMSSEHLNDAAAVRTAFATWWHSLIVRSKTVLVGNVQKDASGFTRFSTAKAVKAERHANRAVVGSTAGRLGTAITLHYITLHYMLKST

SEQ ID NO: 1102 - protein, 424 aa, Chlamydomonas sp.
KLAQQKYDADVKDIKATDEYRHAKGRYDTLVNARKTVAGSFFKKPPVKTGWVFDCSICTDGVSLSMQYSKTVQVRVSDLKKTSKRSRDEEGMSVSEQYDHKLKTTLPDMGIVVLGVDPGRSNIATVTYLADDKSKTWKLTRGAFYHKSGIKKQKKQQEKRFSDMIPRWESLRENGAALSTSRKDDISAYLKNYATFSDEWWRMALRRRESRDNFQRYIGKRKAMDSFWAGIKRNMKLDHPNLRVRVAYGSAITKLKATGPGEVAVPTGSMFASCKRLFKEEVHVTDEFKTTLVSWETGAKKECVYKIPSVQITTEGQICLGYELLGHTPLKETPKVSYRDQLAVRVYCTRKKIQEKHRRGGLAPSLVDNKSIKRYPEVRGLRFSPETSTYSDRDRSSALTIARLHCMELLGQGRPLPFCRDACC

SEQ ID NO: 1103 - protein, 302 aa, Chlamydomonas sp.
GLDGGTRSYSSAQYYRKGLIFKSQRQTDVWNLETADIVGDIIPDRDSSRSEQIGAYARFYMGAAPILLAHRASRGYRNLRFRRYCKKQKLIVEIADFVAPMEKSAKVLVGFGDWKGLGAMPISRRTCGPLQAIRFELRSRGNVIMEDVDEFRTSQRCSCCENRLCNMVALTHRKKQDGTGWECTEGRKRIHKILHCKSSQSGAPRQQSGGRLHCGKTWDRDVNASRNILMLTLHQVFGRERPLAFRRDAPRSSSKTPPAPDTDMGTQTVERFTKEATRNIFENLFNLLHPPTLPKRNDLQSG

SEQ ID NO: 1104 - protein, 688 aa, Chlamydomonas sp.
GNVGAILYHQKKKNIHLLLMGVVQDKGDDDINISVVKKTLNSLCMDVSRHQISSRIQSMVLLINHAVAEAYLFANFHITRCLDDGDFDVKQIPHLDRNFYYRCLLAVSTSNVRKDTLGQSFNDTMVAFDALRPAGYVKVDVRPWGQVIADVSIQMATMACNSVWANVDRVVIKYLRLKHPSLKKHFKKIVKAVVQYPESKIDTIIPEGLVHVIHIKVVVSHLRALFPLPRGKQFNTRAHLTMRLIHHVLTELGEVGRVDPKDKKTKKSHPRLFSILPRKNGFTISYVPISSMTFMKLLSMGDSLLESVSGDGRYENHTMLWRKYFNVQGLETKRSRFDNRILSDGKGVSVQMKQKGKEEVVEEGENAGYPKDANIVECKDAVGALRVGVDPGMTDIVTVASSAGRIESFSSARFSEVAGYNTSKRRTYKWNDETQDLVKSIPSPNTSNMVDLQDHVRAYLKALAILLQHRANKGYRSMRFFRYVGKHKTIEKVCDVIAPRAQTTVVGFGNWSNQGYGISRSCSGPIKEIRRCLSRRKNVLFKNVDERNTSCKCHGCFHRLVNMKADSVVWRGVCKESPIDGSITVEKQKMVVKNVKVHKVLHCRDSVKSASSNVRCGATWNRDVNAAKNLLLLLTTWMDGRERPEAFCVPSPPPKTTVSIEASVSAKPTDPPGFVSSLPWYPLGQLKC

SEQ ID NO: 1105 - protein, 624 aa, Chlamydomonas sp.
VNLTVYKEFACTKYQNAMYGNQRFCKIGKASDALGVSRTVLRQWADNGTIRTIRTPGNQRLFDPSSIQGYLIEQEKNPAVVKSFSTHVCPHTNNKPTCSDSNCSCKPIFLTNIPDASKSLKSRTSDQGSTSSAQDFYEYWDSSRQDLYRQLLWLPKTGSQGLVSSSLNGFARSTPARSSFSITKTEPLKTSLEKTSCPSFKYIVADGTVEDATKSNAKPKLRTLKLKLNPTKAQKSMLAEFAGCSRFMYNKAVAARLGVGSTHKSVFRIRDRYVTNKVRGEGKMPNPYFKNRQWLLQCPKSVRQSAIKAALANIKACFSNLKAGNIKQFSAPFRRKKTELARGWAIEMDQKNVSKDGDKLFIFKDILGNMRYFGSKQLHKLMPEENPTHDPKVQKSRFGEYFLVLSVAARDRRAERKPVHPDKVATASIDPGVRKTMVTYSPENEESFMLGQGQASDLVKLLLVHDKLQSRLDTEKTLLSKERMKIKKQIIRIRKRIFYLKKEFRDQTTNFLAARYDVLLVPQLETAKMTISAERELTTKVARQMLTLSHSVLFNRLKEKCEEYRTVFLHVLEHYTSQTCPMCGFLNKCGETYTCKNCQFTCDRDIVGAAGIFLKAVRTENPCS

SEQ ID NO: 1106 - protein, 791 aa, Chlamydomonas sp.
KMATKSPTVAKLKELLKLAEVPYSSKSNKDDLVRLCEDNGLIARPPPEYKTVEKMCVVKCALKKAMSLDDEEFGKFREHVDQLVNVVSRMLRRSSLVLTFHITSLLEKGLDIPDLYNMKDTYWKDWLRIGVDGIFPDEESKISYEAVKDSIGDVIGNDDADYIKSYPIYFDQVLNYAGHTLSTVVSNNAWVPLIPRLARLTSTTLNKLNAPKTLDTSKIIRGYDVMQAIQQEVQNMEGWPESVQEYVNEVREMLSVPDGSRVYDNYGKDMDFPTMVRFNYWIQTRLEDMDARRIRLMPIFNVQRVHVRLDLKTLVNLFRHMFPNDQNIVELSKWEHVKNPESFMLPQRPAQKKKKSCGPGEWEAYKSVLKQYDDDVKDIKATDEYRHAKGLYDTLVNARKTVAGSFFRKPPVKNGWVFDCSICTDGVSLSMQYSKTVQVLVSDLKKTCKKPRKEEGIKIAEKYDGSLKTILPDMGIVVLGVDPGRSNIATVTYLADDKNKTWKLTRGAFYHKSGIKKQTRQKELRFADMIPMWESLRENGAALSTSRTDKISAYLSNYAKFSDEWWRLALRRRESRDNLQRYIGKRKVKDSFWAGIKRCMMKELPDMKVCVAYGSAITKLKPTGPGEVAVPTGAMFASCKRIFKEDVSVTDEFKTTLMSWETGKEKERVYKIPSVCSADVNLRLGGERFGHTKSKTMPKVADCDHLGVRLYNKRKGAQEKHRRGGFATSLVDSQKSIERYPEVRGLRFSPETCIYSDRDRSSALTIARLHCMELMGLGRPSSIFPQQLCCC

SEQ ID NO: 1107 - protein, 608 aa, Chlamydomonas sp.
VLNIRMPCMATNASVKLARSPMPVVSPGPSSVDGRIMARSGLQATNVSLTQAASKATSSSRKKKPAVVKSFSTHVCPHTNNNPTCSDSNCSCKPIFLTNIPDASKSRTSDQGSTSSSLDFYEYWDSSRQDLYRQLLWLPKTGTQGLVSSSFNGFAHSTPTRSSFSITKTEPLKTSLEKTSCPSFKYIVTDGTVEDATKSNAKPKLRTLKLKLNPTKAQKSMLAEFAGCSRFMYNKAVAARLGVGSTHKSVFRIRDRYVTNKVRGKGKMPNPYFKNRQWLLQCPKSVRQSAIKSALANIKACFSNLKAGNIKQFSAPFRRKKTELERGWVIEMDQKNVSKDGDKLFIFKEILGNMRYFGSKQLHKLMPEENPTHDPKVQKSRFGEYFLVLSVAARDRRAERKPVNPDKVATASIDPGVRKTMVTYSPENEESFMLGQGQASDLVKLLLVHDKLQSRLDTEKTLRSKERMKIKKLMIRIRKTIFYLKKEFRDQTTNFLAARYDVLLVPQLETAKMTISAERELTTKVARQMLTLSHSVLFNRLKEKCEEYGTVFLHVLEHYTSQTCPMCGFLNKCGETYTCKNCQFTCDRDIVGAAGIFLKAVRTENPCS

SEQ ID NO: 1108 - protein, 812 aa, Chlamydomonas sp.
PRMEHVCDVCIKSSVMYKLCKMATKPPTVAKLKELLKLAEVAYSSKDKKDDIVRLCEDNDLIARPPPEYKTVEKMCVVKCALKKAMSLDDEEFGKFREHVDQLVNVVSRMLRRSSLVLTFHITSLLEKGLDIPDLYSMKDTYWKDWLRIGVDGIFPDEEKISYEAVKDSIGDVIGNDDADYIKSYPIYFDQVLNYAGHTLSTVVSNNAWVPLIPRLARLTSTTLNKLNAPKTLDTSKIIRGYDVMQAIQQEVQNMEGWPESVQEYVNEVREMLSVPDGSRVYDNYGKDMDFPTMVRFNYWIQTRLEDMDARRIRLMPIFNVQRVHVRLDLKTLVNLFRHMFPNDQNIVELSKWEHVKNPDSFMLPQRPAQKKKKSCGPGEWEAYKSVMKQYDDDVKDIKATDEYRHAKGLYDTLVNARKTVAGSFFRKPPVKNGWVFDCSICTDRVSLSMQYSKTVQVLVSDLKKTCKKPRKEEGIKIAEKYDGSLKTILPDMGIVVLGVDPGRSNIATVTYLADDKNKTWTLTRGEFYHKSGIKKQTRQKELRFADMIPMWESLRENGAALSTSRTDKISAYLSNYAKFSEEWWRLALRRRESRDNLQRYIGKRKVKDSFWAGIKRCMMKELPDMKVCVAYGSAITKLKPTGPGEVAVPTGAMFASCKRIFKEDVSVTDEFKTTLMSWETGKEKERVYKIPSVCSADVKLRLGGERFGHTKSKTMPKVADCDHLGVRLYNKRKGAQDKHRRGGFATSLVDSQKSIERYPEVRGLRFSPETCIYSDRDRSSALTIARLHCMELMGLGRPLPFAHSSSVVVDE

SEQ ID NO: 1109 - protein, 795 aa, Chlamydomonas sp.
LWKMASKPPTVAKLKELLKLAEVAYSSKDKKDDIVRLCEDNGLIARPPPEYKTVEKMCVVKCALKKAMSLDDEEFGKFREHVDQLVNVVSRMLRRSSLVLTFHITSLLEKGLDIPDLYNMKDTYWKDWLRTGVDGIFPDEESKISYEAVKDSIGDVIGNDDADYIKSYPIYFDQVLNYAGHTLSTVVSNNAWVPLIPRLARLTSTILNKLNAPKTLDTSKIIRGYEVMQAIQQEVQNMEGWPESVQEYVNEVREMLSVPDGSRVYDNYGKDMDFPTMVRFNYWIQTRLEDMDARRIRLMPIFNVQRVHVRLDLKTLVNLFRHMFPNDQNIVELSKWEHVKNPDSFMLSQRPAQKKKKSCGPGEWEAYKSVMKQYDDDVKDIKATDEYRHAKGLYDTLVNARKTVAGSFFRKPPVKNGWVFDCSICTDRVSLSMQYSKTVQVLVSDLKKTCKKPRKEEGIKIAEKYDGSLKTILPDMGIVVLGVDPGRSNIATVTYLADDKNKTWTLTRGAFYHKSGIKKQTRQKELRFADMIPMWESLRENGAALSTSRTDKISAYLSNYAKFSEEWWRLALRRRESRDNLQRYIGKRKVKDSFWAGIKRCMMKELPDMKVCVAYGSAITKLKPTGPGEVAVPTGAMFASCKRIFKEDVSVTDEFKTTLMSWETGKEKERVYKIPSVCSADVKLRLGGERFGHTKSKTMPKVADCDHLGVRLYNKRRGAQDKHRRGGFATSLVDSQKSIERYPEVRGLRFSPETCIYSDRDRSSALTIARLHCMELMGLGRPLPFAHSSSVVVDE

SEQ ID NO: 1110 - protein, 458 aa, Chlamydomonas sp.
PCLCTTRYCRRPSKKNEKLKTKNIAHSRCCLTNLDSLCRTFRFLKWPFSIWSTSATLIHARQTLLPKTIKEYGSASQNLKKVETVSRKFGYRIVTDGFAVSILMNKPTCLTCSMPAGAFSTRAHEYVTTDEGGIVSFLDNVVVAAVDPGVTDIVTVTGLNGGTRSYSSAKYYRKGLIFKSQRQTDVWNLETADIVGGIIPDRDSSSSEQIGAYARFYMGAAPILLAHRASRGYRNLRFRRYCKKQKLIVEIADFVAPRKKSAKVLVGFGDWKGLGATPISRRTCGPLQAIRFELRSRENVIMEDIDEFRTSQRCSCCENHLCNMVALTHRKKQDGTCWECTEGRKRIHKILHCKSSHSGAPRQQSGGMLHCGKTWDRDVNASRNILMLTLHQVFGRERPLAFRRDAPRSSSTTPPPDTDMGTQTVERFTKEATRNIFENLFNLLHPPTLPKSNDLQSG

SEQ ID NO: 1111 - protein, 802 aa, Chlamydomonas sp.
PRMEHVCDVCIKSSVMYKLCKMATKPPTVAKLKELLKLAEVAYSSKDKKDDLVRLCEDNGLIARPPPEYKTVEKMCVVKCALKKAMSLDDEEFGKFREHVDQLVNVVSRMLRRSSLVLTFHVTRLMEGDLPIPNMYDMKDTYWKDWLRIGVDGVFPDEESRISYEAVKDVIGKVLGSDDPDYINSYPIYFDQVLNYAGHTLSTVVSNNAWVPLVPRLTRLTKATLNALKAPKTIRVYDVMRVIQQEIQEMESWPESVQEYVRREVRVRLKVPDGSRLYDDYGKDMDFPTMVRFNYWMQTRLEDMDARRIRLMPIFNVQRAHVRLDMKTLVNLFRHVFPKDPNIVELSKWKDVKDPDRFMLPLKPAVKKKKSCGPGEWEAYKLAQQKYDADVNDIKDTDEYRHAKGRYDTLVNARKTVAGSFFKKPPVKTGWVFDCSICTDGVSLSMQYSKTVQVRVSDLKKTSKRSRDDEGMSVSEQYDHKLKTTLPDMGIVVLGVDPGRSNIATVTYLADDKSKTWKLTRGAFYHKSGIKKQKKQQEKRFSDMIPRWESLRENGAALSTSRTDDISAYLKNYDTFSDDWWRMALLRRESRDNFQRYIGKRKAMDSFWAGIKRNMKLDHPDLRVRVAYGSAITTLKATGPGEVAVPTGSMFASCKRLFKEEVHVTDEFKTTLMSWETGAKKECVYKIPSVQITTEGQIRLGYELLGHTPLKETPNVSYRDQLAVRVYCTRKQIQEKHRRGGLAPSLVDNKSIKRYPEVRGLRFSPETSTYSDRDRSSALTIARLHCMELLGQGRPLPFCRDA

SEQ ID NO: 1112 - protein, 802 aa, Chlamydomonas sp.
PRMEHVCDVCIKSSVMYKLCKMATKPPTVAKLKELLKLAEVAYSSKDKKDDIVRLCEDNGLIARPPPEYKTVEKMCVVKCALKKAMSLDDEEFGKFREHVDQLVNVVSRMLRRSSLVLTFHVTRLMEGDLPIPNMYDMKDTYWKDWLRIGVDGVFPDEESRISYEAVKDVIGKVLGSDDPDYINSYPIYFDQVLNYAGHTLSTVVSNNAWVPLVPRLTRLTKATLNALEAPKTIRVYDVMRVIQQEIQEMESWPESVQEYVREVRVRLKVPDGSRLYDDYGKDMDFPTMVRFNYWMQTRLEAIGARRIRLMPIFNVQRAHVRLDMKTLVNLFRHVFPKDPNIVELSKWKDVKDPDRFMLPLKPAFKKKKSCGPGGWEAYKLAQQKYDAGVNDIKDTDEYRHAKGRYDTLVNARKTVAGSFFKKPPVKTGWVFDCSICTDGVSLSMQYSKTVQVRVSDLKKTSKRSRDDEGMSSEQYDHKLKTTLPDMGIVVLGVDPGRSNIATVTYLADDNSKTWKLTRGAFYHKSGIKKQKKQQEKRFSDMIPRWESLRENGAALSTSRTDDISAYLKNYDTFSDEWWRMALLRRESRDNFQRYIGKRKAMDSFWAGIKRNMKLDHPDLRVRVAYGSAITTLKATGPGEVAVPTGSMFASCKRLFKEEVHVTDEFKTTLMSWETGAKKECVYKIPSVQITTEGQIRLGYELLGHTPLKETPKVSYRDQLAVRVYCTRKQIQEKHRRGGLAPSLVDNNSIKRYPEVRGLRFSPETSTYSDRDRSSALTIARLHCMELLGQGRPLPFCRDACC

SEQ ID NO: 1113 - protein, 347 aa, Chlamydomonas sp.
GGRGRKMPNPYFKNRQWLLQCPKSVRQSAIKSALANIKACFSNLKAGNIKQFSAPFRRKKTELERGWVIEMDQKNVSKDGDKLFIFKEILGNMRYFGSKQLHKLMPEENPTHDPKVHKSRFGEYFLVLSVAARDRRAERKPVNPDKVATASIDPGVRKTMVTYSPENEESFMLGQGQASDLVKLLLVHDKLQSRLDTEKTLRSKERMKIKKLMIRIRKTIFYLKKEFRDQTTNFLAARYDVLLVPQLETAKMTISAERELTTKVARQMLTLSHSVLFNRLKEKCEEYGTVFLHVLEHYTSQTCPMCGFLNKCGETYTCKNCQFTCDRDIVGAAGIFLKAVRTENPCS

SEQ ID NO: 1114 - protein, 248 aa, Chlamydomonas sp.
RVTDKISAYLSNYAKFSDEWWRLALRRRESRDNLQRYIGKRKVKDSFWAGIKRCMMKELPGMKVCVAYGSAITKLKPTGPGEVAVPTGAMFASCKRIFKEDVSVTDEFKTTLMSWETGKEKERVYKIPSVCSADVNLRLGGERFGHTKSKTMPKVADCDHLGVRLYNKRKGAQEKHRRGGFATSLVDSQKSIERYPEVRGLRFSPETCIYSDRDRSSALTIARLHCMELMGLGRPLPFAHSSSVVVDE

SEQ ID NO: 1115 - protein, 793 aa, Chlamydomonas sp.
KMATKPPTVAKLKELLKLAEVPYSSKSNKDDLVRLCEDNGLIARPPPEYKTVEKMCVVKCALKKAMSLDDEEFGKFREHVDQLVNVVSRMLRRSSLVLTFHITSLLEKGLDIPDLYNMKDTYWKDWLRIGVDGIFPDEESKISYEAVKDSIGDVIGNDDADYIKSYPIYFDQVLNYAGHTLSTVVSNNAWVPLIPRLARLTSTTLNKLNAPKTLDTSKIIRGYDVMQAIQQEVQNMEGWPESVQEYVNEVREMLSVPDGSRVYDNYGKDMDFPTMVRFNYWIQTRLEDMDARRIRLMPIFNVQRVHVRLDLKTLVNLFRHMFPNDQNIVELSKWEHVKNPDSFMLPQRPAQKKKKSCGPGEWEAYKSVLKKYDDDVKDIKATDEYRHAKGLYDTLVNARKTVAGSFFRKPPVKNGWVFDCSICTDGVSLSMQYSKTVQVLVSDLKKTCKKPRKEEGIKIAEKYDGSLKTILPDMGIVVLGVDPGRSNIATVTYLADDKNKTWTLTRGAFYHKSGIKKQTRQKELRFADMIPMWESLRENGAALSTSRTDKISAYLSNYAKFSDEWWRLALRRRESRDNLQRYIGKRKVKDSFWAGIKRCMMKELPDMKVCVAYGSAITKLKPTGPGEVAVPTGAMFASCKRIFKEDVSVTDEFKTTLMSWETGKEKERVYKIPSVCSADVKLRLGGERFGHTKSKTMPKVADCDHLGVRLYNKRKGAQEKHRRGGFATSLVDSQKSIERYPEVRGLRFSPETCIYSDRDRSSALTIARLHCMELMGLGRPLPFSHSSSVVVDE

SEQ ID NO: 1116 - protein, 307 aa, Chlamydomonas sp.
GCGRPLPTLRHDVLQQESVIIKKYRFEYMTVTCTFRRLRSLRKVCNIYNVSKSSLHRWVNADQVGKSKRLKRKRKELSMLLRSTISNNIAEIIPDRDSSSSEQIGAYARFYMGAAPILLAHRASRGYRNLRFRRYCKKQKLIVEIADFVAPRKKSAKVLVGFGDWKGLGATPISRRTCGPLQAIRFELRSRENVIMEDIDEFRTSQRCSCCENHLCNMVALTHRKKQDGTGWECTEGRKRIHKILHCKSSQSGAPRQQSGGMLHCGKTWDRDVNVPPTVMVSLCESTRHVPPTVMVSLCESTRHVPP

SEQ ID NO: 1117 - protein, 428 aa, Chlamydomonas sp.
ILYVHSDSAKMIRYNVFINRYLEATEDEGYAKLVNIAPIPTVKHSFITIDTDGLLGVLKDVGLVESLEKTLTKKEHWESVFDVENIRSTGKGVFTCTIDTDGVMACTHFLRAEKKKISIKDDGTAIKKQTKTLREFSESDPNVVVVANDPGRCNIAFLTWKKNKVEEKDKGGRKWKRHCEFGSKRLTRERYYVESGVFKSRGPTKKWLCNIQDCLDDLKDNSPKRTSLESFDAYVTVMVNHWDSRWGEMSKSRWGAQRLRIYGGKKRVLARFFNEVQADVGERKTIVIAYGSSKFAPGGKGELSVPTTSAFNAFRDRFKGRVAVIDEFRTTKIWHKDSTTVLQSVQSEKEGRTVRGLLWCSSTMENSKLFVNRDLNAAINIHNCFTMYPTRPGILARPKKYCKLEVVVGRTIDYKLTGSLQNAVSSEV

SEQ ID NO: 1118 - protein, 507 aa, Chlamydomonas sp.
AKLGSPRRTLGWTQITRNASLHAKWHSVSGGVLPLPSGNTFASRAHMTLPLYHKILSETIEEKRKTKNEKHRTFSLLPYKSGFTLSHIPISKMAFFYMVNECHFDSCKADVASKNHQGIWERFANLKKVETVSRKFGYRIVTDGFAVSILMNKPTCLTCSMPAGAFSTRAHEYVTTDEGGIVSFLDNVVVAAVDPGVTDIVTVTGLNGGTRSYSSAQYYRKGLIFKSQRQTDVWNLETADIVGGIIPDRDSSSSEQIGAYARFYMGAAPILLAHRASRGYRNLRFRRYCKKQKLIVEIADFVAPRKKSAKVLVGFGDWKGLGATPISRRTCGPLQAIRLELRSRENVIMEDIDEFRTSQRCSCCENHLCNMVALTHRKKQDGTGWECTEGRKRIHKILHCKSSQSGAPRQQSGGMLHCGKTWDRDVNASRNILMLTLHQVFGRERPLAFRRDAPRSSSTTPPPPPDTDMGTQTVERFTKEATRNIFENLFNLLHPPTLPKSNDLQSG

SEQ ID NO: 1119 - protein, 404 aa, Chlamydomonas sp.
VPLRFMQGRRCFQKPSSKMERFANLKIVETVSRKFGYRIVTDGFAVSILMNKPTCLTCSMPGDALSTRAHEYMTTDEGGILSFRDNVVVAAVDPGVTDIVTVTGLDGSTNSYSSAQYYRKGLIFKSQRQTDVWNLKTADIFGDVIPDIDSPMSQHIGAYARFYMGAAPILLAHRASRGYRNLRFRRYCKKQKLIVEIADFVAPREKSTKVLVGFGDWKGLGATPISRRTCGPLQAIRFELRSRENVIMEDVDEFRTSQRCSCCETRLCNMVALTHRKKQDGTWECTEGRKRIHKILHCKSSQSGAPRQQSGGRLHCGKTWDRDVIASKNILMLTLHQVFGRERPLAFRRDAPRGSPKKTPIPDTDMGTQTVERFTTEATRNIFENLFNLLHPPTLPKRNDLQFG

SEQ ID NO: 1120 - protein, 686 aa, Chlamydomonas sp.
METIVNKEPPDKRTRPDRAAKIKDRKNGEENVVKCTLSRIIADKDNKDVITKVIKERVDSVSKRTYLAGVAVNRILKEVFEGVPDAKLHTVSVPSVDQNFIRQLMVGSRQAHMETRDATVERFFHNNYWFREKIEGREVIVKKKKQYVGAIARYDGDRNLYSHASKKYLTNFNNHYRVHLSTWIKKFVYSKENRILAKEFKDEHGIDETVFHRYLLYDIHSWGVKEDLIAIHSLLPERTKMLLKIQHSIIGRDEINRQWLKSVSNSAKMIRYNVFINRYLEATEDEGYAKLVNIAPIPTVKHSFITIDTDGLLGVLKDVGLVESLEKTLTNKEHWESVFDVENIRSTGKGVFTCTIDTDGVMACTHFLRAEKKKISIKDDGTAIKKQTKTLRKFSESDPNVVVVANDPGRCNIAFLTWKKNKVEEKDNGGRKRKRHCEFGSKRLTRERYYVESGVFKSRGPTKKWLSNIQDCLDDLKDNSPKRTSLESFDAYVTVMVNHWDSRWGEMSKSRWGAQRLRLYGGKKRVLARFFNEVQADVGERKTIVIAYGSSKFAPGGKGELSVPTTSAFNAFRDRFKGRVAVIDEFRTTKIWHKDSTTVLQSVQSEKKGRTVRGLLWCSSTMENSKLFVNRDLNAAINIHNCFTMYPTRPGILARPKKYCKLEVVVGRTIDYKLTGSLQNAVSSEV

SEQ ID NO: 1121 - protein, 279 aa, Chlamydomonas sp.
SSTMMMLRISRLLTSTDMQRGLYDTLVNARKTVAGSFFRKPPVKNGWVFDCSICTDGVSLSMQYSKTVQVLVSDLKKTRKKPRKEEGIKIAEKYDGSLKTILPDMGIVVLGVDPGRSNIATVTYLADDKNKTWKLTRGAFYHKSGIKKQTRQKELRFADMIPMWESLRENGAALSTSRTDKISAYLSNYAKFSDEWWRLALRRRESRDNLQRYIGKRKVKDSFWAGIKRCMMKELPDMKVCVAYGSAITKLKPTGPGEVAVPTGAMFASCKRISKRTFL

SEQ ID NO: 1122 - protein, 491 aa, Chlamydomonas sp.
RETLLCTRSGILSQGGSTFTIRKHFCVSGSHDPASVPQDIVGDHRRKRKTKNEKHRTFSLLPYKSGFTLSHIPISKMAFFYMVNECHFDSCKADVASKNHQGIWERFANLKKVETVSRKFGYRIVTDGFAVSILMNKPTCLACSMPAGAFSTRAHEYVTTDEGGIVSFLDNVVVAAVDPDVTDIVTVTGLNGGTRSYSSAQYYRKGLIFKSQRQTDVWNLETADIVGGIIPDRDSSSSEQIGAYARFYMGAAPILLAHRASRGYRNLRFRRYCKKQKLIVEIADFVAPRKKSAKVLVGFGDWKGLGATPISRRTCGPLQAIRFELRSRENVIMEDIDEFRTSQRCSCCENHLCNMVALTHRKKQDGTGWECTEGRKRIHKILHCKSSQSGAPRQQSGGMLHCGKTWDRDVNASRNILMLTLHQVFGRERPLAFRRDAPRSSSTTPPPPPDTDMGTQTVERFTKEATRNIFENLFNLLHPPTLPKSNDLQSG

SEQ ID NO: 1123 - protein, 643 aa, Chlamydomonas sp.
PRMEHVCDVCIKSSVMYKLCKMATKPPTVAKLKELLKLAEVAYSSKDKKDDIVRLCEDNGLIARPPPEYKTVEKMCVVKCALKKAMSLDDEEFGKFREHVDQLVNVVSRMLRRSSLVLTFHITSLLEKGLDIPDLYNMKDTYWKDWLRIGVDGIFPDEESKISYEAVKDSIGDVIGNDDADYIKSYPIYFDQVLNYAGHTLSTVVSNNAWVPLIPRLARLTSTTLNKLNAPKTLDTSKIIRGYDVMQAIQQEVQNMEGWPESVQEYVNEVREMLSVPDGSRVYDNYGKDMDFPTMVRFNYWIQTRLEDMDARRIRLMPIFNVQRVHVRLDLKTLVNLFRHMFPNDQNIVELSKWEHVKNPESFMLPQRPAQKKKKSCGPGEWEAYKSVLKQYDDDVKDIKATDEYRHAKGLYDTLVNARKTVAGSFFRKPPVKNGWVFDCSICTDGVSLSMQYSKTVQVLVSDLKKTCKKPRKEEGIKIAEKYDGSLKTILPDMGIVVLGVDPGRSNIATVTYLADDKNKTWTLTRGEFYHKSGIKKQTRQKELRFANMIPMWESLRENGAALSTSRTDKISSYLSNYAKFSDEWWRLALRRRESRDNLQRYIGKRKVKDSFWAGIKRCMMKKLPDMKVCVAYGSAITKLKPT

SEQ ID NO: 1124 - protein, 687 aa, Chlamydomonas sp.
GNVGAILYHQKKKNTHPLLMGVVQDKGDDDINISVVKKTLNSLCMDVSRHQISSRIQSMVLLINHAVAEAYLFANFHITRCLDDGDFDVKQLPHLDRNFYYRCLLAVSTSNVRKDTLGQSFNDTMVAFDALRPAGYVKVDVRPWGQVIADVSIQMATLACNSVWANVDRVVIKYLRLKHPSLKKHFKKIVKAVVQYPESKIDTIIPEGLVHAIHIKEVVSHLRALFPLPRGKQFNTRAHLTMRLFHHVLTELGEVGRVNPKEKIKKKSPPSVQYPSSQERLHKTYVSISSMTFMKLLSMGDSPLESVSGDGRYENHTMLWRKYFNVQGLKTKRSRFDNRILSDGKGVSVQMKQKGKEEVVEEGENAGYPKDANIVECKDAVGALRVGVDPGMTDIVTVVSSAGRIESFSSARFSEVAGYNTSKRHTYKWNDETQDFVKSIPSPNTSNMVDLQDHVRAYLKALPILLQHRANKGYRSMRFFRYVGKQKTIEKVCDVIAPRAQTTVVGFGNWSNQGYGISRSCSGPIKEIRRCLSRRKNVLFKNVDERNTFCKCHGCFQRLVNMKADSVVWRGVCKESPINGSITVEKQKMVVKNVKVHKGLHCRDSVKSASSNVRCGATWNRDVNAAKNLLLLLTTWMDGRERPEAFCVPSPPPKTTVSIEASVSAKSTDPPGFVSSLPCYPLGQLKC

SEQ ID NO: 1125 - protein, 643 aa, Chlamydomonas sp.
LHQLLPYFDQVLNYAGHTLSTVVSNNAWVPLVPRLTRLTKATLNALGAPKTIRVYDVMRVIQQEIQEMESWPESVQEYVREVRVRLKVPDGSRLYDDYGKDMDFPTMVRFNYWMQTRLEAIGARRIRLMPIFNVQRAHVCLDMKTLVNLFRHVFPKDPNIVELSKWENVKDPDRFMLPLKPAVKKKKSCGPGEWEAYKLAQQKYDADVKDIKATDEYRHAKGRYDTLVNFRKTVAGSFFKKPPVKTGWVFDCSICTDGVSLSMQYSKTVQVRVSDLKKTSKRSRDDEGMSVSEQYDHKLKTTLPDMGIVVLGVDPGRSNIATVTYLADDKSKTWKLTRGAFYHKSGIKKQKKQQEKRFSDMIPRWESLRENGAALSTSRKDDISAYLKNYATFSDEWWRMALRRRESRDNFQRYIGKRKAMDSFWAGIKRNMKLDHPDVRVRVAYGSAITKLKATGPGEVAVPTGSMFASFKRLFKEEVHVTDEFKTTLMSWETGAKKECVYKIPSVQITTEGQIRLGYELLGHTPLKETPKVSYRDQLAVRVYCTRKRIQEKHRRGGLAPSLVDNNSIKRYPEVRGLRFSPETSTYSDRDRSSALTIARLHCMELLGQGRPLPFCRDACCWATKKHDGVPLQYGLLHNKVTP

SEQ ID NO: 1126 - protein, 686 aa, Chlamydomonas sp.
METIVNKEPPDKRTRPDRAAKIKDRKNGEENVVKCTLSRIIADKDNKDVITKVIKERVDSVSKRTYLAGVAVNRILKEVFEGVPDAQLHTVSVPSVDQNFIRQLMVGSRQAFMETRDATVERFFHNNYWFREKIEGREVIVKKKKQYVGAIARYDGDRNLYSHASKKYLTNFNNHYRVHLSTWIKKFVYSKENRILAKEFKDEHGIDETVFHRYLLYDIHSWGVKEDLIAIHSLLPERTKMLLKIQHSIIGQDEINRQWLKSVSNSAKMIRYNVFINRYLEATEDEGYAKLVNIAPIPTVKHSFITIDTDGLLGVLKDVGLVESLEKTLTNKEHWESVFDVENIRSTGKGVFTCTIDTDGVMACTHFLRAEKKKISIKDDGTAIKKQTKTLREFSESDPNVVVVANDPGRCNIAFLTWKKNKVEEKDNGGRKRKRHCEFGSKRLTRERYYVESGVFKSRGPTKKWLSNIQDCLDDLKDNSPKRTSLESFDAYVTVMVNHWDSRWGEMSKSRWGAQRLRLYGGKKRVLARFFNEVQADVGERKTIVIAYGSSKFAPGGKGELSVPTTSAFNAFSDRFKGRVAVIDEFRTTKIWHKDSTTVLQSVQSEKKGRTVRGLLWCSSTMENSKLFVNRDLNAAINIHNCFTMYPTRPGILARPKKYCKLEVVVGRTIDYKLTGSLQNAVSSEV

SEQ ID NO: 1127 - protein, 506 aa, Chlamydomonas sp.
AKLGSPRRTLGWTQITKRFFAREVAFCLRGVLPLPSGNTFASRAHMTLPLYHKILSETIEEKRKTKNEKHRTFSLLPYKSGFTLSHIPISKMAFFYMVNECHFDSCKADVASKNHQGIWERFANLKKVETVSRKFGYRIVTDGFAVSILMNKPTCLTCSMPADAFSTRAHEYVTTDEGGIVSFLDNVVVAAVDPGVTDIVTVTGLNGGTRSYSSAQYYRKGLIFKSQRQTDVWNLETADIVGGIIPDRDSSSSEQIGAYARFYMGAAPILLAHRASRGYRNLRFRRYCKKQKLIVEIADFVAPRKKSAKVLVGFGDWKGLGATPISRRTCGPLQAIRFELRSRENVIMEDIDEFRTSQRCSCCENHLCNMVALTHRKKQDGTGWECTEGRKRIHKILHCKSSQSGAPRQQSGGMLHCGKTWDRDVNASRNILMLTLHQVFGRERPLAFRRDAPRSSSTTPPPPPDTDMGTQTVERFTKEATRNIFENLFNLLHPPTLPKSNDLQSG

SEQ ID NO: 1128 - protein, 283 aa, Chlamydomonas sp.
HKSGIKKQTRQKELRFADMIPMWESLRENGAALSTSRTDKISAYLSNYAKFSDEWWRLALRRRESRDNLQRYIGKRKVKDSFWAGIKRCMMKELPGMKVCVAYGSAITKLKPTGPGEVAVPTGAMFASCKRIFKEDVSVTDEFKTTLMSWETGKEKERVYKIPSVCSADVNLRLGGERFGHTKSKTMPKVADCDHLGVRLYNKRKGAQEKHRRGGFATSLVDSQKSIERYPEVRGLRFSPETCIYSDRDRSSALTIARLHCMELMGLGRPLPFAHSSSVVVDE

SEQ ID NO: 1129 - protein, 813 aa, Chlamydomonas sp.
PRMEHVCDVCIKSSVMYKLCKMATKPPTVAKLKELLKLAEVAYSSKDKKDDIVRLCEDNGLIARPPPEYKTVEKMCVVKCALKKAMSLDDEEFGKFREHVDQLVNVVSRMLRRSSLVLTFHITSLLEKGLDIPDLYNMKDTYWKDWLRIGVDGIFPDEESKISYEAVKDSIGDVIGNDDADYIKSYPIYFDQVLNYAGHTLSTVVSNNAWVPLIPRLARLTSTTLNKLNAPKTLDTSKIIRGYDVMQAIQQEVQNMEGWAESVQEYVNEVREMLSVPDGSRVYDNYGKDMDFPTMVRFNYWIQTRLEDMDARRIRLMPIFNVQRVHVRLDLKTLVNLFRHMFPNDQNIVELSKWEHVKNPESFMLPQRPAQKKKKSCGPGEWDAYKSVLKQYDDDVKDIKATDEYRHAKGLYDTLVNARKTVAGSFFRKPPVKNGWVFDCSICTDGVSLSMQYSKTVQVLVSDLKKTCKKPRKEEGIKIAEKYDGSLKTILPDMGIVVLGVDPGRSNIATVTYLADDKNKTWKLTRGAFYHKSGIKKQTRQKELRFADMIPMWESLRENGAALSTSRTDKISAYLSNYAKFSDEWWRLALRRRESRDNLQRYIGKRKVKDSFWAGIKRCMMKELPGMKVCVAYGSAITKLKPTGPGEVAVPTGAMFASCKRIFKEDVSVTDEFKTTLMSWETGKEKERVYKIPSVCSADVNLRLGGERFGHTKSKTMPKVADCDHLGVRLYNKRKGAQEKHRRGGFATSLVDSQKSIERYPEVRGLRFSPETCIYSDRDRSSALTIARLHCMELMGLGRPLPFAHSSSVVVDE

SEQ ID NO: 1130 - protein, 280 aa, Chlamydomonas sp.
SSSLSVKLTFGTSRRLISSVVSFRIETLRVLNRLVRTPDSTCAPILLAHRASRGYRNLRFRRYCKEQKLIVEIADFVAPRKKSAKVLVGFGDWKGLGATPISRRTCGPLQAIRFELRSRENVIMEDIDEFRTYQRCSCCENHLCNMVALTHRKKQDGTGWECIEGRKRIHKILHCKSSQSGAPRQQSGGMLHCGKTWDRDVNASRNILMLTLHQVFGRERPLAFRRDAPRSSSTPPPPDTDMGTQTVERFTKEATRNIFENLFNLLHPPTLPKSNDLQSG

SEQ ID NO: 1131 - protein, 601 aa, Chlamydomonas sp.
QCIRNLHVLNIRIPCMATTSVKLARPPMPLVSPGPSSVDGRIMARSERSGLQATNVSLTQAASKATSSSRKKNPAVVKSFSTHVCPHTNNNPTCSDSNCSCKPIFLTNIPDASKSLKSRTSDQGSTSSAQDFYEYWDSSRQDLYRQLLWLPKTGSQGLVSSSLNGFARSTPARSSFSITKTEPLKTSLEKTSCPSFKYIVADGTVEDATKSNAKPKLRTLKLKLNPTKAQKSMMAEFAGCSRFMYNKAVAARLGVGSTHKSVFRIRDRYVTNKVRGEGKMPNTYFKNSQWLLQCPKSVRQSAIKAALANIKACFSNLKAGNIKQFSAPFRWKKTELERGWAIDMDQKNVSKDGDKLFIFKDILGNMRYFGSKQLHKLMPEENPTHDPKVKKSRFGEYFLVLSVAARDRRAERKPVHPDKVATASIDPGVRKTMVTYSPENEESFMLGQGQASDLVKLLLVYDKLQSRLDTEKTLRSKERMKIKMQMIRIRKRIFYLKKEFRDQTTNFLAARYDVLLVPQLETAKMTISAERELTTKVARQMLTLSHSMLFNRLKEKCEEYGTVFLHVLEHYTSQTCPMCVTCGIKKNKLETWNNPEYMTVL

SEQ ID NO: 1132 - protein, 621 aa, Chlamydomonas sp.
QCIRNLHVLNIRMPCMATKASVKLARPPMPLVSPGPSSVDGRIMARSERSGLQATNVSLTQAASKATSLSRKKKPAVVKSFSTHVCPHTNNNPTCSDSNCSCKPIFLTNIPDASKSLKSRTSDQGSTSSAQDFYEYWDSSRQDLYRQLLWLPKTGSQGLVSSSLNGFARSTPARSSFSITKTEPLKTSLEKTSCPSFKYIVADGTVEDATKSNAKPKLRTLKLKLNPTKAQKSMLAEFAGCSRFMYNKAVAARLGVGSTHKSVFRIRDRYVTNKVRGKGKMPNPYFKNRQWLLQCPKSVRQSAIKSALANIKACFSNLKAGNIKQFSAPFRRKKTELERGWVIEMDQKNVSKDGDKLFIFKEILGNMRYFGSKQLHKLMPEENPTHDPKVQKSRFGEYFLVLSVAARDRRADRKPVHPDKVATASIDPGVRKTMVTYSPENEESFMLGQGQASDLVKLLLVHDKLQSRLDTEKTLRSKERMKIKKLMIRIRKTIFYLKKEFRDQTTNFLAARYDVLLVPQLETAKMTISAERELTTKVARQMLTLSHSVLFNRLKEKCEEYGTVFLHVLEHYTSQTCPMCGFLNKCGETYTCKNCQFTCDRDIVGAAGIFLKAVRTENPCS

SEQ ID NO: 1133 - protein, 503 aa, Chlamydomonas sp.
YMMISRQEKNTPSSVRRLRDLLPLPRGKQFNTRAHLTMRLFHHVLTELGADLKEKTTKKRPRLFSILPRKSGFTISYVPISSMTLMKLLSMGDSPLESFRGDGRHENHSMLWRKYFNVQGLETKGSRFDNRILSDGKGVSVQMKHQASEDVAVEGRDNAGYPKDAILEDCQDASLRVGVDPGMTDIVTIASSDGRVESFSSAHFSEAAGYNTSNRRTNKWNADTQDLVKSIPSPTTSSMHDMQDHVRGYLSALPTLLQHRANRGYRSMRFFRYVGKQKTIEKVCDLIAPKAQKKTIEEKVCDVIAPKAKKTVVGFGNWSNQGYGISRSCSGPVKEIRKCLSRRQNVLFKNVDERNTSCTCHGCFQKLVNMKADSVAWRRVKNEPSALIDGAPTTTTTTTFEKQKTVVKNVKVHKVLHCRNSVKSASSNVRCGATWNRDVNAAKNLLLLLTTWMDGKERPAAFCVPSSSPTPKTTVSGEANVGAQPTDPPGSVSSLQLLSSGPA

SEQ ID NO: 1134 - protein, 682 aa, Chlamydomonas sp.
SIKSLRTSVRDRTGRPKLRTGKRRQENVVKCTLSRIIADKDNKDVITKVIKDRVDSVSKRTYLAGVAVNRILKEVFEGVPDAQLHTVSVPSVDQNFIRQLMVGSRQAHMETRDATVERFFHNNYWFREKIEGREVIVKKKKQYVGAIARYDGDRNLYSHASKKYLTNFNNHYRVHLSTWIKKFVYSKENRILAKEFKDEHGIDDIVFHRYLLYDIHSWGVKEDLIAIHSLLPERTKMLLKIQHSIIGRDEINRQWLKSVSNSAKMIRYNVFINRYLEATEDEGYAKLVNIAPIPTVKHSFITIDTDGLLGVLKDVGLVESLEKTLTNKEHWESVFDVENIRSTGKGVFTCTIDTDGVMACTHFLRAEKKKISIKDDGTAIKKQTKTLREFSESDPNVVVVANDPGRCNIAFLTWKKNKVEEKDKGGRKRKRHCEFGSKRLTRERYYVESGVFKSRGPTKKWLSNIQDCLDDLKDNSPKRTSLESFDAYVTVMVNHWDSRWGEMSKSRWGAQRLRLYGGKKRVLARFFNEVQADVGEWKTIVIAYGSSKFAPGGKGELSVPTTSAFNAFSDRFKGRVAVIDEFRTTKIWHKDSTTVLQSVQSEKEGRTVRGLLWCSSTMENSKLFVNRDLNAAINIHNCFTMYPTRPGILARPKKYCKLEVVVGRKIDYKLTGSLQNAVSSEV

SEQ ID NO: 1135 - protein, 310 aa, Chlamydomonas sp.
SPERSSVATSAMSTNNAHYYVVQRENMNSGQILRVNSIMVTWKKNKVEEKDKGGRKRKRHCEFGSKRLTRERYYVESGVFKSRGPTKKWLSNIQDCLDDLKDNSPKRTSLESFDAYVTVMVNHWDSRWGEMSKSRWGAQRLRLYGGKKRVLARFFNEVQADVGERKTIVIAYGSSKFAPGGKGELSVPTTSAFNAFSDRFKGRVAVIDEFRTTKIWHKDSTTVLQSVQSEKKGRTVRGLLWCSSTMENSKLFVNRDLNAAINIHNCFTMYPTRPGILARPKKYCKLEVVVGRTIDYKLTGSLQNAVSSEV

SEQ ID NO: 1136 - protein, 832 aa, Chlamydomonas sp.
NHYGLFSPRMEHVCDVCIKSSVMYKLCKMATKPPTVAKLKELLKLAEVAYSSKDKKDDIVRLCEDNGLIARPPPEYKTVEKMCVVKCALKKAMSLDDEEFGKFRGHVDQLVNVVSRMLRRSSLVLTFHVTRLMEGDLPIPNMYDMKDTYWKDWLRIGVDDVFPDEESRISYEAVKGVIGKVLGSDDPDYINSYPIYFDQVLNYAGHTLSTVVSNNAWVPLVPRLTRLTKDTLKALGAPKTIRVYDVMRVIQQEIQEMESWPESVHEYVREVRVRLKVPDGSRLDDDYGKDMDFPTMVRFNYWMQTRLEAIGARRIRLMPIFNVQRAHVRLDMKTLVNLFRHVFPKDPNIVELSKWENVKDPDRFMLPLKPSVKKKKSCGPREWEAYKLAQQKYDADVKDIKATDEYRHAKGRYDTLVNAQKTVAGSFFKKPPVKTGWVFDCSICTDGVSLSMQYSKTVQVRVSDLKKTSKRSRDEEGMSVSEQYDHKLKTTLPDMDIVVLGVDPGRSNIATVTYLADDKSKIWKLTRGAFYHKSGIKKQKKQQEKRFSDMIPRWESLRENGAALSTSRKDDISAYLKNYATFSDEWWRMALRRRESRDNFQRYIGKRKAMDSFWAGIKRNMKLDHPDLRVRVAYGSAITKLKATGPGEVAVPTGSMFASCKRLFKEEVHVTDEFKTTLMSWDTGAKKECVYKIPSVQITTKGQIRLGYELLGHTPLKETPKVSYRDQLAVRVYCTRKKIQEKHRRGGLAPSLVDNNSIKRYPEVRGLQFSPETSTYSDRDRSSALTIARLHCMELLGQGRPLPFCRDACCWATKKHDGVPLQCGLLHHKVTP

SEQ ID NO: 1137 - protein, 326 aa, Chlamydomonas sp.
CNVKNPDSFMLPQRPAHKKKKSCGPGEWEAYKSVLKQYDDDVKDIKATDEYRHAKGLYDTLVNARKTVAGSFFRKPPVKNGWVFDSSICTDGVSLSMQYSKTVHVLVSDLKKTCKKPRKEEGIKIAEKYDGSLKTILPDMGIVVLGVDPGRSNIATVTYLADDKNKTWTLTRGAFYHKSGIKKQTRQKELRFADMIPMWESLRENGAALSTSRTDNISAYLSNYAKFSDEWWRLALRRRESRDNLQRYIGKRKVKDSFWAGIKRCMIKELPDMKVCVAYGSAITKLKPTGPGEVAVPTGAMFASCKRIFKEDVSVTDEFKTTLMSW

SEQ ID NO: 1138 - protein, 621 aa, Chlamydomonas sp.
QCIRNLHVLNIRMPCMATNASVKLARPPMPLVSPGPSSVDGRIMARSERSGLQATNVSLTQAASKATSSSRKKKPAVVKSFSTHVCPHTNNNPTCSDSNCSCKPIFLTNIPDASKSLKSRTSDQGSTSSAQDFYEYWDSSRQDWYRQLLWLPKTGSQGLVSSSLNGFARSTPARSSFSITKTEPLKTSLDKTSCPSFKYIVADGTVEDATKSNAKTKLRTLKLKLNPTKAQKSMLAEFAGCSRFMYNKAVAARLGVGSTHKSVFRIRDRYVTNKVRGKGKMPNPYFKNRQWLLQCPKSVRQSAIKAALANIKACFSNLKAGNIKQFSAPFRRKKTELERGWAIEMDQKNVSKDGDKLFIFKDILGNMRYFGSKQLHKLMPEENPTHDPKVQKSRFGEYFLVLSVAARDRRAERKPVHPDKVATASIDPGVRKTMVTYSPENEESFMLGQGQASDLVKLLLVHDKLQSRLDTEKTLRSKERMKIKKQMIRIRKRIFYLKKEFRDQTKNFLAARYDVLLVPQLETAKMTISAERELTTKVARQMLTLSHSVLFNRLKEKCAEYGTVFLHVLEHYTSQTCPMCGFLNKCGETYTCKNCQFTCDRDIVGAAGIFLKAVRTENPCS

SEQ ID NO: 1139 - protein, 547 aa, Chlamydomonas sp.
YYITKRKIILTPLLMGVVQDKGDDDINISVVKKTLNSLCMDVSRHQISSRIQSMVLLINHAVAEAYLFANFHITRCLDDGDFDVKQLPHLDRNFYYRCLLAVSTSNVRKDTLGQSFNDTMVAFDALRPAGYVKVDVPPWGQVIADVSIQMATMACNSVWANVDRVVIKYLRLKHPSLKKHFKKIVKAVVQYPESKIDTIIPEGLVHAIHIKEVVSHLRALFPMPRGKQFNTRAHLTMRLFHHVRTELGEVGRVDPKDKKTRKSHPRLFSILPRKNGFTISYVPISSMTFMKLLSMGDSPLESVSGDGRYENHTMLWRKYFNVQGLETKRSRFDNRILSDGKGVSVQMKQKGKEEVVEEGENAGYPKDANIVECKDAVGALRVGVDPGMTDIVTVASSAGRIESFSSARFSEVAGYNTSKRRTYKWNDETQDLVKSIPSPNTSNKSDLQDHVRAYLKALPILLQHRANKGYRSMRFFRYVGKQKTIEKVCDVIAPRAQTTVVGFGNWSNQGYGISRSCSGPIKEIRRCLSRRKNVLFKNVDERNTSCK

SEQ ID NO: 1140 - protein, 256 aa, Chlamydomonas sp.
IPTMRYFGSKQLHKLMPEENPTHDPKVHKSRFGEYFLVLSVAARDRRAERKPVHPDKVATASIDPGVRKTMVTYSPENEESFMLGQGQASDLVKLLLVHDKLQSRLDTEKTLRSKERMKIKMQMIRIRKRIFYLKKEFRDQTTNFLAARYDVLFVPQLETAKMTISAERELTTKVARQMLTLSHSVLFNRLKEKCEEYGTVFLHVLEHYTSQTCPMCGFLNKCGETCKNCQFTCDRDIVGAAGIFLKAVRTENPCS

SEQ ID NO: 1141 - protein, 546 aa, Chlamydomonas sp.
YGITKIIMGVVTNNGDDDNLDIMVVKKTLNSLCMDVSRQQICSRIQSMVLVINHAVAEAYLFANFHITRCLDDGDFDVKQLPHLDRNFYYRCILAVSTSNVRKDTLGQSLKDSMVAFDALRPAGYLKVDVRQWGQVIADVSIQMATMACNSVWANVDRVVIKYLCLKHPSLKKHFNKIVKAVVQYPESDIDKIIPASLVHANLIKDVVRRLRDLLPVPRGKQFNTRAHLTMRLFHHVLTELGADLKEKTTKKRPRLFSILPRKSGFTISYVPISSMTLMKLLSMGDSPLESVRGDGRHENHSMLWRKYFNVQGPETKGSRFDNRILSDGKGVSVQMKHQVGKDIAGEGGGGNAGYPKDASTEDCQDASLRQGALRVGIDPGMTDIVTIASSDGRVESFSSAHFSEAAGYNTSNRRTNKWNADTQDLVKSIPSPTTSSMHDMQDHVRGYLSALPTLLQHRANRGYRSMRFFRYVGKQKTIEKVCDLIAPKAQKKTIEEKVCDVIAPKAKKTVVGFGDWSNQGYGISRSCSGPVKEIRKCLSRRQNVL

SEQ ID NO: 1142 - protein, 631 aa, Chlamydomonas sp.
QCIRNLHVLNIRMPCMATNVSVKLARPPMPLVSPGPSSVDGRIMARSERSGLQATNVSLTQAASKATSSNRKKKPAVIKSFSTHVCPHTNNNPTCSDSNCSCKPIFLTNIPDASKSLKSRTSDQGSNSSAQDFYEYWDSSRQDLYRQLLWLPKTGSQGLVSSSFNGFARSTPARSTPARSTPARSSFSITKTEPLKTSLEKTSCPSFEYIVADGTVEDATKSNAKPKLRTLKLKLNPTKAQKSMLAEFAGCSRFMYNKAVAARLGVGSTHKSVFRIRDRYVTNKVRGEGRMPNPYFKNRQWLLQCPKSVRQSAIKAALANIKACFSNLKAGNIKQFSAPFRRKKTELERGWVIEMDQKNVSKDGDKLFIFKDILGNMRYFSSKQLHKLMPELNPTHDPKVHKSRFGEYFLVLSVAARDRRAERKPVHPDKVATASIDPSVRKTMVTYSPENEESFMLGQGQASDLVKLLLVHDKLQSRLDTEKTLRTKERMKIKMQMIRIRKRIFYLKKEFRDQTTNFLAARYNVLLVPQLETAKMTISSERELTTKVARQMLTLSHSVLFNRLKEKCEEYGTVFLHVLEHYTSQTCPMCGFLNKCGETYTCKNCQFTCDRDIVGAAGIFLKAVRTENPCS

SEQ ID NO: 1143 - protein, 688 aa, Chlamydomonas sp.
RNVGAILYHQKKKNTHPLLMGVVQDKGDDDINISVVKKTLNSLCMDVSRHQISSRIHSMVLLINHAVAEAYLFANFHITRCLDDGDFDVKQLPHLDQNFYYRCLLAVSTSNVRKDTLGQSFNNTMVAFDALRPAGYVKVDVRPWGQVIADVSIQMATMACNSIWANVDRVVIKYLRLKHPSLKKHFKKIVKAVVQYPESKIDTIIPEGLVHAIHIKEVVSHLRALFPLPRGKQFNTRAHLTMRLFHHVLTELGEVGRVDPKDKKTRKSHPRLFSILPRKNGFTISYVPISSMTFMKLLSMGDSPLESVSGDGRYENHTMLWRKYLNVQGLETKRSRFDNRILSDGKGVSVQMKQKGKEEVVEEGENAGYPQDANIVECKDAVGALRVGVDPGMTDIVTVASSAGRIESFSSARFSEVAGYNTSKRRTYKWNDETQDLVKSIPSPNTSNMSDLQDHVRAYLKVLPILLQHRANKGYRSMRFFRYVGKQKTIEKVCDVIAPRAQTTVVGFGNWSNQGSGISRSCSGPIKEIRRCLSRRKNFLFKNVDERNTSCKCHGCFQRLANMKADSVVWRGVCKESPIDGSITVEKQKMVVKNVKVHKVLHCRDSVKSASSNVRCGATWNRDVNAAKNLLVLLTTWMDGRERPEAFCVPSPPPKTTVSIEASVSAKPTDPPGFVSSLPCYPLGQLKC

SEQ ID NO: 1144 - protein, 287 aa, Chlamydomonas sp.
MGVSRENGAALSTSRKDDISAYLKNYATFSDEWWRMALRRRESRDNFQRYIGKRKAMDSFWAGIKRNMKLDHPDLRVSIAYGSAIKTMKATGPGKLVPTDLGLPTGSMFASCKRLFKEEVHVTDEFKTTLMSWETGAKKECVYKIPSVQITTEGQIRLGYELLGHTPLKETPKVSYRDQLAVRVYCTRKKIQEKHRRGGLAPSLVDNNSIKRYPEVRGLRFSPETSTYSDRDRSSALTIARLHCMELLGQGRPLPFSRCKAACCCWATKKHDGVPLQCGLLHHKVTP

SEQ ID NO: 1145 - protein, 801 aa, Chlamydomonas sp.
PRMEHVCDVGIKSSVMYKLCKMATKPPTVAKLKELLKLAEVAYSSKDKKDDIVRLCEDNGLIARPPPEYKTVEKMCVVKCALKKAMSLDDEEFGKFREHVDQLVNVVSRMLRRSSLVLTFHVTRLMEGDLPIPNMYDMKDTYWKDWLRIGVDGVFPDEESRISYEAVKDVIGKVLGSDDPDYINSYPIYFDQVLNYAGHTLSTVVSNNAWVPLVPRLTRLTKATLNALKAPKTIRVYDVMRVIQQEIQEMESWPESVQEYVREVRVRLKVPDGSRLYDDYGKDMDFPTMVRFNYWMQTRLESIGARRIRLMPIFNVQRAHVRLDMKTLVNLFRHVFPKDPNIVELSKWKDVKDPDRFMLPLKPAVKKKKSCGPGEWEAYKLAQQKYDADVNDIKDTDEYRHAKGRYDTLVNARKTVAGSFFKKPPVKTGWVFDCSICTDGVSLSMQYSKTVQVRVSDLKKTSKRSRDDEGMSVSEQYDHKLKTTLPDMGIVVLGVDPGRSNIATVTYLADDKSKTWKLTRGAFYHKSGIKKQKKQQEKRFSDMIPRWESLRENGAALSTSRTDDISAYLKNYDTFSDEWWRMALLRRESRDNFQRYIGKRKAMDSFWAGIKRNMKLDHPDLRVRVAYGSAITTLKATGPGEVAVPTGSMFASCKRLFKEEVHVTDEFKTTLMSWETGAKKECVYKIPSVQITTEGQIRLGYELLGHTPLKETPNVSYRDQLAVRVYCTRKQIQEKHRRGGLAPSLVDNKSIKRYPEVRGLRFSPETSTYSDRDRSSALTIARLHCMELLGQGRPLPFCRDA

SEQ ID NO: 1146 - protein, 618 aa, Chlamydomonas sp.
QCIRNLHVLNIRMPCMATKASVKLARPPMPLVSPGPSSVDGQIMARSERSGLQATNVSLTQAASKATSSSRKKKPAVVKSFSTHVCPHTNNNTTCSDSNCSCKPIFLTNIPDASKSRTSDQGSTSSALDFYEYWDSSRQDMYCQLLWLPKTGTQGLVSSSFNGFAHSTPTRSSFSITKTEPLKTSLEKTSCPSFKYIVTDGTVEDATKSNAKPKLRTLKLKLNPTKAQKSMLAEFAGCSRFMYNKAVAARLGVGSTHKSVFRIRDRYVTNKVRGEGKMPNPYFKNRQWLLQCPKSVRQSAIKSALANIKACFSNLKAGNIKQFSAPFRRKKTELERGWVIEMDQKNVSKDGDKLFIFKEILGNMRYFGSKQLHKLMPEENPTHDPKVQKSRFGEYFLVLSVAARDRRAERKPVNPDKVATASIDPGVRKTMVTYSPENEESFMLGQGQASDLVKLLLVHDKLQSRLDTEKTLRSKERMKIKKLMIRIRKTIFYLKKEFRDQTTNFLAARYDVLLVPQLETAKMTISAERELTTKVARQMLTLSHSVLFNRLKEKCEEYGTVFLHVLEHYTSQTCPMCGFLNKCGETYTCKNCQFTCDRDIVGAAGIFLKAVRTENPCS

SEQ ID NO: 1147 - protein, 615 aa, Chlamydomonas sp.
QCIRNLHVLNIRMPCMATNASVKLARSPMPVVSPGPSSVDGRIMARSGLQATNVSLTQAASQATSSSRKKKPAVVKSFSTHVCPHTNNNPTCSDSNCSCKPIFLTNIPDASKSRTSDQGSTSSSLDFYEYWDSSRQDLYRQLLWLPKTGTQGLVSSSFNGFAHSTPTRSSFSITKTEPLKTSLEKTSCPSFKYIVTDGTVEDATKSNAKPKLRTLKLKLNPTKAQKSMLAEFAGCSRFMYNKAVAARLGVGSTHKSVFRIRDRYVTNKVRGKGKMPNPYFKNRQWLLQCPKSVRQSAIKSALANIKACFSNLKAGNIKQFSAPFRRKKTELERGWVIEMDQKNVSKDGDKLFIFKEILGNMRYFGSKQLHKLMPEENPTHDPKVQKSRFGEYFLVLSVAARDRRAERKPVNPDKVATASIDPGVRKTMVTYSPENEESFMLGQGQASDLVKLLLVHDKLQSRLDTEKTLRSKERMKIKKLMIRIRKTIFYLKKEFRDQTTNFLAARYDVLLVPQLETAKMTISAERELTTKVARQMLTLSHSVLFNRLKEKCEEYGTVFLHVLEHYTSQTCPMCGFLNKCGETYTCKNCQFTCDRDIVGAAGIFLKAVRTENPCS

SEQ ID NO: 1148 - protein, 462 aa, Chlamydomonas sp.
PCLCTTRYCRRPSKKNEKRKTKNEKHRTFSLLPYKSGFTLSHIPISKMAFFYMVNECHFNSCKADVASKNHQGIWERFANLKKVETVSRKFGYRIVTDGFAVSILMNKPTCLTCSMPADAFSTRAHEYVTTDEGGIVSFLDNVVVAAVDPGVTDIVTVTGLNGGTRSYSSAKYYRKGLIFKSQRQTDVWNLETADIVGGIIPDRDSSSSEQIGAYARFYMGTAPILLAHRASRGYRNLRFRRYCKKQKLIVEIADFVAPRKKSAKVLVGFGDWKGLGATPISRRTCGPLQAIRFELRSRENVIMEDIDEFRTSQRCSCCENHLCNMVALTHRKKQDGTGWECTEGRKRIHKILHCKSSQSGAPRQQSGGMLHCGKTWNRDVNASRNILMLTLHQVFGRERPLAFRRDAPRSSSTTPPPPPDTDMGTQTVERFTKEATRNIFENLFNLLHPPTLPKSNDLQSG

SEQ ID NO: 1149 - protein, 813 aa, Chlamydomonas sp.
PRMEHVCDVCIKSSVMYKLCKMATKPPTVAKLKELLKLAEVAYSSKDKKDDIVRLCEDNGLIARPPPEYKTVEKMCVVKCALKKAMSLDDEEFGKFREHVDQLVNVVSRMLRRSSLVLTFHITSLLEKGLDIPDLYNMKDTYWKDWLRIGVDGIFPDEESKISYEAVKDSIGDVIGNDDADYIKSYPIYFDQVLNYAGHTLSTVVSNNAWVPLIPRLARLTSTTLNKLNAPKTLDTSKIIRGYDVMQAIQQEVQNMEGWPESVQEFVNEVREMLSVPDGSRVYDNYGKDMDFPTMVRFNYWIQTRLEDMDARRIRLMPIFNVQRVHVRLDLKTLVNLFRHMFPNDQNIVELSKWEHVKNPDSFMLSQRPAQKKKKSCGPGEWDAYKSVMKQYDDDVKDIKATDEYIHAKGLYDTLVNARKTVAGSFFKKPPVKNGWVFDCSICTDGVSLSMQYSKTVQVLVSDLKKTCKNPRKEEGIKIAEKYDGSLKTILPDMGIVVLGVDPGRSNIATVTYLADDKNKTWKLTRGAFYHNSGIKKQTRQKELRFADMIPMWESLRENGAALSTSRTDKISAYLSNYAKFSDEWWRLALRRRESRDNLQRYIGKRKVKDSFWAGIKRCMMKELPDMKVCVAYGSAITKLKPTGPGEVAVPTGAMFASCKRIFKEDVSVTDEFKTTLMSWETGKEKERVYKIPSVCSAYVKLRLGGERFGHTKSKTMPKVADCDHLGVRLYNKRKGAQEKHRRGGFATSLVDSQKSIERYPEVRGLRFSPETCIYSDRDRSSALTIARLHCMELMGLGRPLPFAHSSSVVVDE

SEQ ID NO: 1150 - protein, 258 aa, Chlamydomonas sp.
GGRKRKRHCEFGSKRLTRERYYVESGVFKSRGPTKKWLSNIQDCLDDLKDNSPKRTSLVSFDAYVTVMVNHWDSRWGEMSKSRWGAQRLRLYGGKKRVLARFFNEVQADVGERKTIVVAYGSAEFAPGGKGELSVPTTSAFKAFSDRFKGRVAVIDEFRTTKIWHKDSTTVLQSVQSEKEGRTVRGLLWCSSTMENSKLFVNRDLNAAINIHNCFTMYPIRPGILARPKKYCKLEVVVGRKIDYKLTGSLQNAVSSEV

SEQ ID NO: 1151 - protein, 207 aa, Chlamydomonas sp.
YVGKQKTIEKVCDVIAPRAQTTVVGFGNWSNQGYGISRSCSGPIKEIRRCLSRRKNVLFKNVDERNTSCKCHGCFQRLVNMKADSVVWRGVCKESPIDGSITVEKQKMVVVKNVKVHKVLHCRDSVKSASSNVRCGATWNRDVNAAKNLLLLLTTWMDGRERPEAFCVPSPPPKTTVSIEASVSAKPTDPPGFVSSLPCYPLGQLKC

SEQ ID NO: 1152 - protein, 465 aa, Chlamydomonas sp.
SLQLRRKNHVVLVNGRHTSWPNRSTMLTLRISRLLTSTDMQRVGMKTVAGSFFKKPPVKTGWVFDCSICTDGVSLSMQYSKTVQVRVSDLKKTSKRSRDEEGMSVSDQYDHKLKTTLPDMGIVVLGVDPGRSNIATVTYLADDKSKTWKLTRGAFYHKSGIKKQKKQQEKRFSDMIPRWESLRENGAALSTSRKDDVSAYLKNYATFSDEWWRMALRRRESRDNFQRYIGKRKAMDSFRAEIKRNMKLDHLDLRVCVAYGSAITKLKATGPGEVAVPTGSMFASCKRLFKEEVHVTDEFKTTLMSWETGAKKECVYKIPSVQITTEGQIRLGYELLGHTPLKETPKVSYRNQLAVRVYCTRKKIQEKHRRGGLAPSFVDNNSIKRYPEVRGLRFSPETSTYSDRDRSSALTIARLHCMELLGQGRPLPFCRDACCWATKKHDGVPLQCGLLHHKVYRTLQKAVSF

SEQ ID NO: 1153 - protein, 622 aa, Chlamydomonas sp.
QCIRNLHVLNIRMPCMATNASVKLARPPMPLVSPGPSSVDGRIMARSERFGLQATNVSLTQAASKATSSSRKKNPAVVKSFSTHVCPHTNNNPTCSDSNCSCKPIFLTNIQDASKSLKSRTSDQGSTSSAQDFYEYWDSSRQDLYRQLLWLPKTGSQGLVSSSLNGFARSTPARSSFSITKTEPLKTRLDKTMSCPSFKYIVADGTVEDATKSNAKPKLRTLKLKLNPTKDQKSMLAEFAGCSRFMYNKAVAARLGVGSTHKSVFRIRDRYVTNKVRGKGKIPNPYFKNRQWLLQCPKSVRQSAIKAALANIKACFSNLKAGNIKQFSAPFRRKKTEPERGWAIEMDQKNVSKDGDKIFIFKDILGNMRYFGSKQLHKLMPEENPTHDPKVQKSRFGEYFLVLSVAARDRRAERKPVHPDKVATASIDPGVRKTMVTYSSGNEESFMLGQGQASDLVKLLLVHDKLQSRLDTEKTLRSKERMKIKKQMIRIRKIIFYLNKEFRDQTTNFLAARYDVLLVPQLETAKMTISAERELTTKVARQMLTLSHSVLFNWLKVKCEEYGTVFLHVLEHYTSQTCPMCGFLNKCGETYTCKNCQFTCDRDIVGAAGIFLKAVRTENPCS

SEQ ID NO: 1154 - protein, 686 aa, Chlamydomonas sp.
GNVGAILYHEKKKNTLPLLMGVVQDKGDDDINISVVKKTLNSLCMDVSRHQISSRIQSMVLLINHAVAEAYLFANFRITRCLDDGDFDVKQLPHLDRNFYYRCLLAVSTSNVRKDTLGQSFNDTMVAFDALRPAGYVKVDVRPWGQVIADVSIQMATMACNSVWANVDRVVIKYLRLKHPSLKKHLKKIVKAVVQYPESKIDTIIPEGLVHAIHIKEVVSHLRALFPLPRGKQFNTRAHLTMRLFHHVLTELGEVGRVDPKDKKTKKSHPRLFSILPRKNGFTISYVPISSMTFMKLLSMGDSPLESVSGDGRYENHTMLWRKYFNVQGLETKRSRFDNRILSYGKGVSVQMKQKGKEEVVEKGENAGYPKDANIVECKDAVGALRVGVDPGMTDIVTIASSAGRIESFSSARFSEVAGYNTSKRRTYKWNDETQDLVKSIPSPNTSNMVDLQDHVRAYLKALPILLQHRANKGYRSMRFFRYVGKHKTIEKVCDVIAPRAQTTVVGFGNWSNQGYGISRSCSGPIKEIRRCLSHRKNVLFKNVDERNTSCKCHGCFQRLVNMKADSVVWRGVCKESPIDGSITVEKQKMVVKNVKVHKVLHCRDSVKSASSNVRCGATWNRDVNAAKNLLLLLTTWMDGRERPEAFCVPSPPPKTTVSIGASVSAKPNRPTWVCQQLALLSFGPA

SEQ ID NO: 1155 - protein, 267 aa, Chlamydomonas sp.
RADVHNKTTNNKKYHLYEVCIVFDVVVAVNGRSSLPGRFLLVAKHGLERNCDSSVLISQASESFLGATPISRRTCGPLQAIRFELRSRENVIMEDVDEFRTSQRCSCCETRICNMVALTHRKKQDGTWECTEGRKRIHKILHCKSSQSGTPRQQSGGRLHCGKTWDRDVNASRNILMLTLHQVFGRERPLAFRREVPRKTHQHLILIWGHRRLNGLPQRRLGISSRTSSTCCTPQRCPNATICSLDDYKVCPTLFENNCMYYHGRAQ

SEQ ID NO: 1156 - protein, 322 aa, Chlamydomonas sp.
TPTALLGVLKDVGLVESLEKTLTNKEHWESVFDVENIRSTGKGVFTCTIDTDGVMACTHFLRAEKKKISIKDDGTAIKKQTKTLREFSESDPNVVVVANDPGRCCNIAFLTWKKNKVEEKIRGGRKRKRHCEFGSKRLTRERYYVESGVFKSRGPTKKWLSNIQDCLDDLKDNSPKRTSLESFDAYVTVMVNHWDSRWGEMSKSRWGAQRLRLYGGKKRVLARFFNEVQADVGERKTIVIAYGSSKFAPGGKGELSVPTTSAFNAFRDRFKGRVAVIDEFRTTKIWHKDSTTVLQSVQSEKKGARFEACYGAVPPWRTASCL

SEQ ID NO: 1157 - protein, 621 aa, Chlamydomonas sp.
QCIRNLHVLNIRMPCMATKASVKLARPPMPLVSPGPSSVDGRIMARSERSGLQATNVSLTQAASKATSLSRNNNPAVVKSFSTHVCPHTNNNPTCSDSNCSCKPIFLTNIPDASKSLKSRTSDQGSTSSAQDFYEYWDSSRQDLYRQLLWLPKTGSQGLVSSSLNGFARSTPARSSFSITKTEPLKTSLEKTSCPSFKYIVADGTVEDATKSNAKPKLRTLKLKLNPTKAQKSMLAEFAGCSRFMYNKAVAARLGVGSTHKSVFRIRDRYVTNKVRGKGKMPNPYFKNRQWLLQCPKSVRQSAIKSALANIKACFSNLKAGNIKQFSAPFRRKKTELERGWVIEMDQKNVSKDGDKLFIFKEILGNMRYFGSKQLHKLMPEENPTHDPKVQKSRFGEYFLVLSVAARDRRAERKPVNPDKVATASIDPGVRKTMVTYSPENEESFMLGQGQASDLVKLLLVHDKLQSRLDTEKTLRSKERMKIKKLMIRIRKTIFYLKKEFRDQTTNFLAARYDVLLVPQLETAKMTISAERELTTKVARQMLTLSHSVLFNRLKEKCEEYGTVFLHVLEHYTSQTCPMCGFLNKCGETYTCKNCQFTCDRDIVGAAGIFLKAVRTENPCS

SEQ ID NO: 1158 - protein, 621 aa, Chlamydomonas sp.
QCIRNLHVLNIRMPCMATKASVKLARPPMPLVSPGPSSVDGQIMARSERSGLQATNVSLTQAASKATSLSRKNNPAVVKSFSTHVCPHTNNNPTCSDSNCSCKPIFLTNIPDASKSLKSRTSDQGSTSSAQDFYEYWDSSRQDLYRQLLWLPKTGSQGLVSSSLNGFARSTPARSSFSITKTEPLKTSLEKTSCPSFKYIVADGTVEDATKSNAKPKLRTLKLKLNPTKAQKSMLAEFAGCSRFMYNKAVAARLGVGSTHKSVFRIRDRYVTNKVRAKGKMPNPYFKNRQWLLQCPKSVRQSAIKSALANIKACFSNLKAGNIKQFSAPFRRKKTELERGWVIEMDQKNVSKDGDKLFIFKEILGNMRYFGSKQLHKLMPEENPTHDPKVQKSRFGEYFLVLSVSARDRRAERKPVNPDKVATASIDPGVRKTMVTYSPENEESFMLGQGQASDLVKLLLVHDKLQSRLDTEKTLRSKERMKIKKLMIRIRKTIFYLKKEFRDQTTNFLAARYDVLLVPQLETAKMTISAERELTTKVARQMLTLSHSVLFNRLKEKCEEYGTVFLHVLEHYTSQTCPMCGFLNKCGETYTCKNCQFTCDRDIVGAAGIFLKAVRTENPCS

SEQ ID NO: 1159 - protein, 620 aa, Chlamydomonas sp.
QCIRNLHVLNIRMPCMATNASVKLARPPMPLVSPGPSSVDGRIMARSERSGLQATNVSLTQAASKATSSSRKKKPTVVKSFSTHVCPHTNNNPTCSDSNCSCKPIFLTNIPDAKSLKSRTSDQGSTSSAQDFYEYWDSSRQDLYRQLLWLPKTGSQGLVSSSLNGFARSTPARSSFSITKTEPLKTSLDKTSCPSFKYIVADGTVEYATKSNAKPKLRTLKLKLNPTKAQKSMLAEFAGCSRFMYNKAVAARLGVGSTHKSVFRIRGRYVTNKVRGKGKMPNPYFKNRQWLLQCPKSVRQSAIKAALANIKACFSNLKVGNIKQFSAPFRRKKTELERGWAIEMDQKNISKDGDKLFIFKDILGNMRYFGSKQLHKMMPEENPTHDPKVRKSRFDEYFLVLSVAARDRRAERKPVHPDKVANASIDPGVRKTMVTYSPENEESFMLGQGQASDLVKLLLVHDKLQSRLDTEKTLRSKERMKIKKQMIRIQKIIFYLKKEFRDQTTNFLAARYDVLFVPQLETAKMTISAERELTTKVARQMLTLSHSVLFNRLKEKCEEYGTVFLHVLEHYTSQTCPMCGFLNKCGETYTCKNCQFTCDRDIVGAAGIFLKAVRTENPCS

SEQ ID NO: 1160 - protein, 385 aa, Chlamydomonas sp.
IGVLHTLSPLSGVLSKLIKPSVKKKKSCGPGEWEAYKLAQQKYDADVKDIKATDEYRHAKGRYDTLVNARKTVAGSFFKKPPVKTGWVFDCSICTDGVSLSMQYSKTVQVRVSDLKKTSKRSRDEEGMSVSEQYDHKLKTTLPDMGIVVLGVDPGRSNIATVTYLADDKSKTWKLTRGAFYHKSGIKKQKKQQEKRFSDMIPRWESLRENGAALSTSRKDDISAYLKNYATFSDEWWRMALRRRESRDNFQRYIGKRKAMDSFWAGIKRNMKLDHPDLRVRVAYGSAITKLKATGPGEVAVPTGSMFASCKRIFKEEVHVTDEFKTTLMSWETGAKKECVYKIPSVQITTEGQIRLGRVVGSHPIEGDSKGLLSRPVGGEGVLHT

SEQ ID NO: 1161 - protein, 688 aa, Chlamydomonas sp.
GNVGAILYHQKKKNTHPLLMGVVQDKGDDDINISVVKKTLNSLCMDVSRHQISSRIQSMVLLINHAVAEAYLFANFHITRCLDDGDFDVKQLPHLDRNFYYRCLLAVSTSNVRKDTLGQSFNDTMVAFDALRPAGYVKVDVRPWRQVIADVSIQMATMACNSVWANVDRVVIKYLRFKHPSLKKHFKKIVKAVVQYPESKIDTIIPEGLVHAIHIKEVVSHLRALFPLPRGKQFNTRAHLTMRLFHHVLTELGEVGRVDPKDRKTKKSHPRLFSILPRKNGFTISYVPISSMTFMKLLSMGDSPLESVSGDGRYENHTMLWRKYFNVQGLETKRSRFDNRILSDGKEVSVQMKQKGKEEVVEEGENAGYPKDANIVECKDAVGALRVGVDPGMTDIVTVASSAGRIESFSSARFSEVAGYNTSKRRTYKWNDETQDLVKSIPSPNTSNMVDLQDHVRAYLTALPILLQHRANKGYRSMRFFRYVGKQKTIEKVCDVIAPRAQTTVVGFGNWSNQGYGISRSCSGPIKEIRRCLSLRKNVLFKNVDERNTSCKCHGCFQRLVNMKADIVVWRGVCKESPIDGSITVGKQKMVVKNVKVHKVLHCRDSVKSASSNVRCGATWNRDVNAAKNLLLLLTTWMDGRERPEAFCVPSPPPKTTVSIEASVSAKPTDPPGFVTSLPCYPLGQLKC

SEQ ID NO: 1162 - protein, 342 aa, Chlamydomonas sp.
STCPLNLPNSSSSRLIAFFRAHFTTHIFSTVLYSGGGLAMRPLSSHKRIISSFLSFEEYATSANFSSSFNFATVGGFVAILHNFYITELFIQTWVPPQFYMGAAPILLAHRASRGYRNLRFRRYCKKQKLIVEIADFVAPREKSAKVLVGFGDWKGLGATPISRRTCGPLQAIRFELRSRGNVIMEDVDEFRTSQRCSCCENRLCNIVALTHRKKQDGTGWECTEGRKRIHKILHCKSSQSGAPRQQSGGRLHCGKTWDRDVNASRNILMLTLHQVFGRERPLAFRRDAPRSSSKTPPPPDTDMGTQTVERFTKEATRNIFENLFNLLHPPMLPKRNDLQSG

SEQ ID NO: 1163 - protein, 786 aa, Chlamydomonas sp.
KLCKMATKPPTVAKLKELLKLAEVAYSSKDKKDDIIRLCEDNGLIARPPPEYKTVEKMCVVKCALKKAMSLDDEEFGKFRGHVDQLVNVVSRMLRRSSLVLTFHVTRLMEGDLPIPNMYDMKDTYWKDWLRIGVDGVFPDEESRISYEAVKDIIGKVLGSDDPDYINSYPIYFDQVLNYAGHTLSTVVSNIAWVPLVPRLTRLTKATLNALGAPKTIRVYDVMRVIQQEIQEMESWPESVQEYVREVRVRLKVPDGSRLYDDYGKDMDFPTMVRFNYWMQTRLEAMGARRIRLMPIFNVQRAHVRLDMKTLVNLFRHVFPKDPNIVELSKWENVKDPDRFMLPLKPAVKKKKSCGPGEWEAYKLAQQKYDADVKDIKATDEYRHAKGRYDTLVNARKTVAGSFFKKPPVKTGWVFDCSICTDGVSLSMQYSKTVQVRVSDLKKTSKRSRDEEGMSVSEQYDHKLKTTLPDMGIVVLGVDPGRSNIATVTYLADDKSKTWKLTRGAFYHKSGIKKQKKQQEKRFSDMIPRWESLRENGAALSTSRKDDISAYLKNYATFSDEWWRMALRRRESRDNFQRYIGKRKAMDSFWAGIKRNMKLDHPDLRVRVAYGSAITKLKASGPGEVAVPTGSMFASCKRLFKEEVHVTDEFKTTLMSWETGAKKECVYKIPSVQITTEGKIRLGYELLGHTPLKETPKVSYRDQLAVRVYCTRKKIQEKHRRGGLAPTLVDNKSIKRYPEVRGLRFSPETSTYSDRDRSSALTIARLHCMELLGQGRPLPFCRDACC

SEQ ID NO: 1164 - protein, 686 aa, Chlamydomonas sp.
METIVNKEPPDKRTRPDRAAKIKDRKNGEENVVKCTLSRIIADKDNKGVIIKVIKERVNSVSKRTYLAGVAVNRMLKEVFEGVPDAQLHTVSVPSVDQNFIRQLMVGSRQAHMETRDATVERFFHNNYWFREKIEGREVIVKKKKQYVGAIARYDGDRNLYSHASKKYLTNFNNHYRVHLSTWIKKFVYSKENRILAKEIKDEHGIDETVFHLYLLYDIHSWGVKEDLIAIHSLLPERTKMLLKIQHSILGRDEINRQWLKSVSNCAKMILYNVFINRYLEATEDEGYAKLVNIAPIPTVKHAFITIDTDGLLGVLKDVGLMERLEKTLTNKEHWESVFDVENIRSTGKGVFTCTIDTDGVMACTHFLRAEKKKISIKDDGTAIKKQTKTLREFSESDPNVVVVANDPGRCNIAFLTWKKNKVEEKDKGGRKRKRHCEFGSKRLTRERYYVESGVFKSRGPTKKWLSNIQDCLDDLKDNSPKRTSLVSFDAYVTVMVNHWDSRWGEMSKSRWGAQRLRLYGGKKRVLARFFNEVQEDVGERKTIVVAYGSAKFAPGGKGELSVPTTSAFNAFSDRFKGRVAIIDEFRTTKIWHKDSTTVLQSVQSEKEGRTVRGLLWCSSTMENSKLFVNRDLNAAINIHNCFTMYPIRPGILARPKKYCKLEVVVGRKIDYKLTGSLQNAVSSEV

SEQ ID NO: 1165 - protein, 422 aa, Chlamydomonas sp.
PFLCTTRYCRRPSKKNECHFESCKADVASKNHQGIWERFANLKKVEAVSRKFGYRIVTDGFAVSIMMNKPTCLTCSMPADSFSTRAHEYVTTDEGGIVSFRDNVVVAAVDSGVTDIVTVTGIDGGTRSYSSAQYYRKGLIFKSQLQTDVWNLETADIVGDIIPDRDSSRSEQIGAYARFYMGAAPILLAHRASRGYRNLRFRRYCKKQKLIVEIADFVAPREKSAKVLVGFGDWKGLGATPISRRTCGPLQAIRFELRSRGNVIMEGVDEFRTSQRCSCCENRLCNMVALTHRKKQDGTGWECTEGRKRIHKILHCKSSQSGAPRQQSGGRLHCGKTWDRNVNASRNILMLTLHQVFGRERPLAFRRDAPRSSSKTPPPPDTDMGTQTVERFTKEATRNIFENLFSLLHPPTLPKSNDLQSG

SEQ ID NO: 1166 - protein, 793 aa, Chlamydomonas sp.
KMATKPPTVAKLKELLKLAEVPYSSKSNKDDLVRLCEDNGLIARPPPEYKTVEKMCVVKCALKKAMSLDDEEFGKFREHVDQLVNVVSRMLRRSSLVLTFHITSLLEKGLDIPDLYNMKDTYWKDWLRIGVDGIFPDEESKISYEAVKDSIGDVIGNDDADYIESYPIYFDQVLNYAGHTLSTVVSNNAWVPLIPRLARLTSTTLNKLNAPKTLDTSKIIRGYDVMQAIQQEVQHMEGWPESVQEYVNEVREMLSVPDGSRVYDNYGKDMDFPTMVRFNYWIQTRLEDMDARRIRLMPIFNVQRVHVRLDLKTLVNLFRHMFPNDQNIVELSKWEHVKNPDSFMLPQRPAQKKKKSCGPGEWEAYKSVLKQYDDDVKDIKATDEYRHAKGLYDTLVNARKTVAGSFFRKPPVKNGWVFDCSICTDGVSLSMQYSKTVQVLVSDLKKTCKKPRKEEGIKIAEKYDGSLKTILPDMGIVVLGVDPGRSNIATVTYLADDKNKTWKLTRGAFYHKSGIKKQTRQKELRFADMIPMWESLRENGAALSTSRTDKISAYLSNYAKFSDEWWRLALRRRESRDNLQRYIGKRKVKDSFWAGIKRCMMKELPDMKVCVAYGSAITKMKPTGPGEVAVPTGAMFASCKRIFKEDVSVTDEFKTTLMSWETGKEKERVYKIPSVCSADVKLRLGGERFGHTKSKTMPKVADCDHLGVRLYNKRKGAQEKHRRGGFATSLVDSQKSIERYPEVRGLRFSPETCIYSDRDRSSALTIARLHCMELMGLGRPLPFAHSSSVVVDE

SEQ ID NO: 1167 - protein, 342 aa, Chlamydomonas sp.
GNCLTMRLFHHVLTELGADLKEKTTKKRPRLFSILPRKGGFTISYVPISSMTLMKLLSMGDSPLESVRGDGRHENHSMLWRKYFNVQGLETKGSRFDNRILSDGKGVSVQMKHQVGKDIAGEGGGDNAGYSKDASIEDCQDASLRQGALRVGIDPGMTDIVTIASSDGRVESFSSARFSEAAGYNTSNRRTNKWNADTQDLVKSIPSPTTSSMHDMQDHVRGYLSALPTLQHRANRGYRSMRFFRYVGKQKTIEKVCYLIAPKAQKKTIEEKVCDVIAPKAKKTVVGFGNWSNQGYGISRSCSGPVKEIRKCLSRRQNVLFKNVDERNTSCTCHGCFQKLVT

SEQ ID NO: 1168 - protein, 622 aa, Chlamydomonas sp.
METIVNKEPPDKRTRPDRAAKIKDRKNGEENVVKCTLSRIIADKDNKDVITKVIKERVDSVSKRTYLAGVAVNRILKEVFEGVPDAQLHTVSVPSVDQNFIRQLMVGSRQAHMETRDATVERFIHNNYWFREKIEGREVIVKKKKQYVGAIARYDGDRNLYSHASKKYLTNFNNHYRVHLSTWIKKFVYSKENRILAKEFKDEHGIDETVFHRYLLYDIHSWGVKEDLIAIHSLLPERTKMLLKIQHSIIGRDEINRQWLKSVSNSAKMIRYNVFINRYLEATEDEGYAKLVNIAPIPTVKHSFITIDTDGLLGVLKDVGLVESLEKTLTNKEHWESVFDVENIRSTGKGVFTCTIDTDGVMACTHFLRAEKKKISIKDDGTAIKKQTKNLREFSESDPNVVVVANDPGRCNIAFLTWKKNKVEEKDNGGRKRKRHCEFGSKRLTRERYYVESGVFKSRGPTKKWLSNIQDCLDDLKDNSPKRTSLESFDAYVTVMVNHWDSRWGEMSKSRWGAQRLRLYGGKKRVLARFFNEVQADVGERKTIVIAYGSSKFAPGGKGELSVPTTSAFNAFRDRFKGRVAVIDEFRTTKIWHKDSTTVLQSVQSEKKGARFEACYGAVPPW

SEQ ID NO: 1169 - protein, 686 aa, Chlamydomonas sp.
METIVNKEPPDKRTRPDRAAKIKDRKNGEENVVKCTLSRIIADKDNKDVITKVIKERVDSVSKRTYLAGVAVNRILKEVFEGVPDAKLHTVSVPSVDQNFIRQLMVGSRQAHMETRDATVERFFHNNYWFREKIEGREVIVKKKKQYVGAIARYDGDRNLYSHASKKYLTNFNNHYRVHLSTWIKKFVYSKENRILAKEFKDEHGIDETVFHRYLFYDIHSWGVKEDLIAIHSLLPERTKMLLKIQHSIIGRDEINRQWLKSVSNSAKMIRYNVFINRYLEATEDEGYAKLVNIAPIPTVKHSFITIDTDGLLGVLKDVGLVESLEKTLTNKEHWESVFDVENIRSTGKGVFTCTIDTDGVMACTHFLRAEKKKISIKDDGTAIKKQTKTLREFSESDPNVVVVANDPGRCNIAFLTWKKNKVEEKDNGGRKRKRHCEFGSKRLTRERYYVESGVFKSRGPTKKWLSNIQDCLDDLKDNSPKRTSLESFDAYVTVMVNHWDSRWGEMSKSRWGAQRLRLYGGKKRVLARFFNEVQADVGERKTIVIAYGSSKFAPGGKGELSVPTTSAFNAFRDRFKGRVAVIDEFRTTKIWHKDSTTVLQSLKSEKKGRTVRGLLWCSSTMENSKLFVNRDLNAAINIHNCFTMYPTRPGILARPKKYCKLEVVVGRTIDYKLTGSLQNAVSSEV

SEQ ID NO: 1170 - protein, 241 aa, Chlamydomonas sp.
NEMEYHVLEYIGQYYENDGFVVITINILLNTHLIFKSQRQTDFWNLETADIVGGIIPDRDSSSSEQIGAYARFYMGAAPILLAHRASRGYRNLRFRRYCKKQKLIVEIADFVAPREKSTKVLVGFGDWKGLGATPISRRTCGPLQAIRFELRSRENVIMEDIDEFRTSQRCSCCETRLCNMVALTHRKKQDGTGWECTEGRKRIHKILHCKSSQSDRPLQNRAAVASTAGKTWDRATELFP

SEQ ID NO: 1171 - protein, 621 aa, Chlamydomonas sp.
QCIRNLHVLNIRMPCMATNASVKLARPPMPLVSPGPSSVDGRIMARSERSGLQATNVSLTQAASKATSSSRKKNPAVVKSFSTHVCPHINNNPTCSDSNCSCKPIFLTNIPDASKSLKSRTSDQGSTSSAQDFYEYWDSSRQDVYRQLLWLPKTGSQGLVSSSLNGFARSTPARSSFSITKTEPLKTSLEKTSCPSFKYIVADGTVEDATKSNAKPKLRTLKLKLNPTKAQKSMLAEFAGCSRFMYNKAVAARLGVGSTHKSVFRIRDRYVTNKVRGKGKIPNPYFKNRQWLLQCPKSVRQSAIKAALANIKACFSNLKAGNIKQFSAPFRRKKTELERGWAIEMDQKNVSKDGDKLFIFKDTLGNMRYFGSKQLHKLMPEENPTHDPKVQKSRFGEYFLVLSVAARDRRAERKPVHPDKVATASIDPGVRKTMVTYSPENEESFMLGQGQASDLVKLLLVHDKLQSRLDTEKTLRSKERMKIKKQMIRIRKRIFYLKKEFRDQTTNFLAARYDVLLVPQLETAKMTISAERELTTKVARQMLTLSHSVLFNRLKEKCEEYGTVFLHVLEHYTSQTCPMCGCLNKCGETYTCKNCQFTCDRDIVGASGIFLKAVRTENPCS

SEQ ID NO: 1172 - protein, 803 aa, Chlamydomonas sp.
PRMEHVCDVCIKSSVMYKLCKMATKPPTVAKLKELLKLAEVACSSKDKKDDIVRLCEDNGLIARPPPEYKTVEKMCVVKCALKKAMSLDDEEFGKFREHVDQLVNVVSRILRRSSLVLTFHVTRLMEGDLPIPNMYDMKDTYWKDWLRIGVDGVFPDEESRISYESVKDVIGKMLGSDDPDYINSYPIYFDQVLNYAGHTLSTVVSNNAWVPLVPRLTRLTKATLNALEAPKTIRVYDVMRVIQQEIQEMESWPESVQEYVRKVRVRLKVPDGSRLYDDYGKDMDFPTMVRFNYWMQTRLEAIGARRIRLMPIFNVQRAHVRLDMKTLVNLFRHVFPKDPNIVELSKWKNVKDPDRFMLPLKPAVKKKKSCGPGEWEAYKLAQQKYDADVNDIKDTDEYRHAKGRYDTLVNARKTVASSFFKKPPVKTGWVFDCSICTDGVSLSMQYSKTVQFRVSDLKKTSKRSRDDEGMSVSEQYDHKLKTTLPDMGIVVLGVDPGRSNIATVTYLADDKSKTWKLTRGGFYHKSGIKKQKKQQEKRFSDMIPRWESLRENGAALSTSRTDDISAYLKNYATFSDEWWRMALLRRESRDNFQRYIGKRKAMDSFWSGIKRNMKLDHPDLRVRVAYGSAITTLKATGPREVAVPTESMFASCKRLFKEEVHVTDEFKTTLMSWETGAKKECVYKIPSVQITTEGQIRLGYELLGHTPLKETPKVSYRDQLAVRVYCTRKQIQEKHRRGGLAPSLVDNNSIKRYPEVRGLRFSPETSTYSDQDRSSALTIARLHCMELMGQGRPLPFCRDACC

SEQ ID NO: 1173 - protein, 406 aa, Chlamydomonas sp.
YSVLPIWRKYFNVQGLETKGSRFDNRILSVGKGVSVQMKHQVGKDIAGEGGGDNAGYPKDASIEDCQDASLRQDALRVGIDPGMTDIVTIASSDGRVESFSSARFSEAAGYNTSNRRTNKWNADTQDLVKSIPSPTTSSMHDMQDHVRGYLSALPTLLQHRANRGYRSMRFFRSVGKQKTIEKVCDLIAPKAQKKTIEEKVCDVIAPKAKKTVVGFGNWSNQGYGIIRSCSGPVKEIRKCLSRRQNVLFKNVDERNTSCTCHGCFQKLVNMKADSVAWRRVQNEPSALIDGAPTTTTTTTFEKQKTVVKNVKVHKVLHCHNSVKSASSNVRCGATWNRDVNAAKNLLLLLTTWMDGKERPAAFCVPSSSPTPKPQFPERQMWALNQPNHLGQLAAYNCYPLGQLKC

SEQ ID NO: 1174 - protein, 803 aa, Chlamydomonas sp.
PRMEHVCDVCIKSSVMYKLCKMATKPPTVAKLKELLKLAEVAYSSKDKKDDIVRLCEDNGLIARPPPEYKTVEKMCVVKCALKKAMSLDDEEFGKFREHVDQLVNVVSRMLRRSSLVLTFHVRRLMEGDLPIPNMYDMKDTYWKDWLRIGVDGVFPDEESRISYESVKDVIGKVLGSDDPDYINSYPIYFDQVLNYAGHTLSTVVSNNAWVPLVPRLTRLTKATLNALEAPKTIRVYDVMRVIQQEIQEMESWPESVQEYVREVRVRLKVPDGSRLYDDYGKDMDFPTMVRFNYWMQTRLEAIGARRIRLMPIFNVQRAHVRLDMKTLVNLFRHVFPKDPNIVELSKWKNVKDPDRFMLPLKPAVKKKKSCGPGEWEAYKLAQQKYDADVNDIKDTDEYRHAKGRYDTLVNARKTVASSFFKKPPVKTGWVFDCSICTDGVSLSMQYSKTVQFRVSDLKKTSKRSRDDEGMSVSEQYDHKLKTTLPDMGIVVLGVDPGRSNIATVTYLADDKSKTWKLTRGGFYHKSGIKKQKKQQEKRFSDMIPRWESLRENGAALSTSRTDDISAYLKNYATFSDEWWRMALLRRESRDNFQRYIGKRKAMDSFWAGIKRNMKLDHPDLRVRVAYGSAITTLKATGPGEVAVPTGSMFASCKRLFKEEVHVTDEFKTTLMSWETGAKKECVYKIPSVQITTEGQIRLGYELLGHTALKETPKVSYRDQLAVRVYCTRKQIQEKHRRGGLAPSLVDNNSIKRYPEVRGLRFSPETSTYSDWDRSSALTIARLHCMELMGQGRPLPFCRDACC

SEQ ID NO: 1175 - protein, 237 aa, Chlamydomonas sp.
NYAKFSDEWWRLALRRRESRDNLQRYIGKRKVKDSFWAGIKRCMMKEPPDMKVCVAYGSAITKLKPTGPGEVAVPTGAMFASCKRIFKEDVSVTDEFKTTLMSWETGKEKERVYKIPSVCSADVKLRLGGERFGHTKSKTMPKVADCDHLGVRLYNKRKGAQEKHRRGGFATSLVDSQKSIERYPEVRGLRFSPETCIYSDRDRSSALTIARLHCMELMGLGRPLPFAHSSSVVVDE

SEQ ID NO: 1176 - protein, 308 aa, Chlamydomonas sp.
DMTLTLCAFYHKSGIKKQTRQKELRFADMIPMWESLRENGAALSTSRTDKISAYLSNYAKFSEEWWRLALRRRESRDNLQRYIGKRKVKDSFWAGIKRCMMKELPDMKVCVAYGSTIMKLKPTGPGEVAVPTGGMFASCKRIFKEDVSVTDEFKTTLMSWKTGKEKERVYKIPSVCSADVKLRLGGERFGHTKSKTMPKVADCDHLGVRLYNKRKGAQEKHRRGGFATSLVDSQKSIERYPEIRGLRFSPETCIYSDRDRSSALTIARLHCMELMGLGRPLPFAHSSSVVVDYITLHYITLHYMLKST

SEQ ID NO: 1177 - protein, 773 aa, Chlamydomonas sp.
ECSREPVCRSRLHQNVFGVQFLMENGIGASSSLVHEADQHDDVAELVDYEGEEDGECAPGRAICVVKMKLSTFIPHDWLRNKIDTLVLDMNKLLGEGYIFANFHIARLFENGIAVPPVNRNFFYRCLIAVSTNNCKGSTLGEDFESSRLLFDLLREPGQSKVDIRGSVKNQIIADLSILMATMASNHLWTNLERRITTYLKWKYPQIAKRLRSDIVAALIKCPTKNLDVIFKMSTHTTKLPTKLPTSRLRSAKSAVALAKKRVGRKEPEGSPLRVRLTKLQERLEKLSEAWLSSKNLRVDADNAKRFFAREVAFCLRGVLPLPSGNTVASRAHMTLPLYHKILSETIEEKRKTKNEKHRTFSLLPYKSGFTLSHIPISKMAFFYMVNECHFDSCKADVASKNHQGIWERFANLKKVETVSRKFGYRIVTDGFAVSILMNKPTCLTCSMPADAFSTRAHEYVTTDEGGIVSFLDNVVVAAVDPGVTDIVTVTGLNGGTRSYSSAQYYRKGLIFKSQRQTDVWNLETADIVGGIIPDRDSSSSEQIGAYARFYMGAAPILLAHRASRGYRNLRFRRYCKKQKLIVEIADFVAPRKKSAKVLVGFGDWKGLGATPISRRTCGPLQAIRFELRSRENVIMEDIDEFRTSQRCSCCENHLCNMVALTHRKKQDGTGWECTEGRKRIHKILHCKSSQSGAPRQQSGGMLHCGKTWDRDVNASRNILMLTLHQVFGRERPLAFRRDAPRSSSTTPPPDTDMGTQTVTLHYITLHYMLKST

SEQ ID NO: 1178 - protein, 794 aa, Chlamydomonas sp.
ECSREPVCRSRLHQNVFGVQFVMENGIGESSSLVHEADQHDDVAELVDYEGEEDEECAPGRAICVVKMKLSTFIPHDWLRKKIDTLVLDMNKLLGEGYIFANFHIARLFENGIAVPPVNRNFFYRCLIAVSTNKCKGSTLGEDFESSRLLFDLLREPGQSKVDIRGKVKNQIIADLSILMATMASNHLWTNLERRITTYLKWKYPQIAKRLRSDIVTAVIKCPTKNLDVIFKMSPHTTKLPTKLPTTRLRSAKSAVALAKKRVGRKEPEGSPLRVRLTKLQERLEKLSESWLSSKNIRVDADNAKRFFARDVAFCLRGVLPLPSGNTFASRAHMTLPLYHKILSETIEEKRKTKNEKHRTFSLLPYKSGFTLSHIPISKMAFFYMVNECHFDSCKADVASKNHQGIWERFANLKKVETVSRKFGYRIVTDGFAVSILMNKPTCLTCSMPADAFSTRAHEYVTTDEGGIVSFLDNVVVAAVDPGVTDIVTVTGLNGGTRSYSSAQYYRKGLIFKSQRQTDVWNLETADIVGGIIPDRDSSSSEQIGAYARFYMGAAPILLAHRASRGYRNLRFRRYCKKQKLIVEIADFVAPREKSAKVLVGFGDWKGLGATPISRRTCGPLQAIRFELRSRENVIMEDIDEFRTSQRCSCCENHLCNMVALTHRKKQDGTGWECTEGRKRIHKILHCKSSQSGAPRQQSGGMLHCGKTWDRDVNASRNILMLTLHQVFGRERPLAFRRDAPRSSSTTPPPPPDTDMGTQTVERFTKEATRNIFENLFNLLHPPTLPKSNDLQSG

SEQ ID NO: 1179 - protein, 686 aa, Chlamydomonas sp.
METIVNKEPPDKRTRPDRAAKIKDRKHGEENVVKCTLSRIIADKDNKDVITKVIKERVDSVSKRTYLAGVAVNRILKEVFEGVPDAQLHTVSVPSVDQNFIRQLMVGSRQAHMETRDATVERFFHNNYWFREKIEGREVIVKKKKQYVGAIARYDGDRNLYSHASKKYLTNFNNHYRVHLSTWIKKFVYSKENRILAKEFKDEHGIDETVFHRYLLYDIHSWGVKEDLIAIHSLLPERTKMLLKIQHSIIGRDEINRQWLKSVSNSAKMIRYNVFINRYLEATEDEGYAKLVNIAPIPTVKHSFITIDTYGLLGVLKDVGLVESLEKTLTNKEHWESVFDVENIRSTGKGVFTCTIDTDGVMACTHFLRAEKKKISIKDDGTAIKKQTKTLREFSESDPNVVVVANDPGRCNIAFLTWKKNKVEEKDKGGRKRKRHCEFGSKRLTRERYYVESGVFKSRGPTKKWLSNIQDCLDDLKDNSPKRTSLESFDAYVTVMVNHWDSRWGEMSKSRWGVQRLRLYGGKKRVLARFFNEVQADVGERKTIVIAYGSSKFAPGGKGELSVPTTSAFNAFSDRFKGRVAVIDEFRTTKIWHKDSTTVLQSVQSEKEGRTVRGLLWCSSTMENSKLFVNRDLNAAINIHNCFTMYPTRPGILARPKKYCKLEVVVGRTIDYKLTGSLQNAVSSEV

SEQ ID NO: 1180 - protein, 794 aa, Chlamydomonas sp.
ECSREPVCRSRLHQNVFGVQFVMENGIGESSSLVYEADQHDDVAELVDYEGEEDGECAPGRAICVVKMKLSTFIPHDWLRNKIDTLVLDMNKLLGEGYIFANFHIARLFENGIAVPPVNRNFFYRCLIAVSTNKCKGSTLGEDFESSRLLFDLLREPGQSKVDIRGSVKNQIIADLSILMATMASNHLWTNLERRITTYLKWKYPQIAKRLRSDIVAALIKCPTKNLDVIFKMSPHTTKLPTKLPTSRIRSAKSAVALAKKRVGRKEPEGSPFRVRLTKLQERLEKLREAWLSSKNLRVDADNAKLFFAREVAFCLRGGLPLPSGNTFASRAHMTLPLYHKILSETIEEKRKTKNEKHRTFSLLPYKSGFTLSHIPISKMAFFYMVNECHFDSCKADVASKNHQGIWERFANLKKVETVSRKFGYRIVTDGFAVSILMNKPTCLTCSMPADAFSTRAHEYVTTDEGGIVSFLDNVVVAAVDLGVTDIVTVTGLNGGTRSYSSAKYYRKGLIFKSQRQTDVWNLETADIVGGIIPDRDSSSSEQIGAYARFYMGAAPILLAHRASRGYRNLRFRRYCKKQKLIVEIADFVAPRKKSAKVLVGFGDWKGLGATPISRRTCGPLQAIRFELRSRENVIMEDIDEFRTSQRCSCCENHLCNMVALTHRKKQDGTGWECTEGRKRIHKILHCKSSQSGAPRQQSGGMLHCGKTWDRHVNASRNILMLTLHQVFGRERPLAFRRDAPRSSSTTPPPPPDTDMGTQTVERFTKEATQNIFENLFNLLHPPTLPKSNDLQSG

SEQ ID NO: 1181 - protein, 543 aa, Chlamydomonas sp.
VSGWWASTQMATMACNSVWANVDRVVIKYLRLKHPSLKKHFKKIVKAVVQYPESKIDTIISEGLVHAIHIKEVVSHLRALFPMPRGKQFNTRAHLTMRLFHHVLTELGEVGRVDPKDKKTRKNHPRLFSILPRKNGFTISYVPISSMTFMKILSMGDSPLESVSGDGRYENHTMLWRKYFNVQGLETKRSRFDNRILSDGKGVSVQMKQTGKEEVVEEGENAGYPKDANIVECKDAVGALRVGVDPGMTDIVTVASSAGRIESFSSARFSEVAGYNTSKRRTYKWNDETQDLVKSIPLPNTSNMSDLQDHVRTYLKALPILLQHRANKGYRSMRFFRYVGKQKTIEKVCDVIAPRAQTTVVGFGNWSNQGYGISRSCSGPIKEIRRCLSRRKNVLFKNVDERNTSCKCHGCFQRLVNMKADSVVWRGVCKESPIEGSITVEKQKMVVKNVKVHKVLHCRDSVKSASSNVRCGATWNRDVNAAKNLLLLLTTWMDGRERPEAFCVPSPPPKTTVSIEASVSAKPTDPPGFVSSLPCYPLGQLKC

SEQ ID NO: 1182 - protein, 688 aa, Chlamydomonas sp.
RNVGTILYHQKKKNTHPLLMGVVQDKGDDDINISVVKKTLNSLCMDVSRHQISSRIQSMVLLINHAVAVAYLFANFHITRCLDDGDFDVKQLPHLDRNFYYRCLLAVSTSNVRKDTLGQSFNDTMVAFDALRPAGYVKVDVRPWGQVIADVSIQMATMACNSVWANVDRVVIKYLRLKHPSLKKHFKKIVKAVVQYPESKIDTIISEGLVHAIHIKEVVSHLRALFPMPRGKQFNTRAHLTMRLFHHVLTELGEVGRVDPKDKKTRTNHPRLFSILPRKNGFTISYVPISSMTFMKILSMGDSPLESVSGDGRYENHTMLCRKYFNVQGLETKRSRFDNRILSDGKGVSVQMKQTGKEEVVEEGENAGYPKDANIVQCNDAVGALRVGVDPGMTDIVTVASSAGRIESFSSARFSEVAGYNTSKRRTYKWNDETQDLVKSIPSPNTSNMSDLQDHVRAYLKALPILLQHRANKGYRSMRFFRYVGKQKTIEKVCDVIAPRAQTTVVGFGNWSNQGYGISRSCSGPIKEIRRCLSRRKNVLFKNVDERNTSCKCHGCFQRLVNMKADSVVWRGVCKESPIEGSITVEKQKMVVKNVKVHKVLHCRDSVKSASSNVRCGATWNRDVNAAKNLLLLLTTWMDGRERPVAFCVPSPPPKTTVSIEASVSAKPTDPPGFVSSLPCYPLGQLKC

SEQ ID NO: 1183 - protein, 621 aa, Chlamydomonas sp.
QCIRNLHVLNIRMPCMATKASVKLARPPMPLVSPGPSSVDGRIMARSERSGLQATNVSLTQAASKATSLSRKKNPAVVKSFSTHVCPHTNNIPTCSDSNCSCKPIFMTNIPDASKSLKSRTSDQGSTSSAQDFYEYWDSSRQDLYRQLLWLPKTGSQGLVSSSLNGFARSTPARSSFSITKTEPLKTSLEKTSCPSFKYIVADGMVEDATKSNAKPKLRTLKLKLNPTKAQKSMLAEFAGCSRFMYNKAVAARLGVGSTHKSVFRIRDRYVTNKVRGKGKMPNPYFKNRQWLLQCPKSVRQSAIKSALANIKACFSNLKAGNIKQFSAPFRRKKTELERGWVIEMDQKNVSKDGDKLFIFKEILGNMRYFGSKQLHKLMPEENPTHDPKVQKSRFGEYFLVLSVAARDRRADRKPVHPDKVATASIDPGVRKTMVTYSPENEESFMLGQGQASDLVKLLLVHDKLQSRLDTEKTLRSKERMKIKKLMIRIRKTIFYLKKEFRDQTTNFLAARYDVLLVPQLETAKMTISAERELTTKVARQMLTLSHSVLFNRLKEKCEEYGTVFLHVLEHYTSQTCPMCGFLNKCGETYTCKNCQFTCDRDIVGAAGIFLKAVRTENPCS

SEQ ID NO: 1184 - protein, 517 aa, Chlamydomonas sp.
FLTNIPDASKSLKSRTSDQGSTSSAQDFYEYWDSSRQDLYRQLLWLPKTGSQGLVSSSLNGFARSTPARSSFSITKTEPLKTSLEKTSCPSFKYIVADGTVEDATKSNAKPKLRTLKLKLNPTKAQKSMLAEFAGCSRFMYNKAVAARLGVGSTHKSVFRIRDRYVTNKVRGEGKMPNPYFKNRQWLLQCPKSVRQSAIKAALANIKACFSNLKAGNIKQFSAPLRRKKTELERGWAIEMDQKNVSKDGDKLFIFKDILGNMRYFGSKQLHKLMPEENPTHDQKVQKSRFGEYFLVLSVAARDRRAERKPVHPDKVATASIDPGVRKTMVTYSPENEESFMLGQGQASDLVKLLLVHDKLQSRLDTEKTLRSKERMKIKMQMIRIRKRIFYLKKEFRDQTTNFLAARYDVLLVPQLETAKMTISAERELTTKVARQMLTLSHSVLFNRLKEKCEEYGTVFLHVLEHYTSQTCPMCGFLNKCGGETYTCKNCQFTCDRDIVGAAGIFLKAVRTENPCS

SEQ ID NO: 1185 - protein, 795 aa, Chlamydomonas sp.
LWKMATKPPTVAKLKELLKLAEVPYSSKSNKDDLVRLCEDNGLIARPPPEYKTVEKMCVVKCALKKAMSLDDEEFGKFREHVDQLVNVVSRMLRRSSLVLTFHITSLLEKGLEIPDLYNMKDTYWKDWLRIGVDGIFPDEESKISYEAVKDSIGDVIGNDDADYIKSYPIYFDQVLNYAGHTLSTVVSNNAWVPLIPRLARLTSTTLNKLNAPKTMDTSKIIRGYDVMQAIQQEVQNMEGWPESVQEYVNEVREMLSVPDGSRVYDNYGKDMDFPTMVRFNYWIQTRLEDMDARRIRLMPIFNVQRVHVRLDLKTLVNLFRHMLPNDQNIVELSKWEYVKNPDSFMLPQRPAQKKKKSRGPGEWEAFKSVLKQYDDDVKDIKATDEYRHAKGLYDTLVNARKTVAGSFFRKPPVKNGWVFDCSICTDGVSLSMQYSKTVQVLVSDLKKTCKNPRKEEGIKIAEKYDGSLKTILPDMGIVVLGVDPGRSNIATVTYLADDKNKTWTLTRGAFYHKSGIKKQTRQKELRFADMIPMWESLRENGAALSTSRTDKISAYLSNYAKFSEEWWRLALRRRESRDNLQRYIGKRKVKDSFWAGIKRCMMKELPDMKVCVAYGSAITKLKPTGPGEVAVPTGAMFASCKRIFKEDVSVTDEFKTTLMSWETGKEKERVYKIPSVCSADVKLRLGGERFGHTKSKTMPKVADCDHLGVRLYNKRKGAQEKHRRGGFATSLVDSQKSIERYPEVRGLRFSPETCIYSDRDRSSALTIARLHCIELMGLGRPLPFAHSSSVVVDE

SEQ ID NO: 1186 - protein, 566 aa, Chlamydomonas sp.
ERSGLQATNVSLTQEGIEQEKKNQQSSSHSLRTCPHTNNNPTCSDSNCSCKPIFLTNIPDASKSRTSDQGSTSSAQDFYEYWDSSRQDLYRQLLWLPKKGSQGLVSSSLNGFARSTPVRSSFSITKTEPLKTSLEKTSCPSFKYIVADGTVEDATKSNAKPKLRTLKMKLNPTKAQKSMLAEFAGCSRFMYNKAVAARLGVGSTHKSVFRIRDRYVTNKVKGEGKMPNPYFKNRQWLLQCPKSVRQSAIKAALANIKACFSNLKAGNIKQFSAPFRRKKTELERGWAIEMDQHNISKDGDKLFIFKDTLGNMRYFGRKQLQKLMPEKNPTHDQKVQKSRFGEYFLVLSVAARDRREERKPVHPGKVATASIDPGVRKTMVTYSPENEESFMLGKGQASDLVKLLLVHDKLHSRLDTEKTLRSKERMKIKMQMIRIRKRIFYLKKEFRDQTTNFLAARYDVLLVPQLETAKMTISAERELTTKVARQMLTLSHSVLFNRLKEKCEEYGTVFLHVLEHYTSQTCPMCGFLNKCGEPYTCKNCQFTCDRDILGAAGIFLKAVRTENPCS

SEQ ID NO: 1187 - protein, 616 aa, Chlamydomonas sp.
KNRPGGRNAHYVLYQNAMYGNQRFCKIGKASDALGVSRTVLRRWADNGTIRTIRTPGNQRLFDPRRNRAGKKNQQSSSHSLRTCPHTNNNPTCSDSNCSCKPIFLTNIPDASKSRTSDQGSTSSAQDFYEYWDSSRQDLYRQLLWLPKKGSQGLVSSSLNGFARSTPVRSSFSITKTEPLKTSLEKTSCPSFKYIVADGTVEDATKSNAKPKLRTLKMKLNPTKAQKSMLAEFAGCSRFMYNKAVAARLGVGSTHKSVFRIRDRYVTNKVKGEGKMPNPYFKNRQWLLQCPKSVRQSAIKAALANIKACFSNLKAGNIKQFSAPFRRKKTELERGWAIEMDQHNISKDGDKLFIFKDTLGNMRYFGRKQLQKLMPEKNPTHDQKVQKSRFGEYFLVLSVAARDRREERKPVHPGKVATASIDPGVRKTMVTYSPENEESFMLGKGQASDLVKLLLVHDKLHSRLDTEKTLRSKERMKIKMQMIRIRKRIFYLKKEFRDQTTNFLAARYDVLLVPQLETAKMTISAERELTTKVARQMLTLSHSVLFNRLKEKCEEYGTVFLHVLEHYTSQTCPMCGFLNKCGEPYTCKNCQFTCDRDILGAAGIFLKAVRTENPCS

SEQ ID NO: 1188 - protein, 576 aa, Chlamydomonas sp.
KIIRGYVVMQAIQQEVQNMEGWPESVQEYVNEVREMLSVPDGSRVYDNYGKDMDFPTMVRFNYWIQTRLEDMDARRIRLMPIFNVQRVHVRLDLKTLVNLFRHMFPNDQNIVELSKWEHVKNPDSFMLPQRPAQKKKKSCGPGEWEAYKSVLKQYDDDVKDIKATDEYKHAKGLYDTLVNARKTVAGSFFRKPPVKNGWVFDCSICTDGVSLSMQYSKTVQVLVSDLKKTCKKPRKEEGIKIAEKYDGSLKTILPDMGIVVLCVDPGRSNIATVTYLADDKNKTWTLTRGAFYHKSGIKKQTRQKELRFADMIPMWESLRENGAALSTSRTDKISAYLSNYAKFSDEWWRLALRRRESRDNLQRYIGKRKVKDSFWAGIKRCMMKELPDMKVCVAYGSAITKLKPTGPGEVAVPTRAMFASCKRIFKEDVSVTDEFKTTLMSWETGKEKERVYKIPSVCSADVKLRLGGERFGHTKSKTMPKVADCDHLGVRLYNKRKGAQEKHRRGGFATSLVDSQKSIERYPEVRGLRFSPETCIYSDRDRSSALTIARLHCMELMGLGRPLPFAHSSSVVVDE

SEQ ID NO: 1189 - protein, 380 aa, Chlamydomonas sp.
SRFMYNKAVAARLGVGSTHKSVFRIRDRYVTNKVRGEGKLPNPYFKNRQWLLQCPKSVRQSAIKAALANIKACFSNLKAGNIKQFSAPFRRKKTELERGWVIEMDQKNVSKDGDKLFIFKDILGNMRYFGSKQLHKLMPEVNPTHDPKVHKSRFGEYFLVLSVAAMDRRAERKPVHPDKVATASIDPGVRKTMVTYSPENEESFMLGQGQASDLVKLLLVHDKLQSRLDTEKTLRTKERMKIKMQMIRIRKRIFYLKKEFRDQTTNFLAARYDVLLVPQLETAKMTISAERELTTKVARQMLTLSHSVLFNRLKEKCEEYGTVFLHVLEHYTSQTCPMCGFLNKCGETYTCKNCQFTCDRDIVGAAGIFLKAVRTENPCS

SEQ ID NO: 1190 - protein, 504 aa, Chlamydomonas sp.
SQGRRIRDQLQAPRTFTSIGTRHGRTGIVNCCGLPKTGSQGLVSSSLNGFARSTPARSSFSITKTEPLKTSLDKTSCPSFKYIVADGTVEDATKSNAKTKLRTLKLKLNPTKAQKSMLAEFAGCSRFMYNKAVAARLGVGSTHKSVFRIRDRYVTNKVRGKGKMPNPYFKNRQWLLQCPKSVRQSAIKAALANIKACFSNLKAGNIKQFSAPFRRKKTELERGWAIEMDQKNVSKDGDKLFIFKDILGNMRYFGSKQLHKLMPEENPTHDPKVQKSRFGEYFLVLSVAARDRRAERKPVHPDKVATASIDPGVRKTMVTYSPENEESFMLGQGQASDLVKLLLVHDKLQSRLDTEKTLRSKERMKIKKQMIRIRMRFFYLKKEFSDQTTNFLAARYDVLLVPQLETAKMTISAEQELTTKVARQMLTLSHSVLFNRLKEKCAEYGTVFLHVLEHYTSQTCPMCGFLNKCGETYTCKNCQFTCDRDIVGAAGIFLKAVRTENPCS

SEQ ID NO: 1191 - protein, 698 aa, Chlamydomonas sp.
YQDKKRTLPPSISMGVVTNNGDDDDDLDIMVVKKTLNSLCMDVSRQQICSRIQSMVLVINHAVAEAYLFANFHITRCLDDVDFDVKQLPHLDRNFYYRCILAVSTSNVRKDTLGQSLKDSMFAFDALRPAGYLKVDVRQWGHVIADVSIQMATMACNSVWANVDRVVIKYLRLKHPSLKKHFNKIVKAVVQYPESDIDKIIPGSLVHANLIKDVVRRLRDLLPLPRGKQFNTRAHLTMRLFHHVLTELGADLKEKTTKKRPRLFSILPRKSGFTISYVPISSMTLMKLLSMGDSPLESFRGDGRHENHSMLWRKYFNVQGLETKGSRFDNRILSDGKGVSVQMKHQASEDVAVDNAGYPKDAILEDCQDASLRVGVDPGMTDIVTVASSDGRVESFSSARFSEAAGYNTSNRRTNKWNVDTQDLVKSIPSPTTSSMHDMQDHVRGYLSALPTLLQHRASRGYRSMRFFRYVGKQKTIEKVCDLIAPKAQKKTIEEKVCDVIAPRAQTTVVGFGNWSNQGYGISRSCSGPIKEIRRCLSRRKNVLFKNVDERNTSCTCHGCFQKLVNMKADSVVWRRVQNEPPSLINGAPTTTTTIEKQKTVVKNVKVHKVLHCRNSVKSASSKVRCGATWNRDVNAAKNLLLLLTTWMDGKERPATFCVPSSSPTPKTTVSGEANVGAQPTDPLGSVSSLQLLSSGPA

SEQ ID NO: 1192 - protein, 792 aa, Chlamydomonas sp.
ECSREPVCRSRLHQNVFGVQFVMENGIGESSSLVHEADQHDDVAELVDYEGEEDGECAPGRAICVVKMKLSTFIPHDWLRNKIDTLVLDMNKLLGEGYIFANFHIARLFENGIAVPPVNRNFFYRCLIAVSTNKCKGSTLGEDFESSRLLFDLLREPGQSKVDIRGSVKNQIIADLSILMTTMSSNHLWTNLERRITTYLKWKYPQIAKRLRSDIVAALIKCPTKNLDVIFKMSPHTTKLPTKLPTSRLRSAKSAVALAKKRVGRKEPEGSPLRVRLTKLQERLEKLSEAWLSSKNLRVDADNAKRFFAREVAFCLRGVLPLPSGNTFASWAHMTLPLYHKILSETIEEKRKTKNEKHRTFSLLPYKSGFTLSHIPISKMAFFYMVNECHFDSCKADVASKNHQGIWERFANLKKVETVSRKFGYRIVTDGFAVSILMNKPTCLTCSMPADAFSTRAHEYVTTDEGGIVSFLDNVVVAAVDPGVTDIVTVTGLNGGTRSYSSAQYYRKGLIFKSQRQTDVWNLETADIVGGIIPDRDSSSSEQIGAYARFYMGAAPILLAHRASRGYRNLRFRRYCKKQKLIVEIADFVAPRKKSAKVLVGFGDWKGLGATPISRRTCGPLQAIRFELRSRENVIMEDIDEFRTSQRCSCCENHLCNMVALTHRKKQDGTGWECTEGRKRIHKILHCKSSQSGAPRQQSGGMLHCGKTWDRDVNASRNILMLTLHQVFGRERPLAFRRDAPRSSSTTPPPDTDMGTQTVERFTKEATRNIFENLFNLLHPPTLPKSNDLQSG

SEQ ID NO: 1193 - protein, 621 aa, Chlamydomonas sp.
QCIRNLHVLNIRMPCMATKASVKLARPPMPLVSPGPSSVDGRIMARSERYGLQATNVSLTQAASKATSLSRKNNPAVVKSFSTHVCPHTNNNPTCSDSNCSCKPIFLTNIPDASKSLKSRTSDQGSTSSAQDFYEYWDSSRQDLYRQLLWLPKTGSQGLVSSSLNGFARSTPAQSSFSITKTEPLKTSLEKTSCPSFKYIVADGTVEDATKSNAKPKLRTLKLKLNPTKAQKSMLAEFAGCSRFMYNKAVAARLGVGSTHKSVFRIRDRYVTNKVRGKGKMPNPYFKNRQWLLQCPKSVRQNAIKSALANIKACFSNLKAGNIKQFSAPFRRKKTELERGWVIEMDQKNVSKDGDKLFIFKEILGNMRYFGSKQLHKLMPEENPTHDPKVQKSRFGEYFLVLSVAARDRRAERKPVNPDKVATASIDPGVRKTMVTYSPENEESFMLGQGQASDLVKLLLVHDKLQSRLDTEKTLRSKERMKIKKLMIRIRKTIFYLKKEFRDQTTNFLAARYDVLLVPQLETAKMTISAERELTTKVARQMLTLSHSVLFNRLKEKCEEYGTVFLHVLEHYTSQTCPMCGFLNKCGETYTCKNCQFTCDRDIVGAAGIFLKAVRTENPCS

SEQ ID NO: 1194 - protein, 603 aa, Chlamydomonas sp.
GHLTLNSLWMDVSRQQICSRIQSMVLVINHAVAEAYLFANFHITRCLDDGDFDVKQLPHLDRNFYYRCILAVSISNVRNDTLDQSLKDSMVAFDALRPAGYVKVDVRPWGQVIADVSIQMATMACNSVWANVDRVVIKYLRLKHPSLKKHFKKIVKAVVQYPDSDIDKIIPAGLVHANLIKDVVRRLRDLLPLPRGKQFNTRAHLTMRLFHHVLTELGADLKEKTTKKRPRLFSILPRKSGFTISYVPISSMTLMKLLSMGDSPLESVRGDGHHENHSMLWRKYFNVQGLETKGSRFDNRILSDGKGVSVQMKHQVGKDIAGEGGGDNAGYPKDASIEDGQDASLRQGALRVGIDPGMTDIVTIASSDGRVESFSSARFSEAAGYNTSNRRTNKWNADTQDLVKSIPSSTTSSMHDMQDHVRVYISALPTLLQHRANRGYRSMRFFRYVGKQKTIEKVCDLIAPEAHKKTIEEKVCDVIATKAQKTVVGFGNWSNQGYGISRSCSGPVKEIRKCLSRRQNVLFKNVDERNTSCTCHGCFQKLVNMKADSVVWRRVQNEPSALIDGSITVEKQKTVVKNVKVHKVLHCRNSVKSASSNVRCGAT

SEQ ID NO: 1195 - protein, 509 aa, Chlamydomonas sp.
KLSEAWLSSKNLRVDADNAKRFFARDVAFCLRGGLPLPSGNTFASRAHMTLPLYHKILSETIEEKRKTKNEKHRTFSLLPYKSGFTLSHIPISKMAFFYMVNECHFDSCKADVASKNHQGIWERFANLKKVETVSRKFGYRIVTDGFAVSILMNKPTCLTCSMPADAFSTRAHEYVTTDEGGIVSFLDNVVVAAVDPGVTDIVTVTGLNGGTRSYSSAQYYRKGLIFKSQRQTDVWNLDTADIVGGIIPDRDSSSSEQIGAYARFYMGAAPILLAHRASRGYRNLRFCRYCKKQKLIVEIADFVAPREKSAKVLVGFGDWKGLGATPLSRRTFGPLQAIRFELRSRENVIMEDIDEFRTSQRCSCCENHLCNMVALTHRKKQDGTGWECTEGRKRIHKILHCKSSQSGAPRQQSSGMLHCGKTWDRDVNASRNILMLTLHQVFGRERPLAFRRDAPRSSSTTPPPPPDTDMGTQTVERFTKEATRNIFENLFNLLHPPTLPKSNDLQSG

SEQ ID NO: 1196 - protein, 700 aa, Chlamydomonas sp.
NNNHSLSMGVVTNNGDDDDLDIMVVKKTLNSLCMDVSRQQICSRIQSMVLVINQAVAEAYLFANFHITRCLDDGDFDVKQLPHLDRNFYYRCILAVSISNVRNDTLDQSLKDSMVAFDALRPAGYLKVDVCQWGQVIADVSIQMATMACNSVWANVDRVVIKYLRLKHPSLKKHFNKIVKAVVQYPDSDIDKIIPAGLVHANLIKDVVRRLRDLLPLPRGKQFNTRAHLTMRLFHHVLTELGADLKEKTTKKRPRLFSILPRKSGFTISYVPISSMTLMKLLSMGDSPLESVRGDGRHENHSMLWRKYFNVQGLETKGSRFDNRILSDGKGVSVQMKHQVGKDIAGEGGGDNAGYPKDASIEDCQDASLRQGALRVGIDPGMTDIVTIASSDGRVESFSSARFSEAAGYNTSNRRTNKWNADTQDLVKSIPSPTTSSMHDMQDHVRGYLSALPTLLQHRANRGYRSMRFFRYVGKQKTIEKVCDLIAPKAQKKTIEEKVCDVIDPKAKKTVVGFGNWSNQGYGISRSCSGPVKEIRKCLSRRQNVLFKNVDERNTSCTCHGCFQKLVNMKADSVVWRRVQNEPSALIDGAPTTTTTYEKQKTVAKNVKVHKVLHCRNSVKSASSNVRCGATWNRDVNAAKNLLLLLTTWMDGKERPTAFCVPSSSPTPKTTVSGEANVGAQPTDPPGSVSSLQLLSSGPA

SEQ ID NO: 1197 - protein, 615 aa, Chlamydomonas sp.
QCIRNLHVLNIRMPCMATNASVKLARSPMPVVSPGPSSVDGRIMARSGLQATNVSLTQAASKATSSSRKKKPAVVKSFSTHVCPHTNNNPTCSDSNCSCKPIFLTNIPDASKSRTSDQGSTSSSLDFYEYWDSSRQDLYRQLLWLPKTGTQGLVSSSFNGFAHSTPTRSSFSITKTEPLKTSLEKTSCPSFKYIVTDGTVEDATKSNAKPKLRTLKLKLNPTKAQKSMLAEFAGCSRFMYNKAVAARLGVGSTHKSVFRIRDRYVTNKVRGKGKMPNPYFKNRQWLLQCPKSVRQSAIKSALANIKACFSNLKAGNIKQFSAPFRRKKTELERGWVIEMDQKNVSKDGDKLFIFKEILGNMRYFGSKQLHKLMPEENPTHDPKVQKSRFGEYFLVLSVAARDRRAERKPVNPDKVATASIDPGVRKTMVTYSPENEESFMLGQGQASDLVKLLLVHDKLQSRLDTEKTLRSKERMKIKKLMIRIRKTIFYLKKEFRDQTTNFLAARYDVLLVPQLETAKMTISAERELTTKVARQMLTLSHSVLFNRLKEKCEEYGTVFLHVLEHYTSQTCPMCGFLNKCGETYTCKNCQFTCDRDIVGAAGIFLKAVRTENPCS

SEQ ID NO: 1198 - protein, 642 aa, Chlamydomonas sp.
VQGACGSARQCGEPRSSLVLTFHVTRLMEGDLPIPNMYDMKDTYWKDWLRIGVDGVFPDEESRISYEAVKDVMGKVLGSDDPDYINSYPIYFDQVLNYAGHTLSTVVSNNAWVTLVPRLTRLTKATLNALGAPKTIRVYDVMRVIQQEIQEMESWPESVQEFVREVRVRLKVPDGSRLYDDYGKDMDFPTMVRFNYWMQTRLEAIGARCIRLMPIFNVQRAHVRLDMKTLVNLFRHVFPKDPNIVELSKWKNVKDPDRFMLPLKPAFKKKKSCGPGEWEAYKLAQQKYDADVKDIKSTDEYRHAKGRYDTLVNARKTDAGSFFKKPPVKTGWVFDCSICTDGVSLSMQYSKTVQVRVSDLKTTSKRSRDEEGMSVSEQYDHKLKTTLPDMGIVVLGVDPGRSNIATVTYLADDKSKTWKLTRGAFYHKSGIKKQKKQQEKRFSDMIPRWESLRENGAALSKSRKDDISAYLKNYATFSDEWWRMALRRRESRDNFQRYIGKRKAMDSFWAGIKRNMKLDHPDLRVRVAYGSAITKLKATGPGEVAVPTGSMFASCKRLFKEEVHVTDEFKTTLMSWETGAKKECVYKIPSVQITTEGQIRLGYELLGHTPLKETPKVSYRDELTVRVYCTRKKSKKNTGGVA

SEQ ID NO: 1199 - protein, 448 aa, Chlamydomonas sp.
QCDCSITCLQSWERSDEWIRKIKKTKKSHPRLFSILPRKNGFTISYVPISSMTFMKLLSMGDSPLESVSGDGRYENHTMLWRKYFNVQGLETKRSRFDNRILSDGKGVSVQMKQKGKEEVVEEGENAGYPKDANIVECKDAVGALRVGVDPGMTDIVTVASSAGRITSFSSARFSKVAGYNTSKRRTYKWNDETQDLVKSIPSPNTSNMVDLQDHVRAYLKALPILLQHRANKGYRSMRFFRYVGKQKTIEKVCDVIAPRAQTTVVGFGNWSNQGYGISRSCSGPIKEIRRCLSRRKNVLFKNVDERNTSCKCHGCFQRLVNMKADSVVWRGVCKESPIDGSITFEKQKMVVKNVKVHKVLHRRDSVKSASSNVRCGATWNRDVNAAKNLLLLLTTWMDGRERPEAFCVPSPPPKTTVSIEASVSAKPTDPPGFVSSLPCYPLGQLKC

SEQ ID NO: 1200 - protein, 686 aa, Chlamydomonas sp.
METIVNKEPPDKRTRPDRAAKIKDRKNGEENVVKCTLSRIIADKDNKDVIIKVIKERVDSVSKRTYLAGVAVNRILKEVFEGVPDAQLHTVSVPSVDQNFIRQLMVGSRQAHMETRDATVERFFHNNYWFREKIEGREVIVKKKKQYVGAIARYDGDRNLYSHASKKYLTNFNNHYRVHLSTWIKKFVYSKENRILAKEIKDEHGIDETVFHRYLLYDIHSWGVKEDLIAIHSLLPERTKMLLKIQHSILGRDEINRQWLKSVSNSAKMIRYNVFINRYLEATEDEGYAKLVNIAPIPTVKHAFITIDTDGLLGVLKDVGLIESLEKTLTNKEHWESVFDVENIRSNGKGVFTCTIDTDGVMACTHFLRAEKKKISIKDDGTAIKKQTKTLREFSESDPNVVVVANDPGRCNIAFLTWKKNKVEEKDKGGRKRKRHCEFRSKRLTRERYYVESGVFKSRGPTKKWLSNIQDCLDDLKDNSPKRTSLVSFDAYVTVMVNHWDSRWGEMSKSRWGAQRLRLYGGKKRVLARFFNEVQEDVGERKTIVVAYGSAKFAHGGKGELSVPTTSAFKAFSDRFKGRVAVIDEFRTTKIWHKDSTTVLQSVQSEKEGRTVRGLLWCSSTMENSKLFVNRDLNAAINIHNCFTMYPIRPGILARPKKYCKLEVVVGRKIDYKLTGSLQNAVSSKV

SEQ ID NO: 1201 - protein, 269 aa, Chlamydomonas sp.
SSSLSVKLTFGTSRRLISSVVSFRIETLRVLNRLVRTPDSTWVPPQSFLPIVLRGYRFRRYCKKQKLIVEIADFVAPREKSAKVLVGFGDWKDLQAIRFELRSRENVIMEDIDEFRTSQRCSCCENHLCNMVALTHRKKQDGTGWECTEGRKRIHKILHCKSSQSGAPRQQSGGRLHCGKTWDRDVNASRNILMLTLHQVFGRERPLAFRRDAPRSSSTPPPPPPPDTDMGTQTVERFTKEATRNIIFENLFNLLHPPTLPKSNDLQSG

SEQ ID NO: 1202 - protein, 632 aa, Chlamydomonas sp.
STNHAVAEAYLFANFHITRCLDDGDFDVKQLPHLDRNFYYRCLLAVSTSNVRKDTLGQSFNDTMVAFDALRPAGYVKVDVRPWGQVIADVSIQMATMACNSVWANVDRVVIKYLRLKHPSLKKHFKKIVKAVVQYPESKIDTIIPESLVHAIHIKEVVSHLRALFPMPRGKQFNTRAHLTMRLFHHVLTELGEVGRVDPKDKKTKTNHPRLFNILPCKNGFTISYVLISSMTFMKLLSMGDSPLESVSGDGRYENHTMLWRKYFNVQGLETKRSRFDNQILSDGKGVSVQMKQKGKEEVAEEGENAGYPKDANIVECKDAVGALRVGVDPRMTDIVTVASSAGRIESFSSARFSEVAGYNTSKRRTYKWNDETQDLVKSIPSPNTSNMVDLQDHVRAYLKALPILLQHRANKGYRSMRFFRYVGKQKTIEKVCDMIAPREQTTVVGFGNWSNQGYGISRSCSGPIKEIRRCLSRRKNVLFKNVDERNTSCKCHGCFQRLVNMKADSVVWRGVCKESPIDGSITVEKQKMVVKNVKVHKVLHCRDSVKSLSSNVRCGATWNRDVNAAKNLLLLLTTWMDGRERPEAFCVPSPPPKTTVSIEASVSAKPTDPPGFVSSLPCVILWASLNAEIQR

SEQ ID NO: 1203 - protein, 686 aa, Chlamydomonas sp.
METIVNKEPPDKRTRPDRAAKIKDRKNGEENVVKCTLSRIIADKDNKDVITKVIKERVDSVSKRTYLAGVAVNRILKEVFEGVPDAQLHTVSVPSVDQNFIRQLMVGSRQALMETRDATVERFFHNNYWFREKIEGREVIVKKKKQYVGAIARYDGDRNLYSHASKKYLTNFNNHYRVHLSTWIKKFVYSKENRILAKEFKDEHGIDETVFHRYLLYDIHSWGVKEDLIAIHSLLPERTKMLLKIQHSIIGQDEINRQWLKSVSNSAKMIRYNVFINRYLEATEDEGYAKLVNIAPIPTVKHSFITIDTDGLLGVLKDVGLVESLEKTLTNKEHWESVFDVENIRSTGKGVFTCTIDTDGVMACTHFLRAEKKKISIKDDGTAIKKQTKTLREFSESDPNVVVVANDPGRCNIAFLTWKKNKVEEKDNGGRKRKRHCEFGSKRLTRERYYVESGVFKSRGPTKKWLSNIQDCLDDLKDNSPKRTSLESFDAYVTVMVNHWDSRWGEMSKSRWGAQRLRLYGGKKRVLARFFNEVQADVGERKTIVIAYGSSKFAPGGKGELSVPTTSAFNAFSDRFKGRVAVIDEFRTTKIWHKDSTTVLQSVQSEKKGRTVRGLLWCSSTMENSKLFVNRDLNAAINIHNCFTMYPTRPGILARPKKYCKLEVVVGRTIDYKLTGSLQNAVSSEV

SEQ ID NO: 1204 - protein, 786 aa, Chlamydomonas sp.
KLCKMATKHPTVAKLKELLKLAKVAYSSKDKKDDIVRLCEDNGLIARPPPEYKAVEKMCVVKCALKKAMSLDDEEFGKFRGHVDQLVSVVSRMLRRSSLVLTFHVTRLMEGNLPIPNIYDMKDTYWKDLLRIGVDGVFPDEESRISYEAVKDVIGKVLGSDDPDYINSYPIYFDQVLNYAGHTLSTVVSNNAWVPLVPRLTRLTKATLNALGAPKTIRVYDVMRVIQQEIQEMESWPESVQEYVREVRVGLKVPVGSRLYDDYGKDMDFPTMVQFNYWMQTRLEANGARRIRLMPIFNVQWAHVRLDMKTLVNLFRHVFPKDPNIVELSKWKNVKDPDRFMLPLKPAFKKKKSCGPGEWEAYKLAQQKYDVDVKDIKATDEYRHAKGRYDTLVNARKTVEGSFFKKPPVKTGWVFDCSICTNGVSLSMQYSKTVQVRVSDLKKTSKRSRDEEGMSVSEQYDHKLKTTLPDMGIVVLGVDPGRSNIATVTYLADDKSKTWKLTRGAFYHKSGIKKQKKQQEKRFSDMIPRWESLRENGAALSTSRKDDISAYLKNYATFSDEWWRMALRRRESRDNFQRYIGKRKAMDSFWAGIKRNMKLDHPDLRVRVAYGSAITKLKATGPGEVAVPTGSMFASCKRLFKEEVRVTDEFKTTLMSWETGAKKECVYKIPSVQITTEGQIRLGYELLGHNPLKETPKVSYRDQLAVRVYCTRKIIQEKHRRGGLAPSLVDNNSIKRYPEVRGLRFSPETSTYSDRDRSSALTIARLHCMELLGQGRPLPFCRDACC

SEQ ID NO: 1205 - protein, 688 aa, Chlamydomonas sp.
GNVGAILYHQKKKNTHPLLMGVVQDKGDDDINISVVKKTLNSLCMDVSRHQISSRIQSMVLLINHAVAEAYLFANFHITRCLDDGDFDVKQLPHLDRNFYYRCLLAVSTSNVRKDTLGQSFNDTMVAFDALRPAGYVKVDVRPWGQVIADVSIQMATMACNSVWANVDRVVIKYLRLKHPSLKKNFKKIVKAVVQYPESKIDTIIPEGLVHAIHIKEVVSHLRALFPLPRGKQFNTRAHLTMRLFHHVLTELGEVGRVDPKDKKTRKSHPRLFSILPRKNGFTISYVPISSMTFMKLLSMGDLPLESVSGDGRYENHTMLWRKYFNVQGLETKRSRFDNRILSDGKGVSVQMKQKGKEEVVEEGENAGYPKDANILECKDAVGALRVGVDPGMTDIVAVASSAGRIESFSSARFSEVAGYNTSKRRTYKWNDETQDLVKSIPSPNTSNMSDLQDHVRAYLKALPILLQHRANKGYRSMRFFRYVGKQKTIEKVCDVIAPRAQTTVVGFGNWSNQGYGISRSCSGPIKEIRRCLSRRKNVLFKNVDERNTSCKCHGCFQRLVNMKADSVVWRGVCKESPIDGSITVEKQKMVVKNVKVHKVLHCRDSVKSASSNVRCGATWNRDVNAAKNILLLLTTWMDGRERPEAFCVPSPPPKTTVSIEASVSAKPTDPPGFVSSLPCYPLGQLKC

SEQ ID NO: 1206 - protein, 803 aa, Chlamydomonas sp.
PRMEHVCDVCIKSSVMYKLCKMATKPPTVAKLKELLKLAEVAYSSKDKKDDIVRLCEDNGLIARPPPEYKTVEKMCVVKCALKKAMSLDDEEFGKFRGHVDQLVNEVSRMLRRSSLVLTFHVTRLMEGDLPIPNMYDMKDTYWKDWLRIGVDGVFPDEESRISYEAVKDVIGKVLGSDDPDYINSYPIYFDQVLNYAGHTLSTVVSNNAWVPLVPRLTRLTKATLNALGAPKTIRVYDVMRVIQQEIQEMESWPESVQEYVREVQVRLQVPDGSRLYDDYGKDMDFPTMVRFNYWMQTRLEAIGARRIRLMPIFNVQRAHVRLDMKTLVNLFRHVFPKDPNIVELSKWENVKDPDRFMLPLKPSVKKKKSCGPGEWEAYKLAQQKYDADVKDIKATDEYRHAKGRYDTLVNARKTVAGSFFKKPPVKTGWVFDCSICTDGVSFSMQYSKTVQVRVSDLKNESKRSRDEEGMSVSEQYDHKLKTTLPDMGIVVLGVDPGRSNIATVTYLADDKSKTWKLTRGAFYHKSGIKKQKKQQEKRFSDMIPRWESLRENGAALSTSRKDDISAYLKNYATFSDEWWRMALRRRESRDNFQRYIGKRKAMDSFWAGIKRNMKLDHPDLRVRVAYGSAITKLKATGPGEVAVPMGSMFASCKRLFKEEVHVTDEFKTTLMSWETGAKKECVYKIPSVQITTEGQIRLGYELLGHTPLKETPKVSYSDQLAVRVYCTRKKIQEKHRRGGLAPSLVDNNSIKRYPEVRGLRFSPETSTYSDRDRSSALTIARLHCMELLGQGRPLPFCRDACC

SEQ ID NO: 1207 - protein, 621 aa, Chlamydomonas sp.
QCIRNLHVLNIRMPCMATNASVKLARPPMPLVSPGPSSVDGRIMARSERSGLQATNVSLTQAASKATSSSRKKNPAVVKSFSTHVCPHTNNNPTCSDSNCSCKPIFLTNIPDASKSLKSRTSDQGSTSSAQDFYEYWDSSRQDLYRQLLWLPKTGSQGLVSSSLNGFARSTPARSSFSITETEPLKTSLGKTSCPSFKYIVADGTVEYATKSNAKPKLRTLKLKLNPTKAQKSMLAEFAGCSRFMYNKAVAARLGVGSTHKSVFRIRDRYVTNKVRGKGKMTNPYFKNRQWLLQCPKSVRQSAIKAALANIKACFSNLKAGNIKQFSAPFIRKKTELERGWAIEMDQKNVSKDGDKLFIFKDIFGNMRYFGSKQLHKLMLEENPTHDPKVQKSRFGEYFLVLSVAARDRRAERKPVHPDKVAIASIDPGVRKTMVTYSPDNEESFMLGQGQASDLVKLLLVHDKLQSRLDTEKTLRSKERMKIKKQMIRIRKRIFYLKKEFRDQTTNFLAARYDVLLVPQLETAKMTISAERELTTKVARQMLTLSHSVLFNRLKEKCEEYGTVFLHVLEHYTSQTCPMCGFLNKCGETYTCKNCQFTCDRDIVGAAGIFLKAVRTENPCS

SEQ ID NO: 1208 - protein, 813 aa, Chlamydomonas sp.
PRMEHVCDVCIKSSVMYKLCKMATKPPTVAKLKELLKLAEVAYSSKDNKDDIVRLCEDNGLIARPPPEYKTVEKMCVVKCALKKAMSLDDEEFGKFREHVDQLVNVVSRMLRRSSLVLTFHITSLLEKGLDIPDLYNMKDTYWKDWLRIGVDGIFPDEESKISYEAVKDSIGDVIGNDDADYIKSYPIYFDQVLNYAGHTLSTVVSNNAWVPLIPRLARLTSTTLNKLNAPKTLDTSKIIRGYDVMQAIQQEVQNMEGWPESVQEYVNEVREMLSVPDGSRVYDNYGKDMDFPTMVRFNYWIQTRLEDMDARRIRLMPIFNVQRVHVRLDLKTLVNLFRHMFPNDQNIVELSKWEHVKNPESFMLPQRPAQKKKKSCGPGEWDAYKSVLKQYDDDVKDIKATDEYRHAKGLYDTLVNARKTVAGSFFRKPPVKNGWVFDCSICTDGVSLSMQYSKTVQVLVSDLKKTCKKPRKEEGIKIAEKYDGSLKTILPDMGIVVLGVDPGRSNIATVTYLADDKNKTWKLTRGAFYHKSGIKKQTRQKELRFADMIPMWESLRENGAALSTSRTDKISAYLSNYAKFSDEWWRLALRRRESRDNLQRYIGKRKVKDSFWAGIKRCMMKELPGMKVCVAYGSAITKLKPTGPGEVAVPTGAMFASCKRIFKEDVSVTDEFKTTLMSWETGKEKERVYKIPSVCSADVNLRLGGERFGHTKSKTMPKVADCDHLGVRLYNKRKGAQEKHRRGGFATSLVDSQKSIERYPEVRGLRFSPETCIYSDRDRSSALTIARLHCMELMGLGRPLPFAHSSSVVVDE

SEQ ID NO: 1209 - protein, 688 aa, Chlamydomonas sp.
GNVGAILYHQKKKNTHPLLMWVVQDKGDDDINISVVKKTLNSLCMDVSRHQISSRIQSMVLLINHAVAEAYLFANFHITRCLDDGDFDVKQLPHLDRNFCYRCLLAVSTSNVRKDTLGQSFNDTMVAFDALRPAGYVKVDVRPWGQVIADVSIQMATMACNSVWANVDRVVIKYLRLKHPSLKKHFKKIVKAVVQYPESKIDTIIPEGLVHAIHIKEVVSHLRALFPLPRGKQFNTRAHLTMRLFHHVLTELGEVGRVDPKDKKTKKSHPRLFSILPRKNGFTISYVPISSMTFMKLLSMGDSPLESVSGDGRYENHTMLWRKYFNVQGLETKRSRFDNRILRDGKGVSVQMKQKGKEEVVEEGENEGYPKDANIVECKDAVGALRVGVDPGMTDIVTVASSAGRIESFSSARFSEVAGYNTSKRRTYKWNDETQDLVKSIPSPNTSNMVDLQDHVRAYLKALPILLQHRANKGYRSMRFFRYVGKQKTIEKVCDVIAPRAQTTVVGFGNWPNQGYGISRSCSGPIKEIRRCLSRRKNVLFKNVDERNTSCKCHGCFQRLVNMKADSVVWRGVCKESPIDGSITVEKQKMVVKNVKVHKVLHCRDSVKSASSNVRCGATWNRDVNAAKNLLLLLTTWMDGRERPEAFCVPSPPPKTTVSIEASVSAKPTDPPGFVSSLPCYPLGQLKC

SEQ ID NO: 1210 - protein, 695 aa, Chlamydomonas sp.
RVRIRVSGNWYHQKKNNTPSLLMGVVSDQGDDDDLNIMVVKKTLNSLCMDVSRQQICSRIQSMVLLINHAVAEAYLFAIFHITRCLDDVDFDVKQLPHLDRNFYYRCILAVSTSNVRKDTLGQSLKDSMVAFDALRPAGYVKVDVRPWGQVIADVSIQMAMMACNSVWANVDRVVIKYLRLKHPSLKKHFKKIVKAVVQYPESVVDKIIPAGLVHASHIKEVVRHLRTLLPLPRGKQFNTRAHLTMRLFHHVLTELGEVGRAEPKENKTKKSRPRLFSILPRKSGFTMSYVPISSMTLMKLLSMGDSPLESICGDGRHANHNMLWRKYFNVRGLETKMSRFDNRILSDGKGVSVQMKQKGKDDVADEGDNAGYPKDAGIKECKDASLRMGALRVGVDPGMTDIVTVASSAGCVESFSSARFSEAAGYKTSKRRTDKWNAETEDLVKSIPSPTTSSMSDLRGHVIGYLAALPILLHHRGSRGYRSMRFFRYVGKQKTIEKVCDVIAPRAQTTVVGFGNWSNQGYGISRSCSGPVKEIRKCLSRRKNVLFKNVDERNTSCTCHGCFQRLVNMKADSVVWRGDYRESPIDGTITFEKQKTVVKNVKVHKVLHCRDSVKSASSNVRCGATWNRDVNAAKNLLLLLTTWMDGRERPVAFCVPSPPPESPVSREASVSAQPTDPHGSVSSLPCYPLGQLNC

SEQ ID NO: 1211 - protein, 625 aa, Chlamydomonas sp.
RARIRVSGNWYHQKKNNTPSLLMGVVSDQGDDDDLNIMVVKKTLNSLCMDVSRQQICSRIQSMVLLINHAVAEAYLFANFHITRCLDDVDFDVKQLPHLDRNFYYRCILAVSTSNVRKDTLGQSLKDSMVAFDALRPAGYVKVDVRPWGQVIADVSIQMATMACNSVWANVDRVVIKYLRLKHPSLKKHFKKIVKAVVQYPESVVDKIIPAGLVHASHIKEVVRHLRTLFPLPRGKQFNTRAHLTMRLFHHVLTELGEVGRAEPKENKTKKSRPRLFSILPRKSGFTMSYVPISSMTLMKLLSMGDSPLESICGDGRHANHNMLWRKYFNVRGLETKMSRFDNRILSDGKGVSVQMKHKGKDDVADEGDNAGYLKDAGIKESTSSMSDLRDHVIGYLAALPILLHHRGSRGYRSMRFFRYVGKQKTIEKVCDVIAPRAQTTVVGFGNWSNQGYGISCSCSGPVKEIRKCLSRRKNVLFKNVDERNTSCTCHGCFQRLVNMKADSVVWRGDYRESPIDGTITFEKQKTVVKNVKVHKVLHCRDSVKSASSNVRCGATWNRDVNAAKNLLLLLTTWMDGRERPVAFCVPSPPPETPVSREASVSAQPTDPHGSVSSLPCYPLGQLNC

SEQ ID NO: 1212 - protein, 223 aa, Chlamydomonas sp.
RTTILQLSLVSPKEASLSRFMEFLDLWKSSRDTLYAEYSKSCWSEQRLRLYGGKKRVFAKFLNRVEKGKSGDLPDTRPVVLAYGSAKFAPTGRGELSVPTSTAFKECKNRFECVLVDEFRTSKMYHEDGTLLQQVGVCSDPKEAAEADEGPENKESRQRVVVRGLLWCSSTSNNNGKFFVNRDLNAAVNILNCAGSPKRLSWLRRTPGLPPLEKQRVAKLIIC

SEQ ID NO: 1213 - protein, 454 aa, Chlamydomonas sp.
SAPDDATVPSRAYRVGGGRTSGAKRKKNKKSRPRLFSILPRKSGFTMSYVPISSMTLMKLLSMGDSPLESICGDGRHANHNMLWRKYFNVRGLETKMSRFDNRILSDGKGVSVQMKQKGKDDVADEGENAGYPKDAGIEECKDASLRMGALRVGVDPGMTDIVTVASSAGRVKSFSSARFSEAAGYKTSKRRTDKWNAETEELVKSIPSPTTSSMSDLRDHAIGYLAALPILLHHRGSRGYRSMRFFRYVGKQKTIEKVCDVIAPRAQTTVVGFGNWYNQGYGISRSCSGPVKEIRKCLSRHKNVLFKNVDERNTSCTCHGCFQRLVNMKADSVVWRRDYRESPIVGTITFEKQKTVVKNVKVHEVLHCRDSVKSASSNVRCGATWNRDVNAAKNLLLLLTTWMDGRERPVAFCVPSPPPETPVSREASVSAQPTDPHGSVSSLHCYPLGQLNC

SEQ ID NO: 1214 - protein, 436 aa, Chlamydomonas sp.
IKVLASLQVPLWPSGRYSQVVPVGVPLDGQLPHLREAYLFTNFHITRCLDDVDFDVKQLPHLDQNFYYRCILAVSTSNVRKDTLGQSLKDSMVSVQMKQKGKDDVADEGDNAGYPKDAGIEECKDASLRMGALRVGVDPGMTDIVTVASSAGRVESFSSARFSKAAGYKTSKRRTDKWNAETEDLVKSIPSPTTSSMSDLRDHVIGYLAALPILLHHRGSRGYRSMRFFRYVGKQKTIVKVCDVIAPRAQTTVVGFGNWSNQGYGISRSCSGPVKEIRKCLSLCKNVLFKNVDERNTSCTCHGCFQRLVNMKADSVVWRGDYRESPIDGTITFEKQKTVVKNVKVHEVLHCRDSVKSASSNVRCGATWNRDVNAAKNLLLLLTTWMDGRERPVAFCVPSPPPETPVSREASVSAQPTDPHGSVSSLHCYPLGQLNC

SEQ ID NO: 1215 - protein, 205 aa, Chlamydomonas sp.
VGKQKTIEKVCDVIAPRAQTTVVGFGNWSNQGYGISRSCSGPVKEIRKCLSRRKNVLFKNVDERNTSCTCHGCFQRLVNMKADSVVWRGDYRESPIDGTITFEKQKTVVKNVKVHKVLHYRDSVKSASSNVRCGATWNRDVNAAKNLLLLLTTWMDGRERPVAFCVPSPPPETPVSREASVSAQSTDPHGSVSSLPCYPLGQLNC

SEQ ID NO: 1216 - protein, 710 aa, Chlamydomonas sp.
GNCQLVWYHQNNNHSLSMGVVTNNGDDDDLDIMVVKKTLNSLCMDVSRQQICSRIQSMVLVINHAVAEAYLFANFHITRCLDDGDFDVKQLPHLDRNFYYRCILAVSISNVRNDTLDQSLKDNMVAFDALRPAGYVKVDVRPWGQVIADVSIQMATMACNSVWANVDRVVIKYLRLKHPSLKKHFKKIVKAVVQYPDSDIDKIIPAGLVHANLIKDVVRRLRDLLPLPRGKQFNTRAHLTMRLFHHVLTELGADLKEKTTKKRPRLFSILPRKSGFTISYVPISSMTLMKLLSMGDSPLESVRGDGRHENHSMLWRKYFNVQGLETKGSRFDNRILSDGKGVSVQMKHQVGKDIAGEGGGDNAGYPKDASIEDCQDASLRQGALRVGIDPGMTDIVTIASSDGRVESFSSARFSEAAGYNTSNRRTNKWNADTQDLVKSIPSPTTSSMHDMQDHVRGYLSALPTLLQHRANRGYRSMRFFRYVGKQKTIEKVCDLIAPKAQKKTIEEKACDVIAPKAKKTVVAFGNWSNQGYGISRSCSGPVKEIRKCLSRRQNVLFKNVDERNTSCTCHGCFQKLVNMKADSVAWRRVQNEPSALIDGAPTTTTTFEKQKTVVKNVKVHKVLHCRNSVKSASSNVRCGATWNRDVNAAKNLLLLLTTWMDGKERPAAFCVPSSSPTPKTTVSREANVGAQPTDPPGSVSSLQLLSSGPA

SEQ ID NO: 1217 - protein, 437 aa, Chlamydomonas sp.
CGPGEWGAYKSVMKQYDDDVKDIKATDEYRHAKGLYDTLVNARKTVAGSFFRKPPVKNGWVFDCSICTDGVSLSMQYSKTVQVLVSDLKKTCKNPRKEEGIKIAEKYDGSLKTILPDMGIVVLGVDPGRSNIATVTYLADDKNKTWKLTRGAFYHKSGIKKQTRQKELRFADMIPMWESLRENGAALSTSRTDKISAYLSNYAKFSEEWWRLALRRRESRDNLQRYIGKRKVKDSFWAGIKRCMMKELPDMKVCVAYGSAITKLKPTGPGEVAVPTGAMFASCKRIFKEDVSVTDEFKTTLVSWETGKEKERVYKIPSVCSADVKLRLGGERFGHTKSKTMPKVADCDHLGVRLYNERKGAQEKHRRGGFATSLVDSQKSIERYPEVRGLRFSPETCIYSDRDRSSALTIARLHCMELMGLGRPLPFAHSSSVVVDE

SEQ ID NO: 1218 - protein, 794 aa, Chlamydomonas sp.
ECSREPVCRSRLHQNVFGVQFVMENGIGESSSLVHEADQHDDVAELVDYEGEEDEECAPGRAICVVKMKLSTFIPHDLLRNKIDTLVLDMNKLLGEGYIFANFHIARLFENGIAVPPVNRNFFYRCLIAVSTNKCKGSTLGEDFESSRLLFDLLREPGQSKVDIRGNVKNQIIADLSILMATMASNHLWTNLERRITTYLKWKYPQIAKRLRSDIVAALIKCPTKNLDVIFKMSPHTTKLPTKLPTSRLRSAKSAVALAKKRVGRKEPEGSPLRVRLTKLQERLEKLSEAWLSSKNLRVDADNAKRFFAREVAFCLRGVLPLPSGNTFASRAHMTLPLYHKILSETIEEKRKTKNEKHRTFSLLPYKSGFTLSHIPISKMAFFYMVNECHFDSCKADVASKNHQGIWERFANLKKVETVSRKFGYRIVTDGFAVSILMNKPTCLTCSMPADAFSTRAHEYVTTDEGGIVSFLDNVVVAAVDPGVTDIVTVTGLNGGTRSYSSVQYYRKGLIFKSQRQTDVWNLETADIVGGIIPDRDSSSSEQIGAYARFYMGAAPILLAHRASRGYRNLRFRRYCKKQKLIVEIADFVAPREKSAKVLVGFGDWKGLGATPISRRTCGPLQAIRFELRSRENVIMEDIDEFRTSQRCSCCENHLCNMVALTHRKKQDGTGWECTEGRKRIHKILHCKSSQSGAPRQQSGGMLHCGKTWDRDVNASRNILMLTLHQVFGRERPLAFRRDAPRSSSTTPPPPPDTDMGTQTVERFTKEATRNIFENLFNLLHPPTLPKSNDLQSG

SEQ ID NO: 1219 - protein, 702 aa, Chlamydomonas sp.
YQDKKRTLPPSISMGVVTNNGDDDDDLDIMVVKKTLNSLCMDVSRQQICSRIQSMVLVINHAVAEAYLFANFHITRCLDDVDFDVKQLPHLDRNLYYRCILAVSTSNVRKDTLGPSLKDSMVAFDALRPAGYLKVDVRQWGQVIADVSIQMATMACNSVWANVDRVVIKYLRLKHPSLKKHFNKIVKAVVQYPESDINKIIPASLVHANLIKDVVRRLRDLLPLPRGKQFNTRAHLTMRLFHHVLTELGADLKEKTTKKRPRLFSILPRKSGFTISYVPISSMTLMKLLSMGDSPLESFLGDGRHENHSMLWRKYFNVQGLETKGSRFDNRILSDGKGVSVQMKHQESEDVAVDNAGYPKDAILEDCQDASLRVGVDPGMTDIVTVASSAGRVESFSSARFSEAAGYNTSNRRTNKWNVDTQDLVKSIPSPTTSSMHDIQDHVRGYLSALPTLLRHRASRGYRSMRFFRYVGKKKTIEKVCDLIAPKAQKKTIKEKVCDVIAPRAQTTVVGFGNWSNQGYGISRSCSGPIKEIRRCLSRRKNVLFKNVDERNTSCTCHGCFQKLVNMKADSVVWRRVQNEPPSLINGAPTTTTTTTIEKQKTVVKNVKVHKVLHCRNSVKSASSKMRCGATWNRDVNAAKNLLLLLTTWMDGKERPATFCVPSSSPTPKPQFPERQMWALNQPTHLGQLAAYNCYPLGQLKC

SEQ ID NO: 1220 - protein, 305 aa, Chlamydomonas sp.
EQHRYSHVSGRRQKQDMEAYTRSFLPQVWYQETEKNSKKKRFSDMIPRWESLRENGAALSTSRTDDISAYLKNYATFSDEWWRMALLRRESRDNFQRYIGKRKAMDSFWAGIKRNMKLDHPDLRVRVAYGSAITTLKATGPGEVAVPTGSMFASCKRLFKEEVHVTDEFKTTLMSWETGAKKECVYKIPSVQITTEGQIRLGYELLGHTPLKETPKVSYRDQLAVRVYCTRKQIQEKHRRGGLAPSLVDNNSIKRYPEVRGLRFSPETSTYSDRDRSSALTIARLHCMELLGQGRPLPFCRDACC

SEQ ID NO: 1221 - protein, 586 aa, Chlamydomonas sp.
LRRHRIPVRRGFQEPCCRNDQGTSTPLSIHTEDWEMVCRLRTTLGVRDDDVTFYPPKKTPFSRGVLLLHLFIVKFGKGERSYLPISTRGQKYGYLDTKITTSLFAQAVRQSNKRRKEAAAEEAREVKAARLASGEKRPRKKKIETNAPPIASPPTLAPPPVDGEGDMEEDVGSTSVGELLGLTEESFKRRRKELRKVLRLQTRKAHRAERPGAKKTRLAKAKRRWANIGMGSLPKGCRIDSVETDGVGLRLCVKTKIDMRHYIRRVPPPVMTDDGASMSSGAQLTSRKKKAKTRGLPETPYFTPKDASDDRLPRPLVLGVDTGRAKLFVAAISKSAVQKPTSVVFTRHRYYYEMGHTRHRRWDLARREQNPAINAALLQLSESGGLRNCDPEKWAAYLNADQDNDAVLDAEYVLLVERARWRMRMFRSKKRSLDRAVNDLIEKATVGERMDRPLVFGIGDGGFPSSGPGELPAPTSALAVAFKRGLRRHATKGRVVVVLVLDEFRTTMCCCACGSVTTPTQVEYLGKDGTRQWKASNRLRACTTCNTTGKLRDRDVRAARNITWPTYNKYYGQDRPEYLKRGRQMG

SEQ ID NO: 1222 - protein, 236 aa, Chlamydomonas sp.
LVASIPSSKVASLDGMSAHVSGYLSVLKQLLVHRATRGYRSMRFLRYSGKQRTIEKVCDMISPRDKAVVVGFGNWANNGCGISRMCSGPIKEIRQRLASRLNVMFKNIDEFKTSCMCHACFEKLVNMKASSVKRKRAENGNWEKVALTSGKVHKVLHCHNSVCGATWNRDVNAAKDILLLLDTWMDGKGRPLPFNRNPVSPEACVANYRVPPTMDAWVSSACYPEDLPSMAEIQND

SEQ ID NO: 1223 - protein, 263 aa, Chlamydomonas sp.
RKRQGSSSTRIILAVNAYAGRCKSAGRRPRRRNDPLLRMAIQALSCWTWKTTHVMCFEKMLGVQAMVNDILVAEYIEDTWYARWKMLLWRRKRSVIMQHYAATIRHVALPGTPVVYGYGDAGFAACRRGEQAVPTTGKIYLLHRVASCLRDVNPSIATPVDEMRTTMCCHGCGEVMVDIKPPKRFAAEKVPALRGLKLCRGCGVNGNGHRLVASEMVAEDEEGGLVREALNAMISGGERPEYLRPRPRAKRPPRIRSGTIVAS

SEQ ID NO: 1224 - protein, 833 aa, Chlamydomonas sp.
YGQGLQVLGFIRWCDTYIKTLVDDIIHPMPLGCRQGYVTKDVLVARLVSAVPEGGALENKPARVLLGHAIFHGVVTANEVNETTERVETTIPCYLFSYVEDPLKRQAIEKYVLAASQLFRRGTIIANLVAIETLGAHTDLPVGSRPRFDMASSMPFGELADFYMEQDVRSSEAKHVFLPERWPTLNVQRSPRVQAVLSAYGDRIPRLPDWQIVMKPCGWDNAINRMATKFLGNLKVQAMKNLRDAVVDYVGVVSLYDEGSRSLVAGMIKGRLRPLSIHTEDWEMVCRLRTTLGVRDDDVTFYPPKKTPFSRGVLLLHLFIVKFGKGERSYLPISTRGRKYGYLDTKITTSLFALAVRQSNKRRKEAAAEEAREAKAARLASGEKRPRKKKIETNAPSIASPPTLAPPPVDGKGDMEEDVGSTSVGELLGLTEESFKRRRKELRKVLRLQTRKAHRAERPGAKKTRLAKAKRRWANIGMGSLPKGCRIDSVETDGVGLRLCVKTKIDMRPYIRRVPPPVMTDDGASTSSGAQLTSRKKKAKTRGLPETPYFTPKDASDDRLPRPLVLGVDTGRAKLFVAANSKSAVQKPTSVVFTRHRYYEMGHTRHRRWDLARREQNPAIKAALLQLSESGGLRNCDPEKWAAYLNADQDNDAVLDAEYVLLVERARWRMRMFRSKKRSLDRAVNDLIEKAAVGERMDRPLVFGIGDGGFPSTGPGELPAPTSALAVAFKRGLRRQATKGRVAVVLVLDEFRTTMCCCACGSVTTPPQVEYLGKDGTRQWKASNRLRACTTCNTTGKLRDRDVQAARNITWLTYNKYYGQDRPEYLKRGRQMG

SEQ ID NO: 1225 - protein, 535 aa, Chlamydomonas sp.
QYSSLDILLRLPLSFGVISVRLKLARLARTLHRWVTCQTDKATRRITRRRKLTEEIVNTIRQMLVENHGVMNRNHIQILLLECNGVRLCIPTISIAVRKLCGFSKKRTSRRFGGKRDADMHQRLVNTFETSIRERFGDPHRVVSIDECYFSEKVLPLYGYSLVGSKCVVTSPTTSWKKRSLLLAVADDGSKHFRVYEGSINKLRFFDFIMGLECPPKTTIILDNVAFHKDVTPMIDDFHTYHSRRQHLRWTLQERRQKAEVERRRNDPLLRLAIQALSCWTWKTTHVMCFEKMLGVQAMVNDILVAEYIEDTWYARWKMLLWRRKRSVIMQHYAATIRHVALPGTPVVYGYGDAGFAACGRGEQAVPTTGKIYLLRRVASCLRDVNPSIATPVDEMRTTMCCHGCGEVMVDIKPPNRFAAEKVPALRGLKLCRDCGVNGNGHRLVAIEMVAGVPGAMPMQDEEGELVRDLLLCVAAEGGNMLHACRVRNRDKNASRNIWEALNAMISGEERPEYLRPRPRAKRPPRIRSGTIVAS

SEQ ID NO: 1226 - protein, 331 aa, Chlamydomonas sp.
DVAERRMHEIASHDNWTKTALVASLGACNIGTRRRAMASYSAIVGNRVILLSLRIFVSHRARASAFLCGLDKVHRECAMYIKFYIRPTHVMCFEKMLGVQAMVNDILVAEYIEDTWYARWKMLLWRRKRSVIMQHYAATIRHVALPGTPVVYGYGDAGFAACGRGEQAVPTTGKIYLLRRVASCLRDVSPSIATPVDEMRTTMCCHGCGEVMVDIKPPNRFAAELRGLKLCRGCGVNGNGHRLVSIEMVAGVPGAMPLKDEEGELVRDLLLCVAAEGGNMLHACRVRNRDKNASRNIWEALNAMIKRPEYLRPRPRAKRPPRIRSGTIVAS

SEQ ID NO: 1227 - protein, 358 aa, Chlamydomonas sp.
QISCPCHLQRRYVHLAYHLLFYRYMTTDESGLVSFRDNVVVAAIDPGVTNILTVTGLDGCTRSYSSAQYYRKGLIFKSQRQTGIWNLETTDIVADVPDRDSSNSEQIRQYTRFYMGAAPMLLAHRAERGYRNLRFRRHCRKQKLIVEIADFVAPREKRTKVLVGFGDWKGLGATPISRRTSGPLQAIKFELRSRGNVIMEDVDEFRTSQRCSCCESSLCNMVALTHRKMQDGTGWECTEGRKRIHKILHCKSSQSGAPRQQSGGRLHCGKTWDRDVNDSRNILMLTLHQVFGRERPLAFRRDAPRSSLKSPQPPPDTDLGTQTVERFPVEATRNIFEHLSNLLHPPTLRKSNDLQVRL

SEQ ID NO: 1228 - protein, 788 aa, Chlamydomonas sp.
ECSREAVCRSRLHQNVYRIQSVMENGIGVSSEVHEVDQHDAVAELVDYEREDEDCALGRAICVVKMKLSTFIPHDGIRRKIDTLVMEMNKLLGEGYIFANFHIARLLENGIAVPPVNRNFFYRCLLAVSTNKCHGSTLGEDFESSRILFDLLREPGQSKVDIRGSMKNQIIADLTIIMATMASNHLWTNLERRIMTYLNWKYPKISKHLRADIVAAVIKCPTKYLDVIFKMSAHVVKLPTKLPTARLRVAKYAVDLAKKSVGRKEPKGSHLREKLAKLQARFKKLSEAWISSKNLRVDEDNVKRFIARDVAFCLRGVIPLPSGNNFSSRAHMTLPLYHKILSETIASGNEKLCTFSLLPYKSGFTISHIPISKMAFLYLVKECKLDSCKVDVASKNHHGIWERFANLKMVETVSRKFGYRIVTDGFAVSILMNKPTSLTCSMPKDEFSKRANEYMTTDESGLVSFRDNVVVAAIDPGVTDILTVTGLDGCTRSYSSAQYYRKGLIFKSQRQTGIWNLETTDIVADIPDRDSSNSEQIGQYARFYMGAAPMLLAHRAERGYRNLRFRRHCRKQKLIVEIADFVAPREKRTKVLVGFGDWKGLGATPISRRTSGPLQAIKFELRSRGNVIMEDVDEFKTSQRCSCCESSLCNMVALTHRKKQDGTGWECTEGRKRMHKILHCKSSQSGAPRQQSGGRLHCGKTWDRDVNASRNILMLTLHQVFGRERPLAFCRDAPRSSLKSPQPPPDTDLGTQTVERFPVEATRNIFEHLSNLLHPPTLRKSNDLQVRL

SEQ ID NO: 1229 - protein, 362 aa, Chlamydomonas sp.
NLRSTLVVCWHLVRHSVPPSGHHQEFLVYSGECKGEIVCLVKECDLDSCKVDVASKNHHGIWERFANLKMVETVYRKFGYRIVTDGFAVSILMNKPTCMTCSMPEDAFSKRANEYMTTDESGLVSFRDNVVVAAIDPGVTDILTVTGLDGCTRSYSSEQYYRKGLIFKSQRQTGIWNLETTDIVADVLDRDSSNSEQIGAYARFYMGAAPMLLAHRAVRGYRNLRFHRYCRKQKLIVEIADFVAPREKRTKVLVGFGDWKGLGATPISRRTSGPLQSIRFELRSRGNVIMEDVDEFRTSQRCSCCESPLCNMVALTHRKKQDGTGWECTEGRKRIHKILHCKSSQSGAPRQQSGGRFHCGKT

SEQ ID NO: 1230 - protein, 575 aa, Chlamydomonas sp.
SERSGLQATNVSLTQAASKATSSSRKKNPAVVKSFSTHVCPHTNNNPTCSDSNCSCKPIFLTNIPDASKSLKSRTSDQGSTSSAQDFYEYWDSSRQDLYRQLLWLPKTGSQGLVSSSLNGFARSTPARSSFSITKTEPLKTSLEKTSCPSFKYIVADGTVEDATKSNAKPKLRTLKLKLNPTKAQKSMLAEFAGCSRFMYNKAVAARLGVGSTHKSVFRIRDRYVTNKVRGEGKMPNPYFKNRQWLLQCPKSVRQSAIKAALANIKACFSNLKAGNIKQFSAPFRRKKTELDRGWAIEMDQKNVSKDGDKLFIFKDILGNMRYFGSKQFHKLMPEENPTHDPKVQKSRFGEYFLVLSVAARDRRADRKPVHPDKVATASIDPGVRKTMVTYSPENEESFMLGQGQASDLVKLLLVHDKLQSRLDTEKTLRSKERMKIKMQMIRIRKRIFYLKKEFRDQTTNFLAARYDVLLVPQLETAKMTISAERELTTKVARQMLTLSHSVLFNRLKEKCEEYGTVFLHVLEHYTSQTCPMCGFLNKCGETYTCKNCQFTRDRDIVGAAGIFLKAVRTENPCS

SEQ ID NO: 1231 - protein, 622 aa, Chlamydomonas sp.
PCIRNLHVLNIRMPCMATNASVKLARPPMPLVSPGPSSVDGRIMARSERSGLQATNVSLTQAASKATSSSRKKNPAVVKSFSTHVCPHTNNNPTCSDSNCSCKPIFLTNIPDASKSLKSRTSDQGSTSSAQDFYEYWDSSRQDLYRQLLWLPKTGSQGLVSSSLNGFARSTPARSSFSITKTEPLKTSLEKTSCPSFKYIVADGTVEDATKSNAKPKLRTLKLKLNPTKAQKSMLAEFAGCSRFMYNKAVAARLGVGSTHKSVFRIRDRYVTNKVRGEGKMPNPYFKNRQWLLQQCPQSVRQSAIKAALANIKACFSNLKAGNIKQFSAPFRRKKTELDRGWAIEMDQKNVSKDGDKLFIFKDILGNMRYFGSKQFHKLMPEENPTHDPKVQKSRFGEYFLVLSVAARDRRADRKPVHPDKVATASIDPGVRKTMVMYSPENEESFMLGQGQASDLVKLLLVHDKLQSRLDTEKTLRSKERMKIKMQMIRIRKRIFYLKKEFRDQTTNFLAARYDVLLVPQLETAKMTISAERELTTKVARQMLTLSHSVLFNRLKEKCEEYGTVFLHVLEHYTSQTCPMCGFLNKCGETYTCKNCQFTRDRDIVGAAGIFLKAVRTENPCS

SEQ ID NO: 1232 - protein, 306 aa, Chlamydomonas sp.
DCKSVRKQERPLDDKSKTWKLTRGAFYHKSGIKKQKKQQEKRFSDMIPRWESLRENGAALSTSRKDDISAYLKNYTTFSNEWWRMALRRRESRDNFQRYIGKRKAMDSFWAGIKRNMKLDHPDLKVRVAYGSAITKLKATGPGEVAVPTGSMFASCKRLFKEEVQMTDEFKTTLMSWETGAKKECVYKIPSVQITTEGQIRLGYELLGHTPLKETPKVSYRDQLAVRVYCTRKKIQEKHRRGGLAPSLVDNQSIKRYPEVRGLRFSPETSTYSDWDRSSALTIARLHCMELLGQGRPLPFCRDACC

SEQ ID NO: 1233 - protein, 493 aa, Chlamydomonas sp.
ISREKVLQPFWTPAYKIISETLLLPIETGYVDSGSSSSNHWSQKQEDKSQFLTVQTRKLVNKSSQKIYCQSSMSSVAGKWAKEAILEERIKPLKTIQMKIFPTKKQKTILDEFINTSRYVSNKAIECVENGHKPHFPSLRDLLVTSNTKKHSGTYKKLSKEIEDLHTLKHNTVDKLDKQKIIQEINTKNSPMRDEMKEIAYEKNHNLQGFETITPKKIRANAVKSVCDAYKSAFTNLNNGILKILPRTFKDDCILKISNKNTKKHKNLTIENNVDIVRYKGEYFAHILDVVVKNVKNESKDYTMCGIDPGDRSFATVYSCSILDNGKVSSYNTGDYTHRIDLLKKLNKKKSDMMTRRVVRKKQYNKIEKKKKDVVDCLHWETINHVLNHNDIVFYGDIKSQDITKGNKNKTLNQDFNDLKFYIFKNRLEYKASVLEKKVVIMNECYTTKTCSSCGTLNDDVGNKKVFTCPICNLVTGRDANASKNILMKGLLS

SEQ ID NO: 1234 - protein, 229 aa, Chlamydomonas sp.
SRFGEYFLVLSVADRDRRAERKPVHPDKVATASIDPGVRKTMVTYSPENEESFMLGQGQASDLVKLLLVHDKMQSRLDTEKTLRSKERMKIKKQMIRIRKRIFYLKKEFRDQTTNFLAARYDVLLVPQLETAKMTISAERELTTKVARQMLTLSHSVLFNRLKEKCAEYGTVFLHVLEHYTSQTCPMCGSLNKCGETYTCKNCQFTCDRDIVGAAGIFLKAVRTENPCS

SEQ ID NO: 1235 - protein, 713 aa, Chlamydomonas sp.
RETRRGFFSKVIEYNFWTLIQGNGDKMETIVNKEPPDKRTLPDRASKIKDRNNGEENVVKCTLSRIIADKDNKDVIIKVIKERVDSVSKRTYLAGVAVNRILKEVFKGVPDAQLHTVSVPSVDQNFIRQLMVGSRQAHMETRDATVERFFHNNYWFREKIEGREVIVKKKKQYVGAIARYDGDRNLYSHASKKYLTNFNNHYRVHLSTWIKKFVYSKENRILAKEIKDEHGIDETVFHRYLLYDIHSWGVKELDLIALHSLLPERTKMLLKIQHSILGRDEINRQWLKSVSNSAKMIWYNVFINRYLEATEDEGYAKLVNIAPIPTVKHAFITIDTDGLLGVLKDVGLIESLEKTLTNKEHWESVFDVENIRSAGKGVFTCTVDTDGVMACTHFLRAEKKKISIKNDGTAIKKQTKTLREFSESDPNVVVVANDPGRCNIACLTWKKNKVEEKYKGGRKRKRHCEFGSKRLTRERYYVESGVFKSRGPTKKWLSNIQECLDDLKDNSPKRTSLVSFDAYVAVMVNHWDSRWGEMSKSRWGAQRLRLYGGKKRVLARFFNEVQEAVGERKTIVVAYGSAKFAPGGKGELSVPTTSAFKAFSDRFKGRVAVIDEFRTTKIWHKDSTTVLQSVQSEKEGRTVRGLLWCSSTMENSKLFVNRDLNAAINIHNCFTMYPVRPGILARPKKYCKLEVVVGRKIDYKLTGSLQNAVSSEV

SEQ ID NO: 1236 - protein, 360 aa, Chlamydomonas sp.
SVFRIRDRYVTNKVRGKGKMPNPYFKNRQWLLQCPKSVRQSAIKAALANIKACFSNLKAGNIKQFSAPFRGKKTELERGWAIEMDQKNVSKDGDKLFIFKDILGNMRYFGSKQLHKLMPEENPTHDPKVQKSRFGEYFLVLSVAARDRRAERKPVHPDKVATASIDPGVRKTMVTYSPENEESFMLGQGQASDLVKLLLVHDKLQSRLDTEKTLRSKERMKIKKQMIRIRKRIFYLKKEFRDQTTNFLAARYNVLLVPQLETAKMTVSAERELTTKVARQMLTLSHSVLFNRLKEKCQEYGTVFLHVLEHYTSQTCPMCGFLNKCGETHTCKNCQFTCDRDIVGAAGIFLKAVRTENPCS

SEQ ID NO: 1237 - protein, 314 aa, Chlamydomonas sp.
RSLIEQAVQQDKSLRENGAALSTSRKDDISAYLKNYATFSDEWWRMALRRRESRDNFQRYIGKRKAMDSFWAGIKRNMKLDHPDLRVRVAYGSAITKLKATGPGEVAVPTGSMFASCKRLFKEEVHVTDEFKTTLMSWETGAKKECVYKIPSVQITTEGQIRLGYELLGHTPLKETPKVSYRDQLAVRVFCTRKKIQEKHRRGGLPRSSGTLRYEDCDSLQKTALTRTGTAPLLSQSQGCTAWNCWVKGDRFHFAGMRVVDGLQKNMMVFHCNVGCYTIRLHHKVYRTLQKAVSFQYAVECNTISLTTSSSECT

SEQ ID NO: 1238 - protein, 623 aa, Chlamydomonas sp.
METIVNTEPPDKRTRPDRASKIKDRKNGEENVVKCTLGRIIADKDNKDVIIKVIKERVDSVSKRTYLAGVAVNRILKEVFEGVPDAQLHTVSVPSVDQNFIRQLMVGSRQAYMETRDATVKRFFHNNYWFREKIEGREVIVKKKKQYVGAIARYDGDQNLYSHASKKYPTNFNNHYRVHLSTWIKKFVYSKENRILAKEIKDEHGIDETVFHRYLLYDTHSWGVKEDLIAIHSLLPERTKMLLKIQHSILGRDEINRQWLKSVSNSAKMIRYNVFINRYLEATEDEGYAKLVNIAPIPTVKHAFITIDTDGLLGVLKDVGLNESLEKTLTNKEHWESVFDVENIRSTGKGVFTCTIDTDGIMACTHFLRAEKKKISIKDDGTAIKKHTKTLREFSESDPNVVVVANDPGRCNIAFLTWKKNKVDEKDKGGRKRKRHCEFGSKRLTRERYYVESGVFKSRGPTKKWLSNIQDCLDDLKDNSPKRTSLVSFDAYVTVMVNHWDSRWGEMSKSRWGAQRLRLYGGKKRVLARFFNEVQEDVGERKTILLSLPLVARVNFLSLQRARSRRLAIVSRGELPSLTNSVPQRSGTRTAPPSSRVCSPKKKGAWFEACYGAVPPWRTASCL

SEQ ID NO: 1239 - protein, 685 aa, Chlamydomonas sp.
ECSREPVCRSRLHQNVFGVQFVMENEVGESSSLVHEADQHDDVAELVDYDGEEDEECAPGRAICVVKMKLSTFIPHDWLRRKIDTLVLDMNKLLGEGHIFTNFHIARLFENGIAVPPVNRNFFYRCLLAVSTNKCMGSTLGEDFENSRLLFYLLREQGRSKVDIRGRVNNQIVADLSILMATMASNHLWTNLERRITTYLKWKYPKIAKRLRSDIVAAVIKCPTKNLDVIFKMSPHTTKLPTKLPTARLRSAKSAVALVKKRVGRKEPEGSPLRVRLTKLQARLEKLSEAWLSSKNLRVDEDNAKSFFARDVAFCLRGVLPLPSGKTFASRAHMTLPLYHKILSETIEERKTKNEKLRTFSLLPYKSGFTLSHIPISKMAFFYMVNECHFDSCKADVAYKNHQGIWERFANLKKVETISRKFGYRIVTDGFAVSILMNKPTCLTCSMPADSFSTRAHEYVTTDKGGIVSFRDNVVVAAVDPGVTDIVTVTGLDGGTRSYSSAQYYRKGLIFKSQRQTDVWNLETADIVGDIIPDRDSSRSEQIGAYARIYMGAAPILLAHRASRGYRNLRFRRYCKKQKLIVEIADFVGPREKSAKVLVGFGDWKGLGATPITRRTCGPLQAIRFELRSRGNVIMEDVDEFRTSQRCSCCENRLCNMVALTHRKKQDGTGWECTEGRMRIHKILH

SEQ ID NO: 1240 - protein, 514 aa, Chlamydomonas sp.
KNIPDASKSLKSRTSDQGSTSSAQDFYEYWDSSRQDLYRQLLWLPKTGTQGLVSSSFNGFAHITPTRSSFSITKTKPLKTSLEKTSCPSFKYIVTDGTVEDATKSNAKPKLRTLKLKLNPTKAQKSMLEEFAGCSRFMYNKAVAARLGVGSTHKSVFRIRDRYVTNKVRGEGKMPNPYFKNRQWLLQCPKSLRQSAIKAALANIKACFSNLKAGNIKQFSAPFRRKKTELERGWAIEMDQKNVSKDGDKLFIFKDILGNMRYFGSKQLHKLMPEENPTHDPKVQKSRFGEYFLVLSVASRDRRAERKPVHPDKVAPASIDPGVRKTMVTYSPENEESFMLGQGQASDLVKLLLVHDKLQSRLDTEKTLRSKERMKIKKHMIRIRKRIFYLKKEFRDQTTNFLAARYDVLLVPQLETAKMTISAERELTTKVARQMLTLSQSVLFNRLKEKCAEYGTVFLHVLEHYTSQTCPMCGFLNKCGETYTCKNCQFTCDRDIVGAGGIFLKAVRTENPCS

SEQ ID NO: 1241 - protein, 490 aa, Chlamydomonas sp.
EISCPLPRGKQFNTRAHLTMRLFHHVLTELGADLKEKTTKKRPRLFSILPRKSGFTISYVPISSMTLMKLLSMGDSPLESVRGDGRQENHSMLWRKYFNVQGLEKKGSRFDNRILSDGKGVSVQMKHQVGKDVAGEGRGDNAGYPKDASIEDCQDASLRQGALRVGIDPGMTDIVTIASSDGRVESFSSARFSEAAGYNTSNRRTKKWNADTQDLVKSIPSPTTSSMHDMQDHVRGYLSALPTLLQHRANRGYRSMRFFRYGGKQKTIEKVCDLIAPKAQKKTIEEKVCDVIAPKAKKTVVGFGNWSNQGYGISRSCSGPVKEIRKCLSRRQNVLFKNVDERNTSCTCHGCFQKLVNMKADSVVWRRVQNEPSALIDGAPTTTTTTFEKQKTVVKNVKVHKVLHCRNSVKSASSNVRCGATWNRDVNAAKNLLLLLTTWMDGKERPAAFCVPSSSPTPKTTVSGEANVGAQPTDPPGSVSSLQLLSSGPA

SEQ ID NO: 1242 - protein, 793 aa, Chlamydomonas sp.
KMATKPPTVAKLKELLKLAEIPYLSKSNKDDLVRLCEDNGLIARPPPEYKTVEKMCVVKCALKKTMSLDDEEFGKFREHVDQLVNVVSRMLRRSSLVLTFHITSLLEKGLDIPDLYNMKDTYWKDWLRIGVDGIFPDEESKISYEAVKDSIGDVIGNDDADYIKSYPIYFDQVLNYAGHTLSTVVSNNAWVPLIPRLARLTSTTLNKLNAPKTLDTSKIIRGYDVMQAIQQEVQNMEGWPESVQEYVNEVREMLSVPDGSRVYDNYGKDMDFPTMVRFNYWIQTRLEDMDARRIRLMPIFNVQRVHVRLDLKTLVNLFRHMFPNDQNIVELSKWEHVKNPDSFMLPQRPAQKKKKSCGPGEWEAYKSVLKQYDDDVNDIKATDEYRHAKGLYDTLVNARKTVAGSFFRKPPVKNGWVFDCSICTDGVSLSMQYSKTVQVLVSDLKKTCKKPRKEECIKIAEKYDGSLKTILPDMGIVVLGVDPGRSNIATVPYLADDKNKTWTLTRGAFYHKSGIKKQTRQKELRFADMIPMWESLRENGAALSTSRTDKISAYLSNYAKFSDEWWRLALRRRESRDNLQRYIGKRKVKDSFWAGIKRCMMKELPDMKVCVAYGSAITKLKPTGPGEVAVPIGAMFASCKRIFKEDVSVTDEFKTTLMSWETGKEKERVYKIPSVCSADVKLRLGGERFGHTKSKTMPKVVDCDHLGVRLYNKRKGAQEKHRRGGFATSLVDSQKSIERYPEVRGLRFSPETCIYSDRDRSSALTIARLHCMELMGLGRPLPFAHSSSVVVDE

SEQ ID NO: 1243 - protein, 842 aa, Chlamydomonas sp.
WLVPTFLGPRRKRFQSRTTERRLRSRPILSASFPSPTPMWWSLQTTLVCIKSSVMYKLCKMATKPPTVAKLKELLKLAEVAYSSKDKKDDIVRLCEDNGLIARPPPEYKTVEKMCVVKCALKKAMSLDDEEFGKFREHVDQLVNVVSRMLRRSSLVLTFHVTRLMEGDLPIPNMYDMKDTYWKDWLRIGVDGVFPDEESRISYESVKDVIGKVLGSDDPDYINSYPIYFDQVLNYAGHTLSTVVSNNAWVPLVPRLTRLTKATLNALGAPKTIRVYDVMRVIQQEIQEMESWPESVQEYVREVRVRLKVPDGSRLYDDYGKDMDFPTMVRFNYWMQTRLEAIGARRIRLMPIFNVQRAHVRLDMKTLVNLFRHVFPKDPNIVELSKWKNVKDPDRFMLPLKPAVKKKKSCGLGEWEAYKLAQQKYDTDVNDIKATDEYRHAKGRYDTLVNARKTVAGSLFKKPPIKTGWVFDCSICTDGVSLSMQYSKTVQVRVSDLKKTSKRSRYDEGMSVSEQYDHKLKTTLPDMGIVVLGVDPGRSNIATVTYLADDKSKTWKLTRGSFYHKSGIKKQKKQQEKRFSDMIPRWESLRENGAALSTSRTDDISAYLKNYATFSDEWWRMALLRRESRDNFQRYIGKRKAMDSFWAGIKRNMKLDHPDLRVRVAYGSAITTLKATGPGEVAVPTGSMFASCKRLFKEEVHVTDEFKTTLMSWETGAKKECVYKIPSVQITTEGQIRLGYELLGHPPLKETPKVSYRDQLAVRVYCTRKQIQEKHRRGGLAPSLVDNNSIKRYPEVRGLRFSPETSTYSDRDRSSALTIARLHCMELLGQGRPLPFCRDACC

SEQ ID NO: 1244 - protein, 229 aa, Chlamydomonas sp.
YVGKQKTIEKVCDLIAPKAQKKTIEEKVCDVIAPKAKKTVVGFGNWSNQGYGISRSCSGPVKEIRKCLSRRQNVLFKNVDERNTSCTCHGCFQKLVNMKADSVVWRRVQNEPSALINGAPTTTTTFEKQKTVVKNVKVHKVLHCCNSVKSASSNVRCGATWNRDVNAAKNLLLLLTTWMDGKERPAAFCVPSSSPTPKNTVSGEANVGAQPTDPPGSVSSLQLLSSGPA

SEQ ID NO: 1245 - protein, 232 aa, Chlamydomonas sp.
YVGKQKTIEKVCDLIAPKAQKKTIEEKVCDVIAPKAKKTVVGFGNWSNQGYGISRSCSGPVKEIRKCLSRRQNVLFKNVDERNTSCTCHGCFQKLVNIKADSVVWRRVQNEPAALIDGAPTTTTTTTTFEKQKTVVKNVKVHKVLHCRNSVKSASSNVRCGATWNRDVNAAKNLLLLLTTWMDGKERPAAFCVPSSSPTPKTTVSGEANVGAQPTDPPGSVSSLQLLSSGPA

SEQ ID NO: 1246 - protein, 803 aa, Chlamydomonas sp.
PRMEHVCDVCIKSSVMYKLCRMATKPPTVAKLKELLKLAEVACSSKDKKDDIVRLCEDNGLIARPPPEYKTVEKMCVVKCALKKAMSLDDEEFGKFMEHVDQLVNVVSRMLRRSSLVLTFHVTRLMEGDLPIPNMYDMKDTYWKDWLRIGVDGVFPDEESRISYESVKDVIGKVLGSDDPDYINSYPIYFDQVLNYAGHTLSTVVLNNAWVPLVPRLTRLTKATLNALGAPKTIRVYDVMRVIQQEIQEMESWPESVKEYVREVRVRLKVPDGSRLYDDYGKDMDFPTMVRFNYWMQTRLEAIGARRIRLMPIFNVQRAHVRLDMKTLVNLFRHVFPKDPNIVELTKWKNVKDPDRFMLPLKPAVKKKKSCGPGEWEAYKLAQQKYDADVNDIKDTDEYRHAKGRYDTLVNAQKTVAGSFFKKPPVKTGWVFDCSICTDGVSLSMQYSKTVQVRVSDLKKTSKRSRDDEGMSVSEQYDHKLKTTLPDMGIVVLGVDPGRSNIATVTYLADDKSKTWKLTRGAFYHKSGIKKQKKQQEKRFSDMIPRWESLRENGAALSTSRTDNISAYLKNYATFSDEWWRMALLRRESRDNFQRYIGKRKAMDSFWAGIKRNMKLDHPDLRVRVAYGSAITTLKATGPGEVAVPTGSMFASCKRLFKEEVHVTDEFKTTLMSWETGAKKECVYKIPSVQITTEGQIRLGYELLGHTPLKETPKVSYRDQLAVRVYCTRKQIQEKHRRGGLAPSLVGNNSIKRYPQVRGLRFSPETSTYSDRDRSSALTIARLHCMELLGQGRPLPFCRDACC

SEQ ID NO: 1247 - protein, 688 aa, Chlamydomonas sp.
RNVGAILYHQKKKNTHPLLMGVVQDKGDDDINISVVKKTLNSLCMDVSRHQISSRIQSMVLLINHAVAEAYLFANFHITRCLDDGDFDVKQLPHLDRNFYYRCLLAVSTSNVRKDTLGQSFNDTMVAFDALRPAGYVKVDVRPWGQVIADVSIQMATMACNSIWANVDRVVIKYLRLKHPSLKKHFKKIVKAVVQYPESKIDTIIPEGLVHAIHIKEVVSHLRALFPLPRGKQFNTRAHLTMRLFHHVLTELGEVGRVDPKDKKTRKSHPRLFSILPRKNGFTISYVPMSSMTFMKLLSMGDSPLESVSGDGRYENHTMLWRKYFNVQGLETKRSRFDNRILSDGKGVSVQMKQKGKEEVVDEGENAGYPKDANIVECKDAVGALRVGVDPGMTDIVTVASSAGRIESFSSARFSEVAGYNTSKRRTYKWNDETQDLVKSIPSPNTSNMSDLQDHVRAYLKALPILLQHRANKGYRSMRFFRYVGKQKTIEKVCDVIAPRAQTTVVGFGNWSNQGYGISRSCSGPIKEIRRCLSRRKNVLFKNVDERNTSCKCHGCFQRLVNMKADSVVWRGVCKESPIDESITVEKQKMVVKNVKVHKVLHCRDSVKSASSNVRCGATWNRDVNAAKNLLLLLTTWMDGRERPEAFCVPSPPPKTTVSIEASVSAKPTDPPGFVSSFPCYPLGQLKC

SEQ ID NO: 1248 - protein, 231 aa, Chlamydomonas sp.
YVGKQKTIEKVCDLIAPKAQKKTIEEKVCDVIAPKAKKTVVGFGNWSNQGYGISRSCSGPVKEIRKCLSRRQNVLFKNVDERNTSCTCHGCFQKLVNMKADSVVWRRVQNEPSALIDGAPTTTTTTTFEKQKTVVKNVKVHKVLHCRNSVKSASSNVRCGATWNRDVNAAKNLLLLLTTWMDGKERPAAFCVPSSSPTPKTTVSGEANVGAQPTDPPGSVSSLQLLSSGPA

SEQ ID NO: 1249 - protein, 287 aa, Chlamydomonas sp.
QGLIFKSQRQTDVWNLETADIVGGIIPDRDSSSSEQIGAYARFYMGAAPILLAHRASRGYRNLRFRRYCKKQKLIVEIADFVAPRKKGAKVLVGFGDWKGLGATPISRRTCGPLQAIRFELRSRENVIMEDIDEFRTSQRCSCCENHLCNMVALTHRKKQDGTGWECTEGRKRIHKILHCKSSQSGAPRQQSGGMLHCGKTWDRDVNASRNILMLTLHQVFGRERPLAFRRDAPRSSSTTPPPPPDTDMGTQTVERFTKEATRNIFENLFNLLHPPTLPKSNDLQSG

SEQ ID NO: 1250 - protein, 794 aa, Chlamydomonas sp.
ECSREPVCRSRLHQNVFGVQFVMENGIGESSSLVHEADQHDDVAELVDYEGEEDGECAPGRAICVVKMKLSTFIPHDWLRNKIDTLVLDMNKLLGEGYIFANFHIARLFENGIAVPPVNRNFFYRCLIAVSTNKCKGSTLGEDFESSRLLFDLLREPGQSKVDIRGSVKNQIIADLSILMATMASNHLWTNIERRITTYLKWKYPQIAKRLRSDIVAALIKCPTKNLDVIFKMSPHTTKLPTKLPTSRLRSAKSAVALAKKRVGRKEPEGSPLRVRLTKLQERLEKLSEAWLSSKNLRVDADNAKRFFAREVAFCLRGVLPLPSGNTFASRAHMTLPLYHKILSETIEEKRKTKNEKHRTFSLLPYKSGFTLSHIPISKMAFFYMVNECHFDSCKADVASKNHQGIWERFANLKKVETVSRKFGYRIVTDGFAVSILMNKPTCLTCSMPADAFSTRAHEYVTTDEGGIVSFLDNVVVSAVDPGVTDIVTVTGLNGGTRSYSSAKYYRKGLIFKSQRQTDVWNLETADIVGGIIPDRDSSSSEQIGAYARFYMGAAPILLAHRASRGYRNLRFRRYCKKQKLIVEIADFVAPRKKSAKVLVGFGDWKGLGATPISRRTCGPLQAIRFELRSRENVIMEDIDEFRTSQRCSCCENHLCNMVALTHRKKQDGTGWECTEGRKRIHKILHCKSSQSGAPRQQSGGMLHCGKTWDRDVNASRNILMLTLHQVFGRERPLAFRRDAPRSSSTTPPPPPDTDMGTQTVERFTKEATRNIFENLFNLLHPPTLPKSNDLQSG

SEQ ID NO: 1251 - protein, 618 aa, Chlamydomonas sp.
QCIRNLHVLNIRMPCMATKASVKLARPPMPLVSPGPSSVDGRIMARSGLQATNVSLTQAASKATSSSRKKKPAVVKSFSTHVCPHTNNNPTCSDSNCSCKPIFLTNIPDASKSLKSRTSDQGSTSSAQDFYEYWDSSRQDLYRQLLWLPKTGSQGLVSSSLNGFARSTPARSSFSITKTEPLKTSLEKTSCPSFKYIVADGTVEDSTKSNAKPKLRTLKLKLNPTKAQKSMLAEFAGCSRFMYNKAVAARLGVGSTHKSVFRIRDRYVTNKVRGKGKMPNPYFKNRQWLLQCPKSVRQSAIKSALANIKACFSNLKAGNIKQFSAPFRRKKTELERGWVIEMDQKNVSKDGDKLFIFKEILGNMRYFGSKQLHKLMPEENPTHDPKVQKSRFGEYFLVLSVAARDRRAERKPVNPDKVATASIDPGVRKTMVTYSPENEESFMLGQGQASDLVKLLLVHDKLQSRLDTEKTLRSKERMKIKKLMIRIRKTIFYLKKEFRDQTTNFLAARYDVLLVPQLETAKMTISAERELTTKVARQMLTLSHSVLFNRLKEKCEEYGTVFLHVLEHYTSQTCPMCGFLNKCGETYTCKNCQFTCDRDIVGAAGIFLKAVRTENPCS

SEQ ID NO: 1252 - protein, 686 aa, Chlamydomonas sp.
METIVNKEPPDKRTRPDRAAKIKDRKNGEENVVKCTLSRIIADKDNKDVITKVIKERVDSVSKRTYLAGVAVNRILKEVFEGVPDAQLHTVSVPSVDQNFIRQLMVGSRQAHMETRDATVERFFHNNYWFREKIEGREVIVKKKKQYVGAIARYDGDRNLYSHASKKYLTNFNNHYRVHLSTWIKKFVYSKENRILAKEFKDEHGIDETVFHRYLLYDIHSWGVKEDLIAIHSLLPERTKMLLKIQHSIIGRDEINRQWLKSVSNSAKMIRYNVFINRYLEATEDEGYAKLVNIAPIPTVKHSFITIDTDGLLGVLKDVGLVESLEKTLTNKEHWESVFDVENIRSTGKGVFTCTIDTDGVMACTHFLRAEKKKISIKDDGTAIKKQTKTLREFSESDPNVVVVANDPGRCNIAFLTWKKNKVEEKDKGGRKRKRHCEFGSKRLTRERYYVESGVFKSRGPTKKWLSNIQDCLDDLKDNSPKRTSLESFDAYVTVMVNHWDSRWGEMSKSRWGAQRLRLYGGKKRVLARFFNEVQADVGERKTIVIAYGSSKFAPGGKGELSVPTTSAFNAFRDRFKGRVAVIDEFRTTKIWHKDSTTVLQSVQSEKKGRTVRGLLWCSSTMENSKLFVNRDLNAAINIHNCFTMYPTRPGILARPKKYCKLEVVVGRTIDYKLTGSLQNAVSSEV

SEQ ID NO: 1253 - protein, 652 aa, Chlamydomonas sp.
PRMEHVCDVCIKSSVMYKLCKMATKPPTVAKLKELLKLAEVAYSSKDKKDDIVRLCEDNGLIARPPPEYKTVEKMCVVKCALKKAMSLDDEEFGKFREHVDQLVNVVSRMLRRSSLVLTFHVTRLMEGDLPIPNMYDMKDTYWKDWLRIGVDGVFPDEESRISYEAVKDVIGKVLGSDDPDYINSYPIYFDQVLNYAGHTLSTVVSNNAWVPLVPRLTRLTKATLNALKAPKTIRVYDVMRVIQQEIQEMESWPESVQEYVREVRVRLKVPDGSRLYDDYGKDMDFPTMVRFNYWMQTRLESIGARRIRLMPIFNVQRAHVRLDMKTLVNLFRHVFPKDPNIVELSKWKDVKDPDRFMLPLKPVVKKKKSCGPGEWEAYKLAQQKYDADVNDIKDTDEYRHAKGRYDTLVNARKTVAGSFFKKPPVKTGWVFDCSICTDGVSLSMQYSKTVQVRVSDMKKTSKRSRDDEGMSVSEQYDHKLKTTLPDMGIVVLGVDPGRSNIATVTYLADDKSKTWKLTRGAFYHKSGIKKQKKQQEKRFSDMIPRWESLRENGAALSTSRTDDISAYLKNYDTFSDEWWRMALLRRESRDNFQRYIGKRKAMDSFWAGIKRNMKLDHPDLRVRVAYGSAITTLKATGPGEVAVPTGSMFAS

SEQ ID NO: 1254 - protein, 686 aa, Chlamydomonas sp.
METIVNKEPPDKRTRPDRAAKIKDRKNGEENVVKCTLSRIIADKDNKDVITKVIKERVDSVSKRTYLAGVAVNRILKEVFEGVPDAQLHTVSVPSVDQNFIRQLMVGSRQAHMETRDATVERFFHNNYWFREKIEGREVIVKKKKQYVGAIARYDGDRNLYSHASKKYLTNFNNHYRVHLSTWIKKFVYSKENRILAKEFKDEHGIDETVFHRYLLYDIHSWGVKEDLIAIHSLLPERTKMLLKIQHSIIGRDEINRQWLKSVSNSAKMIRYNVFINRYLEATEDEGYAKLVNIAPIPTVKHSFITIDTDGLLGVLKDVGLVESLEKTLTNKEHWESVFDVENIRSTGKGVFTCTIDTDGVMACTHFLRAEKKKISIKDDGTAIKKQTKTLREFSESDPNVVVVANDPGRCNIAFLTWKKNKVEEKDKGGRKRKRHCEFGSKRLTRERYYVESGVFKSRGPTKKWLSNIQDCLDDLKDNSPKRTSLESFDAYVTVMVNHWDSRWGEMSKSRWGAQRLRLYGGKKRVLARFFNEVQADVGERKTIVIAYGSSKFAPGGKGELSVPTTSAFNAFSDRFKGRVAVIDEFRTTKIWHKDSTTVLQSVQSEKEGRTVRGLLWCSSTMENSKLFVNRDLNAAINIHNCFTMYPTRPGILARPKKYCKLEVVVGRTIDYKLTGSLQNAVSSEV

SEQ ID NO: 1255 - protein, 801 aa, Chlamydomonas sp.
PRMEHVCDVCIKSSVMYKLCKMATKPPTVAKLKELLKLAEVAYSSKDKKDDIVRLCEDNGLIARPPPEYKTVEKMCVVKCALKKAMSLDDEEFGKFREHVDQLVNVVSRMLRRSSLVLTFHVTRLMEGDLPIPNMYDMKDTYWKDWLRIGVDGVFPDEESRISYEAVKDVIGKVLGSDDPDYINSYPIYFDQVLNYAGHTLSTVVSNNAWVPLVPRLTRLTKATLNALKAPKTIRVYDVMRVIQQEIQEMESWPESVQEYVREVRVRLKVPDGSRLYDDYGKDMDFPTMVRFNYWMQTRLEDMDARRIRLMPIFNVQRAHVRLDMKTLVNLFRHVFPKDPNIVELSKWKDVKDPDCFMLPLKPAVKKKKSCGPGEWEAYKLAQQKYDADVNDIKDTDEYRHAKGRYDTLVNARKTVAGSFFKKPPVKTGWVFDCSICTDGVSLSMQYSKTVQVRVSDLKKTSKRSRDDEGMSVSEQYDHKLKTTLPDMGIVVLGVDPGRSNIATVTYLADDKSKTWKLTRGAFYHKSGIKKQKKQQEKRFSDMIPRWESLRENGAALSTSRTDDISAYLKNYDTFSDEWWRMALLRRESRDNFQRYIGKRKAMDSFWAGIKRNMKLDHPDLRVRVAYGSAITTLKATGPGEVAVPTGSMFASCKRLFKEEVHVTDEFKTTLMSWETGAKKECVYKIPSVQITTEGQIRLGYELLGHTPLKETPKVSYRDQLAVRVYCTRKQIQEKHRRGGLAPSLVNNNSIKRYPEVRGLRFSPETSTYSDRDRSSALTIARLHCMELLGQGRPLPFCRDA

SEQ ID NO: 1256 - protein, 686 aa, Chlamydomonas sp.
METIVNKEPPDKRTRPDRAAKIKDRKNGEENVVKCTLSRIIADKDNKDVITKVIKERVDSVSKRTYLAGVAVNRILKEVFEGVPDAQLHSVSVPSVDQNFIRQLMVGSRQAHMETRDATVERFFHNNDWFRKKIEGREVIVKKKKQYVGAIARYDGDRNLYSHASKKYLTNFNNHYRVHLSTWIKKFVYSKENRILAKEFKDEHGIDVTVFHRYLLYDIHSWGVKEDLIAIHSLLPERTKMFLKIQHSIIGRDEINRQWLKSVSNSAKMIRYNVYINRYLEATEDEGYAKLVNIAPIPTVKHSFITIDTDGLLGVLKDLGLVESLEKTLTNKEHWESVFDVENIRSTGKGVFTCTIDTDGVMACTHFLRAEKKKISIKDDGTAIKKQTKTLREFSESDPNVVVVANDPGRCNIAFLTWKKNKVEEKDKGGRKRKMHCKFGSKRLTRERYYVESGVFKSRGPTKKWLSNIQDCLDDLKDNSPKRTSLESFDAYVTVMVNHSDSRWGEMSKSRWGAQRLRLYGGKKRVLARFFNEVQADVGERKTIVIAYGSSKFAPGGKGELSVPTTSAFNAFSDRFKGRVAVIDEFRTTKIWHKDSTTVLQSVLSEKEGRTVRGLLWCSSTMENSKLFVNRDLNAAINIHNCFTMYPTRPGILARPKKYCKLEVVVGRTIDYKLTGSLQNAVSSEV

SEQ ID NO: 1257 - protein, 240 aa, Chlamydomonas sp.
CLRKTRPTIRRSKNPASANISSYCLSLLGTERKPVNPDKVATASIDPGVRKTMVTYSPENEESFMLGQGQASDLVKLLLVHDKLQSRLDTEKTLRSKERMKIKKLMIRIRKTIFYLKKEFRDQTTNFLAARYDVLLVPQLETAKMTISAERELTTKVARQMLTLSHSVLFNRLKEKCEEYGTVFLHVLEHYTSQTCPMCGFLNKCGETYTCKNCQFTCDRDIVGAAGIFLKAVRTENPCS

SEQ ID NO: 1258 - protein, 460 aa, Chlamydomonas sp.
PCLCTTRYCRRPSKKNGKLKTKNIAHSRCCLTNLDSLCRTFRFRKWPFSIWSTSATLIHARQTLLPKTIKEYGSASQTSRKWETVSRKFGYRIVTDGFAVSILMNKPTCLTCSMPADAFSTRAHEYVTTDEGGIVSFLDNVVVAAVDPGVTDIVTVTGLNGGTRSYSSAQYYRKGLIFKSQRQTDVWNLETADIVGGIIPDRDSSSSEQIGAYARFYMGAAPILLAHRASRGYRNLRFRRYCKKQKLIVEIADFVAPRKKSAKVLVGFGDWKGLGATPISRRTCGPLQAIRFELRSRENVIMEDIDEFRTSQRCSCCENHLCNMVALTHRKKQDGTGWECTEGRKRIHKILHCKSSQSGAPRQQSGGMLHCGKTWDRDVNASRNILMLTLHQVFGRERPLAFRRDAPRSSSTTPPPPPDTDMGTQTVERFTKEATRNIFENLFNLLHPPTLPKSNDLQSG

SEQ ID NO: 1259 - protein, 686 aa, Chlamydomonas sp.
METIVNKEPPDKRTRPDRAAKIKDRKNGEENVVKCTLSRIIADKDNKDVITKVIKERVDSVSKRTYLAGVAVNRILKEVFEGVPDAQLHTVSVPSVDQNFIRQLMVGSRQAHMETRDATVERFFHNNYWFREKIEGREVIVKKKKQYVGAIARYDGDRNLYSHASKKYLTNFNNHYRVHLSTWIKKFVYSKENRILAKEFKDEHGIDETVFHRYLLYDIHSWGVKEDLIAIHSLLPERTKMLLKIQHSIIGRDEINRQWLKSVSNSAKMIRYNVFINRYLEATEDEGYAKLVNIAPIPTVKHSFITIDTDGLLGVLKDVGLVESLEKTLTNKEHWESVFDVENIRSTGKGVFTCTIDTDGVMACTHFLRAEKKKISIKDDGTAIKKQTKTLREFSESDPNVVVVANDPGRCNIAFLTWKKNKVEEKDNGGRKRKRHCEFGSKRLTRERYYVESGVFKSRGPTKKWLSNIQDCLDDLKDNSPKRTSLESFDAYVTVMVNHWDSRWGEMSKSRWGAQRLRLYGGKKRVLARFFNEVQADVGERKTIVIAYGSSKFAPGGKGELSVPTTSAFNAFRDRFKGRVAVIDEFRTTKIWHKDSTTVLQSVQSEKKGSTVRGLLWCSSTMENSKLFVNRDLNAAINIHNCFTMYPTRPGILARPKKYCKLEVVVGRTIDYKLTGSLQNAVSSEV

SEQ ID NO: 1260 - protein, 779 aa, Chlamydomonas sp.
DGNETSDSREIEGATKIGRSSILIKGQEGRYCPFMRRQWSHRQTPSRIQDGGKMCVVKCALKKAMSLDDEEFGKFREHVDQLVNVVSRMLRRSSLVLTFHVTRLMEGDLPIPNMYDMKDTYWKDWLRIGVDGVFPDEESRISYEAVKDVIGKVLGSDDPDYINSYPIYFDQVLNYAGHTLSTVVSNNAWVPLVPRLTRLTKATLNALKAPKTIRVYDVMRVIQQEIQEMESWPESVQEYVREVRVRLKVPDGSRLYDDYGKEMDFPTMVRFNYWMQTRLESIGARRIRLMPIFNVQRAHVRLDMKTLVNLFRHVFPKDPNIVELSKWKDVKDPDRFMLPLKPAFKKKKSCGPGEWEAYKLAQQKYDADVNDIKDTDEYRHAKGRYDTLVNARKTVAGSFFKKPPVKTGWVFDCSICTDGVSLSMQYSKTVQVRVSDLKKTSKRSRDNEGMSVSEQYDHKLKTTLPDMGIVVLGVDPGRSNIATVTYLADDKSKTWKLTRGAFYHKSGIKKQKKQQEKRFSDMIPRWESLRENGAALSTSRTDDISAYLKNYDTFSDEWWRMALLRRESRDNFQRYIGKRKAMDSFWAGIKRNMKLDHPDLRVRVAYGSAITTLKATGPGEVAVPTGSMFASCKRLFKEEVHVTDEFKTTLMSWETGAKKECVYKIPSVQITTEGQIRLGYELLGHTPLKETPNVSYRDQLAVRVYCTRKQIQEKHRRGGLAPSLVDKSIKRYPEVRGLRFSPETSTYSDRDRSSALTIARLHCMELLGQGRPLPFCRDA

SEQ ID NO: 1261 - protein, 801 aa, Chlamydomonas sp.
PRMEHVCDVGIKSSVMYKLCKMATKPPTVAKLKELLKLAEVAYSSKDKKDDIVRLCEDNGLIAKPPPEYKTVEKMCVVKCALKKAMSLDDEEFGKFREYVDQLVNVVSRMLRRSSLVLTFHVTRLMEGDLPIPNMYDMKDTYWKDWLRIGVDGVFPDEESRISYEAVKDVIGKVLGSDDPDYINSYPIYFDQVLNYAGHTLSTVVSNNAWVPLVPRLTRLTKATLNALKAPKTIRVYDVMRVIQQEIQEMESWPESVQEYVREVRVRLKVPDGSRLYDDYGKDMDFPTMVRFNYWMQTRLEAIGARRIRLMPIFNVQRAHVRLDMKTLVNLFRHVFPKDPNIVELSKWKDVKDPDRFMLPLKPAFKKKKSCGPGEWEACKLAQQKYDADVNDIKDTDEYRHAKGRYDTLVNARKTVAGSFFKKPPVKTGWVFDCSICTDGVSLSMQYSKTVQVRVSDLKKTSKRSRDDEGMSVSEQYDHKLKTTLPDMGIVVLGVDPGRSNIATVTYLADDKSKTWKLTRGAFYHKSGIKKKKKQQEKRFSDMIPRWESLRENGAALSTSRTDDISAYLKNYDTFSDEWWRMALLRRESRDNFQRYIGKRKAMDSFWAGIKRNMKLDHPDLRVRVAYGSAITTLKATGPGEVAVPTGSMFASCKRLFKEEVHVTDEFKTTLMSWETGAKKECVYKIPSVQITTEGQIRLGYELLGHTPLKETPNVSYRDQLAVRVYCTRKQIQEKHRRGGLAPSLVDNNSIKRYPEVRGLRFSPETSTYSDRDRSSALTIARLHCMELLGQGRPLPFCRDA

SEQ ID NO: 1262 - protein, 801 aa, Chlamydomonas sp.
PRMEHVCDVCIKSSVMYKLCKMATKPPTVAKLKELLKLAEVAYSSKDKKDDIVRLCEDNGLIARPPPEYKTVEKMCVVKCALKKAMSLDDEEFGKFREHVDQLVNVVSRMLRRSSLVLTFHVTRLMEGDLPIPNMYDMKDTYWKDWLRIGVDGVFPDEESRISYESVKDVIGKVLGSDDPDYINSYPIYFDQVLNYAGHTLSTVVSNNAWVPLVPRLTRLTKATLNALEAPKTIRVYDVMRVIQQEIQEMESWPESVQKYVREVRVRLKVPDGSRLYDNYGKDMDFPTMVRFNYWMQTRLEAIGARRIRLMPIFNVQRAHVRLDMKTLVNLFRHVFPKDPNIVELSKWKDVKDPDRFMLPLKPAFKKKKSCGPGEWEAYKLAQQKYDADVNDIKDTDEYRHAKGRYDTLVNARKTVAGSFFKKPPVKTGWVFDCSICTDGVSLSMQYSKTVQVRVSDLKKTSKRSRDDEGMSVSEQYDHKLKTTLPDMGIVVLGVDPGRSNIATVTYLADDKSKTWKLTRGAFYHKSGIKKQKKQQEKRFSDMIPRWESLRENGAALSTSRTDDISAYLKNYDTFSDEWWRMALLRRESRDNFQRYIGKRKAMDSFWAGIKRNMKLDHPDLRVRVAYGSAITTLKATGPGEVAVPTGSMFASCKRLFKEEVHVTDEFKTTLMSWETGAKKECVYKIPSVQITTEGQIRLGYELLGHTPLKEAPNVSYRDQLAVRVYCTRKQIQEKHRRGGLAPSLVDNNSIKRYPEVRGLQFSPETSTYSDRDRSSALTIARLHCMELLGQGRPLPFCRDA

SEQ ID NO: 1263 - protein, 813 aa, Chlamydomonas sp.
PRMEHVCDVCIKSSVMYKLCKMATKPPTVAKLKELLKLAEVAYSSKDKKDDIVRLCEDNGLIARPPPEYKTVEKMCVVKCALKKAMSLDDEEFGKFREHVDQLVNVVSRMLRRSSLVLTFHITSLLEKGLDIPDLYNMKDTYWKDWLRIGVDGIFPDEESKISYEAVKDSIGDVIGNDDADYIKSYPIYFDQVLNYAGHTLSTVVSNNAWVPLIPRLARLTSTTLNKLNAPKTLDTSKIIRGYDVMQAIQQEVQNMEGWPESVQEYVNEVREMLSVPDGSRVYDNYGKDMDFPTMVRFNYWIQTRLEDMDARRIRLMPIFNVQRVHVRLDLKTLVNLFRHMFPNDQNIVELSKWEHVKNPESFMLPQRPAQKKKKSCGPGEWDAYKSVLKQYDDDVKDIKATDEYRHAKGLYDTLVNARKTVAGSFFRKPPVKNGWVFDCSICTDGVSLSMQYSKTVQVLVSDLKKTCKKPRKEEGIKIAEKYDGSLKTILPDMGIVVLGVDPGRSNIATVTYLADDKNKTWKLTRGAFYHKSGIKKQTRQKELRFADMIPMWESLRENGAALSTSRTDKISAYLSNYAKFSDEWWRLALRRRESRDNLQRYIGKRKVKDSFWAGIKRCMMKELPGMKVCVAYGSAITKLKPTGPGEVAVPTGAMFASCKRIFKEDVSVTDEFKTTLMSWETGKEKERVYKIPSVCSADVNLRLGGERFGHTKSKTMPKVADCDHLGVRLYNKRKGAQEKHRRGGFATSLVDSQKSIERYPEVRGLRFSPETCIYSDRDRSSALTIARLHCMELMGLGRPLPFAHSSSVVVDE

SEQ ID NO: 1264 - protein, 594 aa, Chlamydomonas sp.
SGSTHRLQSAWRSDIVAALIKCPTKNLDVIFKMSPHTTKLPTKLPTSRLRSAKSAIALAKKRVGRKEPEGSPLRVRLTKLQERLEKLSEAWLSSKNLRVDADNAKRFFAREVAFCLRGVLPLPSGNTFASRAHMTLPLYHKILSETIEEKRKTKNEKHRTFSLLPYKSGFTLSHIPISKMAFFYMVNECHFDSCKADVASKNHQGIWERFANLKKVETVSRKFGYRIVTDGFAVSILMNKPTCLTCSMPADAFSTRAHEYVTTDEGGIVSFLDNVVVAAVDPGVTDIVTVTGLNGGTRSYSSAKYYRKGLIFKSQRQTDVWNLETADIVGGIIPDRDSSSSEQIGAYARFYMGAAPILLAHRASRGYRNLRFRRYCKKQKLIVEIADFVAPRKKSAKVLVGFGDWKGLGATPISRRTCGPLQAIRFELRSRENVIMEDIDEFRTSQRCSCCENHLCNMVALTHRKKQDGTGWECTEGRKRIHKILHCKSSQSGAPRQQSGGMLHCGKTWDRDVNASRNILMLTLHQVFGRERPLAFRRDAPRSSSTTPPPPPDTDMGTQTVERFTKEATRNIFENLFNLLHPPTLPKSNDLQSG

SEQ ID NO: 1265 - protein, 425 aa, Chlamydomonas sp.
KNKKSHPRLFSILPRKNGFTISYVPISSMTFMKLLSMGDSPLESVSGDGRYENHTMLWRKYFNVQGLETKRSRFDNRILSDGKGVSVQMKQKGKEEVVEEGENAGYPKDANIVECKDAVGALRVGVDPGMTDIVTVASSAGRIESFSSARFSKVAGYNTSKRRTYKWNDETQDLVKSIPSPNTSNMVDLQDHVRAYLKALPILLQHRANKGYRSMRFFRYVGKQKTIEKVCDVIAPRAQTTVVGFGNWSNQGYGISRSCSGPIKEIRRCLSRRKNVLFKNVDERNTSCKCHGCFQRLVNMKADSVVWRGVCKESPIDGSITVEKQKMVVKNVKVHKVLHCRDSVKSASSNVRCGATWNRDVNAAKNLLLILTTWMDGRERPEAFCVPSPPPKTTVSIEASVSAKPTDPPGFVSSLPCYPLGQLKC

SEQ ID NO: 1266 - protein, 802 aa, Chlamydomonas sp.
NIYHVCDVCIKSSVMYKLCKMATKPPTVAKLKELLKLAEVAYSSKDKKDDIVRLCEDNGLIARPPPEYKTVEKMCVVKCALKKAMSLDDEEFGKFRGHVDQLVNVVSRMLQRSSLVLTFHVTRLMEGDLPIPNMYDMKDTYWKDWLRIGVDGVFPDEESRISYESVKDVIVKVLGSDDPDYINSYPIYFDQVLNYAGHTLSTVVSNNAWVPLVPRLTRLTKGTLNALGAPKTIRVYDVMRVIQQEIQEMESWPESVQEYVREVRVRLKVPDGSRLYDDYGKDMDFPTMVRFNYWMQTRLEAIGARRIRLMPIFNVQRAHVRLDMKTLVNLFRHVFPKDPNIVELSKWENVKDPDRFMLPLKPSVKKKKSCGPGEWEAYKLAQQKYDADVKDIKATDEYRHSKGRYDTLVNARKTVAGSFFKKPPVKTGWVFDCSICTDGVSLSMQYSKTVQVRVSDLKKTSKRSRDEEGMSVSEQYDHKLKTTLPDMGIVVLGVDPGRSNIATVTYLADDKSKTWKLTRGAFYHKSGIKKQKKQQEKRFSDMIPRWESLRENGAALSTSRKDDISAYLKNYATFSDEWWRMALRRRESRDNFQRYIGKRKAMDSFWAGIKRNMKLDHPDLRVRVAYGSAITKLKATGPGEVAVPTGSMFASCKRLFKEEVHVTDEFKTTLMSWETGAKKECVYKIPSVQITAEGQIRLGYELLGHTPLKETPKVSYRDQLAVKVYCTRKQIQEKHRRGGLAPSLVDNNSIKRYPEVRGLRFSPETSTYSDRDRSSALTIARLHCMELLGQGRPLPFCRDACC

SEQ ID NO: 1267 - protein, 239 aa, Chlamydomonas sp.
YLGLLENYATFSDEWWRMALRRRESRDNFQRYIGKRKAMDSFWAGIKRNMKLDHPDLRVRVAYGSAITTLKATGPGEVAVPTGSMFASCKRLFKEEVHVTDEFKTTLMSWETGAKKECVYKIPSVQITTEGQIRLGYELLGHTPLKETPKVSYRDQLAVRVYCTRKQIQEKHRRGGLAPSLVDNNSIKRYPEVRGLRFSPETSTYSDRDRSSALTIARLHCMELLGQGRPLPFCRDACC

SEQ ID NO: 1268 - protein, 667 aa, Chlamydomonas sp.
SDCHPRGQPRSCCVVGLTQAKSMQSVHQVVNACMTSQSMSKNMPTLARPSHIQFQEGNAYAIAVSPASGKGTISNAKSVLCMTALVSTSSAGDCSMFWNSQTKGLSKKLWLPTVTASADSPSTSWNGSFEPMETGSWFSIKRMPPHPEQNSLMTSWQSSRCSAAELTADASTANVEMVARKLRLYPDAPTTAKLRQWFGCVRVTYNMALYRINTRPNTPKSMYWLRNRFVNACNIPKSMAFLLDTPKHVREGAVADLALPFKTNFARHRTDTSHRFRISYRTKKSDQSIVIPKSAIKLIDQGKEMRVYPKMLSAAIKHRQLHLPEGMTSVPSDCRLTMSKDGIFHLCIPCRRGSAFARENQPSERKSKHVVVRESSGIPEWAGQWASIDPGVRNFATVYSPNGTLVKLGDHDIERIAKLHVGLSKLQSCHDRCNRHKSKRNMRRAMIRARRRMKNLVDEVHHKAAAWLTKHFEHVIIPPFQTSRMVLKSSRRIGRKTVRDMLSWSHYTFRQRLIAKASVVGTNVYVRSEAWTTKTCTRCGHVKHDIGGAKRFKCSKCGLDIDRDASGARNIFLRNVQLTLCNNQSQYTKDPSHVKTAISGCGVASLKPGRRPKAPSCKTSHAEQNNLAPRRSTARSATNRGQGRRVASEESSHGIVPRDYSEAGLFC

SEQ ID NO: 1269 - protein, 272 aa, Chlamydomonas sp.
AYVSDMFDACDAFSTRAHEYVTTDEGGIVSFREYVVVAAVDPGVTDIVTVTGLDGGTRSYSSAQYYRKGLLFKSQRQTDVWNLETADIVGGIIPDRDSSRSEQIGAYARFYMGAAPILLAHRASKRYRNLRFRRYCKKQKLIVEIADFVAPREKSTKVLVGFGDWKGLGATPISRRTCGPLQAIRFELRSRENVIMEDVDEFRTSQRCSCCETAFATWLHSLIVRGKTVLVGNVRKDASGFTIFSTAKAVKAERHANRAAVGSTAGRLGTAM

SEQ ID NO: 1270 - protein, 403 aa, Chlamydomonas sp.
GHPGWMTSRFTCQIPSSNSFFKNPPVKNGWVFDCSICTDGVSLSMQYSKKVQIRVSDLKKTSMRSRDNEGLSVAEQYDRKLETTLTEMGIVVLGVDPGRSNIATVTYLAKGKSKTWKLTRGAFYHKSGIKKQKKQQEKRFSYMIPRWESLRENGAALSTSRKDDISAYLKNYATFSDEWWRMALRRRESRDNFQRYIGKRKAMDSFWAGIKRNMKLDHPDLRVRIAYGSAIKTMKATGPGEVAVPTGSMFASCKRLFKEEVHVTDEFKTTLMSWKTGAKKECVYKIPSVQITMEGQIRLGYELLGHTPLKETPKVSYRDQLAVRVYCTRKKIQEKHRRGGLAPSLVDNKSIKRYPEVRGLRFSPETSTYSDRDRSSALTIARLHCMELLGQGRPLPFCRDACC

SEQ ID NO: 1271 - protein, 300 aa, Chlamydomonas sp.
FSLSMQYSKTVQVCVSDLKKTSKRSRDEEGMSVSEQYDHKLKTTLPDMGIVVLGVDPGRSNIATVTYLADDKSKTWKLTRGAFYHKSGIKKQKKQQEKRFSDMIPRWESLRENGAALSTSRKDDISAYLKNYATFSDEWWRMALRRRESRDNFQRYIGKRKAMDSFWAGIKRNMKLDHPDLKVRVAYGSAITKLKATGPGEVAVPTGSMFASCKRLFKEEVHVTDEFKTTLISWETGAKKECVYKIPSVQITTEGQIRLGYELLGHTPLKETPKVSYRDQLAVRVYCTRKKSKKNTGGVA

SEQ ID NO: 1272 - protein, 621 aa, Chlamydomonas sp.
QCIRNLHVLNIRMPCMATNASVKLARPPMPLVSPGPSSVDGRIMARSERSGLQATNVSLTQAASKATSSSRKKNPAVVKSFSTHVSPHTNNNPTCSDSNCSCKPIFLTNIPDASKSLKLRTSDQGSTSSAQDFYEYWDLSRQDLYRQLLWLPKTGSQGLVSSSLNGFARSTPARSSFSITKTEPLKTSLDKTSCPSFKYIVADGTVEDATKSNAKPKLRTLKLKLNPTKAQKSMLAEFAGCSRFMYNKAVAAQLGVGSTHKSVFRIRDRYVTNKVRGKGKMPNPYFKNRQWLLQCPKSVRQSAIKAALANIKACFSNLKAGNIKQFSAPFRRKKTELERGWAIEMDQKNVSKDGDKLFIFKDILGNMRYFGSKQLHKLMPEENPTHDPKVQKSRFGEYFLVLSVAAKDRRAERKPVHPDKVATASIDPGVRKTMVTYSPENEESFMLGQGLGSDLVKLLLVHDKLQSRLDTEKNLRSKERMKIKKQMIRIWKRIFYLKKEFRDQTTNFLAARYDVLLVPQLETAKMTISAERELTTKVARQMLTLSHSVLFNRLKEKCEEYGTVFLHVLEHYTSQTCPMCGFLNKCGETYTCKNCQFTCDRDIVGAAGIFLKAVRTENPCS

SEQ ID NO: 1273 - protein, 798 aa, Chlamydomonas sp.
ECSREPVCRSRLHQNVFGVQFVMENGIGESSSLVHEADQHDDVAELVDYEGEEDGECAPGRAICVVKMKLSTFIPHDWLRNKIDTLVLDMNKLLGEGYIFANFHIARLFENGIAVPPVNRNFFYRCLIAVSTNKCKGSTLGEDFESSRLLFDLLREPGQSKVDIRGSVKNQIIADLSILMATMASNHLWTNLERRITTYLKWKYPQIAKRLRSDIVAALIKCPTKNLDVIFKMSPHTTKLPTKLPTSRLRSAKSAVALAKKRVGRKEPEGSPLRVRLTKLQERLEKLSEAWLSSKNLRVDADNAKRFFAREVAFCLRGVLPLPSGNTFASRAHMTLPLYHKILSETIEEKRKTKNEKHRTFSLLPYKSGFTLSHIPISKMAFFYMVNECHFDSCKADVASKNHQGIWERFANLKKVETVSRKFGYRIVTDGFAVSILMNKPTCLTCSMPADAFSTRAHEYVTTDEGGIVSFLDNVVVAAVDPGVTDIVTVTGLNGGTRSYSSAKYYRKGLIFKSQRQTDVWNLETADIVGGIIPDRDSSNSEQIGAYARFYMGAAPILLAHRASRGYRNLRFRRYCKKQKLIVEIADFVAPRKKSAKVLVGFGDWKGLGATPISRRTCGPLQAIRFELRSRENVIMEDIDEFRTSQRCSCCENHLCNMVALTHRKKQDGTGWECTEGRKRIHKILHCKSSQSGAPRQQSGGMLHCGKTWDRDVNASRNILMLTLHQVFGRERPLAFRRDAPRSSSTTPPPPPDTDMGTQTVERFTKEATRNIFENLFNLLHPPTTICSLDDYKVSHFI

SEQ ID NO: 1274 - protein, 820 aa, Chlamydomonas sp.
NHYGLFRPLMEHVCDVCIKSSVMYKLCKMATKPPTVAKLKELLKLAEVAYSSKDKKDDIVRLCEDNGLIARPPPEYKTVEKMCVVKCALKKAMSLDDEEFGKFREHVDQLVNVVSRMLRRSSLVLTFHITSLLEKGLDIPDLYNMKDTYWKDWLRIGVDGIFPDEESKISYEAVKDSIGDVIGNDDADYIKSYPIYFDQVLNYAGHTLSTVVSNNAWVPLIPRLARLTSTTLNKLNAPKTLDTSKIIRGYDVMQAIQQEVQNMEGWPESVQEYVNEVREMLSVPDGSRVYDNYGKDMDFPTMVRFNYWIQTRLEDMDARRIRLMPIFNVQRVHVRLDLKTLVNLFRHMFPNDQNIVELSKWGHVKNPDSFMLPQRPAQKKKKSCGPGEWEAYKSVMKQYDDDVKDIKATDEYRHAKGLYDTLVNARKTVAGSFFRKPPVKNGWVFDCSICTDGVSLSMQYSKTVQVLVSDLKKTCKKPRKEEGIKIAEKYDGSLKTILPDMGIVVLGVDPGRSNIATVTYLADDKNKTWTLTRGEFYHKSGIKKQTRQKELRFADMIPMWESLRENGAALSTSRTDKISAYLSNYAKFSDEWWRLALRHRESRDNLQRYIGKRKVKDSFWAGIKRCMMKELPDMKVCVAYGSAITKLKPTGPGEVAVPTGAMFASCKRIFKEDVSVTDEFKTTLMSWETGKEKERVYKIPSVCSADVKLRLGGERFGHTKSKTMPKVADCDHLGVRLYNKRKGAQEKHRRGGFATSLVDSQKSIERYPEVRGLRFSPETCIYSDRDRSSALTIARLHCMELMGLGRPLPFAHSSSVVVDE

SEQ ID NO: 1275 - protein, 533 aa, Chlamydomonas sp.
CNVITRCLDDGDFDVKQLPHLDRNFYYRCILAVSISNVRNDTLDQSLKDSMVAFDALRPAGYVKVDVRPWGQVIADVSIQMATMACNSVWANVDRVVIKYLRLKHPSLKKHFKKIVKAVVQYPDSDIDKIIPAGLVHANLIKDVVRRLRDLLPLPRGKQFNARAHLTMRLFHHVLTELGEDLKEKTTKKRPRLFSILPRKSGFTISYVPISSMTLMKLLSMGDSPLESVRGNGRHENHSMLWRKYFNVQGLETKGSHFDNRILSDGKGVSVQMKPQVGKDIAGEGGGDNAGYPKDASIEDCQDASLRQGALRVGINPGMTDIVTIASSDGRVESFSSARFREAAGYNTSNRRTNKWNADTQDLVSPFHRRLRAVCTTCRTMSEVTSARSRPSFTPSQQRLPIDAILSICGQQKTIEKVCDLIAPKAQKKTIEEKVCDVIAPKTKKTVVGFGNWSNQGYGISRSCSGPVKEIRKCLSRRQNVLFKNVDERNTSCTCHGCFQKLVNMKADSVVWRRVQNEPSALIDGGSYNTNNV

SEQ ID NO: 1276 - protein, 332 aa, Chlamydomonas sp.
ASQNSMTINSKRHCPIWVSSFWVWILVGATSLQSRIWQTTKARHGSLHAELFITSLVSRNRKNSKKNVSPDMIPRWESLRENGAALSTSRTDDISAYLKNYATFSDEWWRMALLRRESRDNFQRYIGKRKAMDSFWAGIKRNMKLDHPDLRVRVAYGSAITTLKATGPGEVAVPTGSMFASCKRLFKEEVHVTDEFKTTLMSWETGAKKECVYKIPSVHITTEGQIRLGYELLGHTPLKETPNVSYRDQLAVRVYCTRKQIQEKHRRGGLAPSLVDNNSIKRYPEVRGLRFSPETSTYSDRDRSSALTIARLHCMELLGQGRPLPFCRDACC

SEQ ID NO: 1277 - protein, 794 aa, Chlamydomonas sp.
EGSREPVCRSRLHQNVFGVQFVMENGIGESSSLVHEADQHDDVAELVDYEGEEDGECAPGRAICVVKMKLSTFIPHDWLRNKIDTLVLDMNKLLGEGYIFANFHIARLFENGIAVPPVNRNFFYRCLIAVSTNKCKGSTLGEDFESSRLLFDLLREPGQSKVDIRGRVKNQIIADLSILMATMASNHLWTNLERRITTYLKWKYPQIAKRLRSDIVAALIKCPTKNLDVIFKMSPHTTKLPTKLPTSRLRSAKSAVALAKKRVGRKEPEGSPLRVRLTKLQERLEKLSEAWLSSKNLRVDTDNAKRFFAREVAFCLRGVLPLPSGNTSASRAHMTLPLYHKILSETIEEKRKTKNEKHRTFSLLPYKSGFTLSHIPISKMAFFYMVNECHFDSCKADVASKNHQGIWERFANLKKVETVSRKFGYRIVTDGFAVSILMNKPTCLTCSMPADAFSTRAHEYVTTDEGGIVSFLDNVVVAAVDPGVTDIVTVTGLNGGTRSYSSAQYYRKGLIFKSQRQTDVWNLETADIVGGIIPDRDSSSSEQIGAYARFYMGAAPILLAHRASRGYRNLRFRRYCKKQKLIVEIADFVAPRKKSAKVLVGFGDWKGLGATPISRRTCGPLQAIRFELRSRENVIMEDIDEFRTSQRCCCCENHLCNMVALTHRKKQDGTGWECTEGRKRIHKILHCKSSQSGAPRQQSGGMLHCGKTWNRDVNASRNILMLTLHQVFGRERPLAFRRDAPRSSSTTPPPPPDTDMGTQTVERFTKEATRNIFENLFNLLHPPTLPKSNDLQSG

SEQ ID NO: 1278 - protein, 234 aa, Chlamydomonas sp.
SPFHRLIRATWSTCRTMSKLISKRSRSSYNTEPTKATDLCDVIAPRAQTTVVGFGNWSNQGYGISRSCSGPIKEIRRCLSRRKNVLFKNVDERNTSCKCHSCFQRLVNMKADSIVWRGVCKESPIDGSITVEKQKMVVKNVEVHKVLHCRDSVKSASSNVRCGATWNRDVNAAKNLLLLLTTWMDGRERPEAFCVPSPPPKTTVSIEASVSAKPTDPPGFVSSLPCYPLGQLKC

SEQ ID NO: 1279 - protein, 240 aa, Chlamydomonas sp.
ENPTHDPKVQKSRFGEYFLVLSVAARDRRAERKPVHPDKVATASIDPGVRKTMVTYSPENEESFMLGQGQASDLVKLLLVHDKLQSRLDTEKTLRSKERMKIKKLMIRIRKTIFYLKKEFRDQTTNFLAARYDVLLVPQLETAKMTISAQRELTTKVAHQMLTLSHSVLFNRLKEKCEEYGTVFLHVLEHYTSQTCPMCGFLNKCGETYTCKNCQFTCDRDIVGAAGIFLKAVRTENPCS

SEQ ID NO: 1280 - protein, 688 aa, Chlamydomonas sp.
RNVGTILYHQKKKNTHPLLMGVVQDKGDDDINISVVKKTLNSLCMDVSRHQISSRIQSMVLLINHAVAEAYLFANFHITRCLDDGDFDVKQLPHLDRNFYYRCLLAVSTSNVRKDTLGQSFHDTMVAFDALRPAGNVKVDVRPWGQVIADVSIQMATMACNSIWANVDRVVIKYLHLKHPSLKKRFKKIVKAVVQYPESKINTIIPEGLVNAIHNKEVVSHLRALFPLPRGKQFNTRAHLTMRLFHHVLTELGEVGRVDPKDKKTRKSHPRLFSILPRKNGFTISYVPISSMTFMKLLSMGDSPLESVSGDGRYENHTMLWRKYFNVQGLETKRSRFDNRILSDGKGVSVQMKQKGKEEVVEEGENAGYPKDANIVECKDAVGALRVGVDPGMTDIVTVASSAGCIESFSSARFSEVAGYNTSKRRTYKWNDETQDLVKSIPSPNTSNMSDLQDHVRAYLKALPILLQHRANKGYRSMRFFRYVGKQKTIEKVCDVIAPRAQTTVVGFGNWSNQGYGISRSCSGPIKEIRRCLSRRKNVLFKNVDERNTSCKCHGCFQRLVNMKADSVVWRGVCKESPIDGSITVEKQKMVVKNVKVHKVLHCRDSVKSASSNVRCGATWNRDVNAAKNLLLLLTTWMDGRERPEAFCVPSPPPKTTVSIEASVSAKPTDPPGFVISLPCYPLGQLKC

SEQ ID NO: 1281 - protein, 373 aa, Chlamydomonas sp.
VFDCSICTDGVSLSMQYSKTVQVRVSDLKKTSKRSRDDEGMSVSEQYDHKLKTTLPDMGIVVLGVDPGRSNIATVTYLADDKSKTWKLTRGAFYHKSGIKKQKKQQEKRFSDMIPRWESLRENGAALSTSRTDDISAYLKNYATFSDEWWRMALLRRESRDNFQRYIGKRKAMDSFWAGIKRNMKLDHPDLRVRVAYGSAITTLKATGPGEVAVPTGSMFASCKRLFKEEVHVTDEFKTTLMSWETGAKKECVYKIPSVQITTEGQIRLGYELLGHTPLKETPKVSYRDQLAVRVYCTRKQIQEKHRRGGLAPSLVDNNSIKRYPEVRGLRFSPETSTYSDRDRSSALTIARLHCMELLGQGRPLPFCRDACC

SEQ ID NO: 1282 - protein, 794 aa, Chlamydomonas sp.
ECSREPVCRSRLHQNVFGVQFVMENGIGESSSLVHEADQHDDVAELVDYEGEEDEECAPGRAICVVKMKLSTFIPHDWLRNKIDTLVLDMNKLLGEGYIFSNFHIARLFENGIAVPPVNRNFFYRCLIAVSTNKCKGSTLGEDFESSRLLFDLLREPGQSKVDIRGNVKNQIIADLSILMATMASNHLWTNLERRITTYLKWKYPQIAKRLRSDIVAALIKCPTKNLDVIFKMSPHTTKLPTKLPTARLRSAKSAVALAKKRVGRKEPEGSPLRVRLTKLQERLEKLSEAWLSSKNLRVDADNAKRFFAREVAFCLRGVLPLPSGNTFASRAHMTLPLYHKILSKTIEEKRKTKNEKHRTFSLLPSKSGFTLSHIPISKMAFFYMVNECHFDSCKADVASKNHQGIWERFANLKKVETVSRKFGYRIVTDGFAVSILMNKPTCLTCSMPADAFSTRAHEYVTTDEGGIVSFLDNVVVAAVDPGVTDIVTVTGLNGGTRSYSSAQYYRKGLIFKSQRQTDVWNLETADIVGGIIPDRDSSSSEQIGAYARFYMGAAPILLAHRASRGYRNLRFRSNCKKQKLIVEIADFVAPREKSAKVLVGFGDWKGLGATPISRRTCGPLQAIRFELRSRENVIMEDIDEFRTSQRCSCCENHLCNMVALTHRKKQDGTGWECTEGRKRIHKILHCKSSQSGAPRQQSGGMLHCGKTWDRDVNASRNILMLTLHQVFGRERPLAFRRDAPRSSSTTPPPPPDTDMGTQTVERFTKEATRNIFENLFNLLHPPTLPKSNDLLSG

SEQ ID NO: 1283 - protein, 710 aa, Chlamydomonas sp.
GNCQLVWYHQNNNHSLSMGVVTNNGDDDDLDIMVVKKTLNSLCMDVSRQQICSRIQSMVLVINHAVAEAYLFAIFHITRCLDDGDFDVKQLPHLDRNFYYRCILAVSISNVRNDTLDQSLKDSMVAFDALRPAGYVKVDVRPWGQVIADVSIQMATMACNSVWANVDRVVIKYLRLKHPSLKKHFKKIVKAVVQYPDSDIDKIIPAGLVHANLIKDVVRRLRDLLPLPRGKQFNTRAHLAMRLFHHVLTELGANLKEKTTKKRPRLFSILPRKSGFTISYVPISSMTLMKLLSMGDSPLESVRGDGRHENHSMLWRKYFNVQGLETKGSRFDNRILSDGKGVYVQMKHQVGKDIAGEGGGDNAGYPKDASIEDCQDASLRQGALRVGIDPGMTDIVTIASSDGRVESFSSARFSEAAGYNTSNRRTNKWNADTQDLVKSIPSPTTSSMHDMQDHVRGYLSALPTLLQHRANRGYRSMRFFRYVGKQKTIEKVCDLIAPKAQKKTIEEKVCDVIAPKAKKTVVGFGNWSNQGYGISRSCSGPVKEIRKCLSRRQNVLFKNVDERNTSCTCHGCFQKLVNMKADSVAWRRVQNEPSALIDGAPTTTTTFEKQKTVVKNVKVHKVLNCRNSVKSASSNVRCGATWNRDVNAAKNLLLLLTTWMDGKERPAAFCVPSSSPTPKITVSGEANVGAQPTDPPGSVSSLQLLSSGPA

SEQ ID NO: 1284 - protein, 802 aa, Chlamydomonas sp.
ECSREPVCRSRLHQNVFGVQFVMENGIGESSSLVHEADQHDDVAELVDYEGEEDGECAPGRAICVVKMKLSTFIPHDWLRNKIDTLVLDMNKLLGEGYIFANFHIARLFENGIAVPPVNRNFFYRCLIAVSTNKCKGSTLGEDFESSRLLFDLLREPGQSKVDIRGSVKNQIIADLSILMATMASNHLWTNLERRITTYLKWKYPQIAKRLRSDIVAALIKCPTKNLDVIFKMSPHTTKLPTKLPTSRLRSAKSAVALAKKRVGRKEPEGSPLRVRLTKLQERLEKLSEAWLSSKNLRVDADNAKRFFAREVAFCLRGVLPLPSGNTFASRAHMTLPLYHKILSETIEEKRKTKNEKHRTFSLLPYKSGFTLSHIPISKMALFYMVNECHFDSCKADVASKNHQGIWERFANLKKVETVSRKFGYRIVTDGFAVSILMNKPTCLTCSMPADAFSTRAHEYVTTDEGGIVSFLDNVVVAAVDPGVTDIVTVTGLNGGTRSYSSAKYYRKGLIFKSQRQTDVWNLETADIVGGIIPDRDSSSSEQIGAYARFYMGAAPILLAHRASRGYRNLRFRRYCKKQKLIVEIADFVAPREKSAKVLVGFGDWKGLGATPISRRTCGPLQAIRFELRSRENVIMEDIDEFRTSQRCSCCENHLCNMVALTHSKKQDGTSWECTEVRKRIHKILHCKSSQSGAPRQQSGGMLHCGKTWDRDVNASRNILMLTLHQVFGRERPLAFRRDAPRSSSTTPPHPLILIWGHRRLNGLPKRLLGISSRTSSTFCTPQRCPKATICSLDDYKVSHFI

SEQ ID NO: 1285 - protein, 793 aa, Chlamydomonas sp.
KMATKPPTVAKLKELLKLAEVPYSSKSNKDDLVRLCEDNGLIARPPPEYKTVEKMCVVKCALKKAMSLDDEEFGKFREHVDQLVNVVSRMLRRSSLVLTFHITSLLEKGLDIPDLYNMKDTYWKDWLRIGVDGIFPDEESKISYEAVKDSIGDVIGNDDADYIKSYPIYFDQVLNYAGHTLSTVVSNNAWVPLIPRLARLTSTTLNKLNAPKTLDTSKIIRGYDVMQAIQQEVQNMEGWPESVQEYVNEVREMLSVPDGSRVYDNYGKDMDFPTMVRFNYWIQKRLEDMDARRIRLMPIFNVQRVHVRLDLKTLVNLFRHMFPTDKNIVELSKWEHVKNPDSFMLPQRPAQKKKKSCCPGEWDAYKSVLKQYDDDVKDIKATDEYRHAKGLYDTLVNAKKTVAGSFFRKPPVKNGWVFDCSICTDGVSLSMQYSKTVQVLVSDLKKTCKKPRKEEGIKIAEKYDGSLKTILPDMGIVVLGVDPGRSNIATVTYLADDKNKTWKLTRGAFYHKSGIKKQTRQKELRFADMIPMWESLRENGAALSTSRTDKISAYLSNYAKFSEEWWRLALRRRESRDNLQRYIGKRKVKDSFWAGIKRCMMKELPDMKVCVAYGSAITKLKPTGPGEVAVPTGAMFASCKRIFKEDVSVTDEFRTTLMSWETGKEKERVYKIPSVCSADVKLRLGGERFGHTKSKTMPKVADCDNLGVRLYNKRKRAQEKHKRGGFATSLVDSQKSIERYPEVRGLRFSPETCIYSDRDRSSALTIARLHCMELMGLGRPLPFAHSSSVVVDE

SEQ ID NO: 1286 - protein, 687 aa, Chlamydomonas sp.
YQDKKRTLPPSISMGVVTNNGDDDDDLDIMVVKKTLNSLCMDVSRQQICSRIQSMVLVINHAVAEAYLFANFHITRCLDDVDFDVKQLPHLDRNFYYRCILAVSTSNVRKDTLGQSLKDSMVAFDALRPAGYLKVDVRQWGQVIADVSIQMATMACNSVLANVDRVVIKYLRLKHPSLKKHFNKIVKAVVQYPESDIDKIIPGSLVHANLIKDVVRRLRDLLPLPRGEQFNTRAHLTMRLFHHVLTELGADLKEKTTKKRPRLFSILPRKSGFTISYVPISSMTLMKLLSMGDSPLESFRGDGRHENHSMLWRKYFNVQGLETKGSRFDNRILSDGKGVSVQMKHQASEDVAVDNAGYPKDAILENCQDASLRVGVDPGMTDIVTVASSDGRVESVSSARFSEAAGYNTSNRRTNKWNVDTQDLVKSIPSPTTSSMHDMQDHVRGYLSALPTLLQHRASRGYRSMRFFRYVGKQKTIEKVCDLIAPKAQKKTIEEKVCDVIAPRAQTTVVGFGNWSNQGYGISRSCSGPIKEIRRCLSRRKNVLFKNVDERNTSCTCHGCFQKLVNMKADSVVWRRVQNEPPSLINGAPTTTTTIEKQKTVVKNVKVHKVLHCRNSVKSASSKVRCGCNLEPRRERCQEPSSASDDVDGRERATGDILCALIIAHPKNHSFRRGKCGRSTNRPTWVS

SEQ ID NO: 1287 - protein, 798 aa, Chlamydomonas sp.
PRMEHVCDVCIKSSVMYKLCKMATKPPTVAKLKELLKLAEVAYSSKDKKDDIVRLCEDNGLIARPPPEYKTVEKMCVVKCALEKAMSLDDEEFGKFRGHVDQLVNVVSRMLRRSSLVLTFHVTRLMEGDLPIPNMYDMKDTYWKDWLRIGVDGVFPDEESRISYEAVKDVIGKVLGSDDPDYINSYPIYFDQVLNYAGHTLSTVVSNNAWVPLVPRLTRLTKATLKALGAPKTIRVYDVMRVIQQEIQEMESWPESVQEYVREVRVRLKVPDGSRLYDDYGKDMDFPTMVRFNYWMQTRLEAMGARRIRLMPIFNVQRAHVRLDMKTLVNLFRHVFPKDPNIVELSKWENVKDPDRFMLPLKPAVKKKKSCGPGEWEAYKLAQQKYDADVKDIEATDEYRHAKGRYDTLVNARKTVAGSFSKKPPVKTGWVFDCSICTDGVSLSMQYSKTVQVRVSDLKKTSKRSRDEEGMSVSEQYDHKLKTTLPDMGVDPGRSNIATVTYLADDKSKTWKLTRGAFYHKSGIKKQKKQQEKRFSDMIPRWESLRENGAALSTSRKDDISAYLKNYATFSDEWWRMALRRRESRDNFQRYIGKRKAMDSFWAGIKRNMKLDHPDLRVRVAYGSAITKLKATGPGEVAVPTGSMFASCKRLFKEEVHVTDEFKTTLMSWETGAKKECVYKIPSVQITTEGQIRLGYELLGHTPLKETPKVSYRDQLAVRVYCTRKKIQEKHRRGGLAPSLVDNKSIKRYPEVRGLRFSPETSTYSDRDRSSALTIARLHCMELLGQGRPLPFCRDACC

SEQ ID NO: 1288 - protein, 396 aa, Chlamydomonas sp.
TQPRLRNRCWQSLQGAAGSCTTRRWQHGWASEALTSLSSEFEDRYVTNKVRGEGKMPNPYFKNRQWLLQCPKSVRQSAIKAALANIKACFSNLKACNIKQFSARFRRKKTELERGWAIEMDQKNVSKDGDKLFIFKDILGNMRYFGSKQLHKLMPEENPTHDPKVKNSRFGEYFLVLSVAARDRRAERKPVHPDKVATASIDPGVRKTMVTYSPENEESFMLGQGQASDLVKLLLVHDKLQSRLDTEKTLRSKERMKIKMQMIRIRKRIFYLKKEFRDQTTHFLAARYDVLLVPQLETAKMTISAERELTTKVARQMLTLSHSVLFNRLKEKCEEYGTVFMHVLEHYTSQTCPMCGFLNKCGETYTCKNCQFTCDRDIMGAAGIFLKAVRTENPCS

SEQ ID NO: 1289 - protein, 200 aa, Chlamydomonas sp.
VGIVFLLRICDMIAPRDTPTIVGFGNWSNQGNGISRPCSGPVKEIRKKLSQRGNVIFKNIDERNTSCTCHGCFERLVNMKANSVRWRRGQIGQLGVSVKEKVMVKNVKVHKILHCCNSVGSAPSVRCGTTWNRDVNASKNILLLLMTWVAGKERPAAFCVPSKNKITTSREATEMLRPVDPSLGSIGHTRLLSSEHQLKC

SEQ ID NO: 1290 - protein, 668 aa, Chlamydomonas sp.
TAIDRLPCCFTTAMGDDDSWIMVVKTTLNSLSRDTSRQQLCSRIREMVGTMNQVVAEAYLFANFHVTRCLDDPTFDAECLPKLDRNFYYRCLLAVSRSNIRKGTLGERLTASMDAFDGLRPEGCPKTDVRPWGQVVADLSIQMATMACNSVRSNLSKIIVKYLRLKYPSLKKHFNRIVKAVVQFPKSDINNFVPSTIGNAVEVKAVINHLRSLLPPSTGKQFNTRAHLTMRLFHSVLAELVSSSSSEPNRRAPRLFSLLPRKIGFTISYIPISSMTFMKILSMGNTPLEKIRGDGRLEDHDRLWRKYFNIGSVETKASRFDCRMITDGKGVSIQMRRELGQRLMETCGYPKDSSIGECLNATTHRNARCVGVDPGMTNIATVAFSRGGGTQSFSSSHFSHTAGYKTSKRRTDKWNVETLELVKSIPTSMTTSMDGLERHVQAYLGALPTLLQHRTNKGYRSMRFFCYVGKQKAIEEVCDMIAPRDTPTIVGFGNWSNQGNGISRPCSGPVKEIRKKLSQRGNVLFKNIDERNTSCTCHGCFERLVNMKANSVRWRRGQIGQLGVSVKEKVMVKNVKVHKILHCCNSVGSAPSMRCGTKWNRDVNASKNILLLLMTWVAGQERPDAFCVPSTNKITTSREANEMLRPVDPSLGSIGHTRLLSSEHQLKC

SEQ ID NO: 1291 - protein, 668 aa, Chlamydomonas sp.
TAIDRLPCCFTTAMGDDDSWIMVVKTTLNSLSRDTSRQQLCSRIREMVGTMNQVVAEAYLFANFHVTRCLDDPTFDAECLPKLDRNFYYRCLLAVSRSNIRKGTLGESLTASMDAFDGLRPEGCPKTDVRPWGQVVADLSIQMATMACNSVWSNLSKIIVKYLRLKYPSLKKHFDRIVKAVVQFPKSDINNFVPSTIGNAVEVKAVINHLRSLLPQSTGKQFNTRAHLTMRLFHSVLAELVSSSSSEPNRRTPRLFSLLPRKIGFTISYIPISSMTFMKILSMGNTPLEKIRGDGRHEDHDRLWRKYFNIGSVETKASRFDCRIITDGKGVSIQMRRKLGQRLMETSGYPKDSSIGECLNAITHRNARCVGVDPGMTDIATVAFSGGGGTQSFSSSHFSHTAGYKTSKRRTDKWNVETLELVKSIPTSMTTSMDGLERHVQAYLGALPTLLQHRTNKGYHSMRFFRYVGKQKDIEEVCDMIAPRDTPTIVGFGNWSNQGNRISRPCSGPVKEICKKLSQRGNVLFKNIDERNTSCTCHGCFERLVNMKANSVRWRRGQIGQLGVSVKEKVMVKNVKVHKILHCCNSVGSAPSVRCGTTWNRDVNASKNILLLLMTWVAGQERPDAFCVPSKNKITTSREATEMLRPVDPSLGSISHTRLLSSEHQLKC

SEQ ID NO: 1292 - protein, 622 aa, Chlamydomonas sp.
MVGTMNQVVAEAYLFANFHVTRCLDDPTFDAECLPKLDRNFYYRCLLAVSRSNIPKGTLGESLTASMDAFDGLRPEGCPKTDVRPWGQVVADLSIQMATMACNSVWSNLSKIIVKYLRLKYPSLKKHFDRIVKAVVQFPKSDINNFVPSTIGNAVEVKAVINHLRSLLPQSTGKQFNTRAHLTMRLFHSVLAELVSSSSSEPNRRAPRLFSLLPRKIGFTISYIPISSMTFMKILSMGNTPLEKIRGDGRLEDHDRLWRKYFNIGSVETKASMFDCRIITDGKGVSIQMRRELGQCLMETSGYPKDSSIGECLNATTHRNARCVGVDPGMTDIATVAFSSGGGTQSFSSSHFSHKSGYKTSKRRTDKWNVETSELVKSIPTSMTTSMDGLERHVQAYLGALPTLLQHRTNKGYRSMRFFRYVGKQKAIEEVCDMIAPRDTPTIVGFGNWSNQGNGISRPCSGPVKEIRKRLSQRGNVLFKNIDERNTSCTCHGCFKRLVNMKANSVRWRRGQIGQLGVSVKEKVMVKNVKVHKILHCCNSVGSAPSVRCGTTWNRDVNTSKNILLLLMTWVAGQERPAAFCVPSKNKIITSREATEMLRPVDPSLGSIGHTRLLSSEHQLKC

SEQ ID NO: 1293 - protein, 803 aa, Chlamydomonas sp.
PRMEHVCDVCIQSSVMYKLCKMATKPPTVAKLKELLKLAEVAYSSKDKKDDIVRLCEDNGLIARPPPEYKTVEKMCVVKCALKKAMSLDDEEFGKFREHVDQLVNVVSRMLRRSSQVLTFHVTRLMEGDLPIPNMYDMKDTYWKDWLRIGVDGVFPDEESRISYESVKDVIGKVLGSDDPDYINSYPIYFDQVLNYAGHTLSTVVSNNAWVPLVPRLTRLTKATLNALEAPKTIRVYDVMRVIQQEIQEMESWPESVQEYVREVRVRLKVPDGSRLYDDYGKDMDFQTMVRFNYWMQTRLEAIGARRIRLMPIFNVQRAHVRLDMKTLVNLFRHVFPKDPNIVELSKWKNVKDPDRFMLPLKPAVKKKKSCGPGEWEAYMLAQQKYDADVNDIKDTDEYRHAKGRYDTLVNARKTVASSFFKKPPVKTGWVFDCSICTDGVSLSMQYSKTVQFRVSDLKKTSKRSRDDEGMSVSEQYDHKLKTTFPDMGIVVLGVDPGRSNIATVTYLADDKSKTWKLTRGAFYHKSGIKKQKKQQEKRFSDMIPRWESLRENGAALSTSRTDDISAYLKNYATFSDEWWRMALLRRESRDNFQRYIGKRKAMDSFWAGIKRDMKLDHPDLRVRVAYGSAITTLKATGPGEVAVPTGSMFASCKRLFKEEVHVTDEFKTTLMSWETGAKKECVYKIPSVQITTEGQIRLGYELLGHTPLKETPKVSYRDQLAVRVYCTRKQIQEKHRRGGLAPSLVDNNSIKRYPEVRGLRFSPETSTYSDRDRSSALTIARLHCMELMGQGRPLPFCRDACC

SEQ ID NO: 1294 - protein, 793 aa, Chlamydomonas sp.
KMATKPPTVAKLKELLKLAEVPYSSKSIKDDLVRLCEDNGLIARPPPEYKTVEKMCVVNCALKKAMSLDDEEFGKFREHVDQLVNVVSRMLRRSSLVLTFHITSLLEKGLDIPDLYNMKDTYWKDWLRIGVDGIFPDEESRISYEAVKDSIGDVIGNDDADYIKSYPIYFDQVLNYAGHTLSTVVSNNAWVPLIPRLARLTSTTLNKLNAPKTLDTSKIIRGYDVMQAIQQEVQNMEGWPESVQEYVNEVREMLSVPDGSRVYDNYGKDMDFPTMVRFNYWIQTRLEDMDARRIRLMPIFNVQRVHVRLDLKTLVNLFRHMFPNDQNIVELSKWEHVKNPDSFMLPQRLAQKKKKSCGPGEWEAYKSVLKQYDDDVKDIKATDEYRHAKGLYDTLVNARKTVAGSFFRKPPVKNGWVFDCSICTDGVSLSMQYSKTVQVLVSDLKKTCKKPRKEEGIKIAEKYDGSLKTILPDMGIVVLGVDPGRSNIATVTYLADDKNKTWTLTRGAFYHKSGIKKQTRQKELRFADMIPMWESLRENGAALSTSRTDKISAYLSNYAKFSDEWWRLALRRRESRDNLQRYIGKRKVKDSFWAGIKRCMMKELPDMKVCVAYGSAITKLKPTGPGEVAVPTGAMFASCKRIFKEDASVTDEFKTTLMSWETGKEKERVYKIPSVCSADVKLRLGGERFGHTKSKTMPKVADCDHLGVRLYNKRKRAQEKHRRGGFATSLVDSQKSIERYPEVRGLRFSPETCIYSDRDRSSALTIARLHCMELMGLGRPLPFAHSSSVVVDE

SEQ ID NO: 1295 - protein, 537 aa, Chlamydomonas sp.
GRTGITMACNSIWANVDRVVIKYLRLKHPSLKKHFKKIVKAVVQYPESKIDTIIPEGLVHAIHIKEVVSHLRALFPLPRGKQFNTRAHLTMRLFHHVLTELGEVGRVDPKDKKTRKSHPRLFSILPRKNGFTISYVPISSMTFMKLLSMGDSPLESVSGDGRYENHTMLWRKYFNVQGLETKRSRFDNRILSDGKGVSVQMKQKGKEEVVEEGENAGYPKDANIVECKDAVGALRVGVDPGMTDIVTVASSAGRIESFSSARFSEVAGYNTSKRRTYKWNDETQDLVKSIPSPNTSNMSDLQDHVRAYLKALPILLQHRANKGYRSMRFFRYVGKQKTIEKVCDVIAPRAQTTVVGFGNWSNQGYGISRSCSGPIKEIRRCLSLRKNVLFKNVDERNTSCKCHGCFQRLVNMKADSVVWRGVCKESPTDGYITVEKQKMVVKNVKVHKVLHCRDSVKSASSNVRCGATWNRDVNAAKNLLLLLTTWMDGRERPEAFCVPSPPPKTTVSIEASVSAKPTDPPGFVSSFPCYPLGQLKC

SEQ ID NO: 1296 - protein, 502 aa, Chlamydomonas sp.
PILSIQILIKDVVRRLRDLLPLPRGKQFNTRAHLTMRLFHHVLTELGADLKEKTTKKRPRLFSILPRKSGFTISYVPISSMTLMKLLSMGDSPLESVRGDGRHENHSMLWRKYFNVQGLETKGSRFDNRILSDGKGVSVQMKHQVGKDIAGEGGGDNAGYPKDASIEDCQDASLRQGALRVGIDPGMTDIVTIASSDGRVESFSSARFSEAAGYNTSNRRTNKWNADTQDLVKSIPSPTTSSMQDHVRGYLSALPTLLQHRANRGYRSMRFFRYVGKQKTIEKVCDLIAPKAQKKTIEEKGCDVIAPKAKKTVVGFGNWYNQGYGISRSCSGPVKEIRKCLSRRQNVLFKNVDERNTSCTCHGCFQKLVNMKADSVVWRRVQNEPSALIDGAPTTTTTFEKQKTVVKNVKVHKVLHCRNSVKSASSNVRCGATWNRDVNAAKNLLLLLTTWMDGKERPAAFCVPSSSPTPKTTVSGEANVGAQPTDPPGSVSSLQLLSSGPA

SEQ ID NO: 1297 - protein, 795 aa, Chlamydomonas sp.
LWKMATKPPTVAKLKELLKLAEVPYSSKSNKDDPVRLCEDNGLIARPPPEYKTVEKMCVVKCALKKAMSLDDEEFGKFREHVDQLVNVVSRMLRRSSLVLTFHITSLLEKGLEIPDLYNMKDTYWKDWLRIGVDGIFPDEESKISYEAVKDSIGDVIGNDDADYIKSYPIYFDQVLNYAGHTLSTVVSNNAWVPLIPRLARLTSTTLNKLNAPKTLDTSKIIRGYDVMQAIQQEVQNMEGWPESVQEYVNEVREMLSVPDGSRVYDNYGKDMDFPTMVRFNYWIQTRLEDMDARRIRLMPIFNVQWVHVRLDLKTLVNLFRHMFPNDQNIVELSKWEHVKNPDSFMLPQRPAQKKKKSCGPGEWEAYKSVLKQYDDDVKDIKATDEYRHAKGLYDTLVNARKTVAGSFFRKPPVKNGWVFDCSICTDGVSLSMQYSKTVQVLVSDLKKTCKNPRKEEGIKIAEKYDGSLKTILPDMGIVVLGVDPGRSNIATVTYLADDKNKTWTLTRGAFYHKSGIKKQTRQKELRFADMIPMWESLRENGAALSTSRTDKISAYLSNYAKFSEEWWRLALRRRESRDNLQRYIGKRKVKDSFWAGIKRCMMKELPDMKVCVAYGSAITKLKPNGPGEVAVPTGAMFASCKRIFKEDVSVTDEFKTTLMSWETGKEKERVYKIPSVCSADVKLRLGGERFGHTKSKTMPKVADCDHLGVRLYNKRKGAQEKHRRGGFASSLVDSQKSIERYPEVRGLRFSPETCIYSDRDRSSALTIARLHCMELMGLGRPLPFAHSSSVVVDE

SEQ ID NO: 1298 - protein, 683 aa, Chlamydomonas sp.
YYITKRKTILTPLLMGVVQDKGDDDINISVVKKTLNSLCMDVSRHQISSRIQSMVLLINHAVAEAYLFANFHITRCLDDGDFDVKQLPHLDRNFYYRCLLAVSTSNVRKDTLGQSFNDTMVAFDALRPAGYVKVDVRPWGQVIADVSIQMATMACNSVWANVDRVVINYLRLKHPSLKKHFKKIVKAVVQYQESKIDTIIPEGLVHAIHIKEVVSHLRALFPLPRGKQFNTRAHLTMRLFHHVLTELGEVGRVDPKDKKTRKSHPRLFSILPRKNGFTISYVPISSMTFMKLLSMGDSPLESVSGDGRYENHTMLWRKYFNVQGLETKRSRFDNRILSDGKGVSVQMKQKGKEEVVEEGENAGYPKDANIVECKDEVGALRVGVDPGMTDIVTVASSAGRIESFSSARFSEVAGYNTSKRRTYKWNDETQDLVKSIPSPNTSNMSDLQDHVRAYLKALPILLQHRANKGYRSMRFFRYIGKQKTIEKVCDVIAPRAQTTVVGFGNWSNQGYGISRSCSGPIKEIRRCLSRRKNVLFKNVDERNTSCKCHGCFQRLVNMKADSVVWRGICKESPIDGSITVEKQKMVVKNVKVHKVLHCRDSVKSASSNVRCGATWNRDVNAAKNLLLLLTTWMDGRERPEAFCVPSPPPKTTVSIEASVSAKPTDPPGFVSSLPCYPLGQLKC

SEQ ID NO: 1299 - protein, 322 aa, Chlamydomonas sp.
YFVQQTNFPQTTIINIVECKDAVGALRVGVDPGMTDIVTVASSAGRIESFSSARFNEVAGYNTSKRRTYKWNDETQDLVKSIPSPNTSNMSDLQDHVRAYLKALPILLQHRANKGYRSMRFFRYVGKQKTIEKVCDVIAPRAQTTVVGFGNWSNQGYGISRSCSGPIKEIRRCLSRRKNVLFKNVDERNTSCKCHGCFQRLVNMKADSVVWRGICKESPIDGSITVEKQKMVVKNVKVHKVLHCRDSVKSASSNVRCGATWNRDVNAAKNLLLLLTTWMDGRERPEAFCVPSPPPKTTVSIEASVSAKPTDPPGFVSSQLKC

SEQ ID NO: 1300 - protein, 350 aa, Chlamydomonas sp.
RTLTSYRNPLGVNVGNVSIVEKSSQAINVYQVSIQMRRELGQCLMETSGYPKDSSIVECLNATTHRNARCVGVDPGMTDIATVAFSSGGGTQSFSSSHFSHTAGYKTSKRRTDKWNVETSELVKSIPTSMTTSMDGLERHVQAYLVALPTLLQHRTNKGYHSMRFFRYVGKQKAIEEVCDMISPKDTPTIVGFGNWSKQGNGISHPCSGPVKEIRKRLLQRGNVLFKNIDKRNTSCTCHGCFERLVNIKANSVRWRRGQIGQLGVSVKEKVMVKYVKVHKILHCCNSVGSAHSVRCGATWNRDVNASQNILLLLMTWVAGQERPAAFIVPSKKSQFPERQLREIAHSIVF

SEQ ID NO: 1301 - protein, 290 aa, Chlamydomonas sp.
TRDVWNLETADIVGGIIPDRDSSRSEQIGAYARFYMGAAPILLAHRASRGYRNLCFRRYCKKQKLIVEIADFVAPREKSTKVLVGFGDWKCLGATPISRRTCGPLQAIRFELRSRENVIMEDVDEFRTSQRCSCCETRLCNMVALTHRKRQDGTGWECTEGRKRIHKILHCKSSQSGAPRQQSGGMLHCGKTWDRDVNASRNILMLTLHQVFGRERPLAFRRDAPRSSSKTPPTPDTDLGIQTVERFTKEATRNIFENLFNLLHPNVAQPQRSAVWMIIRCVPLYLRTTV

SEQ ID NO: 1302 - protein, 609 aa, Chlamydomonas sp.
HQKKKNTPPLLMGVVQDKVDDDINISVVKKTLNSLCMDVSRHQISSRIQSMVLLINHAVAEAYLFANFHITRCLDDGDVKQLPHLDRNFYYRCLLAVSKSNVRKDTLGQSFNDTMVAFDALRPAGYVKVDVRPWGQVIADVSIQMATMACNSVWANVDRVVIKYLRLIHPSLKKHFKKIVKAVVQYPESKIDTIIPEGLVHAIHIKEVVSHLRALFPLPRGKQFNTRAHLTMRLFHHVLTELGEVGRVDPKDKKTRKSHPRLFSILPRKNGFTISYVPISSMTFMKLLSMGDLPLESVSGDGRYENHTMLWRKYFNVQGLETKRSRFDNRILSDGKGVSVQMKQKGKEEVVEEGENAGYPKDANIVECKDAVGALRVGVDLGMTDIVTVASSAGRIESFSSARFSEVAGYNTSKRRTYKWNDETQDLVKSIPSPNTSNMVDLQDHVRAYIIALPILLQHRANKGYRSMRFFRYVGKQKTIEKVCDVIAPRAQTTVVGFGNWSNQGYGISRSCSGPIKEIRRCLSRRKNVLFKNVDERNTSCKCHGCFQRLVNMKADSVVWRGVCKESPIDGSITVEKQKMVVKNVKVHKVLHCRDSVKSASSNVRCGAT

SEQ ID NO: 1303 - protein, 330 aa, Chlamydomonas sp.
INKLQDVDNVVVAAVDPGVTDIVTVTGLNGGTRSYSSAKYYRKGLIFKSQRQTDVWNLETADIVGGIIPDRDSSSSEQIGAYARFYMGAAPILLAHRASRGYRNLRFRRYCKKQKLIVEIADFVAPREKSAKVLVGFGDWKGLGATPISRRTCGPLQAIRFELRTRENVIMEDIDEFRTSQRCSCCENHLCNMVALTHRKKQDGTGWECTEGRKRIHKILHCKSSQSGAPKQQSGGMLHCGKTWDRDVNASRNILMLTLHQVFGRERPLAFRRDAPRSSSTTPPPPPPPDTDMGTQTVERFTKEARNIFENLFNLLHPPTLPKSNDLQSG

SEQ ID NO: 1304 - protein, 792 aa, Chlamydomonas sp.
ECSREPVCRSRLHQNVFGVQFVMENGIGASSSLVHEADQHDDVAELVDYEGEEDGECAPGRAICVVKMKLSTFIPHDWLRNKIDTLVLDMNKLLGEGYIFANFHIARLFENGIAVPPVNRNFFYRCLIAVSTNNCKGSTLGEDFESSRLLFDLLREPGQSKVDIRGSVKNQIIADLSILMATMASNHLWTNLERRITTYLKWKYPQIAKRLRSDIVAALIKCPTKNLDVIFKMSTHTTKLPTKLPTSRLRSAKSAVALAKKRVGRKEPEGSPLRVRLTKLQERLEKLSEAWLSSKNLRVDADNAKRFFAREVAFCLRGVLPLPSGNTVASRAHMTLPLYHKILSETIEEKRKTKNEKHRTFSLLPYKSGFTLSHIPISKMAFFYMVNECHFDSCKADVASKNHQGIWERFANLKKVETVSRKFGYRIVTDGFAVSILMNKPTCLTCSMPADAFSTRAHEYVTTDEGGIVSFLDNVVVAAVDPGVTDIVTVTGLNGGTRSYSSAQYYRKGLIFKSQRQTDVWNLETADIVGGIIPDRDSSSSEQIGAYARFYMGAAPILLAHRASRGYRNLRFRRYCKKQKLIVEIADFVAPRKKSAKVLVGFGDWKGLGATPISRRTCGPLQAIRFELRSRENVIMEDIDEFRTSQRCSCCENHLCNMVALTHRKKQDGTGWECTEGRKRIHKILHCKSSQSGAPRQQSGGMLHCGKTWDRDVNASRNILMLTLHQVFGRERPLAFRRDAPRSSSTTPPPDTDMGTQTVERFTKEATRNIFENLFNLLHPPTLPKSNDLQSG

SEQ ID NO: 1305 - protein, 686 aa, Chlamydomonas sp.
METIVNKEPPDKRTRPDRAAKIKDRKNGEENVVKCTLSRIIADKDNKDVITKVIKERVDSVSKRTYLAGVAVNRILKEVFEGVPDAQLHTVSVPSVDQNFIRQLMVGSRQAHMETRDATVERFFHNNYWFREKIEGREVIVKKKKQYVGAIARYDGDRNLYSHASKKYLTNFNNHYRVHLSTWIKKFVYPKENRILAKEFKDEHGIDETVFHRYLLYDIHSWGVKEDLIAIHSLLPERTKMLLKIQHSIIGRDEINRQWLKSVSNSAKMIRYNVFINRYLEATEDEGYAKLVNIAPIPTVKHSFITIDTDGLLGVLKDVGLVESLEKTLTNKEHWESVFDVENIRSTGKGVFTCTIDTDGVMACTHFLRAEKKKISIKDDGTAIKKQTKTLREFSESDPNVVVVANDPGRCNIAFLTWKKNKVEEKDKGGRKRKRHCEFGSKRLTRERYYVESGVFKSRGPTKKWLSNIQDCLDDLKDNSPKRTSLESFDAYVTVMVNHWDSRWGEMSKSRWGAQRLRLYGGKKRVLARFFNEVQADVGERKTIVIAYGSSKFAPGGKGELSVPTTSAFNAFRDRFKGRVAVIDEFRTTKIWHKDSTTVLQSVQSEKKGRTVRGLLWCSSTMENSKLFVNRDLNAAINIHNCFTMYPTRPGILARPKKYCKLEVVVGRTIDYKLTGSLQNAVSSEV

SEQ ID NO: 1306 - protein, 539 aa, Chlamydomonas sp.
METIVNKEPPDKRTRPDRAAKIKDRKNGEENVVKCTLSRIIADKDNKDVITKVIKERVDSVSKRTYLAGVAVNRILKEVFEGVPDAQLHTVSVPSVDQNFIRQLMVGSRQAHMETRDATVERFFHNNYWFREKIEGREVIVKKKKQYVGAIARYDGDRNLYSHASKKYLTNFNNHYRVHLSTWIKKFVYSKENRILAKEFKDEHGIDETVFHRYLLYDIHSWGVKEDLIAIHSLLPERTKMLLKIQHSIIGRDEINRQWLKSVSNSAKMIRYNVFINRYLEATEDEGYAKLVNIAPIPTVKHSFITIDTDGLLGVLKDVGLVESLEKTLTNKEHWESVFDVENIRSTGKGVFTCTIDTDGVMACTHFLRAEKKKISIKDDGTAIKKQTKTLREFSESDPNVVVVANDPGRCNIAFLTWKKNKVEEKDKGGRKRKRHCEFGSKRLTRERYYVESGVFKSRGPTKKWLSNIQDCLDDLKDNSPKRTSLESFDAYVTVMVNHWDSRWGEMSKSRWGAQRLRLYGGKKRVLARFFNEVQDGCR

SEQ ID NO: 1307 - protein, 794 aa, Chlamydomonas sp.
ECSREPVCRSRLHQNVFGVQFVMENGIGESSSLVHEADQHDDVAELVDYEGEEDGECAPGRAICVVKMKLSTFIPHDWLRNKIDTLVLDMNKLLGEGYIFANFHIARLFENGIAVPPVNRNFFYRCLIAVSTNKCKGSTLGEDFESSRLLFDLLREPGQSKVDIRGRVKNQIIADLSILMATMASNHLWTNLERRITTYLKWKYPQIAKRLRSDIVAALIKCPTKNLDVIFKMSPHTTKLPTKLPTSRLRSAKSAVALAKKRVGRKEPEGSPLRVRLTKLQERLEKLSEAWLSSKNLRVDADNAKRFFAREVAFCLRGVLPLPSGNTFASRAHMTLPLYHKILSETIEEKRKTKNEKHRTFSLLPYKSGFTLSHIPISKMAFFYMVNECHFDSCKADVASKNHQGIWERFANLKKVETVSRKFGYRIVTDGFAVSILMNKPTCLTCSMPADAFSTRAHEYVTTDEGGIVSFLDNVVVAAVDPGVTDIVTVTGLNGGTRSYSSAKYYRKGLIFKSQRQTDVWNLETADIVGGIIPDRDSSSSEQIGAYARFYMGAAPILLAHRASRGYRNLRFRRYCKKQKLIVEIADFVAPRKKSAKVLVGFGDWKGLGATPISRRTCGPLQAIRFELRSRENVIMEDIDEFRTSQRCSCCENHLCNMVALTHRKKQDGTGWECTEGRKRIHKILHCKSSQSGAPRQQSGGMLHCGKTWDRDVNASRNILMLTLHQVFGRERPLAFRRDAPRSSSTTPPPPPDTDMGTQTVERFTKEATRNIFENLFNLLHPPTLPKSNDLQSG

SEQ ID NO: 1308 - protein, 572 aa, Chlamydomonas sp.
SGLQATNVSLTQAASKATSSSRKKKPAVVKSFSTHVCPHTNNNPTCSDSNCSCNPIFLTNIPDASKSLKSRTSDQGSTSSAQDFYEYWDSSRQDLYRQLLWLPKTGSQGLVSSSLNGFARSTPARSSFSITKTEPMKTSLEKTSCPSFKYIVADGTVEDATKSNAKPKLRTLKLKLNPTKAQKSMLAEFAGCSRFMYNKAVAARLGVGSTHKSVFRIRDRYVTNKVRGEGKMPNPYFKNRQWLLQCPKSVRQSAIKAALANIKACFSNLKAGNIKQFSAPFRRKKTELERGWAIEMDQKNVSKDGDKLFIFKDILGNMRYFGSKQLHKLMPEENPTHNPKVQKSRFGEYFLVLSVAARERRAERKPVHPDKVATASIDPGVRKTMVTYSPENEESFMLGQGHASDLVKLLLVHDKLQSRLDTEKTLRSKERMKIKMQMIRIRKRIFYLKKEFRDQTTNFLAARYDVLLVPQLETAKMTISAERELTTKVARQMLTLSHSVLFNRLKEKCEEYGTVFLHVLEHYTSQTCPMCGFLNKCGETYTCKNCQFTCDRDIVGAAGIFLKAVRTENPCS

SEQ ID NO: 1309 - protein, 796 aa, Chlamydomonas sp.
ECSREPVCRSRLHQNVFGVQFVMENGIGESSSLVHEADQHDDVAELVDYEGEEDEECAPGRAICVVKMKLSTFIPHDWLRNKIDTLVLDMNKLLGEGYIFANFHIARLFENGIAVPPVNRNFFYRCLIAVSTNKCKGSTLGEDFESSRLLFDLLREPGQSKVDIRGNVKNQIIADLSILMATMASNHLWTNLERRITTYLKWKYPQIAKRLRSDIVAALIKCPTKNLDVIFKMSPHTTKLPTKLPTSRLRSAKSAVALAKKRVGRKEPEGSPLRVRLTKLQERLEKLSEAWLSSKNLRVDADNAKRFFAREVAFCLRGVLPLPSGNTFASRAHMTLPLYHKILSETIEEKRKTKNEKHRTFSLLPYKSGFTLSHIPISKMAFFYMVNECHFDSCKADVASKNHQGIWERFANLKKVETVSRKFGYRIVTDGFAVSILMNKPTCLTCSMPADAFSTRAHEYVTTDEGGIVSFLDNVVVAAVDPGVTDIVTVTGLNGGTRSYSSAQYYRKGLIFKSQRQTDVWNLETADIVGGIIPDRDSSSSVQIGAYARFYMGAAPILLAHRASRGYRNLRFRRYCKKQKLIVEIADFVAPREKSAKVLVGFGDWKGLGATPISRRTCGPLQAIRFELRSRENVIMEDIDEFRTSQRCSCCENHLCNMVALTHRKKQDGTGWECTEGRKRIHKILHCKSSQSGAPRQQSGGMLHCGKTWDRDVNASRNILMLTLHQVFGRERPLAFRRDAPRSSSTTPPPPPDTDMGTQTVERFTKEATRNIFENLFNLLHPPTLPKSNDLQSGLL

SEQ ID NO: 1310 - protein, 621 aa, Chlamydomonas sp.
QCIRNLHVLNIRMPCMATNASVKLARPPMPLVSPGPSSVDGRIMARSERSGLQATNVSLTQAASKATSSSRKKKQAVVKSFSTHVCPHTNNKPTCSDSNCSCKPIFLTNIPDASKSLKSRTSDQGSTSSAQDFYEYWDSSRQDLYRQLLWLPKTGSQGLVSSSLNGFARSTPARSSFSITKTEPLKTSLENTSCPSFKYIVADGTVEDATKSNAKPKLGTLKLKLNPTKAQKSILAEFAGCSRFMYNKAVAARLGVGSTHKSVFRIRDRYVTNKVRGKGKIPNPYFKNRQWLLQCPKSVRQSAIKAAFANIKACFSNLKAGNIKQFSAPFRRKKTELERGWAIEMDQKSVSKDGDKLFIFKDTLGNMRYFGSKQLHKLMPEENPTHDPKVQKSRFGEYFLVLSVAARDRRAERKPVHPDKVATASIDPGVRKTMVTYSPENEESFMLGQGQASDLVKLLLVHDKLQSRLDTEKTLRSKERMKIKKLMIRIRKRIFYLKKEFRDQTTKFLAARYDVLLVPQLETAKMTISAERELTTKVARQMLTLSHSVLFNRLKEKCEEYGTVFLHVLEHYTSQTCPMCGFLNKCGETYTCKNCQFTCDRDIVGAAGIFLKAVRTENPCS

SEQ ID NO: 1311 - protein, 453 aa, Chlamydomonas sp.
PIRFNHILVEEPFHKIVQAVVPLSGVGISDKTIPSSLVHANLIKYVVRRLRDLLPLPRGKQFNTRAHLTMRLFHHVLTELGADLKEKTTKKRPRLFSILPRKSGFTISYVPISSMTLMKLLSMGNSPLESFRGDGRHENHSMLWRKYFNVQGLETKGSRFDNRILSDGKGVSVQMKHQAGEDVAVEGGDTAGYPKEASLEDCQDASLRQGALRVGIDPGMTDIVTIASSDGRVDSFSSARFSEAAGYNTSNRRTNKWNADTQDLVKSIPSPTTSSMHDMQDHVRGYLSALPTLLQHRANRGYRSMRFFRYVGKQKTIEKVCDVIAPKAQKKTVVGFGNWSNQGYGISRSCSGPVKEIRKCLSRRQNVLFKNVDERNTSCTCHGCFQKLVNMKADSVVWRRVQNEPSALINGAPTTTTTIEKQKTVVKNVKVHKVLHCRNSVKGASSNVRCGAT

SEQ ID NO: 1312 - protein, 503 aa, Chlamydomonas sp.
KLSEAWLSSKNLRVDEDNAKRFFARDVAFCLRGVLPLPSGKTFASRAHMTLPLYHKILSETIASDNEKLRTFSLLPYKSGFTLSHIPISKMAFFYMVNECHFDSCKADVASKNHQGIWERFANLKIVETFSRKFGYRIVTDGFAVSILMNKPTCLTCSMPAEAFSTRVDEYMTTDEGGIVSFRDNVTVAAVDPGVTDIVTVTGLDGGTRSYSSAQYYRKGLIFKSQRQTDVWNLETTDIVGDNIPDRDSSRSEQIGTYARFYMGAAPILLAHRASRGYRKLRFRRYCKIQKLIVEIADFVAPREKSTKVIVGFGDWKGLGATPISRRTCGPLQAIRFELRSRENVIMEDVDEFRTSQRCSCCESRLCNMVALTHRKKQDGTGWECTEGRKRIHKILHCKSSQSGAPRQQSGGRLHCGKTWDRDVNASRNILMLTLHQVFGRERPLAFRRDTPRSSSKNPPPDTDMGTQTVERFTTEATRNIFENLFNLLHPPTLPKRDDLQSG

SEQ ID NO: 1313 - protein, 344 aa, Chlamydomonas sp.
DISGEGGGGDNAGYPKDASLEDCQDASLRQGALRVGIDPGMTDIVTIASSDGRVESFSSARFSEAAGYNTSNRRTNKWNADTQDLVKSIPSPTTSSMHDMQDHVRGYLSALPTLLQHRANRGYRSMRFFRYVGKQKTIEKVCDVIAPKAQKKTVVGFGNWSNQGYGISRSCSGPVKEIRKCLSRRQNVLFKNVDERNTSCTCHGCFQKLVNMKADSVVWSRVQNEPSALINGAPTTTTTTIEKQKTVVKNVKVHKVLHCRNSVKSASSNVRCGATWNRDVNAAKNLLLLLTTWMDGKERPGAFCVPSSSPTPKTTVSGEANVGTQPTDPPGSVSSLQLLSSGPA

SEQ ID NO: 1314 - protein, 217 aa, Chlamydomonas sp.
NQIRRRTCWAKTDLQDSLLPVLRSIVQRMSRVNPAEASKYKDDAAFLQGGSAGSVTFRAMHRDWDEFRTSQRCSCCESRLCNMVALTYRKKQDGTGWECTEGRKRINKILHCKSSQRRAPRQQSGGRLHCGKTWDRDVNASRNILMLTLHQVFGRERPLAFRRDTPRSSSKNPPPDTDMGTQTVERFTTEATRNIFENLFNLLHPPTLPKRDDLQSG

SEQ ID NO: 1315 - protein, 217 aa, Chlamydomonas sp.
NQIRRRTCWAKTDLQDSLLPVLRSIVQRMSRVNPAEASKYKDDAAFLQGGSAGSVTFRAMHRDWDEFRTSQRCSCCESRLCNMVALTYRKKQDGTGWECTEGRKRIHKILHCKSSQSGAPRQQSGGRLHCGKTWDRDVNASRNILMLTLHQVFGRERPLAFRRDTPRSFSKNPPPDTDMGTQTVERFTTEATRNIFENLFNLLHPPTLPKRDDLQSG

SEQ ID NO: 1316 - protein, 793 aa, Chlamydomonas sp.
KMATKPPTVAKLKELLKLAKVPYSSKSNKDDLVRLCEDNGLIARPPPEYKTVEKMCVVKCALKKAMSLDDEEFGKFREHVDQLVNVVSRMLRRSSLVLTFHITSLLEKGLDIPDLYNMKDTYWKDWLRIGVDGIFPDEESKISYEAVKDSIGDVIGNDDADYIKSYPIYFDQVLNYAGHTLSTVVSNNAWVPLIPRLARLTSTTLNKLNAPKTLDTSKIIRGYDVMQAIQQEVQNMEGWPESVQEYVNEVREMLSVPDGSRVYDNYGKDMDFPTMVRFNYWIQTRLEDMDARRIRLMPIFNVQRVHVRLDLKTLVNLFRHMFPNDQNIVELSKWEHVKNPDSFMLPQRPAQKKKKSCGPGEWEAYKSVLKQYDDDVKDIKATDEYRHAKGLYDTLVNAQKTVAGSFFRKPPVKNGWVFDCSICTDGVSLSMQYSKTVHVLVSDLKKTCKKPRKEEGIKIAEKYDGSLKTILPDMGIVVLGVDPGRSNIATVTYLADDKNKTWTLTRGAFYHKSGIKKQTRQKELRFADMIPMWESLRKKGAALSTSRTDKISAYLSNYAKFSDEWWRLALRRRESRDNLQRYIGKRKVKDSFWAGIKRCMMKELPDMKVCVAYGSAITKLKPIGPGEVAVPTGAMFASCKRIFKEDVSVTDEFKTTLMSWETGKEKERVYKIPSVCSADVKLRLGGERFGHTKSKTMPKVADCDHLGVRLYNKRKRAQEKHRRGGFATSLVDSQKSIERYPEVRGLRFSPETCIYSDRDRSSALTIARLHCMELMGLGRPLPFAHSSSVVVDE

SEQ ID NO: 1317 - protein, 422 aa, Chlamydomonas sp.
ALKQYDADVKDIKATDEYRHAKGRYDTLVNARKTVAGSFFRKPPVKNGWVFDCSICTDGVSLSMQYSKKVQVRVSDLKKTSMRSRDNEGLSVAEQYDRKLETTLTEMGIVVLGVDPGRSNIATVTYLAKGKSKTWKLTRGAFYHKSGIEKQKKQQEKRFSDMIPRWESLRENGAALSTSRKGDISAYLKNYATFSDEWWRMALRRRESRDNFQRYIGKRKAMDSFWAGIKRNMKLDHPDLRVRIAYGSAIKTMKATGPGEVAVPTGSMFASCKRLFKEEVHVTDEFKTTLMSWETGAKKECVYKIPSVQITMEGQIRLGYELLGHTPLKETPKVSYRDQLAVRVYCTRKQIQEKHRRGGLAPSLVDNKSIKRYPEVRGLRFSPETSTYSDRDRSSALTIARLHCMELLGQGRPLPFCRDACC

SEQ ID NO: 1318 - protein, 347 aa, Chlamydomonas sp.
GGRGRCQTRTFKNRQWLLQCPKSVRQSAIKAALANIKACFSNLKAGYIKQFSAPFRRKKTELERGWVIEMDQKNVSKDGDKLFIFKDILGNMRYFCSKQLHKLMPEENPTHDPKVQKSRFGEYFLVLSVAARDRRAERKPVHPDKVATASIDPGVRKTMVTYSPENEESFMLGQGQASDLVKLLLVHDKLQSRLDTEKTLQSKERMKIKKQMIRIRKRIFYLKKEFRDQTTNFLAAHYDVLLVPQLETAKMTISAERELTTKVAREMLTLSHSVLFNRLKEKCEEYGTVFLHVLEHYTSQTCPMCGFLNKCGGETYTCKNCQFTCDRDIVGAVGIFLKAVRTENPCS

SEQ ID NO: 1319 - protein, 410 aa, Chlamydomonas sp.
RVQTCKGLYDTLVNARKTVAGSFFRKPPVKNGWVFDCSICTDGVSLSMQYSKTVQVLVSDLKKTCKKPRKEEGIKIAEKYDGSLKTILPDMGIVVLGVDPGRSNIATVTYLADDKNKTWTLTRGAFYHKSGIKKQTRQKELRFAVMIPMWESLRENGAALSTWRTDKISAYLSNYAKFSDEWWRLALRRRESRDNLQRYIGKRKVKDSFWAGIKRCMMKELPDMKVCVAYGSAITKLKPTGPGEVAVPTGAMFASCTRIFKEDVSVTDEFKTTLMSWETGKEKERVYKIPSVCSADVKLRLGGERFGHTKSKTMPKVADCDHLGVRLYNKRKGAQEKHRRGGFATSLVDSQKSIERYPEVRGLRFSPETCIYSDRDRSSALTIARLHCMELMGLGRPLPFAPSSSVVVDE

SEQ ID NO: 1320 - protein, 691 aa, Chlamydomonas sp.
NGIKKCEYNIISQKKKNTHPLLMGVVQDKGDDDINISVVKKTLNSLCMDVSRHQISSRIQSMVLLINHAVAEAYLFANFHITRCLDDGDFDVKQLPHLDRNFYYRCLLAVSTSNVRKDTLGQSFNDTMVALDALRPAGYVKVDVRPWGQVIADVSIQMATMACNSIWANVDRVVIKYLRLKHPSLMKHFKKIVKAVVQYPESKIDTIIPEGLVHAIHIKEVVSHLRALFPLPRGKQFNTRAHLTMRLFHHVLTELGEVGRVDPKDKKTRKSHPRLFSILPRKNGFTISYVPISSMTFMKLLSMGDSPLESVSGDGRYENHTMLWRKYFNVQGLETKRSRFDNRILSDGKGVSVQMKQKGREEVVEEGENAGYPKDANIVECKDAVGALRVGVDPGMTDIVTVASSAGRIESFSSARFSEVAGYNTSKRRTYKWNDETQDLVKSIPSPDTSNLSDLQDHVRAYLKALPILLQHRAIKGYRSMRFFRYVGKQKTIEKVCDVIAPRAQTTVVGFGNWSNQGYGISRSCSGPIKEIRRCLSRRNNVLFKNVDERNTSCKCHGCFQRLVNMKADSVVWRGVCKESPIDGSITVEKQKMVVKNVKVHKVLHCRDSVKSASSNVRCGATWNRDVNAAKNLLLLLTTWMDGRERPEAFCVPSPPPKTTVSIEASVSAKPTDPTGFVSSLPCYPLGQLKC

SEQ ID NO: 1321 - protein, 688 aa, Chlamydomonas sp.
RNVSTILYHQEKKNAHPLLMGVVQDKGDDDINISVVKKTLNSLCMDVSRHQISSRIQSMVLLINHAVAEAYLFANFHITRCLDDGDFDVKQLPHLDRNFYYRCLLAVSTSNVRKDTLGQSFNDTMVAFDALRPAGYVKVDVRPWGQVIADVSIQMATMACNSVWANVDRVVIKYLRLKHPSLKKHFKKIVKAVVQYPESKIDTIIPEGLVHAIHIKEVVSHLRALFPLPRGKQFNTRAHLTMRLFHHVLTELGEVGRVDPKDKKTRKSHPRLFSTLPRKNGFTISYVPISSMTFMKLLSMGDLPLKSVSGDGRYENHTMLWRKYFNVQGLETKRSRFDNRILSDGKGVSVQMKQKGKEEVVEEGENAGYPKDANIVECKDAVGALRVGVDPGMTDIVTVASSAGRIESFSSARFSEVAGYNTSKRRTYKWNDETQDLVKSIPSPDTSNMSDLQDHVRAYLKALPILLQHRANKGYRSMRFFRYVGKQKTIEKVCDVIAPRAHTTVVGFGNWSNQGYGISRSCSGPIKEIRRCLSRRNNVLFKNVDERNTSCKCHGCFQRLVNMKADSVVWRGVCKESPIDGSITVEKQKMVVKNVKVHKVLHCRDSVKSASSNVRCGATWNRDVNAAKNLLLLLTTWMDGRERPEAFCVPSPPPKTTVSIEASVSAKPTDPTGFVSSLPCYPLGQLKC

SEQ ID NO: 1322 - protein, 326 aa, Chlamydomonas sp.
RRRNAGYPKDANIVECKDAVGALRVGVDPGMTDIVTVASSAGRIESFSSARFSEVAGYNTSKRRTYKWNDETQDLVKSIPSPNTSNMSDLQDHVRAYLKALPILLQHRANKGYRSMRFFRYVGKQKTIEKVCDVIAPRAQTTVVGFGNWSNQGYGISRSCSGPIKEIRRCLSRRNNVLFKNVDERNTSCKCHGCFQRLVNMKADSVVWRGVCKESPIDGSITVEKQKMVVKNVKVHKVLHCRDSVKSASSNVRCGATWNRDVNAAKNLLLLLTTWMDGRERPEAFCVPSPPPKTTVSIEASVIAKPTDPPGFVSSLPCYPLGQLKC

SEQ ID NO: 1323 - protein, 324 aa, Chlamydomonas sp.
VGYRQNHPSESRACEPHQRRCQTPERSLAAAKGEAVQHSSAPDNETVSSRAYRVGSGSKRENNKKNAPVCSVSFHARAAFTISYVPISSMTLMKLLSMGDSPLETFRGDGRHENHSMLWRKYFNVQGLETKGSRFDNRILSDGKGVSVQMKHQASEDVAVEGGDNAGYPKDAILEDCQDASLRVGVDPGMTDIVTVASSAGRVESFSSARFSEAAGYNTSNRRTNKWNVDTQDLVKSIPSPTTSSMHDMQDHVRGYLSALPTLLQHRASRGYRSMRFFRYVGQQKTIEKVCDLIAPKAQKKTIEEKVCDVIAPRAQTTVVGIGN

SEQ ID NO: 1324 - protein, 688 aa, Chlamydomonas sp.
RNVGTILYHQKKKNTHPLLMGVVQDKGDDDINISVVKKTLNSLCMDVSRHQISSRIQIMVLLINHAVAEAYLFANFHITRCLDDGDFDVKQLPHLDRNFYYRCLLAVSTSNVRKDTLGQSFNDTMFAFDALRPAGYVKVDVRPWGQVIADVSIQMATMACNSVWANVDRVVIKYLRLKHPSLKKHFKKIVKAVVQYPESKIDTIIPEGLVHAIHIKEAVSHLRALFPLPRGKQFNTRAHLTMRLFHHVLTELGEVGRVDPKDKKTRKSHPCLFSILPRKNGFTISYVPISSMTFMKLLSMGDSPLESVSGDGRYENHTMLWRKYFNVQGLETKRSRFDNRILSDGKGVSVQMKQKGKEEVAEEGENAGYPKDANIVECKDAVGALRVGVDPGMTDIVTVASSAGRIESFSSARFSEVAGYNTSKRRTYKWNDETQDLVKSIPSPNTSNMSDLQDHVRAYLKALPILLQHRANKGYRSMRFFRYVGKQKTIEKVCDVIAPRAQTTVVGFGNWSNQGYGISRSCSGPIKEIRRCLSRRKNVLFKNVDERNTSCKCHGCFQRLVNMKADSVVWRGVCKESPIDGSITVEKQKMVVKNVKVHKVLHCRDSVKSASSNVRCGATWNRDVNAAKNLLLLLTTWMDGRERPEAFCVPSPPPKTTVSIEASVSAKPTDPPGFVSSLPCYPLGQLKC

SEQ ID NO: 1325 - protein, 268 aa, Chlamydomonas sp.
SAFCKAIFRCHDYSPFCTPPHRLPGSHQQERRSGEGCFSHCWREYFLVLSVAARDRRAERKPVNPDKVATASIDPGVRKTMVTYSPENEESFMLGQGQASDLVKLLLVHDKLQSRLDTEKTLRSKERMKIKKLMIRIRKTIFYLKKEFRDQTTNFLAARYDVLLVPQLETAKMTISAERELTTKVARQMLTLSHSVLFNRMKEKCEEYGTVFLHVLEHYTSQTCPMCGFLNKCGETYTCKNCQFTCDRDIVGAAGIFLKAVRTENPCS

SEQ ID NO: 1326 - protein, 762 aa, Chlamydomonas sp.
IRWIFVDPMDLRRSDGSSKNHQGIWERFANLKKVETVSRKFGYRIVTDGFAVSILMNKPTCLTCSMPADAFSTRAHEYVTTDEGGIVSFLDNVVVAAVDPGVTDIVTVTGLNGGTRSYSSAQYYRKGLIFKSQRQTDVWNLETADIVGGIIPDRDSSSSEQIGAYARFYMGAAPILLAHRASRGYRNLRFRRYCKKQKLIVEIADFVAPRKKSAKVLVGFGDWKGLGATPISRRTCGPLQAIRFELRSRENVIMEDIDEFRTSQRCSCCENHLCNMVALTHRKKQDGTGWECTEGRKRIHKILHCKSSQSGAPRQQSGGMLHCGKTWDRDVNASRNILMLTLHQVFGRERPLAFRRDAPRSSSTTPPPPPDTDMGTQTVERFTKEATRNIFENLFNLLHPPTLPKSNDLDAVWMIIKFPTLFKNNCMHRKKKLKCLDLFSGIGGNALALRSICKTIAYCEIDPFARDVLEANMKRKNLDKAPIFEDVTTLKAVDVPELPDVITASFPCQDISSAGKGAGITGEHSGLYKHIFRLVKEFRRHRNHRISVIVMENSPMIKNRGLEKIESDLRSLGFRFQSVYRKASDFGARHERRRWCMVAIDKQSDLDLPCTYFRHNFDNLDNIPVLLKREGKASANFIRYGALGNAVVPKFIASVWDELICSVPFDSQDINRYPLLSYNTPHVTATRRLWPTPLYSRQQWTMRPFIRVGRREWSNMANRVFHEEGVMRKYNYNDANQAYHTYMINPEWVEALMGYPTGWTGT

SEQ ID NO: 1327 - protein, 759 aa, Chlamydomonas sp.
VHEADQHDDVAELVDYEGEEDGECAPGREICVVKMKLSTFIPHDWLRNKIDTLVLDMNKLLGEGYIFANFHIARLFENGIAVPPVNRNFFYRCLIAVSTNKCKGSTLGEDFESSRLLFDLLREPGQSKVDIRGSVKNQIIADLSILMATMASNHLWTNLERRITTYLKWKYPQIAKRLRSDIVAALIKCPTKNLDVIFKMSPHTTKLPTKLPTSRLRSAKSAVALAKKRVGRKEPEGSPLRVRLTKLQERLEKLSEAWLSSKNLRVDADNAKRFFAREVAFCLRGVLPLPSGNTFASRAHMTLPLYHKILSETIEEKRKTKNEKYRTFSLLPYKSGFTLSHIPISKMAFFYMVNECHFDSCKADVASKNHQGIWERFANLKKVETVSRKFGYRIVTDGFAVSILMNKPTCLTCSMPADAFSTRAHEYVTTDEGGIVSFLDNVVVAAVDPGVTDIVTVTGLNGGTRSYSSAQYYRKGLIFKSQRQTDVWNLETADIVGGIIPDRDSSSSEQIGAYARFYMGAAPILLAHRASRGYRNLRFRRYCKKQKLIVEIADFVAPRKKSAKVLVGFGDWKGLGATPISRRTCGPLQAIRFELRSRENVIMEDIDEFRTSQRCSCCENHLCNMVALTHRKKQDGTGWECTEGRKRIHKILHCKSSQSGAPRQQSGGMLHCGKTWDRDVNASRNILMLTLHQVFGRERPLAFRRDAPRSSSTTPPPDTDMGTQTVERFTKEATRNIFENLFNLLHPPTLPKSNDLQSG

SEQ ID NO: 1328 - protein, 802 aa, Chlamydomonas sp.
NCFDHVCDVCIKSSVMYKLCKMATKPPTVAKLKELLKLAEVAYSSKDKKDDIVRLCEDNGLIARPPPEYKTVEKMCVVKCAMKKAMSLDDEEFGKFRGHVDQLVNVVSRMLRRSSLVLTFHVTRLMEGDLPIPNMYDMKDTYRKDWLRIGVDGVFPDEESRISYEAVKDVIGKVLGSDDPDYINSYPIYFDQVLNYAGHTLSTVVSNNAWVPLVPHLTRLTKDTLNALGAPKTIRVYDVMRVIQQEIQEMESWPESVQEYVREVRVRLKVPDGSRLYDDYGKDMDFPTMVRFNNWMQTRFEAMVARRIRLMPIFNAQRAHVRLDMKTLVNLFRHVFPKDPNIVELSKWENVKDPDRFMLPLKPAFKKKKSCGPGEWEAYKLAQQKYDADVKDIKATDEYRHAKGRYDTLVNARKTVAGSFFKKPPVKTGWVFDCSICTDGVSLSMQYSKTVQVRVSDLKKTSKRSRDEEGMSVSEQYDHKLKTTLPDMGIVLVGVDPGRSNIVTVTYLEDDKSKTWKLTRGAFYHKSGIKKQKKHQEKRFSDMIPRWESLRVNGAALSTSRKDDISAYLKNYATFSDEWWRMALRCKESRDNFQRYIGKRKAMDSFWAGIKRKMKLDHPDLRVRVAYGSAITKLKATGPGEVAVPTGSMFASCKRLFKEEVHVTDEFKTTLMSWETGAKKECVYKIPSVQITTEGQIRLGYELLGHPLKETPKVSYRDQLAVRVYCTRQKIQEKHRRGGLAPSLVDNNSIKRYPEVRGLRFSPETSTYSDRDRSSALTIARLHCMELLGQGRPLPFCRDACC

SEQ ID NO: 1329 - protein, 216 aa, Chlamydomonas sp.
DCLDDLKDNSPKRTSLVSFDAYVTVMVNHWDSRWGEMSKSRWGAQRLRLYGGKKRVLARFFNKVQADVGERKTIVVAYGSAKFAPGGKGELSVPTTSAFNAFSDRFKGRVAVIDEFRTTKIWHKDSTTVLQSVQSEKEGRTVRGLLWCSSTMENSKLFVNRDLNAAINIHNCFTMYPIRPGILARPKKYCKLEVVVGRKIDYKLTGSLQNAVSSEV

SEQ ID NO: 1330 - protein, 793 aa, Chlamydomonas sp.
KMATKPPTVAKLKELLKLAEVPYSSKSNKDDLVRLCEDNGLIARPPPEYKTVEKMCVVKCALKKAMSLDDEEFGKFREHVEQLVNVVSRMLRRSSLVLTFHITSLLEKGLDIPDLYNMKDTYWKDWLRIGVDGIFPDEESKISYEAVKDSIGDVIGNDDADYIKSYPIYFDQVLNYAGHTLSTVVSNNAWVPLIPRLARLTSTTLNKLNAPKTLDTSKIIRGYDVMQAIQQEVQNMEGWPESVQEYVNEVREMLSVPDGSRVYDNYGKDMDFPTMVRFNYWIQTRLEDMDARRIRLMPIFNVQRVHVRLDLKTLVNLFRHMFPNDQNIVELSKWEHVKNPESFMLPQRPAQKKKKSCGPGEWEAYKSVLKQYDDDVKDIKATDEYRHAKGFYDTLVNARKTVACSFFRKPPVKNGWVFDCSICTDGVSLSMQYSKTVQVLVSDLKKTCKKPRKEEGIKIAEKYDGSLKTILPDMGIVVLGVDPGRSNIATVTYLADDKNKTWKLTRGAFYHKSGIKKQTRQKELRFADMIPMWESLRENGAALSTSRTDKISAYLSNYAKFSDEWWRLALRRRESRDNLQRYIGKRKVKDSFWAGIKRCMMKELPDMKVCVAYGSAITKLKPTGPGEVAVPTGAMFASCKRIFKEDVSVTDEFKTTLMSWETGKEKERVYKIPSVCSADVKLRLGGERFGHTKSKTMPKVADCDHLGVRLYNKRKGAQEKHRRGGFATSLVDSQKSIERYPEVRGLRLSPETCIYSDRDRSSALTIARLHCMELMGLGRPLPFAHSSSVVVDE

SEQ ID NO: 1331 - protein, 265 aa, Chlamydomonas sp.
RVLYGVLHSDRSIMLQYIESITILYVQLGQTVDCVFKSRGPTKKWLSNIQDCLDDLKDNSPKRTSLESFDAYVTVMVNHWDSRWGEMSKSRWGAQRLRLYGGKKRVLARFFNEVQAERKTIVIAYGSSKFAPGGKGELSVPTTSAFNAFSDRFKGRVAVIDEFRTTKIWHKDSTTVLQSVQSEKEGRTVRGLLWCSSTMENSKLFVNRDLNAAINIHNCFTMYPTRPGILARPKKYCKLEVVVGRTIDYKLTGSLTKATAEIFLA

SEQ ID NO: 1332 - protein, 274 aa, Chlamydomonas sp.
KTTKKRPRLFSILPRKSGFTISYVPISSMTLMKLLSMGDSPLESVRGDGRHENHSMLWRKYFNVQGLETKGSRFENRILSDGKGVSVQMKHQVGKDIAGEGEGDNAGYPKDASIEDCQDASLRQGALRVGIDPGMTDIVTIASSDGRVESFSSARFSEAAGYNTSNRRTNKWNADTQDLVKSIPSPTTSSMHDMQDHVRGYLSALPTLLQHRANRGYRSMRFFRYVGKQKTIEKVCDLIAPKAQKKTIEEKVCDVIAPKAKKTVVGFGNWSNQG

SEQ ID NO: 1333 - protein, 591 aa, Chlamydomonas sp.
RRPNFIRQLMVGSRQAHMETRDATVERFFHNNYWFREKIEGREVIVKKKKQYVGAIARYDGDRNLYSHASKKYLTNFNNHYRVHLSTWIKKFVYSKENRILAKEFKDEHGIDETVFHRYLLYDIHSWGVKEDLIAIHSLLPERTKMLLKIQHSIIGRDEINRQWLKSVSNSAKMIRYNVFINRYLEATEDEGYAKLVNIAPIPTVKHSFITIDTDGLLGVLKDVGLVESLEKTLTNKEHWESVFDVENIRSTGKGVFTCTIDTDGVMACTHFLRAEKKKISIKDDGTAIKKQTKTLREFSESDPNVVVVANDPGRCNIAFLTWKKNKVEEKDNGGRKRKRHCEFGSKRLTRERYYVESGVFKSRGPTKKWLSNIQDCLDDLKDNSPKRTSLESFDAYVTVMVNHWDSRWGEMSKSRWGAQRLRLYGGKKRVLARFFNEVQADVGERKTIVIAYGSSKFAPGGKGELSVPTTSAFNAFRDRFKGRVAVIDEFRTTKIWHKDSTTVLQSVQSEKKGRTVRGLLWCSSTMENSKLFVNRDLNAAINIHNCFTMYPTRPGILARPKKYCKLEVVVGRTIDYKLTGSLQNAVSSEV

SEQ ID NO: 1334 - protein, 336 aa, Chlamydomonas sp.
DHPLIHYNVCRPDSSRTVSRKFGYRIVTDGFAVSILMNKPTCLTCSMPADSFSTRAHEYVTTDEGGIVSFRDNVVVAAVDPGVTDIVTVIGLDGGTRSYSSAQYYRKGLIFKSQRQTDVWNLETADIVGDIIPDRDSSRSEQIGAYARFYMGAAPILLAHRASRGYRNLRFCRYCKKQKLIVEIADFVAPREKSAKVLVGFGDWKGLGATPISRRTCGPLQAIRFELRSRGNVIMEDVDEFRTSQQCSCCENRLCNMVALTHRKKQDGTGWECTEGRKRIHKILHCKSSQSRAPRQQSGGRLHCGRTWDRDVNASRNILMLTLHQVFGRERPLAFR

SEQ ID NO: 1335 - protein, 624 aa, Chlamydomonas sp.
VNLTVYKEFACTKYQNAMYGNQRFCKIGKASDALGVSRTVLRRWADNGTIRTIRTPGNQRLFDPSSIQGYLIEQEKKPSSRQVILYARVSSHKQQPDLLRQQLFMQTHIYDKHSGCEQVIEVKDVGSGLNFKRPGLLRVLGLVTAGLVSSIVVASKDRLARFGFELIEWICSQHSCSIIVLDHQDGAPEDELGKDLMSIVQVHCCRWNGRRRYKVKCQTQVEDLKAEAETNQGSEIDAGRVCGVQPVHVQQGGGSTVGRREHSQVCLPNSRQVCDEQGEGVGEDAKPVLQESPMVASVPQNVRQSAIKAALANIKACFSNMKVGNIKQFSAPFRRKKTELERGWAIEMDQKNVSKDGDKLFIFKDILGNMRYFGSKQLHKLMPEENPTHDPKVQKSRFGEYFLVLSVASRDRRAERKPVHPDKVATASIDPGVRKTMVTYSPENEESFMLGQGQASDLVKLLLVHDKLQSSLDTEKTLRSKERMKIKKHMIRIRKRIFYLKKEFRDQTTNFLAARYDVLLVPQLETAKMTISAERELTTKVARQMLTLSHSVLFNRLKEKCAEYGTVFLHVLEHYTSQTCPMCGFLNKCGETYTCKNCQFTCDRDIVGAAGIFLKAVRTENPCS

SEQ ID NO: 1336 - protein, 299 aa, Chlamydomonas sp.
EEKSCGPGEWEAYKLAQQKYDADVKDIKAIDEYRHAKGRYDTLVNARKTVAGSFFKKPPVKTGWVFDCSICTDGVSLSMQYSKTVQVRVSDLKKTSKRSRDEEGMSVAEQYDHKLKTTLPDMGIVVLGVDPGRSNIATVTYLADDKSKTWKLTRGAFYHKSGIKKQKKQQEKRFSDMIPRWESLRENGAALSTSRKDDISAYLKNYATFSDEWWRMALRRRESRDNFQRYIGKRKAMDSFWAGIKRNMKLDHPDLRVRIAYGSAIKTMKATGPGEVAVPTGSMFRFLQAPLQRGGSCDR

SEQ ID NO: 1337 - protein, 316 aa, Chlamydomonas sp.
PVKTGWVFDCSICTDGVSLSMQYSKTVQVRVSDLKKTSKRSRDEEGMSVAEQYDHKLKTTLPDMGIVVLCVDPGRSNIATVTYLADDKSKTWKLTRGAFYHKSGIKKQKKQQEKRFSDMIPRWESLRENGAALSTSRKDDISAYLKNYATFSDEWWRMALRRRESRDNFQRYIGKRKAMDSFWAGIKRNMKLDHPDLRVRIAYGSAIKTMKATGPGEVPVPTGSMFASCKRLFKEEVHVTDEFKTTLMSWETGAKKECVYKIPSVQITTEGQIRLGYELLGHTPLKETPKVSYLDQLAVRVYCTRKKSMKNTGGVA

SEQ ID NO: 1338 - protein, 276 aa, Chlamydomonas sp.
ETLTKPLHGSSLKLSRRFGPGLSVTRHLSSMRRFAVHQLAHPRFVTRPPGSVWRRRESRDNLQRYIGKRKVKDSFWAGIKRCMMKELPDKKVCVAYGSAITKLKPTEPGEVAVPTGAMFASCKRIFKEDVSVTDEFKTTLMSWETGKEKERVYKIPSVSSADVKLRLGGERFGHTKSKTMPKVADCDHLGVRLYNKRKGAQEKHRRGGFATSLVDSQKSIERYPEVRGLRFSPETCIYSDRDRSSALTIARLHCMELMGLGRPLPFAHSSSVVVDE

SEQ ID NO: 1339 - protein, 309 aa, Chlamydomonas sp.
RSNIATVTYLADDKNKTWTLTRGAFYHKSGIKKQTRQKELRFADMIPMWESLRENGAAFSTSRTDKISAYLSNYAKFSEEWWRLALRRRESRDNLQRYIGKRKVKDSFWAGIKRCMMKELPDMKVCVAYGSAITKLKPTGPGEVAVPTGAMFASCKRIFKEDVSVTDEFKTTLMSWETGKEKERVYKIPSVCSADVKLRLGGERFGHTKSKTMPKVADCNHLGVRLYNKRKGAQEKHRRGGFATSLVDSQKSIERYPEVRGLRFSPETCIYSDRDRSSALTIARLHCMELMGLGRPLPFAHSSSVVVDE

SEQ ID NO: 1340 - protein, 677 aa, Chlamydomonas sp.
RFSDHAIEDSGMIPALTCHRWLVLLINHAVAEAYLFANFHITRCLDDGDFDVKQLPHLDRNFYYRCLLAVSTSNVRKDTLGQSFNDTMVAFDALRPAGYVKVDVRPWGQVIADVSIQMATMACNSVWANVDRVVIKYLRLKHPSLKKHFKKIVKAVVQYPESKIDTIIPEGLVHAIHIKEVVSHLRALLPLPRGKQFNTRAHLTMRLFHHVLTELGADLKEKTTKKRPRLFSILPRKSGFTISYVPISSMTLMKLLSMGDSPLESVRGDGRLENHSMLWRKYFNVQGLEKKGSRFDNRILSDGKGVSVQMKHQVGKDIAGEGGGDNAGYPKDASIEDCQDASLRQGALRVGIDPGMTDIVTIASSDGRVESFSSARFSEAAGYNTSNRRTNKWNADTQDLVKSISSPTTSSMHDMQDHVRGYLSALPTLLQHRANRGYRSMRFFRYVGKQKTIEKVCDLIAPKAQKKTIEEKVCDVIAPKAKKTVVGFGNWSNQGYGISRSCSGPVKEIRKCLSRRQNVLFKNVDERNTSCTCHGCFQKLVNMKADSVVWRRVQNEPSALIDGAPTTTTTTTTFEKQKTVVKNVKVHKVLHCRNSVKSASSNVRCGATWNRDVNAAKNLLLLLTTWMDGKERPAAFCVPSSSPTPKTTVSGEANVGAQPTDPPGSVSSLQLLSSGPA

SEQ ID NO: 1341 - protein, 621 aa, Chlamydomonas sp.
QCIRDLHVLNIRMLCMATNASVKLARPPMPLVSPGPSSVDGRIMARSERSGLQATNVSLTQAASKATSSSRKKNPAVVKSFSTHVCPHTNNNPTCSDSNCSCKPIFLTNIPDASKSLKSRTSDQGSTSSAQDFYEYWDSSRQDLYRQLLWLPKTGSQGLVSSSLNGFARSTPVRSSFSITKTEPLKTSLEKTSCPSFKYIVADGTVEDATKSNAKPKLRTLKLKLNPTKAQKSMLAEFAGCSRFMYNKAVAARLGVGSTHKSVFRIRDRYVTNKVKGEGKMPNPYFKNRQWLLQCPKSVRQSAIKAALANIKACFSNLKAGNIKQFSAPFRRKKTELERGWAIEMDQHNVSKDGDKLFIFKDTLGNMRYFGRKQLQKLMPEKNPTHDPKVQKSRFGEYFLVLSVAARDRREDRKPVHPGKVATASIDPGVRKTMVTYSPENEESFMLGKGQASDLVKLLLVHDKLHSRLGTEKTLRSKERMKIKMQMIRIRKRIFYLKKEFRDQTTNFLAARYDVLLVPQLETAKMTISAERELTTKVARQMLTLSHSVLFNRLKEKCEEYGTVFLHVLEHYTSQTCPMCGFLNKCGETYTCKNCQFTCDRDIVGAAGIFLKAVRTENTCS

SEQ ID NO: 1342 - protein, 796 aa, Chlamydomonas sp.
YERLGYECSREPVCRSRLHQNVFGVQFVMENGIGESSSLVHEADQHDDVAELVDYEGEEDEECAPGRAICVVKMKLSTFIPHDWLRKKIDTLVLDMNKLLGEGYIFANFHIARLFENGIAVPPVNRNFFYRCLIAVSTNKCKGSTLGEDFESSRLLFDLLREPGQSKVDIRGNVKNQIIADLSILMATMASNHLWTNLERRITTYLKWKYPQIAKRLRSDIVAAVIKCPTKNLDVIFKMSPHTTKLPTASLRSAKSAVALAKKRVGRKEPEGSPLRVRLTKLQERLEKLSKAWLSSKNLRVDADNAKRFFARDVAFCLRGVLPLPSGNTFVSRAHMTLPLYHKILSETIEEKRKTKNEKHRTFSLLPYKSGFTLSHIPISKMAFFYMVNECHFDSCKADVASKNHQGIWERFANLKKVETVSRKFGYRIVTDGFAVSILMNKPTCLTCSIPADAFSTRAHEYVTTDEGGIVSFLDNVVVAAVDPGVTDIVTVTGLNGGTRSYSSAQYYRKGLIFKSQRQTDVWNLETADIVGGIIPDRDSSSSEQIGAYARFYMGAAPILLAHRASRGYRNLRFRRYCKKQKLIVEIADFVAPREKSAKVLVRFGDWKGLGATPISRRTCGPLQAIRFELRSRENVIMEDIDEFRTSQRCSCCENHLCNMVALTHRKKQDGTGWECTEGRKRIHKILHCKSSQSGAPRQQSGGMLHCGKTWDRDVNASRNILMHTLHQVFGRERPLAFRRDAPRSSSTTPPPPPDTDMGTQTVERFTKEATRNIFENLFNLLHPPTLPKSNDLQSG

SEQ ID NO: 1343 - protein, 425 aa, Chlamydomonas sp.
KNKKKSPRLFSILPRKNGFTISYVPISSMTFMKLLSMGDSPLESVSGDGRYENHTMLWRKYFNVQGLETKRSRFDNRILSDGKGVSVQMKQKGKEEVVEEGENAGYPKDANIVECKDAVGVLRVGVDLGMTDIVTVASSAGRIESFSSARFSEVAGYNTSKRRTYKWNDETQDLVKSIPSPNTSNMSDLQDHVRAYLKALPILLQHRANKGYRSMRFFRYVGKQKTIEKVCDVIAPRAQTTVVGFGNWSNQGYGISRSCSGPIKEIRRCLSRRKNVLFKNVDERNTCCKCHGCFQRLVNMKADSVVWRGVCKESPIDGSITVEKQKMVVKNVKVHKVLHCRDSVKSASSNVRCGATWNRDVNAAKNLPLLLTTWMDGRERPEAFCVPLPPPKTTVSIEASVSAKPTDPPGFVSSLPCYPLGQLKC

SEQ ID NO: 1344 - protein, 803 aa, Chlamydomonas sp.
KMATKPPTVAKLKELLKLAEVPYSSKSNKDDLVRLCEDNGLIARPPPEYKTAEKMCVVKCALKKAMSLDDEEFGKFREHVDQLVNVVSRMLRRSSLVLTFHITSLLEKGLEIPDLYHMKDTYWKDWLRIGVDGIFPDEESKISYEAVKDSIGDVIGNDDADYIKSYPIYFDQVLNYAGHTLSTVVSNSAWVPLIPRLARLTSTILNKLNAPKTLDTSKIIRGYDVMQAIQQEVQNMEGWPKSVQEYVNEVREMLSVPDGSRVYDNYGKDMDFPTMVRFNYWIQTRLEDMDARRIRLMPIFNVQRVHVRLDLKTLVNLFRHMFPNDQNIVELSKWEHVKNPDSFMLPQRPAQKKKKSCGPGEWEAYKSVLKQYDDDVKDIKATDEYRHAKGLYDTLVNARKTVAGSFFRKPPVKNGWVFDCSICTDGVSLSMQYSKTVQVLVSDLKKTCKKPRKEEGIKIAEKYDGSLKTILPDMGIVVLGVDPGRSNIATVMYLADDKNKTWTLTRGAFYHKSGIKKQTRQKELRFADMIPMWESLRENGAALSTSRTDKISAYLSNYAKFSGEWWRLALRRRESRDNLQRYIGKRKVKDSFWAGIKRCMMKELPDMKVCVAYGSAITKLKPTGPGEVAVPTGAMFASCKRIFKEDVSVTDEFKTTLMSWETDKEKERVYKIPSVCSADVKLRLGGERFGHTKSKTMPKVADCDHLGVRLYNKRKGAQEKHRRGGFATSLVDSQKSIERYPEVRGLRFSPETCIYSDRDRSSALTIARLHCMELMGLGRPLSFAHSSSVVVDYITLHYMLKST

SEQ ID NO: 1345 - protein, 941 aa, Chlamydomonas sp.
KIGQCKGDLVSLVTGFCSRYKDTINAGKILVSFDECGFSERLKAHYGYSPVGKPVIVKTTGGWVHHSLLMAVFSDGRKEFVVKKGSVKKTDFAAFIDSLSLCNNSVVIMDNASIHKNLVLRSPVNICYTPPYSPEFNAIELCFAKVTTYGTRMEHVCDVCIKSSVMYKLCKMATKPPTVAKLKELLKLAEVAYSSKDKKDDIVRLCEDNGLIARPPPEYKTVEKMCVVKCALKKAMSLDDEEFGKFRGHVDQLVNVVSRMLRPSSLLLTFHVTRLMEGDLPIPNMYNMKDTYWKDWLRIGVDGVFPDEESRISYESVKDVIGKVLGSDDPDYINSYPIYFDQVLNYAGHTLSTVVSNNAWVPLVPRLTRLTKATLNALGAPKTIRVYDVMRVIQQEIQEMESWPESVQEYVREVRVRLKVPDGSRLYDDYGKDMDFPTMVRFNYWMQTRLEAIGARRIRLMPIFNVQRAHVRLDMKTLVNLFRHVFPKDPNIVELSKWKNVKDPDRFMLPLKPAVKKKKSCGPGEWEAYKLAQQKYDTDVNDIKATDEYRHAKGRYDTLVNARKTVAGSFFKKPPVKTGWVFDCSICTDGVSLSMQYSKTVQVRVSDLKKTSKRSRDDEGMSVSEQYDHKLKTTLPDMGIVVLGVDPGRSNIATVTCLADDKSKTWKLTRGAFYHKSGIKTQKKQQEKRFSDTIPRWESLRENGAALSTSRKDDISAYLKNYATFSDEWWRMALRRRESRDNFQRYIGKRKAMDSFWAGIKRNMKLDHPDLRVRVAYGSAITTLKATGPGEVAVPTGSMFASCKRLFKEEVHVTDEFKTTLMSWETGAKKECVYKIPSVQITTEGQIRLGYELLGHTPLKETPKVSYRDQLAVRVYCTRKQIQEKHRRGGLAPSLVDNNSIKRYPEVRGLRFSPETSTYSDRDRSSALTTVSSDDVLYWLW

SEQ ID NO: 1346 - protein, 402 aa, Chlamydomonas sp.
NHSMLWRKYFNVQGLEKKGSRFDNRILSDGKGVSVQMKHQVGKDIVGVGGRDNAGYPKNASIEDCQDASLRQGALRVGIDPGMTDIVTIASSDGRVESFSSARFSEAAGYNTSNRRTNKWNADTQDLVKSIPSPTTSSMHDMQDHVRGYLSALPTLLQHRANRGYRSMRFFRYVGKQKTIEKVCDLIAPKAQKKTIEEKVCDVIAPKAKKTVVGFGNWSNQGYGISRSCSGPVKEIRKCLSRRQNVLFKNVDERNTSCTCHGCFQKLVNMKADSVVWRRVQNEPSALIDGAPTTTTTTFEKQKTVVKNVKVHKVLHCRNSVKSASSNVRCGATWNRDVNAAKNLLLLLTTWMDGKERPAAFCVPSLSPTPKTTVSGEANVGAQPTDPPGSVSSLQLLSSGPA

SEQ ID NO: 1347 - protein, 260 aa, Chlamydomonas sp.
IPRWESLRENGAALSTSRKDDISAYLKNYATFSDEWWRMALRRREFRDNFQRYIGKRKAMDSFWAGIKRNMKLDHPDLRVRVAYGSAITTLKATGPGEVAVPTGSMFASCKRLFKEEVHVTDEFKTTLMSWETGAKKECVYKIPSVQTTTEGQIRLGYELLGHTPLKETPKVSYRDQLAVRVYCTRKQIQEKHRRGGLAPSLVDNNSIKRYPEVRGLRFSPETSTYSDRDRSSALTIARLHCMELLGQGRPLPFCRDACC

SEQ ID NO: 1348 - protein, 618 aa, Chlamydomonas sp.
QCIRNLHVLNIRMSCMATNASVKLARPPMPLVSPGPSSVDGRIMARSGLQATNVSLTQAASKATSSSRKKTPAVVKSFSTHECPHTINNPTCSDSNCSCKPIFLTNIPDASKSLKSRTSDQGSTSSAQDFYEYWDSSRQDLYRQLLWLPKKGSQGLVSSSLNGFARSTPVRSSFSITKTEPLKTSLEKTSCPSFKYIVADGTVEDATKSNAKPKLRTLKLKLNPTKAQKSMLAEFAGCSRFMYNKAVAARLGVGSTHKSVFRIRDRYVTNKVKGEGKMPNPYFKNRQWLLQCPKSVRQSAIKAALANIKACFSNLKAGNIKQFSAPFRRKKTELERGWAIEMDQHDISEDDDKLFIFKDTLGNMRYFGRKQLQKLMPEKNPTHDPKVQKSRFGKYFLVLSVAARDRREERKPVHPGKVATASIDQGVRKTMVTYSPENEESVMLGKGQASDLVKLLLVHDKLHSRLDTEKTLRSKERMKIKMQMIRIRKIIFYLKKEFRDQTTNFLAARYDVSLVPQLETAKMTISAERELTTKVARQMLTLSHSVLFNRLKEKCEEYGTVFLHVLEHYTSQTCPMCGFLNKCGETYTCKNCQFTCDRDIVGAAGIFLKAVRTENPCS

SEQ ID NO: 1349 - protein, 199 aa, Chlamydomonas sp.
LRWRRAQRYSSVLVIGKVWGRHQSLGRLVAIRFELRSRKNVIMEDVDEFRTSQRCSCCETRLCNMVALTHGKQQDGTWECTEGRKRIHKILHCKSSQSGAPRQQSGGRLHCGKTWDRDVNASRNILMLTLHQVFGRERPLAFCRDAPRGSSKNPPTPDTDMGSQTVERFTTEATRNIFENLFNMLHPPMLPKRNDLQSG

SEQ ID NO: 1350 - protein, 666 aa, Chlamydomonas sp.
METIVNKEPPDKRTRPDRAAKIKDRKNGEENVVKCTLSRIIADKDNKDVIIKVIKERVDSVSKRTYLAGVAVNRILKEVFEGVPDAQLHTVSVPSVDQNFIRQLMVGSRQAHMETRDATVERFFHNNYWFREKIEGREVIVKKKKQYVGAIARFDGDQNLYSHASKKYLTNFNNHYRVHLSTWIKKFVYSKENRILAKEIKDEHGIDETVFHRYLLYDIHPWGVKEDLIAMHSLLPERTKMLLKIQHSILGRDEINRQWLKSVSNSAKMIRYNVFINRYLEATEDEGYAKLVNIAPIPTVKHAFITIDTDGLLGVLKDVGLIESLEKTLTNKEHWESVFDVENIRSAGKGVFTCTIDTDGVMACTHFLRAEKKKISIKDDGTAIKKQTKTLREFSESDPNVVVVANDPGRCNIAFLPWKKNKVEEKDKGGRKRKRHCEFGSTRLTRERYYVESGVFKSRGPTKKWLSNIQDCLDDLKDNSPKRTSLVSFDDYVAVMVNHWDSRWGEMSKSRWGEQRLRLYGGKKRVLARFFNEVQEAVGERKTNVVAYGSAKFAPGGKGELSVPTTSAFKAFSDRFKGRVAVIDEFRTAKIWHKDSTTVLQSVQSEKEGRTVRGLLWCSSTMENSKLFVNRDLNAAINIHNCFTMYPIRPGILARPKKYCKLEVVV

SEQ ID NO: 1351 - protein, 577 aa, Chlamydomonas sp.
VNLTVYKEFACTTTNVSLTQAASKATSSSRKKKPAVVKSFSTHVCPHTNNNTTCSDSNCSCKPIFLTNIPDASKSRTSDQGSTSSALDFYEYWDSSRQDMYRQLLWLPKTGTQGLVSSSFNGFAHSTPTRSSFSITKTEPLKTSLEKTSCPSFKYIVTDGTVEDATKSNAKPKLRTLKLKLNPTKAQKSMLAEFAGCSRFMYNKAVAARLGVGSTHKSVFRIRDRYVTNKVRGEGKMPNPYFKNRQWLLQCPKSVRQSAIKSALANIKACFSNLKAGNIKQFSAPFRRKKTELERGWVIEMDQKNVSKDGDKLFIFKEILGNMRYFGSKQLHKLMPEENPTHDPKVQKSRFGEYFLVLSVAARDRRAERKPVNPDKVATASIDPGVRKTMVTYSPENEESFMLGQGQASDLVKLLLVHDKLQSRLDTEKTLRSKERMKIKKLMIRIRKTIFYLKKEFRDQTTNFLAARYDVLLVPQLETAKMTISAERELTTKVARQMLTLSHSVLFNRLKEKCEEYGTVFLHVLEHYTSQTCPMCGFLNKCGETYTCKNCQFTCDRDIVGAAGIFLKAVRTENPCL

SEQ ID NO: 1352 - protein, 458 aa, Chlamydomonas sp.
LNGFARSTPARSSFSITKTEPLKTSLEKTSCPSFKYIVADGTVEDATKSNAKPKLRTLKLKLNPTKAQKSMLAEFAGCSRFMYNKAVAARLGVGSTHKSVFRIRDRYVTNKVRAKGKMPNPYFKNRQWLLQCPKSVRQSAIKSALANIKACFSNLKAGNIKQFSAPFRRKKTELERGWVIEMDQKNVSKDGDKLFIFKGILGNMRYFGSKQLHKLMPEENPTHDPKVQKSRFGEYFLVLSVAARDRRAERKPVNPDKVATASIDPGVRKTMVTYSPENEESFMLGQGQASDLVKLLLVHDKLQSRLDTEKTLRSKERMKIKKLMIRIRKTIFYLKKEFRDQTTNFLAARYDVLLVPQLETAKMTISAERELTTKVARQMLTLSHSVLFNRLKEKCEEYGTVFLHVLEHYTSQTCPMCGFLNKCGETYTCKNCQFTCDRDIVGAAGIFLKAVRTENPCS

SEQ ID NO: 1353 - protein, 801 aa, Chlamydomonas sp.
PRMEHVCDVGIKSSVMYKLCKMATKPPTVAKLKELLKLAEVAYSSKDKKDDIVRLCEDNGLIAKPPPEYKTVEKMCVVKCALKKAMSLDDEEFGKFREHVDQLVNVVSRMLRRSSLVLTFHVTRLMEGDLPIPNMYDMKDTYWKDWLRIGVDGVFPDEESRISYEAVKDVIGKVLGSDDPDYINSYPIYFDQVLNYAGHTLSTVVSNNAWVPLVPRLTRLTKATLNALKAPKTIRVYDVMRVIQQEIQEMESWPESVQEYVREVRVRLKVPDGSRLYDDYGKDMDFPTMVRFNYWMQTRLEAIGARRIRLMPIFNVQRAHVRLDMKTLVNLFRHVFPKDPNIVELSKWKDVKDPDRFMLPLKPAVKKKKSCGPGEWEAYKLAQQKYDADVNDIKDTDEYRHAKGRYDTLVNARKTVAGSFFKKPPVKTGWVFDCSICTDGVSLSMQYSKTVQVRVSDLKKTSKRSRDDEGMSVSEQYDHKLKTTLPDMGIVVLGVDPGRSNIATVTYLADDKSKTWKLTRGAFYHKSGIKKKKKQQEKRFSDMIPRWESLRENGAALSTSRTDDISAYLKNYDTFSDEWWRMALLRRESRDNFQRYIGKRKAMDSFWAGIKRNMKLDHPDLRVRVAYGSAITTLKATGPGEVAVPTGSMFASCKRLFKEEVHVTDEFKTTLMSWETGAKKECVYKIPSVQITTEGQIRLGYELLGHTPLKETPNVSYRDQLAVRVYCTRKQIQEKHRRGGLAPSLVDNNSIKRYPEVRGLRFSPETSTYSDRDRSSALTIARLHCMELLGQGRPLPFCRDA

SEQ ID NO: 1354 - protein, 374 aa, Chlamydomonas sp.
TGWVFDCSICTDGVSLSMQYSKTVQVRVSDLKKTSKRSRDDEGMSVSEQYDHKLKTTLPDMGIVVLGVDPGRSNIATVTYLADDKSKTWKLTRGAFYHKSGIKKQKKQQEKRFSDMIPRWESLRENGAALSTSRTDDISAYLKNYDTFSDEWWRMALLRRESRDNFQRYIGKRKAMDSFWAGIKRNMKLDHPDLRVRVAYGSAITTLKATGPGEVAVPTGSMFASCKRLFKEEVHVTDEFKTTLMSWETGAKKKCVYKIPSVQITTEGQIRLGYELLGHTPLKETPNVSYRDQLAVRVYCTRKQIQEKHRRGGLAPSLVDNNSIKRYPEVRGLRFSPETSTYSDRDRSSALTIARLHCMELLGQGRPLPFCRDA

SEQ ID NO: 1355 - protein, 342 aa, Chlamydomonas sp.
GVSVQMKQKGKEEVVEEGENAGYPKDVNIVECKDAVGALRVGVDPGMTDIVTVASSAGRIESFSSARFSEVAGYNTSKRRTYKWNDETQDLVKSIPSPNTSNMSDLQDHVRAYLKALPILLQHRANKGYRSMRFFRYVGKQKTIEKVCDVIAPRAQTTVVGFGNWSNQGYGISRSCSGPIKEIRRCLSRRKNVLFKNVDERNTSCKCHGCFQRLVNMKADSVVWRGVCKESPIDGSITVEKQKMVVKNVKVHKVLHCRDSVKSASSNVRCGATWNRDVNAAKNLLLLLTTWMGGRERPEAFCVPSPPPKTTVSIEASVSAKPTDPPGFVSSLPCYPLGQLKC

SEQ ID NO: 1356 - protein, 693 aa, Chlamydomonas sp.
GACGPARQCGEPHVTAVQSGADFPHHESLRERSGDSRPVQHERYLLEGLAPYRGRRNEESKISYEAVKDSIGDVIGNDDADYIKSYPIYFDQVLNYAGHTLSTVVSNNAWVPLIPRLARLTSTTLNKLNAPKTLDTSKIIRGYDVMQAIQQEVQNMEGWPESVQEYVNEVREMLSVPDGSRVYDNYGKDMDFPTMVRFNYWIQTRLEDMDARRIRLMPIFNVQRVHVRLDLKTLVNLFRHMFPNDQNIVELSKWEHVKNPDSFMLPQRPAQKKKKSCGPGEWEAYKSVLKQYDDDVKDIKATDEYRHAKGLYDTLVNARKTVAGSFFRKPPVKNGWVFDCSICTDGVSLSMQYSKTVQVLVSDLKKTCKNPRKEEGIKIAEKYDGSLKTILPDMGIVVLGVDPGRSNIATVTYLADDKNKTWTLTRGAFYHKSGIKKQTRQKELRFADMIPMWESLRENGAALSTSRTDKISAYLSNYAKFSEEWWRLALRRRKSRDNLQRYIGKRKVKDSFWAGIKRCMMKELPDMKVCVAYGSAITKLKPTGPGEVAVPTGAMFASCKRIFKEDVSVTDEFKTTLMSWETGKEKERVYKIPSVCSADVKLRLGGERFGHTKSKTMPKVVDCDHLGVRLYNKRKGAQEKHRRGGFATSLVDSQNRSSGTQRYEDCDSLQKHAFTRTGIALLLSQSQGCTAWN

SEQ ID NO: 1357 - protein, 208 aa, Chlamydomonas sp.
LRSFEREERAKVLVGFGDWKGLGATPISRRTCGPLQGIRFELRSRENVIMEDIDEFRTSQRCSCCENHLCNMVALTHRKKQDGTAWECTEGRKRIHKILHCKSSQSGAPRQQSGGMLHCGKTWDRDVNASRNILMLTLHQVFGRERPLAFRRDAPRSSSTTPPPPTDTDMGTQTVERFTKEATRNIFENLFNLLHPPTLPKSNDLQSG

SEQ ID NO: 1358 - protein, 199 aa, Chlamydomonas sp.
LRWRRARRYSSVLVIGKVWGRHQSLGGLVAIRFELRSRENVIMEDVDEFRTSQRCSCCETRLCNMVALTHRKKQDGTWECTEGRKRIHKILHCKSSQSGAPRQQSGGRLHCGKTWDRDVNASRNILMLTLHQVFVRERPLAFLGDAPRGSSKNPPTPDTDMGTQTVERFTTEATRNIFENLFNMLHPPTLPKRNDLQSG

SEQ ID NO: 1359 - protein, 273 aa, Chlamydomonas sp.
QHEEVLTSFVGTTGKGVFTCTIDTDGVMACTHFLRAEKKKISIKDDGTAIKKQTKTLRKFSESDPNVVVVANDPGRCNIAFLTWKKNKVEEKDKGGRKRKRHCEFGSKRLTRERYYVESGVFKSRGPTKKWLSNIQDCLDDLKDNSPKRTSLVSFDAYVTVMVNHWDSRWGEMSKSRWGAQRLRLYGGKKRVLARFFNEVQEDVGERKTIVVAYGSAKFAPGGKGELSVPTTSAFKAFSDRFKGRVAVIDEFRTTKIWHKDSTTVLQSVQSEK

SEQ ID NO: 1360 - protein, 275 aa, Chlamydomonas sp.
LFFLVDVEIDLSRFLLLLLLLLLLFLFALAKELHFPKDDMMPIASPTKDANIVECKDAVGALRVGVDPGMTDIVTVASSAGRIKSFSSARFSEVAGYNTSKRRTYKWNDETQDLVKSIPSPNTSNMVDLQDHVRAYLKALQILLQHRANKGYRSMRFFRYVGKQKTIEKVCDVIAPRAQTTVVGFGNWSNQGYGISRSCSGPIKEIRRCLSRRKNVLFKNVDERNTSCKCHGCFQRLVNMKADSVVWRGVCKESPIDGSVRYEGYLLEGLAKDRS

SEQ ID NO: 1361 - protein, 349 aa, Chlamydomonas sp.
RRPVRSLVKKKVSRSQKKYDGSLKTILPDMGIVVLGVDPGRSNIATVTYLADDKNKTWKLTRGAFYHKSGIKKQTRQKELRFADMIPMWESLRENGAALSTSRTDNISAYLSNYAKFSDEWWRLALRRRESRDNLQRYIGKRKVKDSFWAGIKRCMMKELPDMKVCVAYGSAITKLKPTGPGEVAVPTGAMFASCKRIFKEDVSVTDEFKTTLMSWETGKEKERVYKIPSVCSADVKLRLGGERFGHTKSKSMPKVADCDHLGVRLYNKRKGAQEKHRRGGFATSLVDSQKSIERYPEVRGLRFSPETCIYSDRDRSSALTIARLHCMELMGLGRPLPFAHSSSVVVDE

SEQ ID NO: 1362 - protein, 1051 aa, Chlamydomonas sp.
PRMEHVCDVCIKSSVMYKLCKMATKPPTVAKLKELLKLAEVAYSSKDKKDDIVRLCEDNGLIARPPPEYKTVEKMCVVKCALKKAMSLDDEEFGKFRGHVDQLVNVVSRMLRRSSLVLTFHVTRLMEGDLPIPNMYDMKDTYWKDWLRIGVDGVFPDEESRISYEYVKDVIGKVLGSDDPDYINSYPIYFDQVLNYAGHTLSTVVSNNAWVPLVPRLTRLTKATLNALGAPKTIRVYDVMRVIQQEIQEMESWPESVQEYVREVRVRLKVPDGSRLYDDYGKDMDFPNMVRFNYWMQTRLEDMYARRIRLMPIFNVQRVHVRLDLKTLVNLFRHMFPNDQNIVELSKWEHVKNPDSFMLPQRPAQKKKNSCGPGEWEAYKSVLKQYDDDIKDIKATEEYRHAKGLYDTLVNARKTVAGSFFRKPPVKNGWVFDCSICTDGVSLSMQYSKTVQVLVSDLKKTCKKPRKEEGIKIAEKYDGSLKTILPDMGIVVLGVDPGRSNIATVTYLADDKNKTWTLTRGAFYHKSGIKKQTRQKELRFADMIPMWESLRENGAALSTSRTDKISAYLSNYAKFSDEWWRLALRRRESRDNLQRYIGKRKVKDSFWAGIKRCMMKELPDMKVCVAYGSAITKLKPTGPEEVAVPTGAMFASCKRIFKEDVSVTDEFKTTLMSWETGKEKERVYKIPSVCSADVKLRLGGERFGHTKSKTMPKVAGFFFFFFFLFWGGGGGGGGGGGVGGGGWVWFFFLGGGVSLGGVVSFFFFFWGGGGGGGGGGGGLGGWGGGGGGAGGGGGGGVGAGGGGGGGGGVFFFFFFFVVGGGGGGGGGGGGGGGGGGGGGGGGGSFCGGAGGGGGGGGGGGGRGGGGGGGGGGGGGGWGGGGGLGGGGGGGGGGGGGWGGGGGGGGGGGGVWGGGGGGGGGVVGGGGGGGGGGGGWWGGGGGGGGGGGGVCVGCVFVFWLVLCGGGGFFFFWCVFFFFLFFFSLFFFGVGWFFFFLVVVCFFLCFFFFFFFCFFFFFFFFFFFFFLFFFFFFFFFFFFFFFFFFFFWGKVVQ

SEQ ID NO: 1363 - protein, 793 aa, Chlamydomonas sp.
KMATKPPTVAKLKELLKLAEVPYSSKSNKDDLVRLCEDNGLIARPPPEYKKVEKMCVVKCALKKAMSLDDEEFGKFREHVDQLVNVVSRMLRRSSLVLTFHITSLLEKGLDIPDLYNMKDTYWKDWLRIGVDGIFPDEESKISYEAVKDSIGDVIGNDDADYIKSYPIYFDQVLNYAGHTLSTVVSNNAWVSLIPRLARLTSTTLNKLNAPKTLDTSKIIRGYDVMQAIQQEVQNMEGWPKSVQEYVNEVREMLSVPDGSRVYDNYGKDMDFPTMVRFNYWIQTRLEDMDARRIRLMPIFNVQRVHVRLDLKTLVNLFRHMFPNDQNIVELSKWEHVKNSDSFMLPQRPAQKKKKSCGPGEWEAYKSVLKQYDDDVKDIKATDEYRHAKGLYDTLVNARKTVAGSFFRKPPVKNGWVFDCSICTDGVSLSMQYSKTVQVLVSDLKKTCKKPRKEEGIKIAEKYDGSLKTILPDMGIVVLGVDPGRSNIATVTYLADDKNKTWTLTRGAFYHKSGIKKQTRQKELRFADMIPMWESLRENGAALSTSRTDKISAYLSNYAKFSDEWWRLALRRRESRDNLQRYIGKRKVKGSFWAGIKRCMMKELPDMKVCVAYGSAITKLKPTGPGEVAVPTGAMFASCKRIFKEDVSVTDEFKTTLMSWETGKEKERVYKIPSVCSADVKLRLGGERFGHTKSKTMPKVADCDHLGVRLYNKREGAQEKHRRGGFATSLVDSQKSIERYPEVRGLRFSPESCIYSDRDRSSALTIARLHCMELMGLGRPLPFAHSSSVVVDE

SEQ ID NO: 1364 - protein, 355 aa, Chlamydomonas sp.
VPTRSAHSSTSCTPTCSFGHVMSVHRNTVIWWDWSVSSLQLFFVLGVDPGRSNIATVTYLADDKSKTWKLTRGAFYHKSGIKKQKKQQEKRFSDMIPRWESLRENGAALSTSRTDDISAYLKNYATFSDEWWRMALLRRESRDNFQRYIGKRKAMDSFWAGIKRNMKLDHPDLRVRVAYGSAITTLKATGPGEVAVPTGSMFASCKRLFKEEVHVTDEFKTTLMSWETGAKKECVYKIPSVQITTEGQIRLGYELLGHTPLKETPKVSYRDQLAVRVYCTRKQIQEKHRRGGLAPSLVDNNSIKRYPEVRGLRFSPETSTYSDQDRSSALTIARLHCMELLGQGRPLPFCRDACC

SEQ ID NO: 1365 - protein, 473 aa, Chlamydomonas sp.
NCFYCHLKDPNIVELSKWKNVKDPDRFMLPLKPAFKKKKSCGPGEWEAYKLAQQKYDADVKDIEATDEYRHAKGRYGTLVNARKTVAGSFFKKPPVKTGWVFDCSICTDGVSLSMQYSKTVQVRVSDLKKTSKRSRDDEGMSVSEQYDHKLKTTLPDMGIVVLGVDPGRSNIATVTYLADDKSKTWKLTRGAFYHKSGIKKQKKQQEKRFSDMIPRWESLRENGAALSTSRKDDISAYLKNYATFSDEWWRMALRRRESRDNFQRYIGKRKAMDSFWAGIKRNMKLDHSDLRVRVAYGSAITNLKATGPGEVAVPTGSMFASCKRLFKEEVHVTDEFKTTLMSWETGAKKECVHKIPSVQITTEGQIRLGYELLGHTPLKETPKVSYRDQLAVRVYCTRNKIQEKHRRGGLAPSLVDNNSIKRYPEVRGLRFSPETSTYSDRDRSSALTIARLHCMELLGQGRPLPFCRDACC

SEQ ID NO: 1366 - protein, 284 aa, Chlamydomonas sp.
SSSLSVKLTFGTSRRLISSVVSFRIETLRVLNRLVRTPDSTWVPPQSFLPIVLPGGYRNLRFRRYCKKQKLIVEIADFVAPREKSAKVLVEFGDWKGLGATPISRRTCGPLQAIRFELRSRENVIMEDIDEFRTSQRCSCCENHLCNMVALTHRKKQDGTGWECTEGRKRIHKILHCKSSQSGAPRQQCGGMLHCGKTWDRDVNASRNILMLTFHQVFGRERPLAFRRDAPRRSSTTPPPPPDTDMGTQTVERFTKEATRNIFENLFNLLHPPTLPKSNDLQSG

SEQ ID NO: 1367 - protein, 299 aa, Chlamydomonas sp.
HLLQVASSLSARLALAKLLGTIQASVAPTNGMTRLKTSLKSIPSPNTSNMVDLQGPCHSLSQSAPILLQHRANKGYQSMRFFRYVGKQKTIEKVCDVIAPRAQTTVVGFGNWSNQGYGISRSCSGPIKEIRRCLSRRKNVLFKNVDERNTSCKCHGCFQRLVNMKADSVVWRGVCKESPIDGSITVEKQKMVVKNVKVHKVLHCRDSVKSASSNVRCGATWNRDVNAAKNLLLLLTTWMDGRERLEAFCVPSPPPKTTVSIEASVSAKPTDPPGFVSSLPCYPLGQNGRSCFPTDFLFY

SEQ ID NO: 1368 - protein, 358 aa, Chlamydomonas sp.
TVQVRVSDLKKTSKRSRDEEGMSVAEQYDHKLKTTLPDIGIVVPGVDPGRSNIATVTYLADDKSKTWKLTRGAFYHKSGIKKQKRQQEKRFTDMIPMWASLRENGAALSTSRMDDISVYLSNYATFSDEWWRLALRRRESRDNLQRYIGKRKAMDSFWAGIKRNMMMDHPDLRVRVAYGSAITKLKATGPGEVVVPTGSMFASCKRIFKEEVRVTDEFKTTLMSWETGAKKECVYKIPSVSLNAEGQISIGDEWLLCHTLLKKPPKVAERDQSAVRVYCTRKKIQEKHRRGGLATSLFDVNKSIKRYPEVRGLRFSPETSTYSDRDRSSALTIARLHCMELLGLGRPLPFSRCKAACC

SEQ ID NO: 1369 - protein, 261 aa, Chlamydomonas sp.
MYDIAVRKLALSTSRTDKISAYLSNYAKFSDEWWRLALRRRESRDNLQRYIGKRKVKDSFWAGIKRCMMKELPAMKVCVAYGSAITKLKPTGPGEVAVPTGAMFASCKRIFKEDVSVTDEFKTTLMSWEAGKEKERVYKIPSVCSADVKLRLGGERFGHTKSKTMPKVADCDHLGVRLYNKRKGAQEKHRRGGFATSLVDSQKSIERYPEVRGLRFSPETCIYSDRDRSSALTIARLHCMELMGLGRPLPFAHSSSVVVDE

SEQ ID NO: 1370 - protein, 953 aa, Chlamydomonas sp.
KIGQCKGDLVSLVTEFCSRYKDTINAGKIVVSFDECGFSESLKPHYGYSPVGKPVIVKTTGGWVHHSLLMAVFSDGRKEFVVKKGSVKKTDFAAFIDSLSLCNNSVVIMDNASIHKNLVLRSPVNICYTPPYSPEFNAIELCFAKVTTYGTRMEHVCDVCIKSSVMYKLCKMATKPPTVAKLKELLKLAEVAYSSKDKKDDIVRLCEDNGLIARPPPEYKTVEKMCVVKCALKKAMSLDNEEFGKFRGHVDQLVNVVSRMLRRSSLLLTFHVTRLMEGDLPIPNMYDMKDTYWKDWLRIGVDGVFPDEESRISYESVKDVIGKVLGSDGPDYINSYPIYFDQVLNYAGHTLSTVVSNNAWVPLVPRLTRLTKATLNALGAPKTIRVYDVMRVIQQEIQEMESWPESVQEYVREVRVRLKVPDGSRLYDDYGKDMDFPTMVRFNYWMQTRLEAIGARRIRLMPIFNVQRAHVRLDMKTLVNLFRHVFPKDPNIVELSKWKNVKDPDRFMLPLKPAVKKKKSCGPGEWEAYKLAQQKYDTDVNDIKATDEYRHAKGRYDTLVNARKTVAGSFFKKPPVKTGWVFDCSICTDGVSLSMQYSKTVQVRVSDLKKTSKRSRDDEGMSVSEQYDHKLKTTLPDMGIVVLGVDPGRSNIATVTYLADDKSKTWKLTHGAFYYKSGIKKQKKQQEKRFSDMIPRWESLRENGAALSTSRKDDISAYLKNYATFSDEWWRMALRRRESRDNFQRDIGKRKAMDSFWAGIKRNMKLDHPALRVRVAYGSAITTLKATGPGEVAVPTGSMFASCKRLFKEEVHVTDEFKTTLMSWETGAKKECVYKIPSVQITTEGQIRLGYELLGHTQLKETPKVSYRDQLAVRVYCTRKKIQEKHRRGGLAPSLVDNNSIKRYPEVRGLRFSPETSTYSDRDRSSALTIARLHCMELLGQGRPLPFCRDACC

SEQ ID NO: 1371 - protein, 649 aa, Chlamydomonas sp.
SSSLSVDLLREPGQSKVDIRGNVKNQIIADLSILMATMASNHLWTNLERRITTYLKWKYPQIAKRLRSDIVAAVIKCPTKNLDVIFKMSPHTTKLPTKLPTARLRSAKSAVALAKKRVGRKEPEGSPLRVRLTKLQERLEKLSEAWLSSKNLRVDADNAKRFFAREVAFCLRGVLPLPSGNTFASRAHMTLPLYHKILSETIEEKRKTKNEKHRTFSLLPYKSGFTLSHIPISNMAFFYMVNECHFDSCKADVASKNHQGIWERPSNLKKVETVSRKFGYRIVTDGFAVSILMNKHTCLTCSMPADAFSTRAHEYVTTDEGGIVSFLDNVVVAAVDPGVTDIVTVTGLNGGTRSYSSAQYYRKGLIFKSQRQTDVWNLETADIVGGIIPDRDSSSSEQIGAYAGFYMGAAPILLALRVSGGYRNLRFRRYCKKQKLIVEIADFVAPREKSAKVLVGFGDWKGLGATPISRRTCGPLQAIRFELRSRENVIMEDIDEFRTSQRCSCCENHLCNMVALTHRKKQDGTGWECTEGRKRIHKILHCKSSQSGGSRQQSGGMLHCGKTWDRDVNASRNILMLTLHQVFGRERPLAFCRDAPRSSSTTPPPPPDTDMGTQTIERFTKEATRNIFENLFNLLHPPTLPKSNDLQSG

SEQ ID NO: 1372 - protein, 799 aa, Chlamydomonas sp.
HVCDVCIKSSVMYKLCKMATKPPTVAKLKELLKLAEVAYSSKDKKDDIVRLCEDNGLIARPPPECKTVEKMCVVKCALKKAMSLDDEEFGKFRGHVDQLVNVVSRMLRRSSRLLTFHVTRLMEGDLPIPNMYDMKDTYWKDWLRIGVDGVFPDEESRISYESVKDVIGKALGSDDPDYINSYPIYFDQVLNYAGHTLSTVVSNNAWVPLVPRLTRLTKATLNALGAPKTIRVYDVMRVIQQEIHEMESWPESVQDYVREVRVRLKVPDGSRLYDDYGKDMDFPTMVRFNYWMQTRLEAIGARRIRLMPIFNVQRAHVRLDMKTLVNLFRHVFPKDPNIVELSKWKNVKDPDRFMLPLKPAVKKKKSCGPGEWEAYKLAQQKYDTDVNDIKATDEYRHAKGRYDTLVNARKTVAGSFFKKPPIKTGWVFDCSICTDGVSLSMQYSKTVQVRVSDLKKTSKRSRYDEGMSVSEQYDHKLKTTLPDMGIVVLGVDPGRSNIATVTYLADDKSKTWKLTRGAFYHKSGIKKQKKQQEKRFSDMIPRWESLRENGAALSTSRKDDISAYLKNYATFSDEWWRMALRRRESRDNFQRYIGKRKAMDSFWAGIKRNMKLDHPDLRVRVAYGSAITTLKATGPGEVAVPTGSMFASCKRLFKEEVHVTDEFKTTLMSWETGAKKECVYKIPSVQITTEGQIRLGYELLGHTPLKETPKVSYRDQLAVRVYCTRKQIQEKHRRGGLAPSLVDNNSIKRYPEVRGLRFSPETSTYSDRDRSSALTIARLHCMELLGQGRPLPFCRDACC

SEQ ID NO: 1373 - protein, 793 aa, Chlamydomonas sp.
CLYINCSVMYKLCKMATKPPTVAKLKELLKLAEVAYSSKDKKDGIVRLCEDNGLIARPPPEYKTVEKMCVVKCPLKKAMSLDDEEFGKFRGHVDQLVNVVSRMLRRSSLVLTFHVTRLMEGDLPIPNMYDMKDTYWKDWLRIGVDGVFPDEESRISYESVKDVIGKVLGSDDPDYINSYPIYFDQVLNYAGHTLSTVVSNNAWVPLVPRLTKATLNALGAPKTIRVYDVMRVIQQEIQEMESWPESVQEYVREVRVRLKVPDGSRLYDDYGKDMDFPTMVRFNYWMQTRLEAIGARRIRLMPIFNVQRAHVRLDMKTLVNLFRHVFPKDPNILELSKWKNVKDPDRLMLPLKPAFKKKKSCGPGEWEAYKLAQQKYDADVKDIKATDEYRHAKGRYDTLVNARKTVAGSFFKKPPVKTGWVFDCTICTDGVSLSMQYSKTVQVRVSDLKKTSKRSRDDEGMSVSEQYDHKLKTTLPDMGIVVLGVDPGRSNIATVTYLADDKRKTWKLTRGAFYHKSGIKKQKKQEEKRFSDMIPRWESLRENGAALSTSRKDDISAYLKNYATFSDEWWRMALRRSESRDNFQRYIGKRKAMESFWAGIKRNMKLDHPDLRVRVAYGSAITKLKATGPGEVAVPTGSMFASCKRLFKEEVHVTDEFKTTLMSWETGAKKECVYKIPSVQITTEGQIRLGYELLGHTPLKETPKVSYRDQLAVRVYCTRKQIQEKHRRGGLAPSLVDNNSIKRYPEVRGLRFSPETSTYSDRDRSSALTIARLHCMELLGQGRPLPFCRDACC

SEQ ID NO: 1374 - protein, 789 aa, Chlamydomonas sp.
ECSREPVCRSRLHQNVFGVQFVMEHGVVLVHEADQHDDVAELVDYEGDEDEERAPGRAICVVKMKLSTFIPHDWLRKKIDTLVLDMNKLLGEGYIFANFHIARLFENGIAVPPVNRNFFYRCLLAVSTNKCKGSTLGEDFESSRLLFDLLREPGQSKVDIRGNVKNQIIADLSILMATMSSNNLWTNLERRITTYLKWKYPQIAKRLRSDTVAAVIKCPTKNLDVIFKMSPHVANMPTKLPTARLRSAKSAVALAKKRVSRKEPEVSPLRVRLTKLQARFEKLSEAWLSSKNLRVEEDNAKRLFARDVAFCLRGVLPLPSGNTFVSRAHMTLPLYHKILSETIEEKRKTKNEKLRTFSLLPYKSGFTLSHIPISKMAFFYMVNECQFDSCKADVASKNHQGIWERFANLKKVETVSRKFGYRIVTDGFAVSILMNKPTCLTCSMPADSFSTRAHEYVTTDEGGIVSFRDNVVVAAVDPGVTDIVTVTGLDGGTRSYSSAQYYRKGLIFKSQRQTDVWNLETADIVGDIIPGRDSSRSEQIGAYVRFYMGAAPILLAHRASRGYRNLRFRRYCKKRKLIVEIADFVAPREKSAKVLVGFGDWKGLGATPISRRTCVPLQAIRFELRSRGNVIMEDVDEFRTSQRCSCCENRLYNMVALTHRKKQDGTGWECTEGRKRIHKILHCKSSQSGAPRQQSGGRLHCGKTWDRDVNASRNILMLTLHQVFGRERPLAFRRDAPRSSSKTPPPPDTDMGTQTVERFTKEATRNIFENLFNLLHPPTLPKRNDLQSG

SEQ ID NO: 1375 - protein, 354 aa, Chlamydomonas sp.
DRYVTNKVRGKGKMPNPYFKNRQWLLQCPKSVRQSAIKAALANTKACFSNMKAGNIKQFSAPFRRKKTELERGWAIEMDQKNVSKDGDKLFIFKDILGNMRYFGSKQLHKLMPEENPTHDPKVQKSRFGEYFLVLSVASRDRRAERKPVHPDKVATASIDPGVRKTMVTYSPENEDSFMLGQGQASNLVKFLLVHDKLQSRLDTEKTLRSKERMKIKKHMIRIRKRIFYLKKEFRDQTTNVLAARYDVLLVPQLETAKMTISAERELTTKVARQMLTLSHSVLFNRLKEKCAEYGTVFLHVLEHYTSQTCPMCGFLNKCGETYTCKNCQFTCDRDIVGAAGIFLKAVRTENPCS

SEQ ID NO: 1376 - protein, 393 aa, Chlamydomonas sp.
TQSRLRNRCWQSVQPVHVQQGGGSTVGRRKHSQVCLPNSRQVCDEQGEGGGEDAKPVLQESPMVASVPQSVRQSAIKAALANIKACFSNLKAGNIKHFSAPFRRKKAELERGWAIEMDQKNVSKDGDKLFIFKDILGNMRYFGSKQLHKLMPEENPTHDPKVQKSRFGEYFLVLSVAARDRRVERKPVHPDKVATASIDPGVRKTMVTYSPENEESFMLGQGQASDLVKLLLVHDKLQSRLDTEKTLRSKERMKIRMQMIRIRKRIFYLKKEFRDQTTNFLAARYDVLLVPQLETAKMTISAERELTTKVARQMLTLSHSVLFNRLKEKCEEYGTVFLHVLEHYTSQTCPMCGFLSKCGETYTCKNCQFTCDRDIVGAAGIFLKAVRTENPCS

SEQ ID NO: 1377 - protein, 425 aa, Chlamydomonas sp.
KNKKKSPPSVQYPSSQERLHNLYVPISSMTFMKLLSMGDSPLESVSGDGRYENHTMLWRKYFNVQGLETKRSRFDNRILSDGKGVSVQMKQKGKEEVVEEGENAGYPKDANIVECKDAVGALRVGVDPGMTDIVTVASSAGRIESFSSARFSEVAGYNKSKRRTYKWNDETQDLVKSIPSPNTSNMVDLQDHVRAYLKALPILLQHRANKGYRSMRFFRYVGKQKTIEKVCDVIAPRAQTTVVGFGNWSNQGYGISRSCSGPIKEIRRCLSRRKNVLFKNVDERNTSCKCHGCFQRLVNMNADSVVWHGVCKESPIDGSITVEKQKMVVKNVKVHKVLHCRDSVKSASSNVRCGATWNRDVNAAKNLLLLLTTWMDGRERPEAFCVPSPPPKTTVSIEASVSAKPTDPPGFVSSLPCYPLGHLKC

SEQ ID NO: 1378 - protein, 420 aa, Chlamydomonas sp.
VRMAGPLESTDILQFVDSKSYWCIKSYLAIHKYASSRSSLVIVGAEQATYHSSHQPEDTTLLDGANTRTHVNVVVAAVDPSVTDIVTVTGLDGGTRSYSSAQYYRKGLIFKSQRQTDVWNLETADIVGDIIPDKDSSRSEQIGAYARFYMGAAPILLAHRASRGYRNLRFRRYCKKQKLIVEIADFVAPMEKSAKVLVGFGDWKGLGATPISRRTCGPLQAIRFELRSRGNFIMEDVDEFRTSQRCSCCENRLCNMVALTHRKKQDGTGWECTEGRKRIHKILHCKSSQSGARRQQSGGRLHCGKTWDRDVNASRNILMLTLHQVFGRERPLAFRRDAPRSSSRTPPPPNTDTGTQTVERFTKRLLGISSRTSSTCCTPQRCLKATICSLDDYKVCSTLFENYCITEEEENTWKRKTKTR

SEQ ID NO: 1379 - protein, 794 aa, Chlamydomonas sp.
ECSREPVCRSRLHQNVFGVQFVMENGIGESSSLVHEADQHDDVAELVDYEGEEDEECAPGRAICVVKMKLSTFIPHDWLRKKIDTLVLDMNKLLGEGYIFANFHIARLFENGIAVPPVNRNFFYRCLIAVSTNKCKGSTLGEDFESSRLLFDLLREPGQSKVDIRGNVKNQIIADLSILMVTMASNHLWTNLERRITTYLKWKYPKIAKRLRSDIVAAVIKCPTKNLDVIFKMSPHTTKLPTKLPTARLRSAKSAVALAKKRVGRKEPEGSPLRVRLTKIQERLEKLSEAWLSSKNLRVDADNAKRVFARDVAFCLRGVLPLPSGNTFASRAHMTLPLYHKILSETIEEKRKTKNEKHRTFSLLPYKSGFTLSHIPISKMAFFYMVNECHFDSCKADVASKNHQGIWERFAKLKKVETVSRKFGYRIVTDGFAVSILMNKLTCLTCSMPADAFSTRAHEYVTTDEGGIVSFLDNVVVAAVDPGVTDIVTVTGLNGGTRSYSSAQYYRKGLIFKSQRQTDVWNLETADIVGGIIPDRDSSSSEQIGAYARFYMGAAPILLAHRASRGYRNLRFRRYCKKQKLIVEIADFVAPREKSAKVLVGFGDWKGLGATPISRRTCGPLQAIRFELRSRENVIMEDIDEFRTSQRCSCCENHLCNMVALTHRKKQDGTGWECTEGRKRIHKILHCKSSQSGAPRQQSGGMLHCGKTWDRDVNASRNILMLTLHQVFGRERPLAFRRDAPRSSSTTPPPPPDTDMGTQTVERFTKEATRNIFENLFNLLHPPTLPKSNDLQSG

SEQ ID NO: 1380 - protein, 622 aa, Chlamydomonas sp.
VNLIVYKEFACTRYQNAMYGNQRFCKIGKASDALGVSRTVVLRQWSDKGTIRTPGNQRLFDPSSIQGYLIEQEKKPAVVKSFSTHVCPHTNNNPTCSDSNCSCKPIFLTNIPDASKSLKSRTSDQGSTSSAQDFYEYWDSSRQDLYRQLLWLPKTGSQGLVSSSLNGFARSTPTRSSFSIPKTKPLKTSLEKTSCPSFKYIVADGTVEDATKSNAKPKLRTLKLKLNPTKDQKSMLAEFAGCSWFMYNKAVAAWLGVGSTHKSVFRIRDRYVTNKVRGEGKMPNPYFKNRQWLLQCPQSVRQSAIKAALANIKACFSNLKAGNIKQFSAPFRRKKMELERGWAIEMDQKNVSKDGDKLFIFKDILGNMRYFGSKQLHKLMPEENPTHGPKVQKSRFGEYFLVLSVASRDRRAERKPVHPDKVATASIDPGVRKTMVTYSPENEESFMLGQGQASDLVKLLLVHDKLQSRLDTEKTLRSKERMKIKKQMIRIRKIIFYLKKEFRDQTSNFLAARYDVLLVPQLETAKMTISAERELTTKVARQMLTLSHSVLFNRLKEKCEEYGTVFLHVLEHYTSQTCPMCGFLNKCGETYTCKNCQFTCDRDIVGAAGIFLKAVRTENPCS

SEQ ID NO: 1381 - protein, 465 aa, Chlamydomonas sp.
GLFPLPRGKQFNTRAHLTMRLFHHVLTELGEVGRVDPKDKKTKRSHPRLFSILPRKNGFTISYVPISSMTFMKLLSMGDSPLESVSGDGRYENHTMLWRKYFNVQGLETKRSRFDNRILSDGKGVSVQMKQKGKEEVVEEGEHAGYPKDANIVECKDAVGALRVGVDPGMTDIVTVASSAGRIESFSSARFSEVAGYNTSKRRTYKWNDETQDLVKSIPSPNTSNMVDLQDHVRAYLKALPILLQHRANKGYRSMRFFRYVGKQKTIEKVCDVIAPRAQTTVVGFGNWSNQGYGISRSCSGPIKEIRRCLSRRKNVLFKNVDERNTSCKCHGCFQRLVNMKADSVVWRGVCKESPIDGSITVEKQKMVVKNVKVHKVLHCRDSVKSASSNVRCGATWNRDVNAAKNLLLLLTTWMDGRERPEAFCVPSPPPKTTVSIEVSVSAKPTDPPGFVSSLPCYPLGQLKC

SEQ ID NO: 1382 - protein, 251 aa, Anthracocystis panici-leucophaei
EGRSGVRTAQTWFSSDGTVIEFGSKQDCDTLASLHKKADRWKSRRMKKKAVMGRRRAMRGRRARKIGTLMARTTAKESRTLMETKSARRRRMSLASVLAIRKFRLRFRQQRDASCYAKSAVHSRSTTILSKICTGARRHIWPKPAISLSPRMEVRGMIRKSSSKLNRNVKRNLMAWSHGKSLDVLAQQTHDAGKVLLIQPEAYTSKTCGRCGKQNKKLGSSKVFKCPSCSYTADRDHNAARNMTIKAMRQR

SEQ ID NO: 1383 - protein, 326 aa, Anthracocystis panici-leucophaei
YGNGSKHFTVTSDVRFPSGSGTDPQVSLDHTLRFMVWLCQFVHRFVQPMLKATTADEKGEPNGAVNRQQHILANSFRCSLVQRQSHSKWAAKQLPIAADQCHPLYSACSPFQSYTKVHKDHNDFTPTILLNFGHCQLYLPGYDVHIDLRPGEIIFFDTAVHHATQAHPGFHGPDTKRWVVSCFFHYRIRLRRSPPSGLVQAMKRDSNIAGIHQRLLDIIEEEKRAEKEAKSTANDGLSLEMGSARRKERQGKNKGVKQAHLTIGQYKVKSMLMVQREADTLKTCARCGFIHEKLCSNKVCCRCPSCQYHADHDHNGAVNMLIKAIR

SEQ ID NO: 1384 - protein, 214 aa, Apophysomyces ossiformis
LIIARYYMNETANLNWFPLLFNIQVAMDGRSDLREFYMQKKSVRKWKRTQQIYTQKAYSKIASAERRHLKKSGNDKDILIMCTGDAGTAVGSTIHGHARRGGKRLRRQHMQNACVAITDEFRSLQTCPYCFQPVTCHEKKQADKWVTNIGSVTCTNCECPSVKMGYATRGRDTNAAVNIALGGEYAHAKFILSSSSCLLSSKKCQRVRPGYEIV

SEQ ID NO: 1385 - protein, 788 aa, Fucus vesiculosus
PPLIDQSHPGPWMRRKSKTFQQLSRLGSQLNVTTTILIIMVKPSSDGKPKKKKPKRDKPTPPFLQTVRNLYPKQYLMAAGKPPRKYKGSYCAQLFSRVRFGDKVSQNLRSRTVSVGFQAATADDNRETFQAKVNEAVDHLSRERVLASLFSNFVYMERLRDGSALPEPDAKFFRSCLSSCIKSRGGSLNTEFDRFSTLTGLPRLVPPKKLNLDQQRTFEANQMATSTCTRVTHHTERRRISITRWFLRERIPRGNLGYKEYTTKLYSLAKKIITGFDGTPEDKQKLRDMVRGMDTDVEPEAIIEFAENEKKFSDGLGTNKKCASTIAHLNWMFKTYVSEARRKYEQVVSQAQSIFPGEERESREKRKDFMMKELGGKDVCAPPRDATVLPICSAGAVFIHIDMKTLRSWGLLHSNDAWWYKNVLRPFSKEANIKGLRSRENVRYASNEQGYLSSLLQSGPAKCPWFLGESFLTDGVQIKLLLVTLEHTRRAFSGSSELNEEGYSKLPRADAELESLLEEGRGVYNISSLVESGSIRGDLVVMSADPGQAKIINVCSATSETWTKKDPAVILQTSTYVFGDDYRRDTLASRSDEYETFKRKGRPYGVAVDSLAEEKKRTSCLTTFISYYKSWCANVSALMGETLQKGRRLLRFGRHRARQSTLAKIADRYMGHVGDTCRVMLFGKATFSAKKGRASAPRKALIREMASRGVVLMVNEHNTSKKCPGCLEDTVEDKERRVRSCTNFKVGSPEESCRLHPLTPVFEMDRDDVGSTNIGMRGFGHLLGQKWF

SEQ ID NO: 1386 - protein, 239 aa, Scenedesmus sp.
AAPALAGGAAGAVRPPPARRRRLRACLPEPRACILGHERRRAAAWRNGRVHHVLNNAFAYSLLACRAECAWRLRKHGLKQRALHAVIQLTAYGRVFVRGRVRPHARLPADLPAVVLGIGDASLGMGGCISGPGPPRQALLALLRTYYARRRVAAVLMDEHRTSITCSVCGARMEKLRGIYGLLQCPGCTVVAPRDDNAARNICALTLHELLRGGRGTAGGARLAGAFRQAAAAAVDPPA

SEQ ID NO: 1387 - protein, 366 aa, Scenedesmus sp.
IPASITCLLRSPPTTGGREAGRMATSFVSSCTRSTLTGRAALLHTRIGCEKRRTGWDKRAEWAAGIGRAATANLNVYLAHAAARAALLCEGKAVLGSLAARRWSLRTHCLAQHELARVVQQLALGRCTVGGRWSARERDPSWRARQQLLPLPEVVVVGMGNAELSQSFIGRKLSPPVRLLERCVRGWRPAVPDGAPGPRAHFVYVDEYRTSRTCSRCFGLDDVQEVAVRAAGAAGERRTRCGPAARAASRSSATSTARAASRRRPHGRCLSRVCTLTTRGSWTTRSSGSRARGCRCACRLARCATRAQRRCWPASAPGSASGCCHAWRRSLRRQGAGGARRRRQSCVTRARARRRRRRTWRRWPLL

SEQ ID NO: 1388 - protein, 208 aa, Macrobrachium nipponense
VHKKLSKTDSVSFEEYLQLYIENYKIIWDMKTAKSGGGACLVYLLPEKQGHLAKFINRVVGDSTKPLHINYGTAKFAAMGKKHYASPNSATGILSRKKWFWRFLHKLIKEKVVSEIFKSVDEWKTSKVCHMFKELLSTYIRWELLNKKQQITPALGRKWCNCVVYVVALHSNNRLNDGNISQDAPQLKMCPIGGAFLNRDSNAAANID

SEQ ID NO: 1389 - protein, 228 aa, Mortierella sp.
QEPNHSGEGSGAPSSGIQGSSNPSSNEPVQGSQQGTVNQDNGFCSDCSKHHLPDFSRTGLAYPTSCPSNELPFVPVLFVGTAVCNGSRLGGHLKYGGKRVIEQHMCSSPVCMIDEQNTSKVCPFCFQHMRLARATKIVDGQRRSVRVNRAVECVNPSCLSFQLGYTKRARDSNASMNIALNGLLSSPRPTVKSFLLTKETSDQPSPPLMPLASILALKTLSLLQLRSW

SEQ ID NO: 1390 - protein, 273 aa, Mortierella sp.
RQVPLQETRLGRPKGQAKRVPHHRRPASSISRRLATQKKGRDNKVVIAVGLGKFQSKSGMTSRRTSRRLHVLFPKIWKPARFISQSTLIILALHTYASSLGYLVVGVNEFYTSKKWPVCTNFVEQVTIRRLYCRTCRVYLHRDVMAAQNMCSIVQEYLLKWELPEYLQPKSIDGTYLWTIAISEASSSANLDPTTLEQASGTEPSAKDSSKTSVFSSKGIASDGELEEQVEELTIEPKKNSGTHSVTNCYIVIESFCMTDLSVHKGKFPFYLD

SEQ ID NO: 1391 - protein, 219 aa, Mortierella sp.
TFLRNQKLVDKQVLLSDVSPIDGWCVRCQCHHIPTAVESKAFRHLGCCPRTVPEVLPILLIGDAGTCVSSRLRGQTRRGGANMREEHRRYCPVAITSEYRSSKTCVYCYHQVQQARARRIVKDQIRIVNLHEAEECVNPECPSFLVGYTIKSRDQHAAAAIAIIGPRRPYHPISRLSLHSPEPSLTVPPLRTPASRWIEIPTLKIHMLIPWERPSVRGL

SEQ ID NO: 1392 - protein, 664 aa, Haplosporangium sp.
NPMTSITESLEKSGSVFSPFFNASTIQMICRVHDLEFTTSGSILKAFYVIVMFSILSFIFFAALTRTFSDNQIIKGSDQAAMPLILFIGLAGRGVGNRVGDHARRRCKVMRREHRQHCFVAFTDEYNTSQRCLLCSEQIRTVRYWPIQPTQGHEVNQHHQQYTGRTQRHEYQQLIQSWRQPGGQAITLALFIGGEMIAVTSASTSFQQNLFLLSPSPSSSSFKFSSLPFSIPSLFLLCSFFHQRFFILFHTHLSVLFLLDSSIPVSLNPGPVNVMFARPVDPFLVFNSAYSAAELMHKDMFAQEQQPHHQDLQQEQHHASRRKRSLHFEPEFFEALNSSLQDPPATLSRSSRPYKKPKRNATEATSSFAANNTNTFPADLSSTSSASDKLSPATLVELASGQNITKIRSPPPKFSSFLAPKPTDGPSIIDLSSGEELQTLNLGENDHKRRRDNATDSGSSTDTLREVFDVQEDGSLHAVMDHAPSLPSPTKRIKTDKNSKGKDRTLWSLNEQDDGWEHRHSIHYQSNAARRNYYSNMAAKDDARTGSSTDEHAMDQDSWMSTPAYRANTMALVRYKGPKTVTFVDGVDELIRNQLDDHYTPALDNAQGNEMILYRRPARMPLINQTADDDAEESSARIEELDDGYGTDNAIHELEEKIMDMDLD

SEQ ID NO: 1393 - protein, 230 aa, Haplosporangium sp.
KDPSSLSAMQRRVCYLPWSILTSTISFVGQGPNTNVIHDGSYRRVDGLFYEIATLFNFIISFLRSADKDFFDNQILEGSDQAIIPLILFISLSGMSIGSRVGGHARRSGKVMRRHHQQRCLAALTVEYNTSQICLFYFEQIRTVRYRHILSGEVKSVRVNGAKECTNSRCQFVTDGHAVRSRDARLTLCIALAGASTVLNGEPIDPFNRHKALRPTHQQYAGRIQRHEYQ

SEQ ID NO: 1394 - protein, 244 aa, Mortierella sp.
RTPIMINWTCSTTGRICKRHVYDATRAQQEEFAIITDRLLNTVGATVGRKVGMGQFSSTSRLSSLHSTFMDYFVQTVGSRFNGMVSSYGRAMHHVNKVRSVGYIVLGANEYYISKRCPVCESFVCQVTLGRIFCEERGATMHRDVMAGHNMANVVRSYLLDQKRPRYLQPMDKDNNWKIVPPFFSRERVTASKGDPQCVVEACLSLRKDHDRASFSHQSFPTFTFTFPFLSSCPSFSHSSTIAE

SEQ ID NO: 1395 - protein, 218 aa, Mortierella hygrophila
SRLYTIASSTHLSTSSGVPFVDPGSGLCQCGSYHSPEWSSSGLQYPVVCPLSKNRVLPIFFVGTEGVGTNSRIKGSLKYGGKRLIEQHQQHCPVLMTGEHRTSKVCPFCFCLTRLARTHRWVNGEFKSLKVNGLVECTNPSCISFMSGYTKRGRDTNAATNIGILGLTRVLTGNTLPPFTRTMRPAVAPPSTTSRVSAGSFHSVDLNGRPRSSVRIQV

SEQ ID NO: 1396 - protein, 899 aa, Aphidius ervi
KKKKNFSAAVGSGGKRQRTGNNTNTTSTTSTTTSTTTTTTARRSLFKVPERRSLNDSSSNMSLNNSTASNSSRSRSQSPSLSTVSASSRTSSQASICCNNYGTDHTNRASKRCLNHRLPIKERAMKKLNQNNEKPTNYETHTIKMGFKSICPDENIRQEIYNDVELMSECIIDFSIFFEFTIRHDKQWMVQYLENHDKEPNLCLIAMHLKNNYSKKNRDIVELLDEYNTLYPCSNKHQYQFEHHSALIKNQVNLFQVNFKTNIVEHIRSRVNKYYCKVYNRDYSKINKLLDDLFLRNIHLKNDELFNNEQFKNLDFKKLYDTGDKWWKFISFHLKLQLHVDFVLSPINKLGLHSISFTTDAVHQLFRRKKFINNEKTLVNASYSIATNGPDDNYNEYEYENLWKKFIQIPSKYKFAYYITTDGISASIQCFKKMNEKKLNFNIEEKNYQDIVNLKISDVERELLIKKLNELYERFDGLDPGLRELFSGIIIQDFKYFFDKDKQERFKIKSNTYHRISHFYEREEKRKKWTQIYEETYKSLLKENNDLLKKRDPEKIFKLNDIKNYIAITKYRLGLFVQGQIFLKARKIARLKWDKYINTQKTNDMIVNKLLFGEFVGDKQKLTIENNKKKKLDNKKLKRQRNQVKFKKKYDEKKLKRKKKLEEKIKLKTPEQQQQQQHHNNNNNNKLNGKKKRSILRDKNNTNIEFHDAALRQAMKDEEAERIKKKIEKLKARRKKKLDKRPKRIKKNKKKADNTTTDAAIADVIAGAIADAAAAVDDAVVDNIPDENGGGGANDNIKIKKKKKKSIKIITDKFNNNKRILIALGDTKISKWMKGYRRVSFKGIIRALYCRARLSKSKIDIIDTDEFNTTKLCSACNSVCLKSKSPDRLVIYLFINFIF

SEQ ID NO: 1397 - protein, 1278 aa, Aphidius ervi
KMAEPKGLPNLGNTCYMSSAVQALYATSKFCDQIKKDDSTMFKLLKDIFLNMSQKKDAFFMKMSLEALRANMKYELGRQHDSSEFLLTLFIEYSSKAYSKRIIHDTFYGKFHYIKKCIKCDSKLHSFSQEEEFSMINLFVPENLDDITVKSLIGLDLEPEKLKNTTKCKNCGNTCDSYNRHKNFTNLPPYLILNLNYFKCKGSVIEKIKNKTKVDKEITIPIKEKKSSTAINQKYKLYAMIIHVGYTVDSGHYYTYRKDNETNCWYKCNDENVTKIVDFQEIENFNSEEQIPYVLFYEKINNNNNSDEFNLKSHKKSNSFVEKKINSLNNQKLIKKDPPIKKVVKKDNSHIIKNKTKITHIKNKKLSKNIQNFLKINNNNNNNNNNDDDDNNDDDDDDNNDDDDSSITQKLITRSRQVNRLPSNHSNRERSLSVQSIDRMSVASEASSTQTIRMEIENLNIVSERKRAGNDTDIFLAPAPKKSKSSNHKEINTNNDNNNNNHHNQSLIKKNLDKNKKFKYSSIKMGFRKFCGIQDIPHGTQMETLDNDDKTRMEVYNLVKTIIHELSPYVVECSFFLDFCLSHKDEWLINYLASMNKTPNLLFVTNLLRDSSFKNRGLIITQKTTPEQKEKILIKKQQIDKMRSLYEEYIQCKPDKKKTNYNTQNRSKIIEDTTERLCTNLAVGIYENAYSRIKNYFVKYLGISNDLYQIMNDLFCNNIHPVIENDNLFSECKDLDFTKLKTNWYKFLPFFYKLQKLVANFTLAPIYKCGAQHFTFTPSIIFQLAHTYFPSLVETTFQKEVKNDPENVKKMWTKLFGIPPKFLKNFAGSMSTDGIDVSLHQLKEIDESKKMKEEMSNKQLLDLNNVTKDNLSKVTKWSTYDPGLKKTIAGISVKSFDDFNNKNKENQFVLKGKKLRHLTGQFSRRIKYEKIMQTVKEYNQIILSDKFKDLNLKNPTNYQQNTQYHLNYMNASQSISMKNSIQRLKFDAKIKKKSVIDQLADNICYDTGPISFNRTHKKTKNCNNDNNDDDDDDDDGKKKEIKTQRNEGKKKQRDSYKKKIKIRKAKLEEIKKEKKKIAIEKAMKKKGILQNKKEKTDDKIDDKIDDKIDEKRKKYEKDRAKRRMRKREKIKSRIRKMSGQENIVKTVTDASAPYNPGNKTGLTVVFFGDVKMPPHVKGHVKTPLTEIKNTVKQRENVIVLEVDEYCTTKNCSVCNEILSAPRWWSGHRYRYCINCGITWDRDINASRNLFAKGAIDNNLKDENFMKNYDNFLRKKKKT

SEQ ID NO: 1398 - protein, 1716 aa, Aphidius ervi
VLIKNIYKMVMRVGLDNLGLNCYINSIIQVLHAIEDFRNDLINNKEHNSSIIKELCELFKELSLSFSFMAKSPENFIKSLKKSSITKHFDYTRQEDCSEFLFKLFELCNDDENSCEIIKKYFVGEIKRLPKCTNCNKTKIIIEKFNNLQLCFSSNENTIQDMFNNCFVPETLENVKCDSCKVKCNKTETKELTQTPLHLILLLKRFDFKNGQPVKKHDYVKLNENITVKNESYELHSVIIHKGEDIESGHYYTYNKDISENKWYKYDDDEKVENVKFNVIENLKSPDTPYMVLYKKKDNNNNNNNLNKKNEQLKISPIKVTNKLDIHNNTVTKKPKIISNVILNKKKIANKIDLNLNNDDKSIGKCKTWVSSSIIPIGLANFNNTCYINSIIHPLMNTDKFYNKIMNTNYKEFDPLKRIFQLLINKESSKSSFKRLILKLKTEAFVEGTQQDTSEFLLTIFNNYSENKNCEKIINDLFYGKYIEQRRCTNKNCKDFRSKESFFINNLNIQTNTTVRKLMSKNYKNEDQNCVKCGQNNSCTIKKVNTILPPYMIFNLNYFVYDKKSNTFKLINNVTLEIDEEIKLPIKKASKSEIDEEIKLPNKKASKSEIDEEIKLPNKKARESVGGQIYIIYAIIIHDGNTLNSGHYYTYCKDKNTNIWYRFNDNIVTPIKFEDIKTFHLNDNKKPYLLFYKKSNISSTIPSPPPQSAQHNPSVEDIVDNLSDLFSNFSTLSKDTNKSKNSIQSSSIIMKDIDNLSEKLSKCSTSSEEIKNQLKRKNNNHIGIIDKKKFKPYKQNLKRKINNKTLCIVEKKQKINKLESTQTSIFHKNQIISDDDNDDDDENDEKNQSNNIKNTNDLPDNNKISNNKLKGVCNDCHRIGHASKKNKLCEFSDEKQKLKCGDCQKNGHSNKRSTWCRYNSSCKKKVIAKNSINDSKIIKRRNPSKTLKEKERHSTVQIGLKTAIGINTFNFNKMEKKDYDEKLELYNIIIGDVRRLSKLARDASILYEYCINHPNKWLLNYIANSDKEPRVNDIFNRLRENVTVKKDIDENIIRLLADYENDRPKNVKIPMLHNTDGCSRPYEEMMTQFETNLKVNLNEHGPERVTKYFYSLKIKTKDGKEENKYTKDEIKKLLDDLFIYNEHPKEELFKGFEDLDFSLFYRKTKWWKFLPFFHKLQGILKNFILIPTFQCNLKHIRYSNTGLKQLASRLYNLKEREVAKTYNNNNIKELWKKMFPHIPHFENFDCTMTTNAVYACFKYIKKQKINDDDDDDDDDDDDYDYYYDDKKDEYIVKPKKINNIKEKAKDCEQVVTADPGFINPLAGIITRGKDCIKNFGDKEHGKPYCLKLSTYRRKTGTFKRQKKLKKITDKVDKAVNELLLKDRYKNLNTKDPNNYIQTMQWRTECTDIMSPVYTQLRVAKLSWDKIMMTRSVIDTTVNKMGWNIGKKNKKLIKNQKKQIEKKIKLLETDTSKKNDDENNDKNKKKLTNHEQKKKNKKNKLKEESDKRQNKLTDRQKYQRDRQRRKEQAKKVIRKKEKKEKLVQKYKNILSNINDHFEKKKIQFKNEPDKEKKKKIFNGNFRFYHKRKKLNGKTLFLMGSTKMSNRIRGHVFAPLNIFAKTLKKHKNIIFFNVNEYMTTQNCANCNEKCHVSTRGDRYLYCPNCHITWNRDINGGLNIGNVAFIHLLLKNENSMKNYNNFKRSYNNKKNNKTIDKIK

SEQ ID NO: 1399 - protein, 1006 aa, Aphidius ervi
CVLMIFLIKFLIKIFRSSSLQKTKRSTRSSKQNERRPPNLSLIVDPDTDDDDDVNMVVTPTPSTSTSINKNKQQLKNNDGSSIIQRLSQELARTAVLENNNNMDIDDDLIVERQRREMTQVFGSQKSMEDEQVIKSQEWVVKSFSPPSTSENNNKKRLNMSPIPELINKKIQKMAPSSPPPPTPPPPPPPPPSFKTPTVPQTPIKQQKQKKQRNTQTAQSRTPSPSPSSTSTSTSRSTSSINSGKTSTSTKRRQRSAGDKKFANEPDKKMYTIQMGLRTLLKITKDTKLTDQNNKIYTQIQSDVDRVAKWKIGGSYFLEFCINHHKGWLVNHIYSNGAKKIIPQIFNILKVPRLKGKQPIYDVNLIELYDEYCSIITSLNETDNLNYPLRFNVDGLSKLCDDQIETYLTCFETNINTHKYKRLFKYIKKELGISGSEAYKILSDLFERNIRPEKIKLFDDFKDLNFKLFNNNSNWYKFLPFFIELQKLTTNFIVVPINHFGWHHVRYSTSALTRFVGQLSDVKLSEECKTLSDEALWKKIFNIDPESSLGKRFGLSLTTDGASVSIQCRKDVVNKNNNLDNNIQKDVPKITILSQHSLDDLKNYNITHFSSVDQGQRCVVSGIHFENISDLKNKCKQKRFAIKNSTWLYKSGFFRNEKKRKRITSTADEKVEKIVQLVEFKNIINLKNPINYLLNLKFRLLCFAIQQPVYGTLKMTLLKWNISIRKRTYLDDLAYFIATGQRKKKYLKKKIIDEKKKTKNIKAKELKKLRKQNYLKNHPSDKDKQTKHQLKLARKLDSQVKLAEKNQLKMTKKQLKQRKRNRKREKRLKKATKNLEKQRKLELKLSFEKQQLNYHQEKEKKRKEYNKNKNNNNNNNNNNNNSTNNNTKVREYSCCFIGDPNPHLRPKGYQRPPLCKLEKTILTFDNVILVRVDEYKTTQNCSKCHNQLIVSTHGHRYAYCRTCGITWHRDINAGISVGKIGTTYAGMNPDDDIANYSNFERSTKTR

SEQ ID NO: 1400 - protein, 1070 aa, Aphidius ervi
YYCLLFYRSAPLTVLGNLSPESTTESFKQDMFSDDDNDLLGTINLPSTSSAPQVNERKRPILSSPSSSSSSSSSSVIQKTKKKCLEISSSSSSTSTSSSVKETSKKKCLPLSSLSSSSSHNNDLESLSQSQSYRSTTDTSDNSTVCDDDDEQTTLRDSSDADTNNDNNLDVDNVDDNENNENNMDLEDAPDRENLDVDNVDDNTNNDNNMDYYLEDAPDTVQLSQLSIASWISEASSPETFDKKLIEKQQQNLQALENNTPTSPQLPPTIATPSPPPQQPTIATPPPPPQQPTTQTFKRPSTSTVRSRSPSLSSSCASSYRTNMSAGTKKFQSIDKKNLEEYTVQFSLKKFCGIDSQTYDNDNKLKIYNKIINDVRIISEWAKESSIFFEFAINHPNSWLVNWISSKDEFHHIYIIFNILRSDWKPKKATKDSEEFKELNKLFDEYKKERPQNIQLGPTYNTSNLSSLVEGQCVTYFTNFKNNLLNHFYKRLRKLLKNQKTQFFNEKGKEISIYKVLKNLFTKDILPDVDIFKRDEFKNLKFSKFQQNWWKFLKFYLELQKQMKSFVLIPVLKCGLRHVKYSTTALQQFALTLEKETEKETEKETGKKTKQKTTQHTIKSRTHESLWKQYFTIKNDSRLDRDFYLSMTTDGVSVSLICMRKKKLINNPISIDKNIDNYNRLFFGDIGLRLLFGGVILNSINQLGNKELEQRYTYKSKTHRYRSGEFKRQEKRKKITAEVDKYVENLLLKDEFKNINTKDPTNYKNIMKFRVLCFDKLHPVYSQLRVMRIKWDKKIKVKKSIDNMANFIGYGVNPKNRKKKKKETSNEENKKKVKFKNKVNSTRSKEKRVRKHELQVNKARENKKSKTDDEKERAKASRLKEQARRKQLRLAISKRLTEKKKEQLKKQLEKKSVKKLRRINVDQHKTLVIVGNVNVAKHMSGYVHAPTSKFIKKVEKLKNVKVLYVDEYNTTKLCSECSTNLIVGKYGQRYCYCPKCHTTWNRDVNAGRNIGKLGLIRENFVDENYFQNEKGWNFKKFSRKKYTDDDDEEEDEDDDDYDDSEEEEEEQQQL

SEQ ID NO: 1401 - protein, 877 aa, Aphidius ervi
LCFFCVFSSDQQSSIDIQKKKINTCSNQKRLCKACGRKSHGTKFSQKCIKNVDNIPLAKRLEKTKLTQANKIDKIKNSKSKEAKAIRQFNYQKKKRVGKLKSGQEKYSTIKSIKMGLNRIIKNQEVKKIIIDDIKVLSKLFIEFSYFVSFCFNHEKNEAINDIEKLTNKKQFHLSKYLNKLTYFKRQKAKKEEDFIDKLFKEYQIIRNEVGMPIEGYCGDLRTNLISMNLINFETNFMNNIIVNCRVRIGKYLKIVGKIYNRRKRKKMLDNLFYKNIKPKDKDNKIMDIFNDLNLNFTEIKYKWWKFMGFFKKLSNIDLMNFPLTPIYKPGLKHFMYSTSSVWQLAIKVFGNKNQKLVRDWSQQKKMFNNNYYHMQKFIWKQCFKIKKKLIKKKFNFTISTNGVTVTIHLMKEIINNNDNDNNLSKKKLKTTVGAAAVTSSTTTTSSTDENISSDEEDYDDINVLYNYTDIDENDDDNNNNINNNNNIIDDNDDNSNRISDKEYDRGIGLDPGNKNILGGVIVQSLNDIGNKDKEERYLLTSKALLHKSGHYTRQFVIKKLIKNVEEEKKQVYNQFVEIKKQEFENIVGEIEAEYIQKRKTKKERKQLKQQKIENNTKHDDDDDDGKTRNWKKCKQLLKNKKNNNVVPSESAEPTAPIEPAPPIEPLEPSKLKKNSRQMIRKKTLLENFVINKPDNYVLSAKYHLTCMKLEEPVYSSRRYVRLQFDKYIRTNEAVSKEVNYLEHGTYDGKKTSQLEKKTLICGGQFQISKYMRGYPSAPSSLLKKKLQENKKIKLIIVDEFRTTILCNKCNNPCVTSKSPHRYQYCSHCKITFNRDINGGSNIFRLGVYRTDKTHKYLVSKPLNFTRSVQVAVAAVV

SEQ ID NO: 1402 - protein, 236 aa, Aphidius ervi
KEQEKEQEQEKEKEQENCNKKSTDNPSSNDKLKNKIFVRKKNSLELFILNKSDNYILATKYRLEMLRVSIPIYTDRRYVRLNDFDKYIRTNRAVDQQVNFILYCTYSGKKCNTSNDGRKTLFAAGQFIMNGCTKGYTSSPLSLLKKKIDYPPMIVVINTDEFRTTMLCSVCSGKVITSKSPHRYQYCPNCKITFNRDINGAKNILQKTIVKLDPKRKYLIKNIDNFSRSTLRENIK

SEQ ID NO: 1403 - protein, 901 aa, Aphidius ervi
LIFSTTSVEWLEKNQDWLEKDETAVKDIIKLDPGYVEQIQREKQELQEKQQQEEKQQQQQQQQQQQQQQEKQQQQEKQQQQQSKFRKPKKPEKNINIPPPSSSPPPLSVSSVSTKKSRSTVKSKSTTKSKPKTPSVCSSKKTSSSRQTSAGAKKFAGQKNRRQQTIQMGLRTLLNITKETKNDDLHKIVYDKIISEVRVMSKWRIASSMFFEFCFNHEDNWLLNDIMERKKSIDDVFNIMRKDCTKAKHPDRLKKLHQEWCSLIKENKLNIETKFDTKGLFRLTDDAIQVFKTCFKTNITYHGYKRIFKHVKKTLNKSPTQTYNILHDLFNKNIKPANIPIFKDFNHLDFTEMKDDKNWYKFLSFFRSLQRTTLDFAVVPIHKFGWLHIRYSTSALKEFVKNLNLDPKIYEEIINCNSAELWEKLFNIKQHTSLGKNFYETLTTNGAEVSILCLKPKTPVSTLISKNEINIDKVINDDDDVVKLPKIQILSKHKLNDIKKQKPKKYASFDPGFRCPLAGIFFNNLDDLDDKDKQRRYCLKHSTYLYKTGFYKSEKIRKKLTRDADKKIEDLMKSSEFKDINLKNSLDYKKILKFRLLSYDAMQPVYGDLKLTKIRWHRKIQNRRALDRLVNFITTGQGPKSRLKKPIKVDKKKEKNKKNNNNNNNKNNTKVDKDNKSKNQLNKEKKLYRQQEKAKENRNKLTDRQKKRRAKNRKRELLKKKSKKIERNERNDEKKLLFEKKQKKYQINKAKKRALYERSQNPNNNNNNNDDADDADDGGDDGGDDDNDGLMIIFIGQTDMSPLPFGYRKPPLKKIEKKILAHENVVLIRVDEYMTTQNCSKCKQQAIVSTHGHRYTYCPKCNITWHRDINSACGIAKIGAAFSGLNENDSIDNYSTYVRKG

SEQ ID NO: 1404 - protein, 1209 aa, Aphidius ervi
INVNNLLIFYFFFFYKKFKRSNDYVQPTHAQQLLPSSTSSSSRRLSTQPIQQSLSIQNRPTVPSTRSRRSGERYIIIFYSINFKNINRYDYLVIFYFFINFNRSNDCAQPLHAQQLLPSSSSSFSRRVLTQPIQQSLSIQNQPVVPSTRRTRISHERYFIIFYSIEFKNINRHDYLLIFNFYINFNRSSDYVQPTPAQQLLPSSSSSSSSRRLSTQQSRHTHEQQPRQLYERTPAQPTRQLANFIASSSNRDVDELSDKLSEKLSTTSSSKKSSEKTSTSSSSTISFVPRRIIPTPMTPSQFSDKNNDKTNSDIDSQTIKSTGSFNNKKLVGKRQCHDCSKYSHGTKNSKKCSMNKENINENIKNDERLIRKMNRPYQAERRKNKMMLKNQDKIDKPSSNGNNNNQVNNDKKRVINRPIKRAVRHNIDENNETPADQEQKKPAVKRKINDGEKTTAVKRKFDNSNDFSTWSIKMGLNQICKNPIIKNQIIDDVDELSKMFIDFSYFFYFGLQHKDNQLIDEISKLNNKQLCLNKYLSVLTVLENRKKKKKEKSCIDDLFEEYMKLRESAGVEIPLYNVSYRSQVVQLNLRQFSTNFVTNITRNARPRVGKYLKMEKKIYNRKKRKRILDDLFYRNIKPKEPNDDTKIMELFDNDLDFTKIKFKWFLFLNFFKQLSNVEGMNFPLSPIMKPGLKHILYDTQSLWQMGRKLFPDQFETIWSQQMSIPYAYQKIWNFFFKIKKKYKKKHFNCTITTNGITVTLHLQRQIVKKKITKKKLKTTNKVGGNTSIDGKSKVNDDDNDEDADDFDDLNLFNYNDFDDDDDDDDGHNNKKNNIHNVNDQIYGRKGGLDAGKKLSYAAVFVDKLEDIGVKGKVQHYRLPSKVLLAKCGHYTHMNIRKNLTKDIEIQKRKIYDKYLKIKEDIYAEFIKGKKIQVTEYVEKKKSKKEKNKLKQMTEPMITDDDKERNYKKWREQKKLEKLAKSGGGGDDEKSEIIIEQPNIAPSVTTKKKMVKKKCPLELFVLNKSENYESATKYRLEIFGLSQKIYASRRYVRLHDFDKYIRTHRATAREVNFLERGTYCGKKINALKDGKRTFLGAGQFIMSNATRGYTSSPLSLLKKKIDNNSMIDVVYVDEFRTTLLCNRCNNLCITSTSPHRYQYCRFCKITYNRDINASANMLNKAISNTDDSKNYLIKQPNNFKRSTKREDILQ

SEQ ID NO: 1405 - protein, 348 aa, Aphidius ervi
DFRRYYSGVFSGFLRILLDFLRIFLEKIIFLFFVCKLLFLVFLLIFLSFCVCFFKRKFRKKSRDIMEIVWRLLCKYLRKSQLRRKSGENPEKSRENPERLFLPGKKKTKNIKASELKKLKKQNYLENHPSDKDKKTQHQLKLARKLDNQKKLAEENKLTMTKKQKKQRERNRIREKRLKKAPKILEKQHKLELKLSFEKQQINYHKEKENKKKEYNKNKNKNNNNDNNDKDKKYSCCFIGDANPQLRPKRYKRPPLCKLEKKLHELENVIVVRVDEYKAIQNCSVCHSQLIVSTHRHRYAYCPMCGITWHRDINAGINIGKIGTAYVDMNPDDDIANYINFKSLTKTR

SEQ ID NO: 1406 - protein, 220 aa, Aphidius ervi
EKYKKQSVKERSKKKNYSAKASDANVVAASKVVELVSTINAIGNYNNNNNNDNIILLNHIIKTRAKLRKARKLAKQLRVASRNKETKSKSTLKREKIAREKQQAKRKEQREKEKKIIEEKKLTQMSSYEKKKWPRKLRRLNVDGKKIIYCVGRPDYPQWIKAYKRPRLKIFDRKIRSRPGVFTIDVDEYNTTKLCSKCNEALVVSQHGHRYCWCPQCNIT

SEQ ID NO: 1407 - protein, 932 aa, Aphidius ervi
SNYFCYFSLNKRTLVDDTNDTATPSKLPKIHYNDNNNTTRLCRDCGKRSHGTKYSKKCQKNIFHTRHVEMNKPPDIKQRELELKKEKKNKQIIKSKEAKALKRQKQIPSQLDNDRNNNKEFRIHTKKMGFNKICKNTLVKNAIIDDINVLSKLFIDFSYFMSFSLSHNNNIMIDKISSMKNGSTLHFYKFINRLVYFKRKKKKTPTEDEWIDNLFAEYQLYRKIDTLYDGNLRTNLISQNIQTYETNFINNIIVNARPRVGKYLKLEHQVYNRKTRKAMLDQLFYKNIKPKKNNKVIEIFDDDNLDFREIKSKWWLFLKFFKQLANTEGMNFPISPIWKPGLKHFLYSTSCVWQLTNKLFKNDKHIQSDWGCQKKIFDNTEKIDLVYKILWKKCFRIKYKYNRKIFNYTISTNGIDVSIHYKYSINTIDNTPSNKKRKTTTAKATAKAKATAARTNTTTAKATAARPNTPTAKATATTAKTTTAKATATRTNTTTAKATAARPNTIAKATATTAKTTTVTATNSLQHNNPSLDDTNDWDDIDYIFKYTDHDDEDDTNADNNNHVANNNHNHNINNNNNNDKTISDDEYDRYVTLDPGRKLALGGVILKSLADLNNKNLEERYRLSSKSLLNKCGYYTRQRIMTKKTKKIEIEKKKLYDKYVNKFQDQFNNFIETKKNEYRKKKSQVNLNNKAKVNKTNDNKIRNWKLVKEKKKQKKNKDSDDRQVDIINEGKKKIDKINKDLKPFVLNRPDNFILSTQFRSESLELSYPIYSNRHYCRLSFDKYIRTNRAIDREVNYLQNGTYNGRKEDELNKKTLVCAGEFKMSGCTKGYRSSPLSLLKKKLLQRPKIVVIIVDEFRTTILCSLCNNLCTTSKSPHRYQHCRFCNVIFNRDINGSRNIFIQGVLRFDGDKIYLSKIPSNFNRATLHENLKK

SEQ ID NO: 1408 - protein, 899 aa, Aphidius ervi
KKKNNFSAAVGSGGKRQRTGNNTNTTSTTSSTTTTTSTTTARRSLFKVPERRSLNDSSSNMSLNNSTASNSSRSRSQSPSLSTVSASSRTSSQASICCNNYGTDHTNRASKRCLNHRLPIKERAMKKLNQNKEKPTNYETHTIKMGFKSICPDENIRQEIYNDVELMSEYIIDFSIFFEFTIRHDKQWMVQYLENHDKEPNLCLIAMHLKNNYSKKNKGIVELLDEYNKLYPCSNKHQYQFEHHSALIKNQVNLFQVNFKTNIVEHIRSRVNKYYCKVYNRDYSKINKLLDDLFLRNIHPKNDELFNNEQFKNLDFKKLYDTGDKWWKFISFHLKLQLHVDFVLSPINKLGLHSISFTTDAVHQLFRRKKFINNQKTLVNASYSIATNGPDDNYNEYEYENLWKKFIQIPSKYKFAYYITTDGISASIQCFKKIDEKKLNFNIEEKNYQDIVNLKISDVERELLIKELNKLYKRFDGLDPGLRELFGGIIIQDFKDFFDKDKQERFKIKSNTYHKISHFYEREEKRKKWTQIYEEIYKSLLKENNDLLKKDDPEKIFKLNDIKNYIAITKYRLGLFVQGQIFLKARKIARLKWDKYINTQKTNDMIVNKLLFGEFVGDKQKLTIENNKKKKLDNKKLKRQRNQVKFKKKYDEKKLKRKKKLEEKIKLKIPEQQQQQQHNNNNNKLNGKKKRSILRDKNNTNIEFHDAALRQAMKDEEAERIKKKIEKLKARRKKKLDKRPKRIKKNKKKADNTTTDTAAAIADVIAGAIADAAVDDAVVDNIPDENGGGGDNDNVEIKKNKKKSIKIITDKFNNNKRILIALGDTKISKWMKGYRRVSFKGIIRALYCRAHLSKSKIDIVDTDEFNTTKLCSACNSVCLKSKSPDRLVIYLFINFILIN

SEQ ID NO: 1409 - protein, 499 aa, Linnemannia zychae
MEKLGFDSTLLPKVEQEDKDTSDDDDTTPDDDGTTPDDEADDEDVKKKSKKIDFSPQHIQSRWGYPMKLPAANRPRFCIQSKMTDSFIDIREETLFRILWRKKSDTIWGGSTHNFDWAKRQVNISFGNVIKMLFIGDPDTVRLATKHQTTYGKRTTTIDERATAHSTMYGQEPLARYQIDRINYYRAKYNASIPARSSSSSASTTLPPPPNPPPLPAPPGPRLFRYALNNYIRTDGHQLQLLAYDLTKNRQALGHKVFLRCIEKQYTTRQSIIDTFGQNSSSVVVVGIDPGEVVSGAFCMRPNDNTVVNLLVKRASLYQPTLAFRGWEQEWRRQHPMAGPADNVDASLWTRKRDDKNRTTFLPSIHDLENAMPSTNYDSLDALISAQQQYFELEPIIHGFYSSSDWKRAVHQHRMAKLAEMDMAVAGVLRLVDEALKNTPMADRRVLFALGNATFRTGFNLASVHTTFLRRLQQKVMMRKIVGERTRTGGHTDWFHAPF

SEQ ID NO: 1410 - protein, 299 aa, Mortierella antarctica
TVRHKKNRETSRVPFETRRKRKCTNGIKGSGHEGASSQDCSDYAGNRSSPCKAPRGSKNLKIIRNLHRPPQGPAPSADPDQTRMVKACCIRVSSHPAICFGEKPGTKSRAGAGAGAGTGHGTPSQPTRKHDPKARSQFFYGAAGTGVGSRIRGQALRGGKVRQQYMQHAVVALTNEWRTSQTCATCFSQLGLARSRRIVRRKVQRMRVPGAAHCTKQALPSAEESLDHSATGYQCRSMHWQLRSVPTPLPPAAPPVHEGYASTTHVHQRHHPGNTTHAFNILDAMEAPVGPPTSDVALS

SEQ ID NO: 1411 - protein, 646 aa, Gryganskiella cystojenkinii
IKKLGITGLPELIDPYEKKETTGGRMATGEAGHGATSREEQPQGQYQRDEEEVQEIDEEEELRKTKFGPDYIQMLWTYHQAIPEHHRPAFFPMVGFKDTFIRFEERALVDILWGYHQRDSSHCAPVEVSVRKLFETVMDAHAAAKQDPGFVLFELFYGDRELIAKSETFRLTNYGKSTCTMSHFGEYRRSTEAMTTFVNGAKMFWKELNTCIESGASVTSSMPRFRPNLDRWTRYILSNYVLFNGLEVHFLAYDSRRPVRRNIFVRDLTHISPTESKQFVNNFTGVDPGERVTASFCLLSPNPDPEVPKQGCDSIHKVQGKLKESKPLAVKGQSGRGSSSLVSANTPESGATGDTSQIPDKTVINLSITRKALFQQSFKYRQELEVLKQYRGPLQAGNVSFSLWVPKDFEWRKHLLPLGNDGDEQGTLTESPGVQELESMLLPNSYQSRTDIYAIVQTRQHLYPSLHTFYASMKLKKMAWELKKALKSERDKAASAVLKKCPQPTLFTYGKAKFRSKFNLSSPHDTFRMDFASKVTIARTTVFVLGTCFSNTNHDFKIQATSLGHTVVLVNEYMTSKMCPVCVSAENQNRLVQQKYRTFVCPSCRVPIDRDHGGSHNMALLGWYWVHHRRRPKPLDWTPEPNPSIP

SEQ ID NO: 1412 - protein, 227 aa, Gryganskiella cystojenkinii
EATIDSETGKCSFCDDHHLPEVIDGELVMPQVCPELVAKVILIFFHGRAGTCVGSRIKGHLKYGGNWIALERMVRSIVLMVNEHRTSKTCPYCLQPIRLAKATKVNPRGEKRLVSVHGAVVCTNQDCKSFACGYTNRSRDTNAALNIGLAGQSQLISKDRQTLAAFSPKVRPPKPGPALPTPINTSLNWNNNNFQKSAGLDASFDQGGVSNLGVSASFDDRHPTQTS

SEQ ID NO: 1413 - protein, 199 aa, Apophysomyces sp.
AVLGGPSTDIDIASRRPSERRRKLLPSSFEKYDLRIATSYILILRIKKSGRRLHPVVQIRKPLIAYGNTVFNSLRGTVLGVVGAVRKKLKQEARRSRCFVVDVDETRTTKVCSVCGRDQLGNIRGAQSQSLHAVLRRKKCSTVWNRDQNASRNIRFIAYYMATNGNERPDIFKRHCGDKPLTKHTSGQSHKVGWRLFTI

SEQ ID NO: 1414 - protein, 367 aa, Dissophora globulifera
DKLELLKTKDASSSTYKQAKVNVKAAIKNHILNSGGCARSRKYVLADTLHTDGYQLKIHAYSLAHPKKKAETSGNHSAETSTSTNRLEAASASSTSSTRSKMKYLKEAIPNLETLQKEFGDQDSHVIFAIYPGIKNTATAVITDSLVPTKAWNVVLSRGSHVLSSQRHAQMPERHKKDRRYRGEGTMSVYDLESDIKPLQTGDDSGRDLALRFKNIKDSFQEYSKTVFVVEKDLREFYGSKSSKVAKYRKDQGEKAEVGRAIGGMIKATRAQADMPNVEKRKALVVIGDGDFRGKNGGPVQANKFITQLQSRVRPLSIVIDVYSDKKCNSLSVILTSRLVCIAGNWRRDVAVLCGRIQNIDMLLLVP

SEQ ID NO: 1415 - protein, 228 aa, Dissophora globulifera
LFWLHLSSIAEEISPVDGWCNNCSCHHVPRGTPGLFAHVKVCPMRDRQHPTIPAMLTGLAGTGVGSRIVGHERRGGTKMRKEQQKHIVVSFTNEYRTLKTCLFCFGPVRLARRRRLVNDPIRSLRLYGGIECVNPVCVSFKAGYTIKARDAHSVVVIALAGASNLLSPERETLPPFARFAYIPPIPAIATATSALSDFVTKNASPALETLSPQTSIDDATGAPTNVGL

SEQ ID NO: 1416 - protein, 259 aa, Mortierella sp.
DAEIDDGFLEISDDASVEDGAINNESGDNDNPQTSSSTYTTELSVYKWLMINWRQGSKLLTNVEEQFHDASICPSPDDTIIIGIDPGEKNAMAAALIDPKNPNGRHVVKIRRSYSYGPHIQFRNALKKQKDEIGVTQLETNIPAFSRTTLTEYFEYMTAPSGEYPTRLDRIQHCYLGNWYRRKYWESQRPATACLDLGIKGILRMAGVNEGKKSDHQREVIFRVGLGSFNSRTGLASKHTALLQRFVCLVGSNESERRE

SEQ ID NO: 1417 - protein, 218 aa, Mortierella sp.
SAHGVTHRWLVHGVRYTPYPGQQGQTRFEYDTHCPRTQPKTMPILLIGDSGTGNQSRISGHCRREGKKMRQEHMKHCVVGITSKYRTSKACFACSQELRLARSRRVVRGQIKMASVHGAVECTNPNCPAVQQKRSVRSRDTNAAMNIAVAGAAILLSQQRAHLLHSRPFAPKTPVIHRPRQPARDIHVYDTTRAPSRKEGLGKIERGVCRSRDRRRWA

SEQ ID NO: 1418 - protein, 273 aa, Mortierella sp.
ECENSDDNGQDVGKKRPSKSIESQTSAFPSESHGNSSTVPQQAPSPTLLENIDDVKTGGGNSGATSVSTANGWCGVCKRHHSPEVVGDKLVYNPVCPKQRKKTIPVIFQGNAGTCAGSRLKGHCRGGGLSKEHAKVCPVIMTDEYCTSKTCCFCFAPVELVPVKRLVNGVMKQVRCNGAVRCINPDCISVKAGYSVKPRDTNAAMNIALAGASQLLTSSRLPPFRRSFQPTIYTSPSALATSSSSVHQPMPREPPSVEGFIAGKSAFTCPHRD

SEQ ID NO: 1419 - protein, 212 aa, Mortierella sp.
ISIDLQIGSNAAMFNCIFAFGIDLPLLFFRFFVLVYSGLADGKMNVIPVVLHGTAGTGAGSRIQGHARRGGPKMTNEHRKHGPVGETNEMRTSKVCSACFEPISLSRATREKDVKQTTIRVHGSVDCRNPSYPRRQQGQGTMDRDKNSAVNIAIAGPSNLHSAVKTTLPPFRPFRLLPNTNNVSHTAGTNMSSLDHQRNQLPSRNLFFRVQH

SEQ ID NO: 1420 - protein, 572 aa, Actinomortierella ambigua
IAPSGATTGSSSAGSAAGSSSAGPAAGSSSAGPAAGSSSAGPAAGTSLAMSTTGSSSAGPAALISLAMSTTGSSPAGSAAGSSSAGPAAGISLVWSTTGSSSAGSAAGSSSAGSAAGSSSAGPAAGISLAMSTTGSSPAGSAAGSSSAGPAAGISLVWSTTGSSSAGSAAGSSSAGSAAGSSPAGPAAGISLVRSTTGSSSAGSAGDSSSVGSAAGCSPVMRTAANSIRSFLMRTAANSLRSFGMQTASRSTTMSTTGSSPAVTAADLKLKKSHKMSARQVNEVSHTHKMARQRERDLKKTANAAVKRDLETISKPENSLTTADSVLKVHKAHLVRSGVQQTIRAFETTKRMLKMRRTQRLRTQRTWAKLCAAERRYVQQHKLDSLPQPSTPTHINQTNGWCTRCNRHHIPSNLDASLEFQHVKECPNVRQEVRPVLLIGDSGTGVGSRIQGHARRGGGKMRAEHIRYCTIAMTDEFRTSKTCVFCFQQVRLARHHRMVKGKEKLVSVHGVVECVNPDCPSVKSGYCQKPRDAHAAVAIAIAGTHQLLKKQAFAPFSRAFFDTTAGATESAT

SEQ ID NO: 1421 - protein, 288 aa, Actinomortierella ambigua
EERHTTGEGSEGSEGSGRRGWDLPRRRERIRRKERRKRRILATTTATSRRPCRMYRKANTSTVYLAVKRKAVYQPTLEHRRWLEMRKNEKFKGSTMPAGPSSASSSDSEQTQPTSISEVESLLPPLRGENAALGAHVDHRNAYSQVLDELYNGVDYLSKRDEDAKSPLFKKNRWGAKRAQKTEFQRIADRLLRMVGGSIWAKRKKDNKVIIGIGVAKFRCTSGLPSLDGTFQTYFVRFARSLGYIVVGVNEYYSVPAAAARGNGKGTGARPIVCVYVIALSSASQSHD

SEQ ID NO: 1422 - protein, 218 aa, Mortierella polycephala
SLSLSLSTVPLVSRNDGWCASCASHHVPRATGRPFEHLHECPKRQGMDKRPWILPVMFIGSAGTCVGSRLKGHQKRGGGQMRSQHRRYAVIGMTNEFRSSQTCIFCFEQTRLAKGWRKGKDGTVKLSKLHGAIECFNPACPSFQVGYTIRPRDTHSAVAIMIAGASLLLSSDRRPIAPFDQYAKSSIITTNNTRLKLDLTTSLVPSKRTLDELPHGCL

SEQ ID NO: 1423 - protein, 284 aa, Daphnia obtusa
WRAFIQADHLKYLRGQSQEFLESHVIGIDRGVKRPIQAGEQSFDLTPEQKKSMERSRRNLLRYQKRMSRQLKGSGRRQRTKIKLSNTHNDIANVRKDFCHKASRTLVDQKEAKIFILEDLKTSNMTRRAKAVKDDSGRWLKNGAKAKSGLNKAILNVGWHRFEEFLKYKANRAGKAWLKVPSHHTSQECAACGHTHPGNRKSQAVFKCDSCGHTDNADHNAAEVIKKRAIGLISNSGSELSKRGVLSFSDSGRGAMGKTRRAKSPRALGEEASKRKRKVQGFAF

SEQ ID NO: 1424 - protein, 428 aa, Daphnia obtusa
FIFRFMEIVKRKVTYRLYPSRRQQNQMLEALRLHQKLYNAALEQRIDAYRRCGVSLNYNDQAHDLTQLRAEFPEYAALNAQSEQVTLKRLERAFKAFFQRVKEGKEKPGFPRFKSFDRYRGWGYAAHGDGWKFLPNEDFVNGTIRMSGIGNIQARGRSRFIDEERTSRNPGKPKTMEIFRKNDKWYASVTFETLRPFRASGDTALGIDWGTAKFLTIVDETKVPLIVENPRHLKSSEDKLKKAQKSLSRKKKGSSNRKKAKKILGNAHERVAWKREDFLHQTSAAIVKSASLIATEALNIKGMTASGGAYKTGLNRSILDTSPGKFFEILEYKAVDAGIPYIEVPTRKVKPSQTCSGCGHAEKKQLSDRVHDCKKCGLMLDRDVNAAIVILNFAMTGFVTGREPALSVESKVTCSLKHETPPIPEHAR

SEQ ID NO: 1425 - protein, 320 aa, Daphnia obtusa
VSLLLSSIRVLRNRLQSISKGVTTNSGDLLSQSDHLKYLRGQSQEYLKSHVIGIDRGVKRPIQAGDQCLDFTKEQKRNMERKKKNLLRYQRRMTRQLKGSKRRHRTKVKLSNTHNDIANIRKDFCHKASSALVDQKESKVFILEDLKTRQMTGRAKAKKNDSGRWLKNGAKAKSGLNKAILNVGWHRFEEFLKYKVNRAGKAWFKVPAHHTSQECAACGSTHPGSRKSQALFKCDSCGHTDNADHNAAEVIKKRAIGFISNSGSELSKRGVLSLSDSGRGAMGKTRRAKSPRAPGEEASKKKKKSPRALPSDFSLEASPL

SEQ ID NO: 1426 - protein, 219 aa, Chionoecetes opilio
GGEGRAFRNDDLCPRLQNYIDNFETYWELAATKKWRRAKFRGYCLRQRVMDKFVSAVLSPTGHPPPFVAYGGAKFSSTGRGEKFSVPNCKLGKTFKEKAGARNFTLVDEWNTSQICHRCWQLLATVSVRRPAAEEEDDPVDWRVLALRGLRRCSSKETSGADNNLLLGFKCPLASCSSIGMATQPRTSRPRCGWKSAAARMICCSNRTASIEPASENSK

SEQ ID NO: 1427 - protein, 227 aa, Chionoecetes opilio
GYRLRRRAMDKLVSAVLSSTGRPLPFVAYGGAKFSSSEKAARKFLVPNCELAKTFKEKAGARNFTLVDEWNTSHIFHHCWQPLATVSVRRPAAEEEEEDPVDWRVLALRGLRRCSSKETSGADNNLLLGFKCPLAQSFLDRDANAAANIATKVRMEVGGGQNDLLFKPNRVDRASVGKFKIDDEAYYFRKKHHGVAMRRSRGWSSPTGVATITPVTGQSPWLCPLKG

SEQ ID NO: 1428 - protein, 404 aa, Neovahlkampfia damariscottae
LYPNENERKKLNQWMGCARWTYNQCLNGVNKENISKSKKELRKYCLKSTSEIIKKNKWTSNTPYYIRDEAMCDLLKAFKTCFSAGEKFKMKYKRKKDNTDSIVIHLKHFNAARKKEMKELLSKSKAKQKEKKETFYDFIPKIKSSEKLPDSLEYDSRIIKDSLNQYWMCIPVRMDKKSFDHQEMKLKSEKIASIDPGVRTFSTVYGSDGICLKVAKGDISRIYRLGCQVDKLQSKWSQKDVKHKKRYKFKKAAKRIRRKIKDLVTEVHDKLIKYLCVNYSLILLPIFETQKMIRRKARKIRSKTARSLITWSHFSFRKRLINKLREYPEVSLKVVTEEYTSKTCGKCGKLNQKLYGKKTFICPSCSYKADRDLNAARNIMIKSLIMSQCLYGIDVETQLLSTQF

SEQ ID NO: 1429 - protein, 210 aa, Neovahlkampfia damariscottae
KIEKNTTRCFRLCYSAYVCNVHSSTEMLKEKQKKTNKKIKLEANMKKRNEKMSQSVGIPVNGGKPSIKWNEEGFFFWPSYKLGALKTAQKDSVQVHEVSEHYTSCTCGSCGKIDWKLGKKDHFNCKYCNFSLPRDYNGARNIFLMNIQNFIGNPKTASTAGDGPIPKETLILMSGLINQNEQKVSFKIAELFLLDCFSFQDKKIIFCSLN

SEQ ID NO: 1430 - protein, 299 aa, Neovahlkampfia damariscottae
KNICWTKKLVEQSSLTEGVLFSSKDVPKENKQVSHKTGLSKKQLDTDEIIQSRKILLKPTSEQKKKIQEWMRITRFVYNLSHHFVEDLGYDANFLLLKKIILNADKNPESSKYPWLFNRKLKKIPRDALDYAIQQYVCNVHSSTEMLKEKQKKTNKKIKLEANMKKRTEKMSQSVGIPVNGGKPSIKWNEEGFFFCPSYKLGALKTAQKDFVQVHEVSEHYTSCTCGSCGKIDWKLGKKDHFNCKYCNFSLPRDYNGARNIFLMNIQNFIGNPKTASTAGDGPIPKETLINQNEQKSQF

SEQ ID NO: 1431 - protein, 207 aa, Neovahlkampfia damariscottae
KFTEYEKGDVSKLFKNALKCDKIQSEIDKNKSNDKMSKEEIKKLKKKRYKLKKKYQKYQNRIQGLKEAFHKSVSKDLCENNDEILISKFPVKGMIKKWERKIHSTTVRKMLHWSHFQFRQTLKHLAQKDSVQVHEVSEHYTSCTCGSCGKIDWKLGKKDHFNCKYCNFSLPRDYNGARNIFLMNIQNFIGNPKTASTVGDGPIPKET

SEQ ID NO: 1432 - protein, 384 aa, Neovahlkampfia damariscottae
NPESSKYPWLFNRKLKKIPRDALDYAIQQYVCNVHSSTEMLKEKQKKTNKKIKLEANMKKRNEKMSQSVGIPVNGGKPSIKWNEEGFFFWPSYKLGALKIAQKREIKRLSNVVGKESSDRTCILKYQHGRYYMIIPFVAKIKKKDEKEKKIIALDPGVRTFQTGFDNFGKFTEYGKGDVSKLFKNVLKCDKIQSEIDKNKSNDKMSKEEIKILKKKRYKLKKKYQNRIQGLKEAFHKSVSKDLCENNDEILISKFPVKGMIKKWERKIHSTTVRKMLHWSHFQFCQTLKHLAQKDSVQVHEVSEHYTSCTCGSCGKIDWKLGKKDYFNCKYCNFSLPRDYNGARNIFLMNIQNFIGNPKTASTAGDGPIPKETLINQNEQKSQF

SEQ ID NO: 1433 - protein, 334 aa, Neovahlkampfia damariscottae
KKRNEKMSQSVGIPVNGGKPSIKWNEEGFFFWPSYKLGALKTSQKREIKRLSNVVGKESSDRTCILKYQYGRYYMIIPFVAKIKKKDKKEKKIIALDPGVRTFQTGFDNFGKFAEYGKGDVSKLFKNALECDKIQSEIDKNKSNDKMSKEEIKKLKKKRYKLKKKYQKYQNRIQGLKEAFHKSISKDLCENNDEILISKFPVKGMIKKWERKIHSTTVRKMLHWSHFQFCQTLKHLAQKDSVQVHEVSEHYTSCTCGSCGKIDWKLGKKDYFNCKYCNFSLPRDYNGARNIFLMNIQNFIGNPKTASTAGGPIPKETLILMSGLINQNERKSQF

SEQ ID NO: 1434 - protein, 239 aa, Thamnidium elegans
MFTNMVRTDGYGIDFILTVPERQSNKLSNLDLNDFTPEEINERFHLWGVNPGQINIFTASDGHNTNPHQLRKYSTAEYYTRTGFKKTNLHILNYIGRQRADAEMVNIFVNGGKKYLRQEFKQTGRDKKRGNPKRKKRRPVKKEKGKGKEKLKKRKLKPFEPDNRIPLVALGEAIFPTSMKGTIPGLARRLVTVLKKAEDEDLLVTVPVTEYITSKVSEHNLNKKNRLVPIALETIPIIS

SEQ ID NO: 1435 - protein, 224 aa, Thamnidium elegans
RKKKLADSRNINDVETFYKKRKESNARLRAFYYSQKQIKRRRTYELQKRKYVDKLCSNERNYVASGSKSISIMFVGDRGYGIGSTIKGHARQGGLWKPKKHSLYSSVCITNEHNSSQICIFCFKKLFHPISTTTTNSGTKKKSVNGAFVCYNEECVAVKAGKATHGRDALSSLAIGLSGLAMLLFGITFPVFSSKASQFNTEQFNNKAVAFLKRSATQPTAYGE

SEQ ID NO: 1436 - protein, 201 aa, Thamnidium elegans
SQKPTEVYFPGSSFEFRVDEKCNIYYESLFVAKIRGFLPQPERESDTRSFKREVYYNYLQIMLQQPHITKRLEDEQKNKVFELAQQDNYVQKISVILENLQLLPFQKLKFSSKLFYYQDDNKLVHNLTGKFGQDAILVFGDWYAPNTKFHKPTKNKNLIAMQKKNGFTVYLVNEYKSSSFCPRCEHALEIFKTVPNPRPFK

SEQ ID NO: 1437 - protein, 227 aa, Thamnidium elegans
KFEEIYFPNSCFDFHTNEKSNLSFGSLYITKIQDFPQQHNAVSLDRLTNSQRYATYIRIMLQRKHISRRLDDAIKAEVLELADEIFTSERASLRQRASEMLEKLPVLPSRKLKFLTKVYYDQSDEKLVRDLKKKFDSDAILELGNWSAANTKCHKPTRNKNLIHMLKKNGHTVHLIDEFKTSSKYPKCEDDLENFKVIKNLQSYRRLHLRTNKFFFKAINFFKSSFF

SEQ ID NO: 1438 - protein, 235 aa, Mucor saturninus
ENNRLLIQGVDPGIVTTAAISCVKSSTLFESLNRFQMLENYEPWTIPTSNQKGYEFDYTANKINQAVLSNTHRLQREKKKKYDIGKYRLARKIRLTTYHKKHYSVTRRDIFSYHGWKRGSILSFVGNWFGKGAYIRGHTRRSMKPILNQFNSVADDHIAVVNEFKSTITCSSCFEVTTEQVVRVGEKRVKRIKGAVTCTNHNCPRRLSPTRRTAVNRDMNGAINIALIGFSLWFK

SEQ ID NO: 1439 - protein, 207 aa, Mucor saturninus
KQRMSSNNDTLRNFYNSSKIFSHRSFRIKSLLITQLCQKERHHVSLIKNIKKIMFVGDREYGVCSRLRRFNRYGGLWKLKQHSRYTAVCTTNQHSTSQTCNFCFQKLQHPYERIKNKQKQGKNKTVSGPFICHNLHCLSVALNQATRGRDTLSAAAIAFPGACLVMLSLPCLSFDPKISQKKILMNSIKTSTFLCKESKERPTVDDA

SEQ ID NO: 1440 - protein, 239 aa, Mucor saturninus
TQGVVTASFKDVPSSLLFESINKYTSLKNVEPIESVAKENQISLDFTAKIVNHATFSTKHSQERQSREKLDMNYLEKKKVSRKIRKKKIYEVFFRRHRKKLVTSLGSKNNNVIWSFLGNWSGVTTFMKGHSRRSIKPVIAELQKKEKDKFMIVDGYKSTITCTSCFEPTTKQVLRRGDSIKRIKGAVVCVNRRVYNKSTTSNRDQNGALNIALIGFSALVSDDGLTLSPFRRGINNPNK

SEQ ID NO: 1441 - protein, 205 aa, Mucor saturninus
NKKREKTKRGKDGKPISLERKRATRKIRTKRYHKKNYSRYRSGMFKSHVLDVREGSVLTFVGDWSRNGTYIRGHERRSLDPVLKRLKCVEKDETFIVDEYKSTVNCSFCFEPTTKQIIRVGDHGRKRIKDAVTCTNEICPRRLSSRFSTINRDQNGAMNISLIGFCHLVSEDDLTLPPFRRSNNNSNKYEISEIRTFKLYTNSFA

SEQ ID NO: 1442 - protein, 209 aa, Bradysia odoriphaga
ILLSDGFNKVDYRHRMELSKKSWNYMDYVKFELKHLINVQNMLVNPILAHYKLKRSIFITKTAVDVAKQLAETGQVIASRPVQYKHQHKFKCPEQRHANKGKFETAKRTTLIILGNFKMAPDSPMKGHPRSAVGQFHRELRRRCDVLVQDEHNTTKACYKCRKKLEIAQPPERFAQCRCTDGKRKVIDTLFVISIFKAILTQIAFPFLM

SEQ ID NO: 1443 - protein, 199 aa, Bradysia odoriphaga
AAALGSHQFHKYLAKLSFRRYISKKRAIVKIARTLVYGARRENKRKAATRTKRPQRRNQRKRRKRKKPKGDDDKTNKTEQKRSERQSTDPRVLVFVGSTNISPIIKGYVRAPSRLIIKKMSKWAKVVSVHEHRSTMLCSRCFDPCITSRSPHRWQNCTACRIRWNRDINAAWNILYLGMHLVGGTNPDRRFSHGHSFGR

SEQ ID NO: 1444 - protein, 475 aa, Bradysia odoriphaga
IFFFWVYMFELYATNFRNNIVVHAKKRVRQFFRLFKSDNNIDDKAIDRTIRYIFNVNSRVKSVLGLLQMLDQFNIHHWPKNNRTNHWPVQLNGAECFRGFFSQQLANNWFLTVPIFIQIQRQIQVISEQQQNLHNQMTQAKDNEQFELAELLAHELKKTPSARNFNVVPLMNFQRKHVRIDDKVLLGLLILLNKRPKHADGKLFTESASDCNAFMSVSAYYWNQIFKIDEMKTHKPFAHQIVTDGVSVSILQKTIAVHEDYDDLAAAVKKTTSTEVAANVQADINSIKRSCPLPHYFIGIDPGYNTWLAAVRRTVATGKETLIKISSKQYHARTKRPIRNRLEKKYTADYSAAETQDLIKNGFPSPKGIYYEAYISHRLRMFTRGIETYTQRKYARLALDKYINSYRVIDTIAHNLTRGQPSIVFMGAAEFSNSSPIKKYVRCPGTRRIVNSFNKQSRTFVAYVDEFMTSQCCPL

SEQ ID NO: 1445 - protein, 275 aa, Bradysia odoriphaga
NRSRMSKIKFGKSRTTSAQDKYKYRTSIDVGFNTYIAAKRLTIETGKEVNLKLKSKEYHRGTRNNCRKKKFQKLVGDYERRAATDRESYAVMPTPTGPFYWIYVRHCLRFWTEGIGVYTRARYARMAFDKYVYSQKKIDSIVTVLTNKQPSLFLIGGAEFSPNSPIKGHVRCPGIRKFTQALIKYDNCELLSTVGCVYLGFPLGQKRRDTNGVKAARLLSWPYHRHQSLLVLHQSVSTNVSVNRAILETKLGDTSKQQTPPAFQPTGIGIFRRAV

SEQ ID NO: 1446 - protein, 233 aa, Bradysia odoriphaga
KNHESVLVFLVQSSKEIVGDENVHGKATTQQNKVRVFFVGNCSTTSNSSIKGHRRSSGNAPIVCYLKQIPRTFVDATIDEYCSTKKCSRCYETLDDVEFSKERLKLCHNCKLAENSTSTNLVWTYQRKRKIAKAMVPITRMYPKPTQFQRAQRVEMERTKRWSIGDKIRIAARNERKSTSYNVYTTETLNKLYWNRDGNAARNIVQLGLCEYNDCLPIEFNRDEAFQRPKKNQ

SEQ ID NO: 1447 - protein, 384 aa, Bradysia odoriphaga
FTICSAKTTEKTDAELKQLKQQEFDRVQKKYNNGDFTTIVGADEGERLMVAAHANCQSDSGEWIRKQTKYKSRTFQYDSGQLYFKHKQHIITRDVLEYVEKDRAVFPLHNPNRNTDAGYRLVEELRDDGLCDRRKQQRDKIRNFLLQRQAEGTITRRQQRTLHRQEQFGKINQRNRLELSKHSYNYNDYVRFQLKHLQRLQDVMVKPLLAHYKFKRGIFITKTATNIATQLAETGKIVGNKRVKYEEIHKRAKHLSKTQRQDIQNKYKMGRNSTLVIIGDYKLAANSPMKGHPRSAHSQFLRELRRRCNVLVVNEFNTTKCCAVCRKKLLVAKPPERFAQCFCINKKRKVIFVYARFFGFNFNLQFCVRFHYRSGIATSMRRSI

SEQ ID NO: 1448 - protein, 314 aa, Bradysia odoriphaga
RYCFYVNEKHYETTTNVLWRRYFKIDEVESDGHKFHNHIRTDSVSITMKRKKRSVADIAQRMAQANAKLKRNEIKNVRAYDPGHRLIFAGIDRDLETEQETSLKYSRRSYHYTSGRHRFQEKYNRLANPLFRELQTEREALPSKASAILDYDEFINFELKHFCKTNEVLMSKAITKLRFQRFVSREKATTELAKALVGSRTATNTTIVFCGSTEQNPVIKGYVRTPNKKIFSEMQRLAPFTFKIDEYRSTMLCSRCFTPAITSKSPHRWQYCKKCAITWNRDVNAGWNICYLGLNEILGVQCHKGFSRLFQFPG

SEQ ID NO: 1449 - protein, 349 aa, Isochrysis galbana
WSTTRGHICVWGRQKGTYNIDGLSVANYKWDAPAERLQLEDTDRGVYRDHQWRHDISCQADADVKLISIDPGIKKKLQIASAPLSRCADATKLAELAAVEPRSVFWEISSKEWADYAGTRRWEARVVGARQRNQPYDVLVEELRMCRKKTANRETFKDYLFHLLGGFSTFTSHLLHPQRSMDRWRETRKAMSALARIADRVWGIKKRKKGEPRVPNNEKKRTIVLIGDGSFADTFPKKKFVRALASRGLTIVLDEYNTSSMCPCGESKLQDTAAIFQVASDDAPRRPWCHKAAEHEGPCHVMSTFLLNQLDTDRDELACMQMLLAGYEGLCHGTRPKCLCSGVWRKGRL

SEQ ID NO: 1450 - protein, 394 aa, Isochrysis galbana
RSSFTGVEKDILQSELYSHRCAEASLFDVLLKRSSFGGSSEKKGWREGWIPLRISTDGVKLAVTFASAVAQKAPNIDGLASADYKWEAPTERLDVHQVARGVFRDHQWRHDIACRVDDKVQLLAIDPGIKKKLQIASAPLSQCAHAAGLAQFAAQTPSVFWNISSKEWKELGGAKLWEDRAVHQRHYNASYNQLVEGLTRKKTSKSGTFERYLEAVLGGYITFTSHLLHPQRSMDRWRESRKARSALDRIADRVWGIKKRKKGEPKKTDSDKDKERTVVLVGDGSFGDTFPQKKFVRALACRGVTIVLDEYHTSLMCPCGTSELQDTAAMFGVTPSDIPRRPRCHKAAESMGRVQDGAGEESDIESANQALELECTPQRLADLLPSDSESDGEL

SEQ ID NO: 1451 - protein, 238 aa, Isochrysis galbana
QRLLILMADGQDLDPQRLPIAAVARGARQALKPLQVTGDEITLAQCNSRTADLVAFTVYCTRRIITLKRSLGFYGDLEWRRHRRNVYIHKQKSEERLFRRFEMFRKNHHDRLMVLAYGSWGMKTGKMPMRGLPPTIGVGLLRKLARRFVVCVTPERNTSQTCSSCGGKAFECQETEALRQRKIRGLRRCTMCLKHLGRDRNAACNIGRVFAARYHNQIISFQMDPLDTAIEEADCSCE

SEQ ID NO: 1452 - protein, 250 aa, Isochrysis galbana
AQSHIGKEGRRRDLRTQQYAARIKALKPLQVTGDEITLAQCNSRTAALVAFTVYCTRRVITLTRSLGFYGDLEWRRHRRNVYIHRQKSEKRLFRRFEMFRENHPDRLMVLAYGSWGMKTGKMPIRGLPPTIGVGLLRKLARRFVVCVTPERNTSQTCSFCGGKAFDCDCQETEALRQRKIRGLRRCTVCIKHLGRDRNAACNIGRVWRKGRYDKITWPSFDGTRLRSTFHLRSPARSDEAALARVPIGIL

SEQ ID NO: 1453 - protein, 447 aa, Isochrysis galbana
ARREGNQEPFQTRDEGDVRAAPAEMVRGMGSRAPPRMAHGGSCLRSDGGLRDRHQLYETPGALAAAAAQRCLAHADALCPSGGAVVVDVGVGRGRLLQALRRLADDRHRVVGVEIQSAEELGAPPLPGVAYGLDALDGARPWPGVARGDHVLVLSNPPFRAQIDVLNAIARRAAAEGWASLHVFAILGASARTPSSRSRCLLHLHHEWGVPRAMCSFEARARRVDVCCVLQHLSALPPLVLDFDAFRSYCLESVSSLELRFSFYSNVEFRRARWKSYVQRQKSTARLLNRIEALRPKYDTRPILVAYGAWGLKAGTSSIGKRGNPPAIGVSMARFMAKRFRVIWTPEYFTSKTCLACGSKCGRCSKVERSRPLDEQGRVREIRGLRQCLNPYCGPSGQERGILLNRDRMGATNIGWNLARALDGVPLIGAPPPGIERELHDLNIELE

SEQ ID NO: 1454 - protein, 211 aa, Isochrysis galbana
FWNLSSKEWKELGGLKLWEDRVVHQRHHNASYNQLVEGLTRKKTSKSGTFQRYLEGVLGGYLTFTSHLLHPQRSMDRWRESRKAKSALDRIADRVWGIKKRKKGDPKKTDYDTDKERTVVLIGDWSFGDTFPKKQFIRALASRGVTIVLDEYHTSLIYMPLWYIGTTGHCRNLCDRAQRDSPPSSVPQSSRAHGTILCTLSLLHQPYGHRS

SEQ ID NO: 1455 - protein, 228 aa, Isochrysis galbana
VVPPPWAVIGIDPGKYDIIHCVDMDSPTHMLFRYTSAERRRDLRTQQYAARMQALKPLQVTGDEITLAQCNSRTADLVAFTVYCTRRVITLTRSLGFYGDLEWRRHRRNVYIHRQKSEERLFRRFEMFRENHPDRLMVLAYGSWGMKTGKMPMRGLPPTIGVGLLRKLARRFVVCVTLSRWMPGSSQGGNKKQEADDLMKRNVADKVIGKADSIGKDQWVVLVDDGTL

SEQ ID NO: 1456 - protein, 428 aa, Isochrysis galbana
PYTRRFVCAARVIACNHCARRAYAHRLPPPRGAVRAHRCTEAALFDLLLKRSAFGGSSEKNGWRKGWTPIRLSTDGVRLAVTFASGVAKKAPNIDALSAANYKWDAPAERLQVEDTDRGVYRDHQWRHDVTCQVDADVKLIAIDPGIKKKLQVASAPLSRCADAAQLAELAAREPKSVFWDISSKDWADYAGAKRWEARVAGARQRNRPYDVLVEELRMCRKKTSNSETFQEYLFHLLGGFSIFTSHLLHPQRSMDRWCESRKAMSALDRIADRVWGIKKKRKKGEPHAEKYTPNDEKKRTIVLIGDGSFGDTFPKKKFVRALASRGLTIVLDEYNTSSMCPCGESKLQDTAAIFQVAPDDAPRRPRCHKAAEHEGPCHVMSTFLQKQLDTDRDELACMQMLRAGYQGLCHGNRPQCLCSGVWRKGRL

SEQ ID NO: 1457 - protein, 202 aa, Isochrysis galbana
LPIELREIGEKYREYCTESLRTLQVRLSFYSHVAYRRRRWKIYLKQQQSISRLFKRIKTMQPTCDNRPMLLAYGAWGLNVHIMTTGRKGNPPALGIGMARMLAKRFRVIWTPEYFTSRTCVACGSVCTRCPRVERQRQNGRPGRVREIRGLRQCSNNECGATSMTLGGLFNRDRQGAINIGRNLALALVRRKAIFSRSVHSG

SEQ ID NO: 1458 - protein, 291 aa, Isochrysis galbana
RPFSAPVSRCVFQPAFPIHQERYPSMWALIEPYMGRWCKAKLMLVGDYSDEYDRIPKTKYIGDEAAVAYLCMEYITAVAYAETNPMVQVHQVAGKLYMENKKAVLARVTDLATQDQPSDIVAMDRWCETRKAMSALARIADRVWGIKKRKKGEPRVPNNEKKRTIVLIGDGSFADTFPKKKFVRALASRGLTIVLDEYNTSSMCPCGESKLQGTAAIFQVASDDAPRRPRCHKAAEHEGPCHVMSTFLLNQLDTDRDELACMQMLLAGYEGLCHGTRPKCLCSGVWRKGRL

SEQ ID NO: 1459 - protein, 261 aa, Isochrysis galbana
MRMSSSYIAIDPGIKKKLQVASAPLSRCADAAQLAELAASEPNSVFWSISSKDWADYAGAKRWEARVTGARQRNRPYDVLVEELRMCRKKTSKSATFQEYLFHLLGGLSTFTSHLLHPQRSMDRWCESRKAMSALARIADRVWGIRKRKKDEPLAEGCIPNDEKKRTIVLVGDGSFGDTFPKKKFVRALASRGLTIVLDEYNTSSMCPCGESQLQDAAAIFQVASDDAPRRPRCHKAQSSRARRTISRDVYLSSEAARYRP

SEQ ID NO: 1460 - protein, 228 aa, Isochrysis galbana
RGGACRVCCPNSFRLLEHLVQGARSGRSLVVPSYGKIELFINVTTMDNGSYNQLVEGLTRKKTSKSGTFEKYLEVVLGGYLTFTSHLLHPRRSMDRWRESRKARSALDRIADRVWGIKKRKKGEPSKKTGADTDREPTVVLVGDGSFGDTFPQKKLIRGLASRRGVTIVLDEYHTSLMCPCGASELRGCNLRFGCFFGECPPCGRYKFYLKDSLIKVQTCRFQALAQI

SEQ ID NO: 1461 - protein, 226 aa, Isochrysis galbana
GARTGSLRCPYGAQCSQLHNVMCENAKLRLSGHKTPFHYRRPFLQTPEHRHFGLVPCESRKAMSALARIADRVWGIKKRTKDEPHAENCIPNDEKKRTIVLIGDGSFGDTFPKKKFVRALASRGLTTVLDEYNTSSMCPCGESKLQDAAAIFQVASDDAPRRPRCHKAAEREGPCHVMSTFLLNQLDKVVCLHLVPLVSKYAMRRYQKNRLVFKQRHPPHSAQPCL

SEQ ID NO: 1462 - protein, 301 aa, Isochrysis galbana
PLARGGLHFLTVARCPIKNLQGGGTCHYENLRQEIEMVRISAPLLGQRRTETCENVFAKRLESEKPADVQNAEVSLSAFNSKALDFGAYRAYCAESLQTLQVRLSFYSHVAYRRRRRKIYLKQQQSISRLFKRIEKMQPTCDKRPMLLAYGAWGLNAHTMTTGRKGNPPALGIGMARMLAKRFRVIWTPEYFTSKTCVACGSVCTRCPRVERLGRSVCPEIMHCRKLARAAALGFCQGGRRCAHVQASHGAQWAPGTLVHARERKCALRLGLRCTVHWTEEGHWRERRQRNKGGGAGYRRG

SEQ ID NO: 1463 - protein, 295 aa, Isochrysis galbana
KTSPTPSPLPLPCDDPHITVTSTLSFLNCESMGWLSAPIGLHERSTDESRELRASSQRRRTPAGPIRLRLSRSLSVLWDVPASSTRQIMSRDSSSRSAFERRTVERLEETSKILHSMRERRGSGALASVRKTSASAKLKRLFHLLGGFSTFTSHLLHPQRSMDRWCESRKAMSALDRIADRVWGIKKRKKGEPHAEKYTPNDEKNTTIVLIGDGSFGDTFPKKKFVRALASRGLTIVLDEYNTSSMCPCGESKLQDAAAIFQVAPNDAPRRPRCHKAAEHEGPCHVMSTFLQKTA

SEQ ID NO: 1464 - protein, 253 aa, Isochrysis galbana
PSPPHPHSTPSQRPTIDRPQREKAPAACVELLHRLSRAPLLVGHLDELAQQLAQVVRTFLALVLVLALVLVLANLLVSLLLLSLLLLSLLVLADVAGVHCRRSSRLSSLLSPPRRQTRAHAVVDHGPHTQGAHRERQGRGRVRCGSLPPTIGVGLLRKLARRFVVCITPERNTSQTCSSCGGTAFECQETEALRRRKIRGLRRCTECLKHLGRDRNAACNIGRVFAARYHRETMHFQADPLDIAIEDADCTSE

SEQ ID NO: 1465 - protein, 583 aa, Euura lappo
SVDVDDDDDDDDGVFYPKKPSSKDNKGRTLKGGTTPSRKPSTGRCTRSPPTSGERVASKSDSSDDGIFYPKRPRSGSSSTTPRKDNKGRKSVPTKGGTTPSRKPSTGRCTRSPPTSGERVASKSDSSDDGIFYPKRPSSKHDKGRLPTEGTRSRSKSSTPGKTISRAKGDDGVFARKRPKSGSLTPSRDAESPRPKQPRLSEMDWQDSSGRSGSASTTPRSEPATTPTTTTRMLPPKSSGSRGPKRSWTTGCVFQDRSPPPTTPPHHSLIVKLFSNYSPTPAEATTSSGAKKPRALIALGDTTMPDWTRKWHRGPLKLFDKRLNDRARYGQKDTHLVYVNEYLTTQLCNECNERMDVAKRRDRYVHCPRCKITLNRDVNAGENIRQLALHREGMVPVGYVKCPENFQRGSAQERRKKKPDADTTAGKKKQLEANSSSGRRVAGVDGFVGMTNRDGVSCYANATLQCMFHCSEIFRELIGSNNANDEDAALKSFARSYNDARNVPDATPLDSFEVREFVGGPFTDRVQQQDVADFLTAICEKSRLVRQAIEHELVVITRCNNDCGIRESRSVQANRILAIPLLV

SEQ ID NO: 1466 - protein, 568 aa, Euura lappo
LTPSRDAESPRPKQPRLSEMDWQDSSGRSGSASTTPRSEPAATPTTTTRMSPPKSSGSRGPKRSRTTGCVFQDRSPPPTTPPHHRCRVSLIVKLFSNYSPTPAEATTSSGAKKLRALIALGDTTMPGWTHKWQRGPTKTYDKRLNDRARYGEKDIHLVYVDEYLTTQLCNKCNERMYVAKSRDRYVHCPRCKITLNRDVNAGENIRQLALHREGMVPVGYVKRPENFERGSTQERGKKKKPDTDTSAGKNQLEAKNRPDLAKIRKKALPNSSSGRRVAGVDGFVGITNGDGVSCYANATLQCIFHCSEIFRELIGSNNANDEDAALKSFARSYNDARNVPDATPLDSFEVREFVRCPFTDRVQQQDVTDFLTAICEKSGLVRQAIEHELVIITRCNNNDCGEGDSYSVQANRILAIPVTSFVTPGVENPANLQDLLDNATSQWTKVVGSRCKNCQEMNRVQKTTVASIQRFLVVQLMIFTSDKNERPIKLTDLRLNGISGITLNGQRFRVIGTIFHHGQLLKHGHYTVKLKDAGNDNNWVNFDDTEVRTCAWPQDAKDAYVIVLEKIT

SEQ ID NO: 1467 - protein, 240 aa, Phytophthora capsici
QDCNPQVPEAIRNMLTKKTTSLEKLEVYVAFMAQHMDLLLRYSQLKPSRRLRLRSYIFMKKKLRQLCEQQVPRGNRVVVGFGDWSNFDPGGVINKCPAGPVKGFERELARHCTVIPIVEYHTSKVHFDCQYELKNQYSQRLCRDGEIRTKKVYSVLHCLNNGCRGMIVNRDVNASRNILRLLQCKLRDEDRPAAYSRQVTKTKRATECLRAAQQQRNAPLRQLSLSTPFAELVETSIRAK

SEQ ID NO: 1468 - protein, 670 aa, Phytophthora capsici
EPLRAEKGNMKLARIRHIDEIIPEWPNTSDSENNARPKYQRRNCGWAALRKRLRDSLQQLRVLIFVHVEDPKACLETRLSAVFRWKTLAWKALLQLHKTTRVDLPGLLQELNTCQEEAIIAVLSSVLAHILRGYVSEYRPLLTKLSTHHRRLLNQNFNARTLNTLEPLRNLPGFSSWFQFQTQSNLIREPKTLHELDEYQHIKTWLNDAVKYQQKCAAFDKKEERARTISTYRATINILKVNAEEHESDIETAKHELKTLEKEDNLMIRRTRKYRLYPTPEQRGRLRQFMGTCRWTYNQAVAHFRKTNVYKAETLRDLYVTKVTSKQQEYPEGMGPPQEWAFDTPKNFRYNTLRRFQSNVRSAFSNKKNCNITKFKIGFKSKKDSRFFTICEDARAAKLTYVAGQSRALLSVSKLKNIPIRCDHGLSITHDIQILNENGFWYAAIPVFVCPSVQVNLGRAVALDPGLKAFMTGVDLCGNCIHVGRGTRDHLDKLRDRAADAQRRMAEIKNVCGHRTGKQWKIFARAKRTFDCATAKIKNCVKELHYQTCAYLTKHYDTIVLPIFMSKQMVKKSCARNRTYNKMLLGLKHYQFRELLRAKCEVAGKSLVLCSEMYTTQTCGDCSRLHLKIGNKDVFECPHCEYVAGRDVNAAFNILRFTCGGSLAVHTIHR

SEQ ID NO: 1469 - protein, 709 aa, Phytophthora capsici
KSDRTKATCIIINNAVVHVVVAAFFIRRARSLAERVLPFCGGCPTFIRSMPYIQRSNPALAQLFFHFLTVVMKRKRREDNDNPDGSDEYYPSLEFVAETPDLDYEEEKTEVAGVEAVTEEHAQMFPCSQRPTISSTYHLKEITKNIHSSVVCKLNRVCRHPWLVEEIKNVCVVMKQVQLEGWHLANLHVLRCLEEDDDIPELDQMFFCRCCAATLGDVEKRDRPKKKTGYETFYKTCQLYWAGREREPSYEPEFIDHASTMINEMAKLMQINALNMVALHFRRRLHQYIRFKYAVEGKLELKYSETKRLVGSCYRVKSVPEKGDDGNLTGNTVKDWASWDDTKNPIEKELRAWLEIVPWQWQIRANSAHFIRKLSDMLAYMEKFVNKHPDTKGARVYSLLPVSTSYQAAYVKLNASTLYGFLSRRILDPKVKDFLDTELNHLPFDRKTFQKNRNEVLRLIFDVEQFETRDRTFAFEVKTNGYGASVTMIRPVTTRSVVVVEKPVSTKKHKKNDGTAGTKKKPTKKKLKTPEELAEADTFAKELFKLGPEYSPKVLIGIDPGMRSLVTAVSIGHLPRRRRHKSRRGKHRHHRKRHGKRKERVVKISTREYYHLARVNDFAFYNESLKRREPWYASVIRAMPSFKTANYDMYFGHLQFFWKHLRFLLAFSAEQAFLRWRFTRDRAKMKAMDTLAKRIVPKADKQVCIAYGD

SEQ ID NO: 1470 - protein, 304 aa, Phytophthora capsici
KKLKAPTELAEADTFTKELFKLGPEYSPKVLIGIDPGMRSLVTAVSIGHLPRRCRHKSRRGKHRHHRKRRGNRKEPVVQISTREYRHLARIHDFTFYNENLKRRELWYASVIRAMPSFKTASCDMYFGHLHLIWKHLRFLLAFSAEQAFLRWRFTRDHTKMKAIDTLAKRIVPKAGKQVCIAYNDWSRRDGLKGHATGPMKGFVEAPKRWATVIPMVEYRTSITCSGCHKRLRQSRLFNNLNRKKNEADVRLNERPSLREAKEIAEKAKFRNPKLANKKIVLKCTRNVLRCTNSLCKGMALQQP

SEQ ID NO: 1471 - protein, 232 aa, Phytophthora capsici
HAYTVTWLGSTDFEHGEGQKRSHPEYSKVIAKMPSFKTASYEKYLGRLEYFWYHAEFLLQFSVDRPFLKWKFFRKRMAQVAVDVAAKRIAPNVSRLMCVAYGDWSRRKGITGHAPSPVKGLKQALQKRATVVPMDEFKTSKLCSQCHQTLSQVSYEVDVMLPKKRKRKGVVLIRNRAEIQFEEKTCYGVLRCGHKNCTAQYWDRDVNAAINMVELLKSETLGRGRMPAFGRS

SEQ ID NO: 1472 - protein, 264 aa, Phytophthora capsici
DSGRYCGRGHVRQGCDQARSRVLARRPHRSRNERRGTPASSGQCPRSRLRVKYDYRSHLQFLWVHLQFLLAFSAEQSFLRWRFTRDVAKMKALGTLAQRLVPKARKQVCIAFGDWRRRDGIKGHATGPVKGFVEALKKRATVIPVGEYRTSITCSHCHQRLKQARLFNNIKRGHDEVDMRTEANPSPKEVRVIAKMAKFRNPKLVNRKIVLRGTRNVLRCSNSRCKTNFWNRDVNAARNTLEPLKSGLKGKHEATRLRAFRQGQ

SEQ ID NO: 1473 - protein, 359 aa, Phytophthora capsici
FSLPRFMKATKSSIAGFFAALKRDEKTSFPVLKFKSKFASTNSIKIPSRAVKVAEQDSHTAFPFQARFFGFKEADGIAVFEGIPTLTTSVRLHRLREGKYYLCVPRLRSFQKTESVRVCAIDPGVVNFVTVYDPDGRIISVTDAHKVLKKKFEAVDAMKSILALKDNACKDRHKLKVRSKKKTGRKSPKSKEHRLRYRLHRRMGFTYRKATRCVNDLHQKLSCWLSENYNTVLLPSFQTQEMVMRHLREVASDATPETASTEDNAAINTRKMRSPTARALMAQAHFKFKQLLKYKMKRTGGRVVDCEEEYTSKTCSSCGVIKTNLGGDRVFQCANCHAVFDRDVSAAKNILHKNFSLLT

SEQ ID NO: 1474 - protein, 359 aa, Phytophthora capsici
FSLPRFMKATKSSIAGFFAALKRDEKTSFPVLKFKSKFASTNSIKIPSRAVKVVEQDSHTAFPFHTRFFGFKEVDGIAVFEGIPTLTTSVRLHRLREGKYYLCVPRLRSFQKTESVRVCAIDPGVVNFATVYDPDGRTFSVTDAHKVLKKKFEAVDAMKSILALKDNACKDRHKLKVRSKKKTGRKSPKSKEHRLRYRLRRRMRFTYRKATRCVNDLHQKLSCWLSENYNIVLLPSFQTQEMVMRHLREVASDATPETASTEDNAAINTRKMRSPTARALMAQAHFKFKQLLKYKMKRTGGRVVDCEEEYTSKTCSSCGVIKTNLGGDRVFQCANCHAVFDRDVSAAKNILHKNFSLLT

SEQ ID NO: 1475 - protein, 258 aa, Phytophthora capsici
FSLPRFHEGHQNIYRGIFAALKRDENTSFPVLKFKASANSIEIPSRAVKVVEQDSLTALQFHARFFGFKEADGTAVFEDIPTVTASVRWQRLWEGKNYLCVTRLRSFQKPEAARVCAIDPGVVNFATVYDPDGRTFKFTDADKVLKKKFEDVDAMKSILALKDNVCKDRHKLKVRSKKKTGRKSPKSKEHRLRYCLRRRMRFTSRIATRCANDLHQKLSCWLSENYNTILLPSFQTQQMIMRHLREVASGATPETAST

SEQ ID NO: 1476 - protein, 241 aa, Paralithodes camtschaticus
KNMFNITKRYGRPRQWRRVKFRKYCLDQKTLDAFVNKTLFGGNNRSPFHVAYESAKFSATGKGEHYSSPNGKLAKLKRERASAENFTAVDEWNTSKVCHRCKGPLSPVGFVKVENEDKGETEETPKVTERLIYLRALRRCSAQSNNFNDVDTQRRKRQTRIGGNDNNNNLVSSPPSKCPIGGALLDRDSNAAANIAQKLFLDSSSTLQRGVKVETKRVFWLSKVYLKKKKKHTPCTHVTEV

SEQ ID NO: 1477 - protein, 239 aa, Propsilocerus akamusi
SWMQPASNSLFVAAVKIPSNPMNSFENIKISNKTYQHECGSNERKSKMKKFTGLVDKAMETDRRNINVPLNKKGNVHYEDFISFELKWLNVKQAEYCKNKISRLKFDKYIRTKSTLSSYVNRLVGDFKSTTCFFGDANIASSSPIKGYIRLPRKELRKSLENHPKINLIPTDEFRSTKLCSKYYAVNEIPESPHRFASCPHCKKVWNQDINAANNILINGVNKFMEIIPIPQFSRTFIL

SEQ ID NO: 1478 - protein, 472 aa, Propsilocerus akamusi
DHVKMASRKRKCYNEQPITSSTDKKQKLNELKVIKCTLNSVIKNTRLYDKINQDVAEMSLLAREASILISWDLVQKLDDGDYMNMSNFKSLPYFYMLLSGSKEKYTLLRNRFAIRKYNKTLRSNLFVQLSRQYDTIFDNNLWMHGYTRVRRFIKSLYHIDDNKMLYRDMKYLFSKDLSQTHLHENDPLPVWPQSHFSKLTSGRGLSYLNDFYLIWKWNNENQVKNFKLIPLYRAGRLYVNYDAFAFYQLLSSIGECPKYKNECGKMVAAKYHQVNMLDFLTLSNALRQKFHGSFATDGVACSIKIDCPPCNSTIEPVTRNLRSEAYFGIDPGCKLFLGGVYSRETVDSKPHHENLKYSSRQYHHECGYSERKIKLVKFTMNIDVHLEVKRPTNQSHIEYLTFELENMLEKQALYMKRNVARLKFDAYTRKQKILAQCIQKNVIKEASSVTVFFGDAKQVTNSPIKGYVRNRN

SEQ ID NO: 1479 - protein, 484 aa, Propsilocerus akamusi
KKSNFSTKYFYMLLPGAKAKYSLPEEYETLRNTHRARKYEKSYKGNLFKYAAQNYTAAFENNIAIHAYSRMKRFLKKIFPTKNASQIYHILKYLFDKKPVVIDASDVTKLESLLNCELPRGHFFSIKREPMNHFKIFFQLQSLNESNEWKNFNLIPLYKAGLKHVVYDKQSFHALLCRLKKCPMKLNARGRQVNQNYNEIQWSNYFSFKKTKMFQGTFTTDGVSVCVKYIKKISNAAKKPKISQSFDQYIGIDPGCRLFVAAVKIPSNSIENIKISNKMYQHECGRNERKSKMKKFTGLVDKAMETDRRNINVPLNKKGNAHYEDFISFQLKWLNVKQAEYCQNKISRLKFDKYIRTKSTLSSYVNRLVGDFKSTACFFGDATIASSSSIKGYIRLPGKELRKALENHPKINLIPTDEFRSTKLCSKCYAVNEIPESPHRFASCTHCKKVWNRDINAANNILINGVNKFMENIPIPQFSRTFIL

SEQ ID NO: 1480 - protein, 574 aa, Propsilocerus akamusi
CIFSQTSFTYKHTETSVDSKSGKTLKRKIEDGNETIKTVKCGLKKIVLNDTILSAIQEDVKEISLLMYEASRLIYFDLMKKLHHGESVEKVKFLDYFYMLLQGAKAKYSLPEEYETLRNTHRARKYDKSYKGNLFKYAAQNYTTAFENNIAIHAYSRMKRFLKKIFPAKNASQIYHILKYLFDKKPVVIDPSDVTKLESLLNCELPRGHFFSIKREPMNHVKIFFQLQSLNESNEWKNFNLIPLYKAGLKHVVYDKQSFHALLCRLKKCPTKLNARGRQVNENYNEIQWSNYFSFKKTKMFQGTFTTDGVSVCVKYIKKISNAAKKAKISQSFDQYIGIDPGCRLFVAAVKIPSNSMNSFQNIKISNKTYQHECGSNERKSKMKKFTGLVDKAMETDRRNINVPLNKKGNAHFEDFIGFELKWLNVKQAEYCKNKISRLKFDKYIRTKSTLSSYVNRLVGDFKSTACFFGDATISSNSPIKGYIRLPGKELRKALENHPKINLIPTDEFRSTKLCSKCYAVNEIPESPHRFASCTHCKKVWNRDINAANNILINGVNKLMEIIPIPQFSRTFIL

SEQ ID NO: 1481 - protein, 228 aa, Phytophthora pseudosyringae
YRHGDLHARAPTFGEDERLPVLQRKPEEAGAVVRYCHSCDTVLQDLELHTYFQRFQFFWKHLLFLLAFSAEQYFLRWRFTQDRAKMKALDSLAKRLVPKASKQVCIAYGDWSRRDGIKGHATGPDKGFVEALKKRATVVPMDEYRTSITCSRCHKSLMQARLFTKVRRKKDEEDIRMKEQPSKKEVKEIAEMRKFKNPKLANQKVVQAPGTSCAVPTVVARLTSGTGT

SEQ ID NO: 1482 - protein, 249 aa, Phytophthora pseudosyringae
RGSVQNRLPQVRRRREDQRLRCFSDHDSTAYDDLRCSSRVNGLHEEEEEDERRRRAAHARKEPQTKKAMIPEEIAAGDSFAKELFKLGSDYAPDVIIGIDPGMRSIVTAVSVGRLPRRRRRHRGRNRHRPHMRRPPRKQTVMEISTREYRHLAKMNDLRFYSENLKKREPLYATVVRAMPSFKTSSYDTYFQRLQFFWQHLRFLLTFSAEQAILRWRFTQDRAKMMALDSLAKRLVPKASKQVCIAYGD

SEQ ID NO: 1483 - protein, 387 aa, Apostasia ramifera
NGPMSRFRLYPTVEQEQRLTLYCSHARYIWNIAVEQLGHYRPGHGMPGTAEQSRQLTEARHEHDWLREVPTVVGQQALRDFRQACTNWWAGTHRRPTWRKKDRHEGFRVTNGHGIRVEKLNRRWSRVWITGLGWVKFRRTREVGDVRSFRITRDPAGRWHVAFAVKPDPTEAPGNREVIGVDRGVAVTLAYSDGTMLHAPIPAPVKAAAQALSRCKRGSTRRRKARARLAREHARNTDRRRDFIEKATTALARRFDLIRIEDLRVGSMTRSAKGTVEKPGRNVRQKAGLNRSIMAGGWGVFAQRLEDKAPQRVEKFNPAFTSQTCAVCRYTDKANRENQSFACRSCGHTAHADVNAAQVIAAGRAVRGVEHVAALKREPQLPTSSVA

SEQ ID NO: 1484 - protein, 231 aa, Listronotus oregonensis
MRKQKRAKWTRNIDKKIHIEQEAVGFDKTSSRSIPYVHFYTSFFLRHFEEKQQCYERRNLLRLKFDKYVHQQKLQHGLIRKYFSRPNEHSLVLYGAGYQFMNTASFKGHRKFGHNKLVACMRRYYASAVTCVDVDESYTTKTCSYCRRTSGGRTITNVQVAKKHGHRYVFCSKCHKGIHRDKNGAQNILLKFVQKQFVGLLSWIDKDFCLATPPASAGMSLRARIVTLSAS

SEQ ID NO: 1485 - protein, 616 aa, Listronotus oregonensis
QKNNVNNMVCPSCLQSDHSRSSSARCLKHKRRIREQNLKANEKVEIYTIKKCLASILCPLLENKQSLLQKIQQDVREVSRLSIEMSVLVNFFYKSYFMHYNTRNEFYVHFPKFSPLHFMYVLQNKRNQLDDPADIIGEYKRMRTLPAYNGQLRSFIIQEAAKQYDTVFRTNITTHMFTRIKRYLRLLYPDQTAADIHQKSYQLYYKQETNSNNDDVIVNFFTLHNLDVKSVKKDPWMYVYLMMEMQRKFEEEKTAVKHIQTFPQYSHGSKYITYTSTGLYELLRSIKGPDVPPGDLVRFREEAPKFWRRYFNVAANFGYTMSTDGVACSLSMNRVVAVKTTVKKRKIEPTTPSKITRIIAVDPGAKTPIVTCDTSLQYQMLRKEQVSHETREYMRKQKRRKWTGKFDKKLHTEQESVGFEKTSSRSIQHVRHYTDFFLQHFQEKQQCYERRNLVRLKFDKYVHDQKLQHVLIRKYFYNENERTLVLYGNGYNFMKTATFRGHRKFSHSKLLSCLRREPSYSKNVTCLNVDESYTTKTCSYCRRTNNGVEVNVQVANKDGHRYVICSNCHKGIHRDKNGAQNILVKFIQKHFVNLLSWIDNDSMSLQARIVTLGGLL

SEQ ID NO: 1486 - protein, 1221 aa, Leptopilina boulardi
ILVNCLTFIIVMSDKKKETNKSPPSRADIENAQRRVEQINAINRRNVSRQFVPLLPRRSDNNSGSNHNSNSVDSNRIRTVYSRFTPLFPRRCQQSDNGQNCNVNRVRRQLFPPRDEEHLNQEQSASTSVNFVYRQDQSQEIIPTNHQQLFPLQQDAHLNQEPNALPSFNFVYRQDQSLQEDISADHRQPEQPFLNDENTVMSINDNSQPFISNINNDDRTLSWQKNLNLLNIESSESGDLGEENEFQRCPIPRKRFKLNLGSDKRSEKTTNEAENEKNTPTEKFELPKSLSTQKNYANEPQPSTSKQADVQDAVSFISMVTKKSMKKTTDKIQNTRKKTPKKQSLKNKKETPQKVDKSSTTAVDDNDDDDDDDDDDDDEDLKLQTKFTIKTGFSDSFCCCPELRDLVINQVKVLSRMTILVTIFINFALRHPTNDYLRKIWSEQGPDYNSIFPLFKENSTEPRTDAKKEMHNKLKNEFIPQFSEFMGGKFELFNCTNLSSQIQEMAIQLNVNYLTNLHYHARSRLATFFKHELFKKNKSTMKLNKKETTERQQERTRVYREKKLIRRLRNKKKREKWAKKKKKIKQLYREERRARRAELERLHPYEPHVEKLIFRNVKKLKQNRDIIQRQIVYDLPPKGKNRGKKYRERLTLKKNNKNWEKPSRKKKSSKPSTKKSKIINSKEATKKVQDNEEEEELNHRKIIKTKLDNLLKYNECDNETLKALNLENLDFRDLKRRKECHKFFIFFHRLQDYFAREGIKSFILVPIMSPGLKYITYTNTALKLLETELKKVAPDYTCTKKAPEKFTVNEITAQELMHKDIISPLKEKSKLLHAEKIGLERNFQYLEKANNPKNSEELSNIKNQIKEITKKLTPIKKEIQLENKRHQDIKNQRRPEKINENDERWNNMFDISKIQVNKEKLKFSKTIMTDGVAVSVIYNLVKPKNITNFSPLQQQESRDLTKYEVFKGLDPGLKFGFAGVERKMNDNFDIKCIDKHIKISTKSYRWQTQENKRQSILYNETKNYKKYYHDLQVSEKYRDKVNHKDPQQILISTEYLLTALKRNQPYFEKRKIAALKWDKYMSVQRETDLLANYMVGDVKRKQLLVIGSPEISPWMRGHVRMPLRKVVRRLIEKQSKYPNLRIVFIDEHRTTKLCSTCNENMDIFRNRTAYCASCKISWNRDVNAGRNILNLGLVKLGIINKEQLPNWNDFRALKNIQDWNE

SEQ ID NO: 1487 - protein, 1221 aa, Leptopilina boulardi
ILVNCLTFIIVMSDKKKETNKSPPSRADIENAQRRVEQINAINRRNVSRQFVPLLPRRSDNNSGSNHNSNSVDSNRIRTVYSRFTPLFPRRCQQSDNGQNCNVNRVRRQLFPPRDEEHLNQEQSASTSVNFVYRQDQSQEIIPTNHQQLFPLQQDAHLNQEPNALPSFNFVYRQDQSLQEDISADHRQPEQPFLNDENTVMSINDNSQPFISNINNDDRTLSWQKNLNLLNIESSESGDLGEENEFQRCPIPRKRFKLNLGSDKRSEKTTNEAENEKNTPTEKFELPKSLSTQKNYANEPQPSTSKQADVQDAVSFISMVTKKSMKKTTDKIQNTRKKTPKKQSLKNKKETPQKVDKSSTTAVDDNDDDDDDDDDDDDEDLKLQTKFTIKTGFSDSFCCCPELRDLVINQVKVLSRMTILVTIFINFALRHPTNDYLRKIWSEQGPDYNSIFPLFKENSTEPRTDAKKEMHNKLKNEFIPQFSEFMGGKFELFNCTNLSSQIQEMAIQLNVNYLTNLHYHVRSRLATFFKHELFKKNKSTMKLNKKETTERQQERTRVYREKKLIRRLRNKKKREKWAKKKKKIKQLYREERRARRAELERLHPYEPHVEKLIFRNVKKLKQNRDIIQRQIVYDLPPKGKNRGKKYRERLTLKKNNKNWEKPSRKNKSSKPSTKKSKIINSKEATKKVQDNEEEEELNHRKIIKTKLDNLLKYNECDNETLKALNLENLDFRDLKRRKECHKFFIFFHRLQDYFAREGIKSFILVPIMSPGLKYITYTNTALKLLETELKKVAPDYTCTKKAPEKFTVNEITAQELMHKDIISPLKEKSKLLHAEKIGLERNFQYLEKANNPKNSEELSNIKNQIKEITKKLTPIKKEIQLENKRHQDIKNQRRPEKINENDERWNNMFDISKIQVNKEKLKFSKTIMTDGVAVSVIYNLVKPKNITNFSPLQQQESRDLTKYEVFKGLDPGLKFGFAGVERKMNDNFDIKCIDKHIKISTKSYRWQTQENKRQSILYNETKNYKKYYHDLQVSEKYRDKVNHKDPQQILISTEYLLTALKRNQPYFEKRKIAALKWDKYMSVQRETDLLANYMVGDVKRKQLLVIGSPEISPWMRGHVRMPLRKVVRRLIEKQSKYPNLRIVFIDEHRTTKLCSTCNENMDIFRNRTAYCASCKISWNRDVNAGRNILNLGLVKLGIINKEQLPNWSDFRALKNIQDWNE

SEQ ID NO: 1488 - protein, 1218 aa, Leptopilina boulardi
ILVNCLTFIIVMSDKKKETNKSPPSRADIENAQRRVEQINAINRRNVSRQFVPLLPRRSDNNSGSNHNSNSVDSNRIRTVYSRFTPLFPRRCQQSDNGQNCNVNRVRRQLFPPRDEEHLNQEQSASTSVNFVYRQDQSQEIIPTNHQQLFPLQQDAHLNQEPNALPSFNFVYRQDQSLQEDISADHRQPEQPFLNDENTVMSINDNSQPFISNINNDDRTLSWQKNLNLLNIESSESGDLGEENEFQRCPIPRKRFKLNLGSDKRSEKTTNEAENEKNTPTEKFELPKSLSTQKNYANEPQPSTSKQADVQDAVSFISMVTKKSMKKTTDKIQNTRKKTPKKQSLKNKKETPQKVDKSSTTAVDDNDDDDDDDDDEDLKLQTKFTIKTGFSDSFCCCPELRDLVINQVKVLSRMTILVTIFINFALRHPTNDYLRKIWSEQGPDYNSIFPLFKENSTEPRTDAKKEMHNKLKNEFIPQFSEFMGGKFELFNCTNLSSQIQEMAIQLNVNYLTNLHYHARSRLATFFKHELFKKNKSTMKLNKKETTERQQERTRVYREKKLIRRLRNKKKREKWAKKKKKIKQLYREERRARRAELERLHPYEPHVEKLIFRNVKKLKQNRDIIQRQIVYDLPPKGKNRGKKYRERLTLKKNNKNWEKPSRKKKSSKPSTKKSKIINSKEATKKVQDNEEEEELNHRKIIKTKLDNLLKYNECDNETLKALNLENLDFRDLKRRKECHKFFIFFHRLQDYFAREGIKSFILVPIMSPGLKYITYTNTALKLLETELKKVAPDYTCTKKAPEKFTVNEITAQELMHKDIISPLKEKSKLLHAEKIGLERNFQYLEKANNPKNSEELSNIKNQIKEITKKLTPIKKEIQLENKRHQDIKNQRRPEKINENDERWNNMFDISKIQVNKEKLKFSKTIMTDGVAVSVIYNLVKPKNITNFSPLQQQESRDLTKYEVFKGLDPGLKFGFAGVERKMNDNFDIKCIDKHIKISTKSYRWQTQENKRQSILYNETKNYKKYYHDLQVSEKYRDKVNHKDPQQILISTEYLLTALKRNQPYFEKRKIAALKWDKYMSVQRETDLLANYMVGDVKRKQLLVIGSPEISPWMRGHVRMPLRKVVRRLIEKQSKYPNLRIVFIDEHRTTKLCSTCNENMDIFRNRTAYCASCKISWNRDVNAGRNILNLGLVKLGIINKEQLPNWSDFRALKNIQDWNE

SEQ ID NO: 1489 - protein, 266 aa, Leptopilina boulardi
ESRDVTKYEVFKGLDPGLKFGFAGVERKMNDNFDIKCIDKHIKISTKSYRWQTQENKRQSILYNETKNYKKYYHDLQVSEKYRDKVNHKDPQQILISTEYLLAALKRNQPYFEKRKIAALKWDKYMSVQRETDLLANYMVGDVKRKQLLVIGSPEISPWMRGHVRMPLRKVARRLIEKQSKYPNLRIVFIDEHRTTKLCSTCNENMDIFRNRTAYCASCKISWNRDVNAGRNILNLGLVKLGIINKEQLPNWSDFRALKNIQDWNE

SEQ ID NO: 1490 - protein, 306 aa, Leptopilina boulardi
VNKEKLKFSKTIMTDGVAVSVIYNLVKPKNITNFSPLQQQESRDVTKYEVFKGLDPGLKFGFAGVERKMNDNFDIKCIDKHIKISTKSYRWQTQENKRQSILYNETKNYKKYYHDLQVSEKYRDKVNHKDPQQILISTEYLLTALKRNQPYFEKRKIAALKWDKYMSVQRETDLLANYMVGDVKRKQLLVIGSPEISPWMRGHVRMPLRKVARRLIEKQSKYPNLRIVFIDEHRTTKLCSTCNENMDIFRNRTAYCASCKISWNRDVNAGRNILNLVLVKLGIINKEQLPNWSDFRALKNIQDWNE

SEQ ID NO: 1491 - protein, 1220 aa, Leptopilina boulardi
ILVNCLTFIIVMSDKKKETNKSPPSRADIENAQRRVEQINAINRRNVSRQFVPLLPRRSDNNSGSNHNSNSVDSNRIRTVYSRFTPLFPRRCQQSDNGQNCNVNRVRRQLFPPRDEEHLNQEQSASTSVNFVYRQDQSQEIIPTNHQQLFPLQQDAHLNQEPNALPSFNFVYRQDQSLQEDISADHRQPEQPFLNDENTVMSINDNSQPFISNINNDDRTLSWQKNLNLLNIESSESGDLGEENEFQRCPIPRKRFKLNLGSDKRSEKTTNEAENEKNTPTEKFELPKSLSTQKNYANEPQPSTSKQADVQDAVSFISMVTKKSMKKTTDKIQNTRKKTPKKQSLKNKKETPQKVDKSSTTAVDDNDDDDDDDDDDDEDLKLQTKFTIKTGFSDSFCCCPELRDLVINQVKVLSRMTILVTIFINFALRHPTNDYLRKIWSEQGPDYNSIFPLFKENSTEPRTDAKKEMHNKLKNEFIPQFSEFMGGKFELFNCTNLSSQIQEMAIQLNVNYLTNLHYHARSRLATFFKHELFKKNKSTMKLNKKETTERQQERTRVYREKKLIRRLRNKKKREKWAKKKKKIKQLYREERRARRAELERLHPYEPHVEKLIFRNVKKLKQNRDIIQRQIVYDLPPKGKNRGKKYRERLTLKKNNKNWEKPSRKNKSSKPSTKKSKIINSKEATKKVQDNEEEEELNHRKIIKTKLDNLLKYNECDNETLKALNLENLDFRDLKRRKECHKFFIFFHRLQDYFAREGIKSFILVPIMSPGLKYITYTNTALKLLENELKKVAPDYTCTKKAPEKFTVNEITAQELMHKDIISPLKEKSKLLHAEKIGLERNFQYLEKANNPKNSEELSNIKNQIKEITKKLTPIKKEIQLENKRHQDIKNQRRPEKINENDERWNNMFDISKIQVNKEKLKFSKTIMTDGVAVSVIYNLVKPKNITNFSPLQQQESRDLTKYEVFKGLDPGLKFGFAGVERKMNDNFDIKCIDKHIKISTKSYRWQTQENKRQSILYNETKNYKKYYHDLQVSEKYRDKVNHKDPQQILISTEYLLTALKRNQPYFEKRKIAALKWDKYMSVQRETDLLANYMVGDVKRKQLLVIGSPEISPWMRGHVRMPLRKVVRRLIEKQSKYPNLRIVFIDEHRTTKLCSTCNENMDIFRNRTAYCASCKISWNRDVNAGRNILNLGLVKLGIINKEQLPNWSDFRALKNIQDWNE

SEQ ID NO: 1492 - protein, 1218 aa, Leptopilina boulardi
ILVNCLTFIIVMSDKKKETNKSPPSRADIENAQRRVEQINAINRRNVSRQFVPLLPRRSDNNSGSNHNSNSVDSNRIRTVYSRFTPLFPRRCQQSDNGQNCNVNRVRRQLFPPRDEEHLNQEQSASTSVNFVYRQDQSQEIIPTNHQQLFPLQQDAHLNQEPNALPSFNFVYRQDQSLQEDISADHRQPEQPFLNDENTVMSINDNYQPFISNINNDDRTLSWQKNLNLLNIESSESGDLGEENEFQRCPIPRKRFKLNLGSDKRSEKTTNEAENEKNTPTEKFELPKSLSTQKNYANEPQPSTSKQADVQDAVSFISMVTKKSMKKTTDKIQNTRKKTPKKQSLKNKKETPQKVDKSSTTAVDDNDDDDDDDDDEDLKLQTKFTIKTGFSDSFCCCPELRDLVINQVKVLSRMTILVTIFINFALRHPTNDYLRKIWSEQGPDYNSIFPLFKENSTEPRTDAKKEMHNKLKNEFIPQFSEFMGGKFELFNCTNLSSQIQEMAIQLNVNYLTNLHYHARSRLATFFKHELFKKNKSTMKLNKKETTERQQERTRVYREKKLIRRLRNKKKREKWAKKKKKIKQLYREERRARRAELERLHPYEPHVEKLIFRNVKKLKQNRDIIQRQIVYDLPPKGKNRGKKYRERLTLKKNNKNWEKPSRKNKSSKPSTKKSKIINSKEATKKVQDNEEEEELNHRKIIKTKLDNLLKYNECDNETLKALNLENLDFRDLKRRKECHKFFIFFHRLQDYFAREGIKSFILVPIMSPGLKYITYTNTALKLLENELKKVAPDYTCTKKAPEKFTVNEITAQELMHKDIISPLKEKSKLLHAEKIGLERNFQYLEKANNPKNSEELSNIKNQIKEITKKLTPIKKEIQLENKRHQDIKNQRRPEKINENDERWNNMFDISKIQVNKEKLKFSKTIMTDGVAVSVIYNLVKPKNITNFSPLQQQESRDLTKYEVFKGLDPGLKFGFAGVERKMNDNFDIKCIDKHIKISTKSYRWQTQENKRQSILYNETKNYKKYYHDLQVSEKYRDKVNHKDPQQILISTEYLLTALKRNQPYFEKRKIAALKWDKYMSVQRETDLLANYMVGDVKRKQLLVIGSPEISPWMRGHVRMPLRKVVRRLIEKQSKYPNLRIVFIDEHRTTKLCSTCNENMDIFRNRTAYCASCKISWNRDVNAGRNILNLGLVKLGIINKEQLPNWSDFRALKNIQDWNE

SEQ ID NO: 1493 - protein, 1220 aa, Leptopilina boulardi
ILVNCLTFIIVMSDKKKETNKSPPSRADIENAQRRVEQINAINRRNVSRQFVPLLPRRSDNNSGSNHNSNSVDSNRIRTVYSRFTPLFPRRCQQSDNGQNCNVNRVRRQLFPPRDEEHLNQEQSASTSVNFVYRQDQSQEIIPTNHQQLFPLQQDAHLNQEPNALPSFNFVYRQDQSLQEDISADHRQPEQPFLNDENTVMSINDNSQPFISNINNDDRTLSWQKNLNLLNIESSESGDLGEENEFQRCPIPRKRFKLNLGSDKRSEKTTNEAENEKNTPTEKFELPKSLSTQKNYANEPQPSTSKQADVQDAVSFISMVTKKSMKKTTDKIQNTRKKTPKKQSLKNKKETPQKVDKSSTTAVDDNDDDDDDDDDDDEDLKLQTKFTIKTGFSDSFCCCPELRDLVINQVKVLSRMTILVTIFINFALRHPTNDYLRKIWSEQGPDYNSIFPLFKENSTEPRTDAKKEMHNKLKNEFIPQFSEFMGGKFELFNCTNLSSQIQEMAIQLNVNYLTNLHYHARSRLATFFKHELFKKNKSTMKLNKKETTERQQERTRVYREKKLIRRLRNKKKREKWAKKKKKIKQLYREERRARRAELERLHPYEPHVEKLIFRNVKKLKQNRDIIQRQIVYDLPPKGKNRGKKYRERLTLKKNNKNWEKPSRKNKSSKPSTKKSKIINSKEATKKVQDNEEEEELNHRKIIKTKLDNLLKYNECDNETLKALNLENLDFRDLKRRKECHKFFIFFHRLQDYFAREGIKSFILVPIMSPGLKYITYTNTALKLLETELKKVAPDYTCTKKAPEKFTVNEITAQELMHKDIISPLKEKSKLLHAEKIGLERNFQYLEKANNPKNSEELSNIKNQIKEITKKLTPIKKEIQLENKRHQDIKNQRRPEKINENDERWNNMFDISKIQVNKDKLKFSKTIMTDGVAVSVIYNLVKPKNITNFSPLQQQESRDLTKYEVFKGLDPGLKFGFAGVERKMNDNFDIKCIDKHIKISTKSYRWQTQENKRQSILYNETKNYKKYYHDLQVSEKYRDKVNHKDPQQILISTEYLLTALKRNQPYFEKRKIAALKWDKYMSVQRETDLLANYMVGDVKRKQLLVIGSPEISPWMRGHVRMPLRKVVRRLIEKQSKYPNLRIVFIDEHRTTKLCSTCNENMDIFRNRTAYCASCKISWNRDVNAGRNILNLGLVKLGIINKEQLPNWSDFRALKNIQDWNE

SEQ ID NO: 1494 - protein, 970 aa, Leptopilina boulardi
SFSFMKSKTCFYTFFPELPLQIDTMNNRKRRRETQSSKATSPSNAEPTKKQKKIEKSSFPNAASSQFPPSTSKPKVSNTASKDAKEEDQEQKYYTRYMSLNAILPEGNIVKEKIQDDVNVLSRLKIVCSIFLEYIMNAHDSKIAKRYAKEGIQFDKIMGCFKKRTVAAEKTFRKKHGELDKLFEDFKVLLKDEKTEIDSDLFEEFQQLHKGKSKWKDENEKYEAFNKYRIEKLTKFDCANKEDLILQACQEMKKDMGVHIQINGPKILEKYFNLLLMEKKNQNNDEYKVEDSFVKANSDEEKIEENLKNRRRRKNWNKKMKKKRMERKRTHNMEDQNKQQKKEMTRQQLRKERIYFQLITRKADRKDDLKKINEDYDKRTYKVKKKTEITEEEKEKKKKEKKEKEKKKKEKKEKEKKKKEEKKKKEEEKKKEQEKNKEEKKKEEKKTNDEPKTRNKPLTRKERKQQVETLVNLLIEENQCTDETLKKILKEVQEEYDTFYEKLEKEDEEEEEEEEEKKKQEEIENEKGKKTEKEEIQGQKRKKAEEKKQVERRKPLDFKNLKSHYTSHKLLPFFMKLQKHFVENKIKSFVLFPIRRYGIQHATYTKTILLRNVLPYVHKKENMNPQQKKNEINKINKLNGKDNQLEYLWNRLFDFTELMKKNKIKKLPTLMQTDGVKVSLIFDRTETQKEIFKQEPKEVKIKKYTRFVGLDPGRKAIVGGVIRRGEPKMLEKVKDQDAPIYVKAKTFRFRAGEFRRRDILNRKTKKMNEKYKKFMKENPTFNVNTKDPRQYEKIAKFRMKLFEIFQDTLSKRSIVQLKFNKLVLVEREKDRVVNKIIGNLKEESCFVGIGNEKLANFTKGHVFTPIRQIHKKLQERSRQVGEQKLKILHVSEWYTTQKCSTCCGQCFVSASPKRYSFCQKCNITWERDINAGRNILNLALIKANLMERTDLKDPSVFPQIRESANADIFR

SEQ ID NO: 1495 - protein, 312 aa, Leptopilina boulardi
EAQREKSTKVKRFLSLQEKIDRWHYLFDFSKTERGKKGAFSEAISTNGVDVSVLFDVPKFRKESITEDKEEKYKVFYGFDPGKKIMLGGVRRFGNPNPSSENKSKDKPIHLKSSRFRWQISVYLRKEKKKKFGLDLQKYFKEYVIKNPNMENFSNKNPRDFKRIVNYKIHLFTKFQELHEKKALIRLKMDKYMSHQRECEKLVNFFIGDTLEKPCFVAFGNAKMPNFTLGYAGTPMNQLKQTFDNRAKQLGSRRLKIVTVNEFHTTALCINCCFRLFKSKTPNRYLRCDDNCHTIWKEDINGGRNIHKISHL

SEQ ID NO: 1496 - protein, 386 aa, Leptopilina boulardi
KNWFGKKFSIFGKANNPKNAEELLNIKNQLKEITKKLTPIKKEIQLENKRHQDIKNQRRPEKINENDERWNNMFDISKIQVNKDKLKFSKTIMTDGVAVSVIYNLVKPKNITNFSPLQQQESRDLTKYEVFKGLDPGLKFGFAGVERKMNDNFDIKCTDKHIKISTKSYRWQTQENKRQSILYNETKNYKKYYHDLQVSEKYRDKVNHKDPQQILISTEYLLTALKRNQPYFEKRKIAALKWDKYMSVQRETDLLANYMVGDVKRKQLLVIGSPEISPWMRGHVRMPLRKVVRRLIEKQSKYPNLRIVFIDEHRTTKLCSTCNENMDIFRNRTAYCASCKISWNRDVNAGRNILNLGLVKLGIINKEQLPNWSDFRALKNIQDWNE

SEQ ID NO: 1497 - protein, 1218 aa, Leptopilina boulardi
ILVNCLTFIIVMSDKKKETNKSPPSRADIENAQRRVEQINAINRRNVSRQFVPLLPRRSDNNSGSNHNSNSVDSNRIRTVYSRFTPLFPRRCQQSDNGQNCNVNRVRRQLFPPRDEEHLNQEQSASTSVNFVYRQDQSQEIIPTNHQQLFPLQQDAHLNQEPNALPSFNFVYRQDQSLQEDISADHRQPEQPFLNDENTVMSINDNSQPFISNINNDDRTLSWQKNLNLLNIESSESGDLGEENEFQRCPIPRKRFKLNLGSDKRCEKTTNEAENEKNTPTEKFKLPKSLSTQKNYANEPQPSTSKQADVQDAVSFISMVTKKSMKKTTDKIQNTRKKTPKKQSLKNKKETPQKVDKSSTTAVDDNDDDDDDDDDEDLKLQTKFTIKTGFSDSFCCCPELRDLVINQVKVLSRMTILVTIFINFALRHPTNDYLRKIWSEQGPDYNSIFPLFKENSTEPRTDAKKEMHNKLKNEFIPQFSEFMGGKFELFNCTNLSSQIQEMAIQLNVNYLTNLHYHARSRLATFFKHELFKKNKSTMKLNKKETTERQQERTRVYREKKLIRRLRNKKKREKWAKKKKKIKQLYREERRARRAELERLHPYEPHVEKLIFRNVKKLKQNRDIIQRQIVYDLPPKGKNRGKKYRERLTLKKNNKNWEKPSRKNKSSKPSTKKSKIINSKEATKKVQDNEEEEELNHRKIIKTKLDNLLKYNECDNETLKALNLENLDFRDLKRRKECHKFFIFFHRLQDYFAREGIKSFILVPIMSPGLKYITYTNTALKLLETELKKVAPDYTCTKKAPEKFTVNEITAQELMHKDIISPLKEKSKLLHAEKIGLERNFQYLEKANNPKNSEELSNIKNQIKEITKKLTPIKKEIQLENKRHQDIKNQRRPEKINENDERWNNMFDISKIQVNKEKLKFSKTIMTDGVAVSVIYNLVKPKNITNFSPLQQQESRDLTKYEVFKGLDPGLKFGFAGVERKMNDNFDIKCIDKHIKISTKSYRWQTQENKRQSILYNETKNYKKYYHDLQVSEKYRDKVNHKDPQQILISTEYLLTALKRNQPYFEKRKIAALKWDKYMSVQRETDLLANYMVGDVKRKQLLVIGSPEISPWMRGHVRMPLRKVVRRLIEKQSKYPNLRIVFIDEHRTTKLCSTCNENMDIFRNRTAYCASCKISWNRDVNAGRNILNLGLVKLGIINKEQLPNWSDFRALKNIQDWNK

SEQ ID NO: 1498 - protein, 973 aa, Leptopilina boulardi
SFSFMKSKTCFYTFFPELPLQIDTMNNRKRRRETQSSKATSPSNAEPTKKHKKIEKSSFPNAASSQFPPSTSKPKVSNTASKDAKEEDQEQKYYTRYMSLNAILPEGNIVKEKIQDDVNVLSRLKIVCSIFLEYIMNAHDSKIAKRYAKEGIQFDKIMGCFKKRTVAAEKTFRKKHGELDKLFEDFKVLLKDEKTEIDSDLFEEFQQLHKGKSKWKDENEKYEAFNKYRIEKLTKFDCANKEDLILQACQEMKKDMGVHIHINGPKILEKYFNLLLMEKKNQNNDEYKVEDSFVKANSDEEKIEENLKNRRRRKNWNKKMKKKRMERKRTHNMEDQNKQQKKEMTRQQLRKERIYFQLITRKADRKDDLKKINEDYDKRTYKVKKKTEITEEEKEKKKKEKKEKEKKKKEKKEKEKKEKEKKKKEEKKKKEEEKKKEQEKNKEEKKKEEKKTNDEPKTRNKPLTRKERKQQVETLVNLLIEENQCTDETLKKILKEVQEEYDTFYEKLEKEEEEEEEEEKKKQEEIENEKGKKTEKEEIQGQKRKKAEEKKQVERRKPLDFKNLKSHYTSHKLLPFFMKLQKHFVENKIKSFVLFPIRRYGIQHATYTKTILLRNVLPYVHKKENMNPQQKKNEINKINKLNGKDNQLEYLWNRLFDFTELMKKNKIKKLPTLMQTDGVKVSLIFDRTETQKEIFKQEPKEVKIKKYTRFVGLDPGRKAIVGGVIRRGEPKMLEKVKDQDAPIYVKAKTFRFRAGEFRRRDILNRKTKKMNEKYKKFMKENPTFNVNTKDPRQYEKIAKFRMKLFEIFQDTLSKRSIVQLKFNKLVLVEREKDRVVNKIIGNLKEESCFVGIGNEKLANFTKGHVFTPIRQIHKKLQERSRQVGEQKLKILHVSEWYTTQKCSTCCGQCFVSASPKRYSFCQKCNITWERDINAGRNILNLALIKANLMERTDLKDPSVFPQIRESANADIFR

SEQ ID NO: 1499 - protein, 313 aa, Cystobasidium slooffiae
QTDPRLQYEPESYEEKPPFDETSSLRGSVFYAKKYLKDKKLECVTTLPTEATRKGMYKHVISLDDNSAPIVKDWLMLTSEQNEGAEIKIAGDDPGIRFSQAIHINSPPSSSSYLSHLKGDEKPDQEQETSHQSQGASDTFLLAPHTLAEVARSVSHVKQRLRSRMAFSTLDILNASKQQLNSGDKHRLSSFYNLVDLSLKCSRDYCHSSFRGRQQVRRFYDKTARQFAELVWPKHYENGPKSPLLFVIGDSCGYGNSQARKHHADYSTTSVRQLQKRLESWKLPVKFVLVDELFSSQVCPDPKCRDDQGLRSM

SEQ ID NO: 1500 - protein, 229 aa, Carpediemonas membranifera
TSIYKTRLGLCSSTSRKFDAGMVKSFRRVRLTNHILRQKHFHRAAEQIARTLGWTPRRLPRSIAPPRAAPTRLVVFYGSARFKTPRLVHPCAPYGRFATLLPHRAFNITAEVRMTNEFRTSLFCPFCRARFRRTRYTRRTMRCHNPNCQGAPWYRQQRLNSNPTSTWLNLSHRDKTAAQNILDCGLMTDAQYQASAFRNPRPPARLPNYNPNTPITANQPLVFASGQAN

SEQ ID NO: 1501 - protein, 302 aa, Carpediemonas membranifera
VRMIGALVPTAAVTSLAARLVSINNSIRFVLDNANDIFEAGMRKSFRLVRFANHILRQKHFARCDQQLAREFGRHHPIATPIRLKVFYGSSGFTTPAGMFIPCAPYRKFAREIVPLLKGYNIVVDLNMVDEDRTTVVCPHCHAPYKRVRPRDDQHVHPQRVMLCENPQCRGAQWRATVPDALNVDHRDKSAAETSCGVLLPRKMSSVALRSVAPRSRAFQHHSSIINWLTANIRLRTDDVVQFGTLIVPFRPCLEVRTMCLYCATSQFAHPSLHTFLCAIGLFRYLQGRWPRVILVCLKNRI

SEQ ID NO: 1502 - protein, 253 aa, Carpediemonas membranifera
RRLPQRTAHTCTRRSSGSGLRGHRAASFKSTRLVSINNSIRFVLDNANDIFEAGMRKSFRRVRFANHILRQKHFARCGQQLAREFGWRRHHPIATPIRLKVFYGSSGFTTPAGMFIPCAPYRKFAREIVPLLKRYNIVVDLNMVNEDRTTVVCPHCHAPYKRVRPRDDQHVHPHRVMLCENPQCRGAQWRATVPDALNVGHRDKSAAENILWRSLATEDELSGSPYSRTSIPRLPTSFQHHQLANRQHSSTDG

SEQ ID NO: 1503 - protein, 231 aa, Carpediemonas membranifera
YDGRVVQEHKTVSIINSIRFVLDNANDIFEAGMRKSFRRVRFANHILRQKHFARCGQQLAREFGWRGHHPIATPIRLKVFYGSSGFTTPAGMFIPCAPYRKFAREIVPLLKRYNIVVDLNMVNEDRTTVVCPHCHAPYKRVRPRDDQHVHPHRVMLCEKPQCRGAQWRATVPDALNVDHRDKSAAENILWRSLATEDELSGSPFSRTSIPRLPTSFQYHQLANRHHSSADG

SEQ ID NO: 1504 - protein, 209 aa, Carpediemonas membranifera
SRKLLAYADSPAGRSSSELNSPSLAHLLSYTNRVADMRASAMVRAIMRAGMFYVLSDVAFLTRRTEPIHLKVAYGAALFGSAGTPSCAPYRHFARALPGIMLRHNVVVTVAMVSEFRTSIVCPYCKSTLQTCGAHRTMLCQNPACEGAPWRDKRLSRHPEQRDMLLNLSHRDKSASENIHWCTFDATPDQIGLSPFHYGTQRGALPRYH

SEQ ID NO: 1505 - protein, 208 aa, Carpediemonas membranifera
VSTTLLGLCWTTRTTFSRLECVSLSAECALRTTSFARCGQQLAREFGWRRHHPIATPIRLKVFYGSSEFTTPAGMFIPCAPYRKFAREIVPLLKGYNIVVDLNMVDEDRTTVVCPHCHAPYKRVRPRDDQHVHPHRVMLCENPQCRGAQWRATVPDALNVDHRDKSAAENILWRSLATEDELSGSPFSRTSIPRLQTSFRYHQLANRT

SEQ ID NO: 1506 - protein, 200 aa, Carpediemonas membranifera
RLSNSRLGLSMRTSFRSSTRGRESVSAVRLLPITVCARSTSPGLDVNSWMISAGAPRSPFTVAYGAALFGSASTPSCAPYRHFARALPGIMLRHNVVVTVTMVSEFRTSIVCPYCKAHFRRVVHTHRTMLCQNPACEGAPWRVERLRRHPEQRDILLNLSHRDKSASENILWCTIDATSDQIEQSPFHYDSQRGALPRYH

SEQ ID NO: 1507 - protein, 215 aa, Carpediemonas membranifera
VSTTLFVLDNANDIFEAGMRKYFRRVRFANHILRQKHFARCGQQLAREFGRHHPIATHIRLKVFYGSSGFTTPAGMFIPCAPYRKFAREIVPLLKGYNIVVNLNMVNEDRTTVVCPHCHAPYKRVRPRDDQHVHPHRVMLCEYPQCRGAQWRATVPDALNVDHRDKSAAENILWRSLATEDELSGSPFSRTLIPRLQTSFQYHQLANRQHSSTDG

SEQ ID NO: 1508 - protein, 258 aa, Carpediemonas membranifera
SLFSCEIRCSKLIFSCSNISRSVFMSWNVFACFLYRRRYSWRKLSISDTRLSSAVISNEFLHKLHILGYRLERLGVDDADARPAPDPDAHLMGFNPGARALGGFFIRHPDGTTSSGVVPKCGYTKTPSFAFDMTPASFKSTNLDSLQNSIRFVLLHEQEIFDAGMVKSFRRVRLTNHILRQKHFHRAGEQLARTLGWTPRRLPRSIAPPRAAPTRLVVFYGSARFKTPRRVHPCAPYGRFAKPLPHIMRLSTTLLKCG

SEQ ID NO: 1509 - protein, 205 aa, Carpediemonas membranifera
GDRLLQGFHKASSSWTSAQLQTSQSLTRRLIVFYSTSNNAEAPPTPDPDAHLMRFDPGARSIGGYYIRHPDGTTSSGVLPKCGYTKTPSFGFDMTAASFKSTRLVSINNSIRFVLDNANEIFEAGMRKSFRRVRFANHILRQKHLARCGQQLAREFGWLRHHPIATPIRLKVFYGSSGFTTPAGMLIPCAISKVRERDSTHSQGV

SEQ ID NO: 1510 - protein, 200 aa, Carpediemonas membranifera
RLSNSRLGLSMRTSFRSSTRGRESVSAVRLFANHCLRQKHFARAGRQLLDDLGGRPPEPIHLEVAYGAALFGSAGTPSCAPYRHFARALPGIMLRHNVVVTVTMVSEFRTSIVCPYCKAHFRRVVHTHRTMLCQNPACEGAPWRVERLRRHPEQRDILLNLSHRDKSASENIHWCTFDATSDQIEQSPFHSQRGALPRYH

SEQ ID NO: 1511 - protein, 200 aa, Carpediemonas membranifera
RLSNSRLGLSMRTSFRSSTRGREKCFRRATFANHCLRQKHFARAGRQLMDDLGGRPSEPIHLEVAYGAALFGSAGTPSCAPYRHFARALPGIMLRHNVVVTVTMVSEFRTSIVCPYCKAHFRRVVHTHRTMLCQNPACEGAPWRVERLRRHPEQRDILLNLSHRDKSASENIHWCTFDATSDQIEQSPFHSQRGALPRYH

SEQ ID NO: 1512 - protein, 263 aa, Carpediemonas membranifera
KRDSFHRIGEQALLVHEGQVLSHLPSVDPGARALRGFFIRHPDGTTSSGVVPKCGYTKTPSFAFDMTPASFKSTNLDSLQNSIRFVLLHEQEIFDAGMVKSRVRLTNHILRQKHFHRAGEQLARTLGWTPRRLPRGIAPPRAAPTRLVVFYGSARFKTPHRVHPCAPYGRFAKSLPHIMRAFNITAEVRMTNEFPEPHSSAPSAARGSVELATRGARCDATTRIVKVLHGTDSNASIPILPPLGSISPTETRLLHRTSWIAAS

SEQ ID NO: 1513 - protein, 355 aa, Carpediemonas membranifera
CATRWRYIRSKPPSSKLSDRTTPKNGEWGITPQQNISTHACWPGSRLNAMRSAGNSPYMTVPYVRKRARGREKERPRLGTNNAEAPPAPDPDVHLMGFDTGARPIGGYYIRHPDGTTSSGVLPKCGYTKTPSFGFDMTAASFKSTRLVSINNSIRFVLDNANEIFEAGMRKSFRRVRFANHILRQKHLARCGQQLAREFGWRRHHPIATPIRLKVFYRSSGFTTPAGMSIPCAPYRKFAREIVPLLKGYNIVVDLNMVNEDRTTVVCPHCHAPYKRVRPRDDQHVHPHRVMLCENPQCRGAQWRATVPDALNVDQRDKSAAENILWRSLATEDELSGSPFSRTLIPRLQTSFQYH

SEQ ID NO: 1514 - protein, 245 aa, Carpediemonas membranifera
PHSSRTSGKPTLELQHCWLGEYSTATRVWLSRASPGYLTRLRAGLERVRPLHENIVQIINEGTRKCFRRASFANHCLRLKHFARAGRQLLDDLGGRPPEPIHIEVAYVAALFGSAGTPSCAPYRHFARALPGIMLRHNVVVSVTMVSEFRTSIVCPYCKAHFRRVVHTHRTMLCQNPACEGAPWRVERLRRHPEQRDILLNLSHRDKSASENILWCTYDATSDQIEQSPFHYDSQRGASSLSLTC

SEQ ID NO: 1515 - protein, 217 aa, Carpediemonas membranifera
VSTTLFGLCWTTRTTFSRLECVSLSAECALRTTSFARSTSPAAANSWLGSCGRHHPIATPIRLKAFNGSSGFTTPAGMFIPCAPYRKFAREIVPLLKRYNIVVDLNMVNEDRTTVVCPHCHAPYKRVRPRDDQHVHPHRVMLCENPQCRGAQWRATVPDALNVDHRDKSAAENILWRSLATEDELSGSPFSRTSISRLQTSFQYHQLANRQHSSTDG

SEQ ID NO: 1516 - protein, 216 aa, Carpediemonas membranifera
VSTTIRFVLDNANDIFEAGMRKSFRLVRFANHILRQKHFARCGQQLAREFGRHHPIATPIRLKVFYGSSGFTTPAGMFIPCAPYRKFAREIVPLLKGYNIVVDLNMVNEDRTTVVCPHCHAPYKRVRPRDDQHVHPQRVMLCENPQCRGAQWRATVPDALNVDHRDKSAAENILWRSLATEDELGGSPFSRTSIPRLPTSFQYHQLVNRQHSSTDG

SEQ ID NO: 1517 - protein, 224 aa, Carpediemonas membranifera
PRDSFHRIGEQALLVHEGQVLSHLPPVDPGARALRGFFIRHPDGTTSSGVVPKCGYTKTPSFAFDMTPASFKSTNLDSLQNSVRFVLLHEQEIFDAGMVKSFRRVRLTNHILRQKHFHRAGEQLARTLGWTPRRLPRGIAPPRAAPTRLVVFYGSARFKTPRRVHPCAPYGRFAILLPHIMRAFNITAEAHDAMPQPELSRCTMVQTATPQFRSYYHHLAQSLP

SEQ ID NO: 1518 - protein, 473 aa, Carpediemonas membranifera
GDRLLQGFHKASSSWTSAQLQTSQSLTRRLIVFYSTLNSPLHLYSSPEALRPLRPTVGSGVRSPPSHRHPHSPESLLRELGIHHACWYVHSLRAISKVRERDSSLLKGYNIVVDLNMVNEDRTTVVCPHCHATYKRVRPRDDQHVHPHRVMLCENRQCRGAQWRATIPDAPNVDHRDKSAAENILWRSLATEDELSGSPFSRTSHVFKLHSSIINWLTANIRLRTDDIVQFGTLIVPFRPCLGGSKNVFILRNRIELRHHKESPSMNFGGSITLVFGPMFSGKTTELIRLCDRQQLAGRKVLVIKYSKDTRYTANNEVSTHVGHKLPAIPTDNLFSILDAALDAEVIGIDEGQFFPDIVQFADDMANAGKHVIVAALDGTFRRDPFPSRVIDLLPRAEHVTKLSAVCHICGRNAPFSRRITADTDVEVIGGADMYVAVCRHCFHTDVTEGLKVDPKSRSPMRNMVVPEPPRSW

SEQ ID NO: 1519 - protein, 262 aa, Carpediemonas membranifera
GDRLLQSFHKASSSWTSAQLQTSQSLTRRLIVFYSTLNSLLHLYMLVMVFIVGSYMSSSSMTSCTPVVRNKMEIYTIKASINQAFRPLVLLLKGYNIVVDLNMVNEDRTTVVCPHCHAPYKRVRPRDDKHVHPHRVMLCEKPQCRGAQWRTTVPDALNVDHRDKSAAENILWRSLATEDELGRSPFSRTVIPRLPTSFQSIINWLTATIRLLTDDVVQFGTLIVPFRPCLGGSNNVFILRNMPRSQILQDSTTMPTVVVTRP

SEQ ID NO: 1520 - protein, 215 aa, Carpediemonas membranifera
VSTTLLGLCWTTRTTFSRLACVSLFAECALRTTSFARSTSPAAANSWLGSSVATHRPPIRLKVFYRSSGFTTPAGMFIPCAPYRKFAREIVPLLKRYNIVVDLNMVNEDRTTVVCPHCHAPYKRVRPRDDQHVHPHRVMLCENPQCRGAQWRATVPDALNVDHRDKSAAENILWRSLATEDELSGSPFSRTSIPRLPTSFQYHQLANRQHSSTDG

SEQ ID NO: 1521 - protein, 204 aa, Carpediemonas membranifera
RLSNSRLSFCFVHENIVQIINEGTRKCFRRATFANHCLRLKHFARAGRQLLDDLGGRPPEPIHLEVAYGAALFDSAGTPSCAPYRHFARALPGIMLRHNVVVSVTMVSEFRTSIVCPYCKAHFRRVVHTHRTMLCQNPACEGAPWRVERLRRHPEQRDILLNLSHRDKSTSENILWCTFDATSDQIEQSPFHYDSQRGALPRYH

SEQ ID NO: 1522 - protein, 260 aa, Carpediemonas membranifera
YYIRHPDGTTSSGVLPKCGYTKTPSFGFDMTAASFKSTRLVSINNSIRFVLDNANDIFEAGMRKSFRRVRFANHILRQKHFARCGQQLAREFGWRRHHPIATHIRLKVFYGSSGFTTPAGMFIPCAPYRKFAREIVPLLKGYNIVVDLNMVNEDRTTVVCPHCHAPCKRVRPRDDQHVHPHRVMLCEKPQCRGAQWRATVPDALNVDHRDKSAAENILWRSLATEDELSGSPFSRTLIPRLPTSFQYHQLANRQHSSTDG

SEQ ID NO: 1523 - protein, 223 aa, Carpediemonas membranifera
FARSTSPAAANSWLGSCGRHHPIATPIRLKVFYGSSGFTTPAGMFIPCAPYRKFAREIVPLLKGYNIVVDLNMVNEDRTTVVCPHCHAPYKRVRPRDDQHVHPHRVMLCEYPQCRGAQWRATVPDALNVDHRDKSAAENILWRSLATEDELSGSPFSRTSHVFKLHSSIINWLTANIRLRTDDVVQFGTLIVPFRPSLGGSNNVFYTAQHLQRDGLEYQQASC

SEQ ID NO: 1524 - protein, 306 aa, Carpediemonas membranifera
CRLPQRTAHSSTRRSAGSGLRGLRAVARHSADVAGDYHAGSGRAARRSCGVAWSESQSPEVVLPKCGYTKTPSFGFDMTAASFKSTRLVSINDSIRFVLDNANGIFEAGMRKSFRRVRFANHILRQKHFARCGQQLAREFGRHHPIATPIRLKVFYGSSGFTTPAGMFIPCAPYRKFAREIVPLLKRYNIVVDLNMVNEDCTTVVCPHCHAPYKRVRPRDDQHVHPHRVMLCENPQCRGAQWRATVPDALNVDHRDKSAAENILWRSLATEDELSGSPFSRTSIPRLQTSFQYHQLANRQHSSTDG

SEQ ID NO: 1525 - protein, 202 aa, Carpediemonas membranifera
RLSNSRLGLSMRTSFRSSTRGRESVSAVRVFANHCLRLKHFARAGRQLLDDLGGRPPEPNHLEVAYGAALFGSAGTPSCAPYRHFAQALPGIMLRHNVVVSVDMVSEFRTSIVCPYCKAHFRRVVHTHRTMLCQNPACEGAPWRVERLRRHPEQRDILLNLSHRDKSASENILWCTYDATSDQIEQSPFHYDSQRGALPRYH

SEQ ID NO: 1526 - protein, 534 aa, Carpediemonas membranifera
RKCSAAHALTPPRTVNLFDEEVLKQMVSIAKGRESKAKAADRCRWIGDLAMWRDPDITPLVEDFREAYVGIAAPFQSWLGEYSTATRVWLSHASPEYLTRLRAGLERVRPLLHDEGVRQDFLDTLGELDTEVDAIAADHGRYHHRMHALPEEQRVGHTDTVADALVGVLSCVTRMSAAVTKLVTLTRAVNLELSHALPEPKLVPFVPMAPVRPGFMTLERGVTALTPAMKRRLRVHVNWPANKNLTDEQVAEYERDHGDITKLRRVLSVAVAVWVGREKYSGGRVADRPTYKKGSNNKRARLGQDDAEATPAPHIQALMGFDPGARSLGGYTIRRPDGQSVSGVLAKCGYTATPSFRVNMSAASFKTTSLEALKQSIRFVHENIVQIINEGMRKCFRRASFANHCLRLKHFARAGHQLLDDLGGRPPEPIHLEVAYGAALFGSAGTPSCAPYRHFARALPGIMLRHNVVTVTMVSEFRTSIVCPYCKAHFRRVVHTHRTMLCQNPACEGAPWRVERLRRHPAAERHTSQSLSPR

SEQ ID NO: 1527 - protein, 256 aa, Carpediemonas membranifera
HRLPQRTAHSCTRRSSGSGLRGHRAVARHSADVETTLPYLSINNSIRFVLDNANDIFEAGMRKSFRRVRFANHILRQKHFARCGQQLAREFGRHHPIATPIRLKVFYGSSGFTTPAGMLIPCAISKVRERDSSPSQGHNLVVDLNMVNEDRTTVVCPHCHAPYKRVRPRDDQHVHPHRVMLCENQQCRGAQWRATVPDALNVDHRDKSAAENILWRSLATEDELSGSPFSRTLIPRLQTSFQYHQLANRQHSSTDG

SEQ ID NO: 1528 - protein, 224 aa, Carpediemonas membranifera
GVCVCAIEGSNNVFILRNTALSPSYSRLKSVGRSSSPGLPQSVFFEKNTEAPPAPDPDAHLMGFDPGARSIGGYYIRHPDGTTSSGVLPKCGYTKTPSFGFDMTAASFKSARRVSINNSIRFVLDNANDIFEAGMRKSFRRVRFANHILRQKHFARCGQQLAREFGWRRHHPTATPIRLKVFYGSSGFTAPADMFIPCAPYRKFAREIVPLLKGYITLSSILTW

SEQ ID NO: 1529 - protein, 221 aa, Carpediemonas membranifera
GCFGCAIEGSNNVFILRNTALSPSYSRLKSVGRSSSPGLPQSVFFENNAEAPPAPDPDAHLMGFDPGARSIGGYYIRHPDGTTSSGVLPKCGYTKTPSFGFDMTAASFKSARLVSINNSIRFVLDNANDIFEAGMRKSFRRVRFANHILRQKHFARCGQQLAREFGWRRHHPIATPIRLKVFYGSTKPADMFIPCAPYRKFAREIVPLLKGYITLSSILTW

SEQ ID NO: 1530 - protein, 223 aa, Carpediemonas membranifera
VCAIEGSNNVFTLRNTALSPSYSRLKSVGRSSSPGLPQSVFFVDVSTAANFTIAHTSSHHHPIATPIRLKVFYGSSGFTKPAGMFIPCASYRKFAREIVPLLKRYNIVVDLNMVNEDRTTVVCPHYHAPYKRVRPRDDQHVHPHRVMLCENPQCRGAQWRATVPDALNVDHRDKSAAENILWRSLATEDELSGSPFSRTSIPRLPTSFQHHQLANRQHSSADG

SEQ ID NO: 1531 - protein, 335 aa, Carpediemonas membranifera
AHDARAAGGSSSEHPSGAVCQDRWGRRGPHGPSWCSVIRQQTCQWQPDEEAKGSGASGCGWRGCSPRARPRCPPHGFDPGARALGGFFIRHPDGITSGVVPKCGYTKTPSFAFDMTPASFKSTNLDSLQNSVRFVLLHEQEIFDAGMVKSFRRVRLTNHILRQKHFHRAGEQLARTLGWTPRRLPRGIAPPRAAPTRLVVFYGSARFKTPRRVHPCAPYGRFAKSLAHIMRAFNITAEVRMTNEFRTSLVCPFCRARFRRTRFTRRTMPQPELSRCSMVQTATPQFRSYYIHLAQSLPQRQDCCTEHLGLRPHDGCTVSSQCSQKSKTSSPSSQL

SEQ ID NO: 1532 - protein, 226 aa, Carpediemonas membranifera
GIAPCAIEGSNNVFILRNTALSPSYSRLKSVGRSSSPGLPQSVFFVDVSTAANITIAHTSSHHHPIATPIRLKVFYGGSGFTKPAGMFIPCAPYRKFAREIVPLLKRYNIVVDLNMVNEDRTTVVCPHCHAPYKRVRPRDDQHVHPHRVMLCENPQCRGAQWRATVPDALNVDHRDKSAAENILWRSLATEDELSGSPFSRTLIPRLQTSFQYHQLANRQHSSMDG

SEQ ID NO: 1533 - protein, 285 aa, Carpediemonas membranifera
PAHVQKGSSNKRARLGQDDAEANPAPDIQALMGFDPGARSLGGYTIRRPDGQSVSGVLAKCGYTATPSFRVNMSAASFKTTSLEALKQSIRFVHENIVQIINEGTRKCFRHATFANHCLRQKHFARAGRKLLDDLGGRPPEPIHLEVAYGAALFGSAGTPSCAPYRHFARALPGIMLRHNVVVTVTMVSEFRTSIVCPYCKAHFRRVVHTPRTMLCQNPACEGAPWRVERLRRHPEQRDILLNLSHRDKSASENILWCTYDATSDQIEQSPFHYDSQRGALPHYH

SEQ ID NO: 1534 - protein, 251 aa, Carpediemonas membranifera
VHIHLPACVRLCICARVDPTEDGQPVATPSFRVNMSAASFKTTSLEALKQSIRFVHENIVQIINEGTRKCFRRATFANHCLRQKHFARAGRQLLDDLGGRPPEPIHLEVAYGAALFGSAGTPSCAPYRHFARALPGIMLRHNVVVTVTMVSEFRTSIVCPYCKAHFRRVVHTHRTMLCQNPACEGAPWRVERLRRHPEQRDILLNLSHRDKSASENILWCTYDATSDQTEQSPFHYDYDEVLFLAIINLPS

SEQ ID NO: 1535 - protein, 200 aa, Carpediemonas membranifera
SCAAQLECVSLSAECALRTTSFARSTSPAAANRLGSSVGVATPIRLKVFYGSSGFTTPAGMFIPCAPYRKFAREIVPLLKRYNIVVDLNMVNEDRTIVVCPHCHAPYKRVRPRDDQHVHPHRVMLCENPQCRGAQWRATVPDALNVDHRDKSAAENILWRSLASEDELSGSPFSRTSIPRLPTSFQYHQLANRQHSSTDG

SEQ ID NO: 1536 - protein, 247 aa, Carpediemonas membranifera
VHIHLPACVRLCICARVDPTEDGQPVATPSFRVNMSAASFKMTSLEALKQSIRFVHENIVQIINEGTRKCFRRASFANHCLRLKHFARAGRQLLDDLGGRPPEPIHLEVAYGAALFGSAGTPSCAPYRHFARALPSIMLRHKVVVSVTMVSEFRTSIMCPYCKAHFRRVVHTHRTMLCLNPACEGAPWRVERLRRHPEQRDILLNRSHRDKSASENILWCTFDATPDQIGLSPFHYGTQRGALPRYH

SEQ ID NO: 1537 - protein, 218 aa, Carpediemonas membranifera
PSEDGRDRDPEASVSVCTRRLIVFYSTLNSLLHLYSSPEALRPLRPTLGSGVRSPPSHRHPHSPESLLRELGIHHACWYVHSLCAISKVRERDSTLLKRYNIVVDLNMVNEDRTTAVCPHCHAPYKRVRPRDDQHVHPHRVMLCENPQCRGAQWRATVPDALNVDHRDKSAAENILWRSLATEDELSGSPFSRTSIPRLQTSFQYHQLANRQHSSTDG

SEQ ID NO: 1538 - protein, 364 aa, Chlorops oryzae
VTCKTQRSFGSTYIYFIICSGTMRQKKIKNFALIPQMRHGLHHIRYDSLAMYSMLCKLKLFKGAFATFKRDDEFPKYFRMPTSGIKKISSIMTDGVSVSFVMDKIVKTPAPVAPKKKKPTSLEFSGNIEEMRQTKYEHTLGLDPGCRLIFGGVRDGEPIKIKNTRYQHLAGLYSNKRKLDRYTKSFEETTQLSANDGNYREYIAYQLQILVKKQSVFEQRKVARLRLKRYMLRQKACNNIAEMLVPNPNEKTLVCIGSTEMAANSPIRGYVRTPNKKLIEALRNRKAHILMVNEFRTTKLCAKCFAPNKTSLSPHRYQFCPNCRTCWNRDVNAGKNILYLGQCLIHSQEKHKNFKKSTILNIPP

SEQ ID NO: 1539 - protein, 252 aa, Chlorops oryzae
LQKKKKPTSLEFSGNIEEMRQTKYEHTLGLDPGCRLIFGGVRDGEPIKIKNTRYQHLAGLYSNKRKLDRYTKSFEETTQLSANDGNYREYIAYQLQILVKKQSVFEQRKVARLRLKRYMLRQKACNNIAEMLVPNPNEKTLVCIGSTEMAANSPIRGYVRTPNKKLIEALRNRKAHILMVNEFRTTKLCAKCFAPNKTSLSPHRYQFCPNCRTCWNRDVNAGKNILYLGLCLIHSKEKHKNFKKSTILNIPP

SEQ ID NO: 1540 - protein, 548 aa, Chlorops oryzae
RKMGGKRQAADSDKRVMQVVKGALHSRCLNNAVFERIQLDVKEMSCLFVEVSRYIHFALMKRWENGNFVPVRFLDFYYHLMTKKMKKYVIDEEYSRLRGDIPLYDSGSRSNIFVENSNRYETIFHNNIWMHAYSRLRRYFKFETDRSKVYNTLDYLFVKDSTKNPCEHLLTRLREDLKWTGENLSDLQNSKKFWKHLYLFYNLQRYNEAKKIKNFALIPQMRHGLHHIRYDSLAMYSMLCKLKLFKGKFETFKKDDEFPKYFRMPTSGIKKISSIMTDGVSVSFVMDKIVKTPAPVAPKKKKPTSLEFSGNIEEMRQTKYEHTLGLDPGCRLIFGGVRDGEPIKIKNTRYQHLAGLYSNKRKLDRYTKSFEETTQLSANDGNYREYIAYQLQILVKKQSVFEQRKVARLRLKRYMLRQKACNNIAEMLVPNPNEKTLVCIGSTEMAENSPIRGYVRTPNKKLIEALRNRKAHILMVNEFRTTKLCAKCFAPNKTSLSPHRYQFCPNCRTCWNRDVNAGKNILYLGQCLIDSQEKHKNFKKSTILNIPP

SEQ ID NO: 1541 - protein, 256 aa, Chlorops oryzae
TPAPVAPKKKKQTSLEFSGNIEEIRQTKYEHTLGLDPGCRLIFGGVRDGEPIKIKITRYQHLAGLYPNKRKLDRYTKSFEETTQLSANDGNYREYIAYQLQILLKKQSVFEQRKVARLRLKRYMLRQKACNNIAKMLVPNPNKKTLVCIGSTEMAANSPIRGYVRTLNKQLIEALRNRKAHILMVNEFRTTKLCPNKTSLSPHRYQFCPNCRTCWNRDVNAGKNILYLGLCLIHNKEKHKNFKKSTILNIPPNNNK

SEQ ID NO: 1542 - protein, 221 aa, Chlorops oryzae
IAYQLQILLKKQSVFEQRKVARLRLKRYMLRQKACNNIAKMLVPNPNEKTLVCIGSTEMAANSPIRGYVRTLNKQLIEALRNRKAHILMVNEFRTTKLCPQQNIPVTSQVPILSKLPYLLEQGCKSSKSDKVVCFYTRHTLCRGYIAFVGLCVTPRTSRYRPYKMYIEMISVTRRFDLDMCVRLSVCPSVCLSVCLYTVILSKELSYLGIKIWYACSRGHE

SEQ ID NO: 1543 - protein, 252 aa, Chlorops oryzae
LQKRKKQTSLKFSGNIEEIRQTKYEHTLGLDPGCRLIFGGVRDGEPIKIKNTCYQHLAGLYSNKRKLDRYTKSFEETTQLSANDGNYREYIAYQQQILLEKQSVFEQRKVARLRLKRYMLRQKACNNIAEMLVPNPNEKTLVCIGSTEMAANSPIRGYVRTPNKKLIEALRNRKAHILIVNEFRITKLCAKCFAPNKTSLSPHRYQFCPNCRTWWNRDVNAGKNILYLGLCLIHNKEKHNNFKKSTILNIPP

SEQ ID NO: 1544 - protein, 494 aa, Dreissena polymorpha
VYKQTHLFPAFYCTAMKRKREHFTLWDAANVHKHKSMWYWWAYIRRKDMVNHEKTDCDVIQLLQSASVKKQKTQSDKFLTSFSVGLRPTKHQKQVLNEMLRVSNYTYNWCLWLVNEKGLKPHLFELQKVVCKTNASDVDPYYRMENDDWFFNNKMSTIKLTSCKNFCTSYKSAKSLKSKLKRPMSVSNIIQGSFCVQKLFIRRLSDKDVSIDNTQMQNRYICMMPDNFEKRSNPKKRFLKLAKSITKIPPIDHDVKIVKRADGMFIMNIPCDPKYTRRNASNDTIEKRVCGIDPGGRTFATVYDPIDCCVFQVGIKEDKQYVISKLHNKIDHAHMHLTKAQNKKQQQAAQERIVSLKKTHLKLKTFVDDIHLKLSSHLVKEYQYVALGKINVAPLVKKKHLSKRAKRDLLYWQHYRFRQRLTHRTTNTECILDVQNEAYTSKTCGVCGTINKNLEKSETFYCDNCKYNTHRDVNGARNILLKSLRMFPFVNSQL

SEQ ID NO: 1545 - protein, 515 aa, Dreissena polymorpha
VGIRFHSYRSDIRLLQIFVYKQTNYCVALYCTAMKRKREDLTLWDAANVHKHKSMWYWWEYIRRKDLINHEKTDCDVIQLLQSASVKKQKTHSDDFLTSFSVGIRPTKHQKQVLNEMLRVSNYTYNWCLWLVNEKGIRPHQFELQKIVCKTNAGDVDPQYRMENDDWFFNNKMTSVKTTSCKNFFTSYKSAKSLKSKLKRPMPVSNIVQGSFCVRKVLLRHLSNKDVSTDNTNMLNRYICMIPDNFGKRSKPKERFLKLAKPITKIPPIDHDVKIVKRADGMFIMNIPCDLKYTRRNASNDTIDKRVCGIDPGGRTFATVYDPIDCSVFQVGIKEDKQYVIRKLHNKIDHAHMHLTKAQNKKQQQAARERIVSLKKTHLKLKTFVDDIHLKLSSHLVKEYQYVALGKINVAQLVKTDRPKPLSKRAKRDLLSWQHYRFRQRLTHRTTNTDCILEVQNEANTSKTCGVCGEKDDNLGKSETYYCIKCEYNTHRDVNGARNILLKSLHMFPFEKKQQ

SEQ ID NO: 1546 - protein, 515 aa, Dreissena polymorpha
VGIRFHSYRSDIRLLQIFVYKQTNYCVALYCTAMKRKREDLTLWDAANVHKHKSMWYWWEYIRRKDLINHEKTDCDVIQLLQSASVKKQKTHSDDFLTSFSVGIRPTKHQKQVLNEMLRVSNYTYNWCLWLVNEKGIRPHQFELQKIVCKTNASDVDPQYRMENDDWFFNNKMTSVKTTSCKNFFTSYKSAKSLKSKLKRPMPVSNIVQGSFCVRKVLLRHLSNKDVSTDNTNMLNRYICMIPDNFGKRSKPKERFLKLAKPITKIPPIDHDVKIVKRADGMFIMNIPCDLKYTRRNASNDTIDKRVCGIDPGGRTFATVYDPIDCSVFQVGIKEDKQYVIRKLHNKIDHAHMHLTKAQNKKQQQAARERIVSLKKTHLKLKTFVDDIHLKLSSHLVKEYQYVALGKINVAQLVKTDRPKPLSKRAKRDLLSWQHYRFRQRLTHRTTNTDCILEVQNEANTSKTCGVCGEKDDNLGKSETYYCIKCEYNTHRDVNGARNILLKSLHMFPFEKKQQ

SEQ ID NO: 1547 - protein, 202 aa, Dreissena polymorpha
ILVVERLLQCMTQSIVTFFQVGIEEDKQYVISKLHNKIDHAHMHLTKAQNKKQQQAACERIVSLKKTHLKLKTFVEDIHLKLSSHLVKEYQYVALGKINVASMVKKKHLSQRAKRDLLYWQHYRFRQRLIHRTTNTECILLVQDKAYTSKTCGVCGKINKNLQKSETFYCDQCKYNTHRDVNGARNILLKSLRMFPFENQQQ

SEQ ID NO: 1548 - protein, 496 aa, Dreissena polymorpha
VYKQTHLFPAFYCTAMKRKREHFTLWDAANVHKHKSMWYWWAYIRRKDMVNHEKTDCDVIQLLQSASVKKQKTQSDKFLTSFSVGLRPTKHQKQVLNEMLRVSNYTYNWCLWLVNEKGLKPHLFELQKVVCKTNASDVDPYYRMENDNWFFNNKMSTIKLTSCKKICTSNKSAKSLKSKLKRPMSVSNIIQGSFCVQKLFIRRLSDKDVSIDNTQMQNRYICMMPDNFEKRSNPKERFLKLAKPITKIPPIDHDVKIVKRADGMFIMNIPCDPKYTRRNASNDTIEKRVCGIDPGGRTFATVYDPIDCCVFQVGIKEDKQYVISKLHNKIDHAHMHLTKAQNKKQQQAARERIVSLKKTHLKLKTFVDDIHLKLSSHLVKEYQYVALGKINVAQLVKTDRPKPLSPRAKRDLLYWQHYRFRQRLTHRTTNTECILDVQNEAYTSKTCGVCGTINKNLEKSETFYCDNCKYNTHRDVNGARNILLKSLRMFPFVNSQ

SEQ ID NO: 1549 - protein, 493 aa, Dreissena polymorpha
VYKQTHLFPAFYCTAMKRKREHFTLWDAANVHKHKSMWYWWAYIRRKDMVNHEKTDCDVIQLLQSASVKKQKTQSDKFLTSFSVGLRPIKHQKQVLNEMLRVSNYTYNWCLWLVNEKGLKPHLFELQKVVCKTNASDVDPYYRMENDDWFFNNKMSTIKLTSCKNFCTSYKSAKSLKSKLKRPMSVSNIIQGSFCVQKLFIRRLSDKDVSIDNTQMQNRYICMMPDNFEKRSNPKERFLKLAQPITKIPPIDHDVKIVKRADGMFIMNIPCDPKYTRRNASNDTIEKRVCGIDPGGRTFATVYDPIDCCVFQVGIKEDKQYVISKLHNKIDHAHMHLTKAQNKKQQQAARERIVSLKKTHLKLKTFVEDIHLKLSSHLVKEYQYIALGKINVAPLVKKKHLSKRAKRDLLYWQHYRFRQRLTHRTTNTECILDVQNEAYTSKTCGVCGTINKNLEKSETFYCDNCKYNTHRDVNGARNILLKSLRMFPFVNSQ

SEQ ID NO: 1550 - protein, 496 aa, Dreissena polymorpha
VYKQTHLFPAFYCTAMKRKREHFTLWDAANVHKHKSMWYWWAYIRRKDMVNHEKTDCDVIQLLQSASVKKQKTQSDKFLTSFSVGLRPTKHQKQVLNEMLRVSNYTYNWCLWLVNEKGLKPHLFELQKVVCKTNASDVDPYYRMENDNWFFNNKMSTIKLTSCKNFCTSYKSAKSLKSKLKRPMSVSNIIQGSFCVQKLFIRRLSDKDVSIDNTQTQNRYICMMPDNFEKRSNPKERFLKLAKPITKIPPIDHDVKIVKRADGMFIMNIPCDPKYTRRNASNDTIEKRVCGIDPGGRTFATVYDPIDCCVFQVGIKEDKQYVISKLHNKIDHAHMHLTKAQNKKQQQAARERIVSLKKTHLKLKTFVDDIHLKLSSHLVKEYEYVALGKINVAQLVKTDRPKPLSPRAKRDLLYWQHYRFRQRLTHRTTNTECILDVQNEAYTSKTCGVCGTINKNLEKSETFYCDNCKYNTHRDVNGARNILLKSLRMFPFVNSQ

SEQ ID NO: 1551 - protein, 492 aa, Dreissena polymorpha
VYKQTHFLPAFYCTAMKRKRENFTLWDAANVHKHKSMWYWWEHIRRKDMVNHEKTDCDVIQLLQSASVKKQKTQSDKFLTSFSVGIRPTKHQKRVLNEMLRVSNYTYNWCLWLVDEKGQRPHLFELQKIVCKTTANDVDPYYRMENDDWFFNNKMSNIKLTSCKNFCTSYKSAKSLKSKLIRPMSVSNIIQGSFCVQKVLLRHLSDKDVSTDNMLNRYICMMPDNFEKRSKPKERFLKLAKPITKIPPIDHDVKIVKRADGMFIMNIPCDPKYTRRNASNDTIDKRVCGIDPGGRTFATVYDPIDCNVFQVGIEEDKQYVISKLHNKIDHAHMHLTKAQNKKQQQAARERIVSLKKVHLKLKTFVEDIHLKLSSHLVKEYQYIALGKINVAPMVKKKHLSKRAKRDLLYWQHYRFRQRLTHRATNTECILEVQNEAYTSKTCGVCGEINENLEKSKTFYCDQCKYNTHRDVNGARNILLKSFRMFPFEKQQQ

SEQ ID NO: 1552 - protein, 306 aa, Dreissena polymorpha
GSFCVPKLFIRNLSSKDVSIDNINMLNRYICMIPENFEKRSKPKERFLKLAKPITKIPPFDHDVKIVKRADGMFILNIPCDPKYTRRNASNDTIDKRVCGIDPGGRTFATVYDPIDCSVFQVGIEEDKQYVISKLHNKIYHAHKHLTKAQNKKQQQAASERIVSLKKTHLKLKTFVDDIHLKLSSHLVKEYEYVALGKINVAQLVKTDRPKPLSPRAKRDLLYWQHYRFRQRLTHRTTNTECILDVQNEAYTSKTCGVCGTINKNLEKSETFFCDQCKYNTHRDVNGARNILLKSLRMFPFEKQQQ

SEQ ID NO: 1553 - protein, 238 aa, Dreissena polymorpha
IVKRADGTFIMKIRCDPKYTRRKASNDMIEKRVCGIDPGGRTFATVYDPIDCSVFQVGIEEDKQYVISKLHNKIDHVHMHLTKAQNKKQQQAARERIVSLKKTHLKLKTFVDDIHLKLSSHLVKEYQYVALGKINVAPMVKKKHLSKRAKRDLLYWQHYRFRQRLTNRTTNTECILDVHNEAYTSKTCGVFSTINENLKKRETFYCDNCKYNTHRDVNGARNILLKSLRMFPFEKQQQ

SEQ ID NO: 1554 - protein, 261 aa, Dreissena polymorpha
RTILKLAKSITKIPPIDHDVKIVKRADGMFIMNIPCDPKYTRRNASNDTIEKRVCGIDPGGRTFATVYDPIDCCVFQVGIKEDKQYVISKLHNKIDHAHMHLTKAQNKKQQQAARERIVSLKKTHLKLKTFVDDIHLKLSSHLVKEYEYVALGKINVAQLVKTDRPKPLSPRAKRDLLYWQHYRFRQRLTHRTTNTECILDVQNEAYTSKTCGVCGTINKNLEKSETFYCDNCKYNTHRDVNGARNILLKSLRMFPFVNSQ

SEQ ID NO: 1555 - protein, 496 aa, Dreissena polymorpha
VYKQTHLFPAFYCTAMKRKREHFTLWDAANVHKHKSMWYWWAYIRRKDMVNHEKTDCDVIQLLQSASVKKQKTQSDKFLTSFSVGLRPTKHQKQVLNEMLRVSNYTYNWCLWLVNEKGLKPHLFEIQKVVCKTNASDVDPYYRMENDDWFFNNKMSTIKLTSCKNFCTSYKSAKSLKSKLKRPMSVSNIIQGSFCVQKLFIRRLSDKDVSIDNTQMQNRYICMMPDNFEKRSNPKERFLKLAKSITKIPPIDHDVKIVKRADGMFIMNIPCDPKYTRRNASNDTIEKRVCGIDPGGRTFATVYDPIDCCVFQVGIKEDKQYVISKLHNKIDHAHMHLTKAQNKKQQQAARERIVSLKKTHLKLKTFVDDIHLKLSSHLVKEYEYVALGKINVAQLVKTDRPKPLSPRAKRDLLYWQHYRFRQRLTHRTTNTECILDVQNEAYTSKTCGVCGTINKNLEKSETFYCDNCKYNTHRDVNGARNILLKSLRMFPFVNSQ

SEQ ID NO: 1556 - protein, 317 aa, Dreissena polymorpha
SDQCLYQISFRDRFVFKKCYSDIFQAKSLKDVSTDNMLNRYLCMMPDDFEKRSNPKERFLKLAKPITKIPPIEHDVTIVKRADGMFILNIPCDPKYTRRNASNDTIDKRVCGIDPGGRTFATVYVPFDCSVFQVGIEEDKQYVISKLHNKIDHAHMHLTKAQNKKQPQAAHERIVSLKKTHLKLKAFVDDIHLKLSSHLVKEYQYVALGKINVAQLVKTDRPKPLSPRAKRDLLYWQHYRFRQRLTHRTMNTECILDVQNEANTSRTCGLCGTINKNLEKSETFNCDQCNYNTHRDVNGARNILLKSLRMFPFVNSQ

SEQ ID NO: 1557 - protein, 481 aa, Vermamoeba vermiformis
KSQIKLNNQGASIKGSVVRRLCWKIIYNVCWNRDFDFDPPESIKDIFDRVHDDFIGFYGEFQQDEYGLRKDEAIRYIYHLMVNMKGNHSMKLIPQSSFTVKSITIDKEVCNSIKSAIERRKRKYIKQKLKKKKKKIKKKKKEIKKKKKEIKKKKKEKLDKNDLFKSIFVVDEPKNCKLTLIRSNGVDIDFVFERVDSQRKRKFEKIDDSDRPLKRLKNNTNVMVNNTNDGQDVNNTNVMVNDERITGVDLGRKDLFVSISHPNKAQCVVKKWSNGQYQFESGLAIWNSQLKRWKRKDRGIRIFEADLSDDTAIQSIISAQSKKHLHYVFEKLWIVTKFYFKRQHRRRLFWLYNCRQKALNKLCRVMAADSDIVAIGDPKFSASSRGYAPAPTVAVVKELQRLCPRKVVLIDEYNTSKLCSLCYSPLKQTKTEGRVNWRVQRCNNCGVYWNRDVNAARNMRALYVYQRDNNGARIPAFERPE

SEQ ID NO: 1558 - protein, 648 aa, Vermamoeba vermiformis
IRTVKKCLLSSLMGSKWQKHFVRKWISDQAEAHSQMLILASRFLWFHFARLIEKKKELPQNIDQQYIMNVFRHVSKSSKPSQRDNKIDDDLLQETATILNLNTEKFPVRVSQISKYHANQFITNIENHLKHNTIHHYTLKYLMWTLKESIKLNNQGASIKGSVVCRLCWKIIYNVCWNRDFDFDPPESIKDIFDRVHDDFIGFYGEFQQDEYGLRKDEAIRYIYHLMVNMKGNHSMKLIPQSSFTVKSITIDKEVCNSIKLAVERRKRKYTKQKLKKKKKKIKKKKKEIKKKKKEIKKKKKEKLDKNDLFKSIFVVDEPKNCKLTLIRSNGVDIDFVFERVDSQRKRKFEKIDDSDRPLKRLKNNTNVMVNNTNVRVNNTNVMVNNTNVMVNNTNVMVNNTNVRVNNTNVMVNERITGVDLGRKDLFVSISHPNKAQCVVKKWSNGQYQFESGLAIWNSQLKWWKRKDRGIRIFEADLSDDTAIQSIISVQSKKHLHYVFEKLWIVTKFYFKRQHRRRLFWLYNRRQKALNKLCRVMAADSDIVAIGDPKFSASSRGYAPAPTVAVVKELQRLCPRKVVLIDEYNTSKLCSLCYSPLKQTKTEGRVNWRVQRCNNCGGVLEPRRQRCTKHACVVRLSARQQWRANSCL

SEQ ID NO: 1559 - protein, 295 aa, Vermamoeba vermiformis
TKTEEKEEENQEKEEGNQEKRRRKSRKRRRKSWIKNDLFKSIFIVDEPKNCKLTLIRSNGVDIDFVFERVDSQHKRKFEKIDDSDRPLKRLKNNTNVIVNNTNVMVNNTNVMVNNTNVRVNNTNVMVNERITGVDLGRKDLFVSISHPNKAQCVVKEWSNGQYQFESGLAIWNSQLKRWKRKDRGIRIFEADLSDDTAIQSIISEQSKKHLHYVFEKLWIVTKFYFKRRHCRRLFWLYNRRQKALNKLCRVMAADSDIIAVGDPKSSTRHHEAMLLHQPSLSLRSCSVSALERWC

SEQ ID NO: 1560 - protein, 287 aa, Vermamoeba vermiformis
HDDSDRPLKRLKNNTNVMVNNTNVMVNNTNMMVNNTNVRVNNTNMMVNERITGVDLGRKDLFVSISHPNKAQCVVKEWSNGQYQFESGLAIWNSQLKRWKRKDRGIRIFEADLSDDTAIQSIISEQSKKHLHYVFEKLWIVTKFYFKRRHRRHLFWLYNRRQKALNKLCRVMAANSDIVAIGDPKFSPSSQGYAPAPTVAVVKALQDKYPRKVVLIDEYNTSKLCSGCLTHLEFTKTEGRVNWRVQRCNNCGVYWNRDVNAARNMRALYVYQRDNNGARIPAFERPE

SEQ ID NO: 1561 - protein, 478 aa, Vermamoeba vermiformis
LCWKIIYNVCWNRDFDFDPPESIKDIYDRVHDDFIGFYGEFQQDEYGLRKDEAIRYIYHLMVNMKGNHSMKLIPQSSFTVKSITIDKEVCNSIKSAVERRKRKYIKQKLKKKKKEIKKKKKEIKKKKKEIKKKKKEIKKKKKEIKKKKEKLDKNDLFKSIFIVDEPKNCKLTLIRSNGVDIDFVFECVDSQRKRKFEKIDDSDRPLKRLKNNTNVMVNNTNVMVNNTNVMVNNTNVMVNERITGVDLGRKDLFVSISHPNKAQCVVKEWSNGQYQFESGLAIWNSQLKRWKRKDRGICIFEADLSDATAIQSIISEQSKKHLHYVFERLWIVTKFYFKRRHCRHLFWLYNCRQKALNKLCRVMAANSDIVAIGDPKFSASSRGYAPAPTVAVVKELQHLCPRKVVLIDEYNTSKLCSLCYSPLKQTKTEGRVNWRVQRCNSCGVYWNRDVNAARNMRALYVYQRDNNGARIPAFERPE

SEQ ID NO: 1562 - protein, 362 aa, Vermamoeba vermiformis
KEEKRKYIKQKLKKKKKEIKKKEKGNQEKRRRKSWIKNDLFKSIFIVDEPKNCKLTLIRSNGVDIDFVFERVDSQRKRKFEKIDDSDRPLKRLKNNTNVMVNNTNVMVNNTNMMVNNTNVMVNERITGVDLGRKDLFVSISHPNKAQCVVKEWSNGQYQFESGLAIWNSQLKRWKRKDRGIRIFEADLSDDTAIQSIISEQSMKHLHYVFEKLWIVTKFYFKRRHRRHLFWLYNRRQKALNKLCHVMAANSDIVAIGDPKFSASSRGYAPAPTVAVVKELQRLCPRKVVLIDEYNTSKLCSLCYSPLKQTKTEGRVNWRVLRCNNCGVYWNRDVNAARNMRALYVYQRDNNGARIPAFERPE

SEQ ID NO: 1563 - protein, 565 aa, Vermamoeba vermiformis
IRTVKKCLFSSLTGSKWQKHFVRNWISDQAEAHSQMLILASRFLWFHFARLIEKKKELPQNIDQQYIMNVFRHVSKSSKPGQQDKIDDDLLQETAEILNLNTEKFPVRVSLISKYHANQFIINIENHLKHNTIHHYTLKYLMWTLKESIKLNNQGASIKGRVVRQLCWKIIYNVCWNRDFDFDPPESIKDIFDRVHDDFIGFYGEFQQDEYGLRKDEAIRYIYHLMVNMKGNHSMKLIPQSSFTVKSITIDKEVCNSIKSAVERRKRKYIKQKLKKKKKKIKKKKKEIKKKKKEIKKKKKEKLDKNDLFKSIFIVDEPKNCKLTLIRSNGVDIDFVFERVDSQRKRKFEKIDDSDRPLKRLKNNTNVMVNNTMKVNNTNVMVNNTNVMVNNTNVMVNNTNVRVNNTNVMVNERITGVDLGRKDLFVSISHPNKAQCVVKKWSNGQYQFESGLAIWNSQLKWWKRKDRGIRIFEADLSDDTAIQSIISAQSKKHLHYVFEKLWIVTKFYFKRQHRRRLFWLYNRRQKALNKLCRVMAADSDIVAIGRSKVQRVITRLCSCTNCCCC

SEQ ID NO: 1564 - protein, 353 aa, Vermamoeba vermiformis
RKRRRRRRNQEKRRRGKSWIKSDVFKSIFIVDEPKNCKLTLIRSNGVDIDFMFERVDSQRKRKFEKIDDSDRPLKRLKNNTNVIVNNTNVMVNNTNVMVNNTNVRVNNTNVMVNERITGVDLGRKDLFVSISHPNKAQCVVKEWSNGQYQFESGLAIWNSQLKRWKRKDRGICIFEADLSDATAIQSIISEQSKKHLHYVFEKLWIVTKFYFKRRHRRHLFWLYNRRQKALNKLCRVMAANSDIVAIGDPKFSASSRGYAPAPTVAVVKALQDKYPRKVVLIDEYNTSKLCSDCLTHLEFTKTEGRVNWRVQRCNNCGVYWNRDVNAARNMRALYVYQRDNNGARIPAFERPE

SEQ ID NO: 1565 - protein, 267 aa, Vermamoeba vermiformis
AIERLKNNTNVMVNNTNVRVNNTNMMVNERITGVDLGHKDLFVSISHPNKAQCVVKEWSNGQYQFESGLAIWNSQLKRWKRKDRGIRIFEADLSDDTAIQSIISEQSMKHLHYVFEKLWIVTKFYFKRRHRRHLFWLYNRRQKALNKLCRVMAANSDIVTIGDPKFSASSRGYAPAPTVAVVKELQRLCPRKVVLIDEYNTSKLCSGCLTHLEFTKTEGRVNWRVQRCNNCGVYWNRDVNAARNMRALYVYQRDNNGARIPAFERPE

SEQ ID NO: 1566 - protein, 264 aa, Vermamoeba vermiformis
SLQFNRGIFFTLLKVRPNNTNVMVNERITGVDLGRKDLFVSISHPNKAQCVVKEWSNGQYQFESGLAIWNSQLKRWKRKDRGICIFEADLSDDTAIQSIISAQSKKHLHYVFEKLWIVTKFYFKRQHHRHLFWLYNRRQKALNKLCRVMAANSDIVAIGDPKFNASSRGYAPAPTVAVVKELQRLCPRKVVLIDEYNTSKLCSLCYSPLKQTKTEGRVNWRVQRCNNCGVYWNRDVNAARNMRALYVYQRDNNGARIPAFERPE

SEQ ID NO: 1567 - protein, 298 aa, Vermamoeba vermiformis
FDPMELTLTLCSKRVDSQRKRKFEKIDDSDRPLKRLKNNTNVMVNNTNVRVNNTNVMVNERITGVDLGRKDLFVSISHPNKAQCVVKEWSNGQYQFESGLAIWNSQLKWWKRKDRGIRIFEADLSDDTAIQSIISAQSKKHLHYVFEKLWIVTKFYFKRRHRRHLFWLYNRRQKALNKLCRVMAADSDIVAIGDPKFSASSRGYAPAPTVAVVKELQRLCPRKVVLIDEYNTSKLCSLCYSPLKQTKTEGRVNWRVQRCNNCGVYWNRDVNAARNMRALYVYQRDNNGARIPAFERPE

SEQ ID NO: 1568 - protein, 555 aa, Vermamoeba vermiformis
FITGDSNNIEFKHRKVSSSVSQISKYHANQFITNIENHLKHNTIHHYTLKYLMWTLKESIKLNNQGASIKGSVVRRLCWKIIYNVCWNRDFDFDPPESIKDIFDRVHDDFIGFYGEFQQDEYGLRKDEAIRYIYHLMVNMKGNHSMKLIPQSSFTVKSITIDKEVCNSIKSAIERRKRKYIKQKLKKKKKKIKKKKKEIKKKKKEKLDKNDLFKSIFVVDEPKNCKLTLIRSNGVDIDFVFERVDSQRKRKFEKIDDSDRPLKRLKNNTNVMVNNTNVRVNNTNVMVNNTNVMVNNTNVMVNNTNVRVNNTNVMVNERITGVDLGCKDLFVSISHPNKAQCVVKKWSNGQYQFESGLAIWNSQLKWWKRKDRGIRIFEADLSDDTAIQSIISAQSKKHLHYVFEKLWIVTKFYFKRRHRRRLFWLYNCRQKALNKLCRVMAANSDIVAIGDPKFSASSRGYAPAPTVAVVKELQRLCPRKVVLIDEYNTSKLCSLCYSPLKQTKTEGRVNWRVQRCNNCGVYWNRDVNAARNMRALYVYQRDNNGARIPAFERPE

SEQ ID NO: 1569 - protein, 695 aa, Vermamoeba vermiformis
TDLKKLDSKNQMGSQDVKSKFIYFIHYYLSNYFYYFLLIQKLQIKTVKKCLLSSLMGSKWQKHFVRKWISDQAEAHSQMLILASRFLWFHFARLIEKKKALPQNIDQQYIMNVFRHVSKSSKPGQRDNKIDDDLLQETAEILNLNAEKFPVRVSQISKYHANQFITNIENHLKHNTIHHYTLKYLMWTLKESIKLNNQGATINNSVVRRLCWKIIYNVCWNRDFDFDPPESIKDIFDRVHDDFIGFYGEFQQDEYGLRKDEAIRYIYHLMVSMKGNHSMKLIPQSSFTVKSITIDKKVCNSIKSAVERRKRKYIKQKLKKKKKKIKKKEEGNQEKRRRKSRKKKKEIKKKKEKLDKNDLFKSIFVVDEPKNCKLTLIRSNGVDIDFVFERVDSQRKRKFEKVDDSDRPLKRLKNNTNVMVNNTNVMVNNTNVMVNNTNVRVNNTNVMVNNTNVMVNERITGVDLGRKDLFVSISHPNKAQCVVKEWSNGQYQFESGLAIWNSQLKWWKRKDRGIRIFEADLSDDTAIQSIISEQSKKHLHYVFEKLWIVTKFYFKRRHRRHLFWLYNRRQKALNKLCRVMAADSDIIAVGDPKFNASSRGYAPAPTVAVVKELQRLCPRKVVLIDENNTSKLCSGCLTHLEFTKTEGRVNWRVQRCNNCGVYWNRDVNAARNMRALYVYQRDNNGARIPAFERPE

SEQ ID NO: 1570 - protein, 353 aa, Vermamoeba vermiformis
TKTEEKRRRKSRKKKKEIKKKKKEIKKKKKEKLDKNDLFKSIFIVDEPKNCKLTLIRSNGVDIDFVFERVDSQHKRKFEKIDDSDRPLKRLKNNTNVMVNNTNVRVNNTNVMVNERITGVDLGRKDLFVSISHPNKAQCVVKEWSNGQYQFESGLAIWNSQLKRWKRKDRGICIFEADLSDDTAIQSIISEQSKKHLHYVFEKLWIVTKFYFKRRHRRHLFWLYNRRQKALNKLCRVMAADSDIIAVGDPKFNASSRGYAPAPTVAVVKELQRLCPRKVVLIDENNTSKLCSGCLTHLEFTKTEGRVNWRVQRCNNCGVYWNRDVNAARNMRALYVYQRDNNGARIPAFERPE

SEQ ID NO: 1571 - protein, 645 aa, Vermamoeba vermiformis
IRTVKKCLFSSLMGSKWQKHFVRNWISDQAEAHSQMLILASRFLWFHFARLIEKKKALPQNIDQQYIMNVFRHVSKSSKPGQQDNKIDDDLLQETATILNLNAEKFPVRVSQISKYHANQFITNIENHLKHNTIHHYTLKYLMWTLKESIKLNNQGASIKGRVVRRLCWKIINNVCWNRDFDFDPPESIKDIFDRVHDDFIGFYGEFQQDEYGLRKDEAIRYIYHLMVNMKGNHSMKLIPQSSFTVKSITIDKEVCNSIKSAVERRKRKYIKQKLKKKKKKIKKKKKEIKKKKKEKLDKNDLFKSIFIVDEPKNCKLTLIRSNGVDIDFVFERVDSQRKRKFEKIDDSDRPLKRLKNNTNVMVNNTNVRVNNTNVMVNNTNVMVNNTNVMVNNTNVRVNNTNVMVNERITGVDLGRKDLFVSISHPNKAQCVVKEWSNGQYQFESGLAIWNSQLKQWKRKDRGICIFEADLSDDTAIQSIISEQSKKHLHYVFEKLWIVTKFYFKRRHRRHLFWLYNRRQKALNKLCRVMAADSDIIAVGDPKFNASSRGYAPAPTIAVVKELQRLCPRKVVLIDENNTSKLCSDCLTHLEFTKTEGRVNWRVQRCNNCGVYWNRDVNAARNMRALYVYQRDNNGARIPAFERPE

SEQ ID NO: 1572 - protein, 363 aa, Vermamoeba vermiformis
RKKKKKIKKKEEGNQEKRRRKSRKRRKSWIKNDLFKSIFIVDEPKNCKLTLIRSNGVDIDFVFERVDSQRKRKFEKIDDSDRPLKRLKNNTNVMVNNTNVMVNNTNVMVNNTNVMVNNTNVMVNERITGVDLGRKDLFVSISHPNKAQCVVKEWSNGQYQFESGLAIWNSQLKRWKRKDRGICIFEADLSDDTAIQSIISEQSKKHLHYVFEKLWIVTKFYFKRRHRRHLFWLYNRRQKALNKLCRVMAADSDIIAVGDPKFNASSRGYAPAPTVAVVKELQRLCPRKVVLIDENNTSKLCSGCLTHLEFTKTEGRVNWRVLRCNNCGVYWNRDVNAARNMRALYVYQRDNNGARIPAFERPE

SEQ ID NO: 1573 - protein, 258 aa, Vermamoeba vermiformis
HQCDGQQPMMVNNTNVMVNERITGVDLGRKDLFVSISHPNKAQCVVKEWSNGQYQFESGLAIWNSQLKRWKRKDRGIRIFEADLSDDTAIQSIISEQSKKHLHYVFEKLWIVTKFYFKRRHRRHLFWLYNRRQKALNKLCRVMAADSDIIAVGDPKFNASSRGYAPAPTVAVVKELQRLCPRKVVLIDENNTSKLCSGCLTHLEFTKTEGRVNWRVLRCNNCGVYWNRDVNAARNMRALYVYQRDNNGARIPAFERPE

SEQ ID NO: 1574 - protein, 584 aa, Vermamoeba vermiformis
KKCLFSSLMGSKWQKHFVRNWISDQAEAHSQMLILASRFLWFHFARLIEKKKALPQNINQQYIMNVFCHVSKSSNPSQRDNKIDDDLLQETATILNLNAEKFPVRVSQISKYHANQFITNIENHLKHNTIHHYTLKYLMWTLKESIKLNNQGASIKGRVVRRLCWKIIYNVCWNRDFDFDPPESIKDIYERVHDDFIGFFGEFQQDEYGLRKDEAIRYIYHLMVNMKGNHSMKLIPQSSFSVKSITIDKEVCNSIKSAVERRKRKYIKQKLKKKKKEIKKKKKEIKKKKKEIKKKKEKLDKNDLFKSIFIVDEPKNCKLTLIRSNGVDIDFVFERVDSQRKRKFEKIDDSDRPLKRLKNNTNMMVNNTNVMVNNTNVMVNNTNVMVNNTNVMVNERITGVDLGCKDLFVSISHPNKAQCVVKEWSNGQYQFESGLAIWNSQLKRWKRKDRGIRIFEADLSDATAIQSIISEQSKKHLHYVFERLWIVTKFYFKCRHRRHLFWLYNRRQKALNKLCRVMAANSDIVAIGDPKFSVLSRGYAPAPTVAVVKELQRLCPRKVVLIDEYNTSKLCSDLSYSPFKANED

SEQ ID NO: 1575 - protein, 359 aa, Vermamoeba vermiformis
RKRRRKSRKRRKKSRKKKKEIKKKKKEKLDKNDLFKSIFVVDEPKNCKLTLIRSNGVDIDFVFERVDSQRKRKFEKIDDSDRPLKRLKNNTNVMVNNTNVMVNNTNVMVNNTNVRVNNTNVMVNERITGVDLGRKDLFVSISHPNKAQCVVKEWSNGQYQFESGLAIWNSQLKWWKRKDRGICIFEADLSDDTAIQSIISVQSKKHLHYVFEKLWIVTKFYFKRQHRRRLFWLYNRRQKALNKLCRVMAADSDIVAIGDPKFSASSRGYAPAPTVAVVKELQRLCPRKVVLIDEYNTSKLCSLCYSPLKQTKTEGRVNWRVQRCNNCGGVLEPRRQRCTKHACVVRLSARQQWRANSCL

SEQ ID NO: 1576 - protein, 583 aa, Vermamoeba vermiformis
IRTVKKCLFSSLTGSKWQKHFVRNWISDQAEAHSQMLILASRFLWFHFAQLIEKKKELPQNINQQYIMNVFRHVSKSSNLSQRDNKIDDDLLQETAEILNLNAEKFPVRVSQISKYHANQFITNIENHLKHNTIHHYTLKYLMWTLTESIKLNNQGASIKGSVVRRLCWKIIYNVCWNRDFDFDPPESIKDIFDRVHDDFIGFYGEFQKDEYGLRKDEAIRYIYHLMVNMKGNHSMKLIPQSSFTVKSITIDKEVCNSIKSAVERRKRKYIKQKLKKKKKKIKKKKKEIKKKKKEIKKKKKEKLDKNDLFKSIFIVDEPKNCKLTLIRSNGVDIDFVFERVDSQRKRKFEKIDDSDRPLKRLKNNTNVMVNNTNVMVNNTNVMVNNTNGMVNNTNVMVNERITGVDLGRKDLFVSISHPNKAQCVVKEWSNGQYQFESGLAIWNSQLKQWKRKDRGIRIFEADLSDDTAIQSIISEQSKKHLHYVFEKLWIVTKFYFKRRHRRHLFWLYNRRQKALNKLCRVMAANSDIVAIGDPKFSPSSRGYAPAPTVAVVKACSDQCPRKVVLIDEYNTSKLCSGCLTHP

SEQ ID NO: 1577 - protein, 394 aa, Vermamoeba vermiformis
TKTEEKKKEIKKKKKEIKKKKKEIKKRRRKSRKKEEGNQERKKKESQEKEEGNQEEEGKSRKRRREKLDKNDLFKSIFIVDEPKNCKLTLIQSNGVDIDFVFERVDSQRKRKFEKIDDSDRPLKRLKNNTNVMVNNTNVMVNNSNVRVNNTNVMVNERITGVDLGRKDLFVSISHPNKAQCVVKEWSNGQYQFESGLAIWNSQLKRWKRKDHGICIFEADLSDDTAIQSIISEQSKKHLHYVFEKLWIVTKFYFKRRHRRHLFWLYNHRQKALNKLCRVMAADSDIIAVGDPKFSASSRGYAPAPTVAVVKELQRLCPRKVVLIDEYNTSKLCSLCYSPLKQTKTEGRVNWRVQRCNNCGVYWNRDVNAARNMRALYVYQRDNNGARIPAFERP

SEQ ID NO: 1578 - protein, 409 aa, Vermamoeba vermiformis
TTKVHQLKAVWFANYAGRSFIMCVGIEILILIHQKALRTYMIEFMMTFIGFYGEFQQDEYGLRKDESNSIYLSLNGQYERKSFNEINSTVIIHSKRVSPLIKKVCNSIKSAVERRKRKYIKQKTEEKEEGKSRKKKKEIKKKKKEIKKKKEKLDKNDLFKSIFIVDEPKNCKLTLIRSNGVDIDFVFERVDSQRKRKFEKIDDSDRPLKRLKNNTNVMVNNTNVMVNNTNVMVNNTNVMVNNTNVMVNNTNVMVNERITGVDLGRKDLFVSISHPNKAQCVVKEWSNGQYQFESGLAIWNSQLKRWKRKDRGIRIFEADLSDDTAIQSIISEQSKKHLHYVFEKLWIVTKFYFKRRHRRHLFWLYNRRQKALNKLCRVMAADSDIVAIGDPKVQCVITRLCSCTNCRCC

SEQ ID NO: 1579 - protein, 373 aa, Vermamoeba vermiformis
LHQVCSRKKKRKYIKQKLKKKKKKIKKKKKEIKKKKEKLDKNDLFKSIFIVDEPKNCKLTLIRSNGVDIDFVFERVDSQRKRKFEKIDDSDRPLKRLKNNTNVMVNNTNVMVNNTNVMVNNTNVRVNNTNVMVNERITGVDLGRKDLFVSISHPNKAQCVVKEWSNGQYQFESGLAIWNSQLKRWKRKDRGIRIFEADLSDDTAIQSIISEQSMKHLHYVFEKLWIVTKFYFKRWHRRHLFWLYNRRQKALNKLCRVMAANSDIVAIGDPKFSASSRGYAPAPTVAVVKELQRLCPRKVVLIDEYNTSKLCSLCYSPLKQTKTEGRVNWRVQRCNNCGVYWNRDVNAARNMRALYVYQRDNNGARIPAFERPE

SEQ ID NO: 1580 - protein, 276 aa, Phytophthora ramorum
RLSKLDNEARAEARKRHPTKIHTAQKLATKKAATEAGIKIARSAKQRERARLRREIRAIKTKITNATTDFHQKFISVLAAKFKTLLLPLYQTSEMVRMYEEEMEADGTPLAPAQPYIDRRGRKRRIRSSTARAMLSQQHFSFRMLSEYKMKRAGGRLITCDEEYSSTTCSSCGKIKENLGGSEVYKCAFCARSWTETSTGPRTSLSRTSRCSFDEVEPKRYCLHRGYLPCGHYRTKRRDLLRWAWKQISACRPSSSFRYRVLLFCFSYCYHKLCRH

SEQ ID NO: 1581 - protein, 220 aa, Mythimna separata
SFAGSQKSTYVRSHTLEWKQERVRTRLCCASKAAERKAREKLDFPVSSKNSSHVFEYTVFRMIWFNVRQEPYEKHAKLTRLGLDKYLRTAKCQEKIIKEVFDGGGVESTLVLYGAGSKFMNGASFSGRKFKHDALLKRLRTKRNIDVEVVDEKYTSQACSSCNEKTGEFRKIVMNHRLRWGVCRNCNSEFDRDANAAKNILINHTRSAICRPGCSTSEAS

SEQ ID NO: 1582 - protein, 333 aa, Sitodiplosis mosellana
FSSHSTIEQTSFPNTQQCSSPFQGLSYDTHIDYSCVKMVLSRVNMTMMDQDGPKNTPTDFRQPRPFQRCIAPANRTIRSPTKCGLIFYLKKNMTKSIDSTFHVVPKNNMAEINSLITSKQYYRLIREDTFEEKLAKLNGDRLKFEKSEMLIAQRNCNDHEMPSNKSHKFGSYVNVKLKVFKRFNSHSKARKVASLKLGQYQKRQIAMTKIVKRLTFGYEPTLLISSRPPIAKDSPIRGYRRCPLKLIEKTCILSPHIDVMFTGEVNTTQKHSKCYGQMEISKSPHLFAICSFCLSYMNTVLPEPQMWKTRASLLCPSRYRYSPLYVIKRNQHT

SEQ ID NO: 1583 - protein, 234 aa, Sitodiplosis mosellana
IHLNIIHNHKNPQYSAETFITVDTMQTNVFGFILLCQSFHSCIESARNDFRRFQQIRLTNRQYHRLIGYHQREKKRRELTRQIDEQMKSHRERFDDRPCPRSADYNMNAGNILRHFNAKFKPYTQYEYALQDLLQYIATERELDKLASQLINGKQTFVYAGNATLPGSSPTKGYRRTRVRALFEKKSRRHNCTVFWVDEFRTTKLCSLCFRELEQPKKSRSSEEKVPVLFVSWV

SEQ ID NO: 1584 - protein, 330 aa, Sitodiplosis mosellana
RDLKSYPIASVSSRGSQWKSFIKHKIKMLTDSLATYARRKYAQLSLHKYIESNREMDLMAQHITKNETGLVFLGDAAFPSNSKIGVKRTKRTPDQRKFIVSLKKDGKTDVVLTPEPYTSQTCANCLRRFPRSTKSDRFKVCKDCRPHKDVRLPPLIVTDRSRRRKQRDRKQNASQMPTANVTRAERAGKHREKRRSERESHNPEQLDTEQAVRRYNRRIRRRELRQRRRVAGHRSRKVTKQPEAESDLSGFVKIGDTSICKIRVKNRKAKPQSWQRIHYDANDTGFGSLGSKKIFFQKNWHSSPMNDQNASTVTWHRDICAAKCILYRGM

SEQ ID NO: 1585 - protein, 218 aa, Sitodiplosis mosellana
SRPENKNGLRASDSRYWNRSKLKYHMKINIDLHCCCSFHRPTSNYRVFNITGVRDKECRKYVHKEQRDLKSYPITSVSPRGSQWKSFIKHKIKMLTDSLATYARRKYAQLSLHKYIESNREMDLMAQHITKNETGVVFLGDAAFPSNSKIGVKRTKRTPDQRKFIVSLKKDSKTDVALTPEPYTLKLLTNRTRTVRVRFLLNFVFVFVRVRFELFETK

SEQ ID NO: 1586 - protein, 234 aa, Sitodiplosis mosellana
ELTIEFLFLWKKLNVFVVAQQTNRKRCIINIGASQPAANSPIKIKKHVRCPGVRKLVKSFKKMEGNVIRFVNEARSSRLCARCFEPFPLSTLNDRVKVCEWCMPDQDDWPDGMKLPEKIVAAKSKRKLRSERRAMRQAAVQNPNQPRGFVSKVICYRKNWQQNAANGMDDNVEERRGVIIHDAELGIIEYTDEYVPEDPVDDSPVLKTVWQRDISAAKLILYRGMLLIELKLMQ

SEQ ID NO: 1587 - protein, 365 aa, Sitodiplosis mosellana
LCLKSRKSTKSQSAKAVTSMNQQLIPASKYVHKEQRDLKSYPITSVSPRGSQLKSFIKHKIKMLTDSLATYARRKYAQLSLHKYIESNREMDLMAQHITKNETGVVFLGDAAFPSNSKIGVKRTKRTPDQRKFIVSLKKDGKTDVVLAPEPYTSQTCANCLRRFPRSTKSDRFKVCKDCRPHKDVRLPSLIVTDRSRRRKQRDRKQNASQKPTANVTRAERAGKHREKRRSERESHNPEQLDTEQAVRRYNRCIRRRELRQRRRVAGHRSRKVTKQPEAESDLQGFVKIGDTSICKIRVKNRKAKPQSWQRIHFNANDTGFGLLGSKKIFFQKNWHSNPMNDQNASTVTWHRDICAAKCILYRGM

SEQ ID NO: 1588 - protein, 241 aa, Sitodiplosis mosellana
YIRHRLKMTERGIAVYTTDKYTRLNFDKYVRANSVTDSIAGMLTNHQPSLMRFRAAQMSLSSPIGIKKTLRCPGNRKMIRSYEKCPGCVVNMVDEYYTSQTCAKCFGRFDRRTKRHRFKVCHDCRPDEGAMLPTMIVCKVNKRKMRQEKLKLFLLEKEVEEGNGNPAVGNDVPHPDQLNPDLLPKVAIYHKTWQVNGLGNLEYVKFNSAGEMEVVEPRVQKTKWHRDIAAAKCILIKGKCS

SEQ ID NO: 1589 - protein, 218 aa, Sitodiplosis mosellana
MFLLLLNRQIANDASLTLELPNHLQIHQLRSRNMFDARACGKSFKKMEGNIIRFVNEARSSRLCARCFEPFPLSTLNDRVKVCVWCEPDQNDWPDGMKLPEKIVVAKSKRKLRSDRREMRQAAVQNPNQPRGFVSKVICYRKNWQQNAANGMDDNVEERRGVTIHDAELGIIEYTDEYVPEDPVDDSPVLKTVWQRDISAAKLILYRGMLFIELKLMQ

SEQ ID NO: 1590 - protein, 235 aa, Sitodiplosis mosellana
TNYKISSKQYHYWTKQTVRNRQGKRWTKDVVKEERRDRENQPSLMHFGAAQMSPSSPIGIKKTLRCPGNRKMIRSYKKCPGCVVNMVDEYFTSQTCAKCFGCFDRRTKRHRFKVCHDCRPDERAMLPSMIVCKVNKRKMRQVKLKLFLLEKEAEEGNGNPAVGNDVPHPDQLSPYLLPKVAIYHKTWQVNGLGNVEYVKFNKADEMEVVESQVHKTKWHRDIAAAKSILIKGKCS

SEQ ID NO: 1591 - protein, 301 aa, Sitodiplosis mosellana
ANYTISSKQYHYWTKQTVRNRQGKRWTKDFVKEERQDRENRALYPVMPSPLGRHWEDYIRHRLKMTERGIAVYTTDKYTRLNFDKYVRANSVTDSIAGMLTNHQPTLMHFGAAQMSPSSPIGIKKSLRCPGNRKMIRSYKKCRGCVVNMVDEYYTSQTCAKCFGRFDRRTKRHRFKVCHDCRPQSVVRAMLPSMIVCKVNKRKMRQEKLKLFLLEKEAEEGNGNPAVGNDVPHPDQLNPELLPKVAIYHKTWHVNESSGILEYVKFNSAGEMEVVEPRLHKTTWHRDIAAAKCILIKGKCS

SEQ ID NO: 1592 - protein, 237 aa, Anadara kagoshimensis
EIKRADGYFILCIPCKPEYTRRKFNKEGQKGVCGVDPGGRTMATIYDPVNRHAWQVGTKRDKKYLIKPLQKKIDVVMAQLQLAIEKEQKSRIMDKKRELKKLHTKMKWIINNIHCDFSNELVKTNKLVVLGDMKTAKIVNKTEKKGLPRKANRDLIEWRHYEFKKRLIHRAKGSGCKVVIQDEAYTSKTCGRCGRMNANLGSAETFVCDTCKYETHRDVNGARNILRKYTKHFFTYK

SEQ ID NO: 1593 - protein, 228 aa, Anadara kagoshimensis
EDKHLMIFPVSLIRPIRLTKSVRKLPPFDHDMRIIKRADGYFILCIPCKPEYTRRKFNKEGQKGVCGVDPGGRTMATIYDPVNRHAWQVGTKRDKKYLIKPLQKKIDVVMAQLQLAIEKEQKSRIMDKKRELKKLHTKMKWIINNIHCDFSNELVKTNKLVVLGDMKTAKIVNKTEKKGLPRKANRDLIEWRHYEFKKRLIHRAKGSGCKVVIQDEAYTSRRVVDAVG

SEQ ID NO: 1594 - protein, 236 aa, Sphagnum fallax
MRKHEVIDGKRVVEWEVELSAYNKKTTDFATFETYVAKKNEMNVCLTPFYQDYTFRRMKMLSFIGRERTEAKMIREFKEKFGSGEEVVVAIGDWEHRQHRKFKEPTKGKGFRTLLRKASYDVYLVDEFRTSCRCSHCEEHGECKSFLECENPKPYRTGRILRHGLVRCKTYQRLWNRDTNASSNIWKVADSAINGLPRPEHLRRTVQANYTVGSDASSSRRRTRRGPSPLQRHGKV

SEQ ID NO: 1595 - protein, 206 aa, Sphagnum fallax
TCKHEVIDGKRVVEWEVELSAYNKKTTDFAAFKTYIAKKNEMNVRLTPFYQDYTFRRMKMLSFIGRQSTEAKMIREFKEKFGSGEEVVVAIGDWEQRQHRKFKEPTKGKGSERSCVNQAMTCIWSTSFVPAADVASVRSMVSVRCFWSVRTRDRTVQDASCVMGLSGVRPTNVYGTGIRTSLNSHIIFASVCCLPMKDNIFMRRKV

SEQ ID NO: 1596 - protein, 342 aa, Rhodotorula sp.
LLNVWADTISAGWLFDRALSRTEERVFPRWSNLDPQGYAERFKNNLATEFSAEGSVLQERRIVTIIPYQNGTRPPNLPIAKLSQNPATPSFCAIRRIRPPVRRYIKPPRTSKGLPITWPDSDKTNGITRVREFATTNEDRSTAGIDIGEVEMVTLFTSTPYAKDGAIAEGVALYSRRSLLELQKLSSREASSLLAKRQRVLLPSNAPLTGSTEPRSRIAIATLSSSSASSRHQQERSRLRSTAEQQGAAAELARHILGGSASKEGVGTVEQAQAALIYVGKGSMVRSDGGHGPRSGAAITRQLEVELRRQRVRCLFVRTNEAYTSSVCPSAHCTNEEGQRNP

SEQ ID NO: 1597 - protein, 443 aa, Microglena sp.
DHPLIHYNVCRPDSSRTVSRKFGYRIVTDGFAVSILMNKPTCSMPADSFSTRAHEYVTTDEGGIVSFRDNVVVAAVDPGVTDIVTVTGLGGGTRSYSSAQYYRKGLIFKSQRQTEVWNLETADIVGDIIPDRDSSRSEQIGAYAWFYMGAAPILLAHRASRGYRNLRFRRYCKKQKLIVEIADFVAPREKSAKVLVGFGDWKGLGATPISRRTCGPLQAIRFELRSRGNVIMEDVDEFRTSQRCSCCENRLCNMVALTHHKKQDGTGWECTEGRKRIHKILHCKSSQSGAPRQQSGGRLHCGKTWDRDVNASRNILMLTLHQVFGRERPLAFRRDAPRSSSKTPPPPDTDMGTQTVERFTKEATRNIFENLFNLLHPPPNVAQKQRSAVWMIIRCVPLYLRTTVSSIKWHWITSICMQLKKWMQALVLRHSKAASWALQSTSA

SEQ ID NO: 1598 - protein, 272 aa, Microglena sp.
AYVSDMFDACDAFSTRAHEYVTTDEGGIVSFREYVVVAAVDPGVTDIVTVTGLDGGTRSYSSAQYYRKGLLFKSQRQTDVWNLETADIVGGIIPDRDSSRSEQIGAYARFYMGAAPILLAHRASKRYRNLRFRRYCKKQKLIVEIADFVAPREKSTKVLVGFGDWKGLGATPISRRTCGPLQAIRFELRSRENVIMEDVDEFRTSQRCSCCETAFATWLHSLIVRGKTVLVGNVRKDASGFTRFSTAKAVKAERHANRAAVGSTAGRLGTAM

SEQ ID NO: 1599 - protein, 222 aa, Microglena sp.
WLVPTFLGPRRKRFQSRTTERRFKKQTKTLREFSESDPNVVVVANDPGRCNIAFLTWKKNKVEEKDKGGRKWKRHCEFGSKRLTRERYYVESGVFKSRGPTKKWLCNIQDCLDDLKDNSPKRTSLESFDAYVTVMVNHWDSRWGEMSKSRWGAQRLRIYGGKKRVLARFFNEVQADVGERKTIVIAYGSSKFAPGGKGELSVPTTSAFNAFRDRFKGRVAVH

SEQ ID NO: 1600 - protein, 206 aa, Microglena sp.
RYFVGFGDWKVCVWATPISSDCALSKLFRLELRSRENVIMEDIDEFRTSQTSSCCENHLCNMVALTHRKKQDGTGWECTEGRKRIHKIPPLQKQSKRSATQQSGGMLHCGKTWDRDVNASRNILMLTLHQVFGRERPLAFRRDAPRSSSTTPPPPPDTDMGHRRLNGLPKRLLGISSRTSSTFCTPQRCPKATICSLDDYKVSHFI

SEQ ID NO: 1601 - protein, 393 aa, Microglena sp.
SFSAWVIRYSRASLAMDVTRTIQCCGESTLMSKVLRRKGLALTTESSATVKGVSVQMKQKGKEEVVEEGENAGYPKDANIVECKDAVGALRVGVDPGMTDIVTVASSAGRIESFSSARFSEVAGYNTSKRRTYKWNDETQDLVKSIPSPNTSNMVDLQDHVRAYLKALAILLQHRANKGYRSMRFFRYVGKHKTIEKVCDVIAPRAQTTVVGFGNWSNQGYGISRSCSGPIKEIRRCLSRRKNVLFKNVDERNTSCKCHGCFHRLVNMKADSVVWRGVCKESPIDGSITVEKQKMVVKNVKVHKVLHCRDSVKSASSNVRCGATWNRDVNAAKNLLLLLTTWMDGRERPEAFCVPSPPPKTTVSIEASVSAKPTDPPGFVSSLPWYPLGQLKC

SEQ ID NO: 1602 - protein, 551 aa, Microglena sp.
GNVGAILYHQKKKNIHLLLMGVVQDKGDDDINISVVKKTLNSLCMDVSRHQISSRIQSMVLLINHAVAEAYLFANFHITRCLDDGDFDVKQLPHLDRNFYYRCLLAVSTSNVRKDTLGQSFNDTMVAFDALRPAGYVKVDVRPWGQVIADVSIQMATMACNSVWANVDRVVIKYLRLKHPSLKKHFKKIVKAVVQYPESKIDTIIPGGLVHAIHIKEVVSHLRALFPLPRGKQFNTRAHLTMRLFHHVLTELGEVGRVDPKDKNTKKRHPRLFSILPRKNGFTISYVPISSMTFMKLLSMVDSPLESVSGDGRYENHTMLWRKYFNVQGLETKRSRFDNRILSDGKGVSVQMKQKGKEEVVEEGENAGYPKDANIVECKDAVGALRVGVDPGMTDIVTVASSAGRIESFSSARFSEVAGYNTSKSRTYKWNDETQDLVKSIPSPNTSNMVDLQDHVRAYLKALPILLQHRANKGYRSMRFFRYVGKHKTIEKVCDVIAPRAQTTVVGFGNWSNQGYGISRSCSGPIKEIRRCLSRRKNVFVQKRRRTQHFL

SEQ ID NO: 1603 - protein, 344 aa, Microglena sp.
CYSILNQFQFSMYNLDKRSIVVHMYTLLQSLRRVAILANVSHMTVSRWISNPTKKVYTRNKPTKSDVVIEFLKASLKIDPFASLAGLRHKVKDAFGFEVSKELIRVVIKRLGLTKKKAKFFSRPDNLYEKTTSFISQRERLKEEGRTFVSIDETSFGRHSRWGEMSKSRWGAQRLRLYGGKKRVLARFFNKVQADVGERKTIVVAYGSAKFAPGGKGELSVPTTSAFKAFSDRFMGRVAVIDEFRTTKIWHKDSTTVLQSVQSEKEGRTVRGLLWCSSTMENSKLFVNRDLNAAINIHNCFTMYPIRPGILARPKKYCKLEVVVGRKIDYKLTGSLQNAVSSEV

SEQ ID NO: 1604 - protein, 423 aa, Microglena sp.
KNKKSHPRLFSILPRKNGFTISYVPISSMTFMKLLSMGDSPLESVSGDGRYENHTMLWRKYFNVQGLETKRSRFDNRILSYGKGVSVQMKQKGKEEVVEKGENAGYPKDANIVECKDAVGALRVGVDPGMTDIVTIASSAGRIESFSSARFSEVAGYNTSKRRTYKWNDETQDLVKSIPSPNTSNMVDLQDHVRAYLKALPILLQHRANKGYRSMRFFRYVGKHKTIEKVCDVIAPRAQTTVVGFGNWSNQGYGISRSCSGPIKEIRRCLSHRKNVLFKNVDERNTSCKCHGCFQRLVNMKADSVVWRGVCKESPIDGSITVEKQKMVVKNVKVHKVLHCRDSVKSASSNVRCGATWNRDVNAAKNLLLLLTTWMDGRERPEAFCVPSPPPKTTVSIGASVSAKPNRPTWVCQQLALLSFGPA

SEQ ID NO: 1605 - protein, 206 aa, Microglena sp.
YVGKQKTIEKVCDVIAPRAQTTVVGFGNWSNQGYGISRSCSGPIKEIRRCLSRRKNVLFKNVDERNTSCKCHGCFQRLVNMKADSVVWRGVCKESPIDGSITVEKQKMVVKNVKVHKVLHCRDSVKSASSNVRCGATWNRDVNAAKNLLLLLTTWMDGRERPEAFCVPSPPPKTTVSIEASVSAKPTDPPGFVSSLPCYPLGQLKC

SEQ ID NO: 1606 - protein, 825 aa, Microglena sp.
PRMEHVCDVCIKSSVMYKLCKMATKPPTVAKLKELLKLAEVAYSSKDKKDDIVRLCEDNGFIARPPPEYKTVEKMCVVKCALKKAMSLDDEEFGKFRGHVDQLVNVVSRMLRRSSLVLTFHVTRLMEGDLPILNMYDMKDTYWKDWLRIGVDGVFPDEESRISYEAVKDVIRKVLGSYEPDYINSYPIYFDQVLNYAGHTLSTVVSNNAWVPLVPRLTRLTKDTLKALGAPKTIRVYVVMRVIQQEIQEMESWPESVQEYVREVRVRLKVPDGSRLYDDYGQDMDFPTMVQFNYWMQTRLEAIGARRIRLMPIFNVQRAHVHLDMKTLVNLFRHVFPKDPNIVELSKWENVKDPDRFMLPLKPSVKKKKSCGPGEWEAYKLAQQKYDADVKDIKATDEYRHAKGRYDTLVNAQKTVAGSFFKKPPVKTGWVFDCSICTDGVSLSMQYSKTVQVRVSDLKKTSKRSRDEEGMSVSEQYDHKLKTTLPDMGIVVLCVDPGRSNIATVMYLADNKSKTWKLTCGAFYHKSGIKKQKKQQEKRFSDMIPRWESLRENGAALSTSRKDDISAHLKNYATFSDEWWRMALRRRESRDYFQRYIGKRKAMDSFWAGIKRNMKLDHPDLRVRVAYGSAITKLKATGPGEVAVPTGSMFASCKGLFKEEVHVTDEFKTTLMSWETGAKKECVYKIPSVQITTEGQIRLGYELLGHTPLKETPKVSYRDQLAVRVYCTRKKIQEKHRRGGLAPSLVDNNSIKRYPEVRGLRFSPETSTYSDRDRSSALTIARLHCMELLGQGRPLPFCRDACCWATKKHDGVPLQCGLLHHKVTP

SEQ ID NO: 1607 - protein, 425 aa, Microglena sp.
KKKKSHPRLFSILPRKNGFTILYVSISSMTFMKLLSMGDSPLESVSGDGRYENHTMLWRKYFNVQGLETKRSRFDNRILSDGKGVSVQMKQKGKEEVVEEGENAGYPKDANIVECKDAVGALRVGVDPGMTDIVTVASSACRIESFSSARFSEVAGYNTSKRRTYKWNDETQDLVKSIPSPNTSNMVDLQDHVRAYLKALPILLQHRANKGYRSMRFFRYVGKQKTIEKVCDVIAPRAQTTVVGFGNWSNQGYGISRSCSGPIKRSGGASHVVRMFCSKNVDERNTSCKCHGCFQRLVNMKADSVVWRGVCKESPINGSITVEKQKMVVKNVKVHKVLHCRDSVKSASSNVRCGATWNRDVNAAKNLLLLLTTWMDGRERPEAFCVPSHPTKTTVSIEASVSAKPTDPPGFVSSLPCYPLGQLKC

SEQ ID NO: 1608 - protein, 686 aa, Microglena sp.
IETIVNKEPPDKRTRPDRAAKIKDRKNGEENVVKCTLSRIIADKDNKDVIIKVIKERVDSVSKRTYLAGVAVNRILKEVFEGVPDAQLHTVSVPSVDQNFMRQLMVGSRQAHMETRDATVERFFHNNYWFREKIEGREVIVKKKKQYVGAIARYDVDRNLYNHASKKYLTNFNNHYRVHLSTWIKKFVYSKENRILAKEIKDEHGIDETVFHRYLLYDIHSWGVKEDLIAIHSLLPERTKMLLKIQHSILGRDEINQQWLKSVSNSAKMIRYNVFINRYLEATEDEGYAKLVNIAPIPTVKHAFITIDTDGLLGVLKDVGLIESLEKTLTNNEHWESVFDVENIRSTGKGVFTCTIDTDGVMACIHFLRAEKKKISIKDDGTAIKKQTKTLREFSESDPNVVVVANDPGRCNIAFLTWKKNKVEEKDKGGRKRKRHCEFGSKRLTRERYYVESGVFKSRGPTKKWLSNIQDCLDDLKDNSPKRTSLVSFDAYVTVMVNHWDSRWGEMSKSRWGAQRLRLYGGKKRVLARFFNEVQEDVGERKTIVVAYGSAKFAPGGKGELSVPTTSAFKVFSDRFKGRVAVIDEFRTTKIWHKDSTTVLQSVQSEKEGRTVRGLLWCSSTMENSKLFVNRDLNASINIHNCFTMYPIRPGILARPKKYCKLEVVVGRKIDYKLTGSLQNAVSSEV

SEQ ID NO: 1609 - protein, 342 aa, Microglena sp.
RVSVQMKQKGKEEVVEEGENAGYPKDANIVECKDAVGALRVGVDPGMTDIVTVASSACRIESFSSARFSEVAGYNTSKRRTYKWNDETQDLVKSIPSPNTSNMVDLQDHVRAYLKALPILLQHRANKGYRSMRFFRYVGKQKTIEKVCDVIAPRAQTTVVGFGNWSNQGYGISRSCSGPIKEIRRCLSRRKNVLFKNVDERNTSCKCHGCFQRLVNMKADSVVWRGVCKESPINGSITVEKQKMVVKNVKVHKVLHCRDSVKSASSNVRCGATWNRDVNAAKNLLLLLTTWMDGRERPEAFCVPSHPPKTTVSIEASVSAKPTDPPGFVSSLPCYPLGQHKC

SEQ ID NO: 1610 - protein, 266 aa, Microglena sp.
ESRDEEGMSVSEQYDHKLKTTLPDMGLVFLGVILVGATSLQSRIWQTTKARHGSLHAELFYHKSGIKKQKKTARKTFLRQIPRWESLRENGAALSTSRKDDISAYLKNYATFSDEWWRMALRRRESRDNFQRYIGKRKAMDSFWAGIKRNMKLDHPDLRVRVAYGSAITKLKATGPGEVAVPTGSMFASCKRLFKEEVHVTDEFKTTLMSWETGAKKECVYKIPSVQITTEGQIRLGYELLGHTPLKETPKVSYRDQLAVRVYCHT

SEQ ID NO: 1611 - protein, 487 aa, Microglena sp.
GARGNCEKEETIRGCHRSLRWRSNLYSHASKKYLTNFNNHYRVHLSTWIKKFVYSKENRILAKEFKDEHGIDETVFHRYLLYDIHSWGVKEDLIAIHSLLPERTKMLLKIQHSIIGRDEINRQWLKSVSNSAKMIRYNVFINRYLEATEDEGYAKLVNIAPIPTVKHSFITIDTDGLLGVLKDVGLVESLEKTLTNKEHWESVFDVENIRSTGKGVFTCTIDTDGVMACTHFLRAEKKKISIKDDGTAIKKQFSESDPNVVVVANDPGRCNIAFLTWKKNKVEEKDKGGRKRKRHCEFGSKRLTRERYYVESGVFKSRGPTKKWLSNIQDCLDDLKDNSPKRTSLESFDAYVTVMVNHWDSRWGEMSKSRWGAQRLRLYGGKKRVLARFFNEVQADVGEGKQLSSHTVLLSLPLVARVNFLSLQRARSMRLETVSRGELPTLTNSVPQRSGTRTAPPSSRVCNPKKKGARFEACYGAVPPWRTASCL

SEQ ID NO: 1612 - protein, 220 aa, Microglena sp.
HVRCLADAFSTRAHEYVTTDEGGIVSFLDNVVVAAVDPGVTDIVTVTGLNGGTRSYSSAKYYRKGLIFKSQRQTDVWNLETADIVGGIIPDRDSSSSEQIGAYARFYMGAAPILLAHRASRGYRNLRFRRYCKKQKLIVEIADLVAPRKKSAKVLVGFGDWKGLGATPISRRTCGPLQAIRFELRSRENVIMEDIDEFRTSQRCSCCENQKFLDNPTPTP

SEQ ID NO: 1613 - protein, 561 aa, Microglena sp.
ALIQQSCQPSFQHLDFDRQKSAVALAKKRVGRKEPEGSPLRVRLTKLQERLEKLSEAWLSSKNLRVDADNAKRFFAREVAFCLRGVLPLPSGNTFASRAHMTLPLYHKILSETIEEKRKTKNEKHRTFSLLPYKSGFTLSHIPISKMAFFYMVNECHFDSCKADVASKNHQGIWERFANLKKVETVSRKFGYRIVTDGFAVSILMNKPTCLTCSMPADAFSTRAHEYVTTDEGGIVSFLDNVVVAAVDPGVTDIVTVTGLNGGTRSYSSAKYYRKGLIFKSQRQTDVWNLETADIVGGIIPDRDSSSSEQIGAYARFYMGAAPILLAHRASRGYRNLRFRRYCKKQKLIVEIADFVAPRKKSAKVLVGFGDWKGLGATPISRRTCGPLQAIRFELRSRENVIMEDIDEFRTSQRCSCCENHLCNMVALTHRKKQDGTGWECTEGRKRIHKILHCKSSQSGAPRQQSGGMLHCGKTWDRDVNASRNILMLTLHQVFGRERPLAFRRDAPRSSSTTPPPPPDTDMGTQTVERFTKEATRNIFENLFNLLHPPTLPKSNDLQSG

SEQ ID NO: 1614 - protein, 240 aa, Microglena sp.
GKPDPRSKGPQIPLRRIFPRLVCRCQGQEAERKPVHPDKVATASIDPGVRKTMVTYSPENEESFMLGQGQASDLVKLLLVHDKLQSRLDTEKTLRSKERMKIKKHMIRIRKRIFYLKKEFRDQTTNFLAARYDVLLVPQLETAKMTISAERELTTKVARQMLTLSHSVLFNRLKEKCAEYETVFLHVLEHYTSQTCPMCGFLNKCGETYTCKNCQFTCDRDIVGAAGIFLKAVRTENPCS

SEQ ID NO: 1615 - protein, 243 aa, Microglena sp.
CLRKTRPRSKGPQNPASANISSSCLSLPTDRRAERKPVHPDKVATASIDPGVRKTMVTYSPENEESFMLGQGQASDLVKLLLVHDKLQSRLDTEKTLRSKERMKIKKHMIRIRREFFTSRKSLGTRQQISWPHRYDVLLVPQLETAKMTISAERELTTKVARQMLTLSHSVLFNRLKEKCAEYGTVFLHVLEHYTSQTCPMCGFLNKCGETYTCKNCQFTCDRDIVGAAGIFLKAVRTENPCS

SEQ ID NO: 1616 - protein, 729 aa, Microglena sp.
PRMEHVCDVCIKSSVMYKLCKMATKPPTVAKLKELLKLAEVAYSSKDKKDDIVRLCEDNGLIARPPPEYKTVEKMCVVKCALKKAMSLDDEEFGKFREHVDQLVNVVSRMLRRSSLVLTFHVTRLMEGDLPIPNMYDMKDTYWKDWLRIGVDGVFPDEESRISYESVKDVIGKVLGSDDPDYINSYPIYFDQVLNYAGHTLSTVVSNNAWVPLVPRLTRLTKATLNALKAPKTIRVYDVMRVIQQEIQEMESWPESVQEYVREVRVRLKVPDGSRLYDDYGKDMDFPTMVRFNYWMQTRLESIGARRIRLMPIFNVQRAHVRLDMKTLVNLFRHVFPKDPNIVELSKWKDVKDPDRFMLPLKPAVKKKKSCGPGEWEAYKLAQQKYDADVNDIKDTDEYRHAKGRYDTLVNARKTVAGSFFKKPPVKTGWVFDCSICTDGVSLSMQYSKTVQVRVSDLKKTSKRSRDDEGMSVSEQYDHKLKTTLPDMGIVVLGVDPGRSNIATVTYLADDKSKTWKLTRGAFYHKSGIKKQKKQQEKRFSDMIPRWESLRENGAALSTSRTDDISAYLKNYDTFSDEWWRMALLRRESRDNFQRYIGKRKAMDSFWAGIKRNMKLDHPDLRVRVAYGSAITTLKATGPGEVAVPTGSMFASCKRLFKEEVHVTDEFKTTLMSWETGAKKECVLQNSKCPNNHGRADSSRLRVVGSHPIEGDSKCLLSRPVGGEGVLHT

SEQ ID NO: 1617 - protein, 349 aa, Microglena sp.
RRPVRSLVKKKVSRSQKKYDGSLKTILPDMGIVVLGVDPGRSNIATVTYLADDKNKTWTLTRGEFYHKSGIKKQTRQKELRFADMIPMWESLRENGAALSTSRTDKISAYLSNYAKFSDEWWRLALRRRESRDNLQRYIGKRKVKDSFWAGIKRCMMKELPDMKVCVAYGSAITKLKPTGPGEVAVPTGTMFASCKRIFKEDVSVTDEFKTTLMSWETGKEKERVYKIPSVCSADVKLRLGGERFGHTKSKTMPKVADCDHLGVRLYNKRKGAQEKHRRGGFATSLVDSQKSIERYPEVRGLRFSPETCIYSDRDRSSALTIARLHCMELMGLGRPLPFAHSSSVVVDE

SEQ ID NO: 1618 - protein, 301 aa, Microglena sp.
EADQDSPRVFRVRPQCGVVANDPGRCNIAFLTWKKNKVEEKDKGGRKRKRHCEFGSKRLTRERYYVESGVFKSRGPTKKWLSNIQDCLDDLKDNSPKRTSLESFDAYVTVMVNHWDSRWGEMSKSRWGAQRLRLYGGKKRVLARFFNEVQADVGERKTIVIAYGSSKFAPGGKGELSVPTTSAFNAFRDRFKGRVAVIDEFRTTKIWHKDSTTVLQSVQSEKKGRTVRGLLWCSSTMENSKLFVNRDLNAAINIHNCFTMYPTRPGILARPKKYCKLEVVVGRTIDYKLTGSLQNAVSSEV

SEQ ID NO: 1619 - protein, 243 aa, Microglena sp.
CLRKTRPTIRRSKNPASANISSYCLSLLGTEGQSGSLSIQTRLQLPPSTQASERQWSRTHLRMRNPSCLVRDRHPTLSNSCWFMTSCSQGWILRKPYDQKERMKIKKLMIRIRKTIFYLKKEFRDQTTNFLAARYDVLLVPQLETAKMTISAERELTTKVARQMLTLSHSVLFNRLKEKCEEYGTVFLHVLEHYTSQTCPMCGFLNKCGETYTCKNCQFTCDRDIVGAAGIFLKAVRTENPCS

SEQ ID NO: 1620 - protein, 214 aa, Microglena sp.
RIWQTIKIKTWKLTRGAFYHKSGIKKQTRQKELRFADMIPMWESLRENGAALSTSRTDKISAYLSNYAKFSDEWWRLALRRRESRDNLQRYIGKRKVKDSFWAGIKRCMMKELPGMKVCVAYGSAITKLKPTGPGEVAVPTGAMFASCKRIFKEDVSVTDEFKTTLMSWETGKEKERVYKIPSVCSADVNLRLGGERFGHTKSKTMQRSLIATT

SEQ ID NO: 1621 - protein, 330 aa, Microglena sp.
ASQNSMTINSKTTLPDMGIVVLGVDPGRSNIATVTYLADDKSKTWKLTRGAFYHKSGIKKQKKQQEKRFSDMIPRWESLRENGAALSTSRTDDISAYLKNYDTFSDEWWRMALLRRESRDNFQRYIGKRKAMDSFWAGIKRNMKLDHPDLRVRVAYGSAITTLKATGPGEVAVPTGSMFASCKRLFKEEVHVTDEFKTTLMSWETGAKKECVLQNSKCPITTEGQIRLGYELLGHTPLKETPKVSYRDQLAVRVYCTRKQIQEKHRRGGLSPSLVDNNSIKRYPEVRGLRFSPETSTYSDRDRSSALTIARLHCMELLGQGRPLPFCRDA

SEQ ID NO: 1622 - protein, 786 aa, Microglena sp.
CIKLCKMATKPPTVAKLKELLKLAEVAYSSKDKKDDIVRLCEDNGLIARPPPEYKTVEKMCVVKCALKKAMSLDDEEFGKFREHVDQLVNVVSRMLRRSSLVLTFHVTRLMEGDLPIPNMYDMKDTYWKDWLRIGVDGVFPDEESRISYEAVKDVIGKVLGSDDPDYINSYPIYFDQVLNYAGHTLSTVVSNNAWVPLVPRLTRLTKATLNALKAPKTIRVYDVMRVIQQEIQEMESWPESVQEYVREVRVRLKVPDGSRLYDDYGKDMDFPTMVRFNYWMQTRLEDMDARRIRLMPIFNVQRAHVRLDMKTLVNLFRHVFPKDPNIVELSKWKDVKDPDRFMLPLKPAFKKKKSCGPGEWEAYKLAQQKYDADVNDIKDTDEYRHAKGRYDTLVNARKTVAGSFFKKPPVKTGWVFDCSICTDGVSLSMQYSKTVQVRVSDLKKTSKRSRDDEGMSVSEQYDHKLKTTLPDMGIVVLGVDPGRSNIATVTYLADDKSKTWKLTRGAFYHKSGIKKQKKQQEKRFSDMIPRWESLRENGAALSTSRTDDISAYLKNYDTFSDDWWRMALLRRESRDNFQRYIGKRKAMDSFWAGIKRNMKLDHPDLRVRVAYGSAITTLKATGPGEVAVPTGSMFASCKRLFKEEVHVTDEFKTTLMSWETGAKKECVYKIPSVQITTEGQIRLGYELLGHTPLKETPNVSYRDQLAVRVYCTRKQIQEKHRRGGLAPSLVDNNSIKRYPEVRGLRFSPETSTYSDRDRSSALTIARLHCMELLGQGRPLPFCRDA

SEQ ID NO: 1623 - protein, 229 aa, Microglena sp.
VRMAGPLESTDILQFVDSKSYWCIKSYLAIHKYASSRSSLVIVGAEQATYHSSHQPEDTTLLDGANTRTHVNVVVAAVDPGVTDIVTVTGLDGGTRSYSSVQYYGKGLIFKSQRQTDVWNLKTADIVGDIIPGRDSSRSEQIGAYARFYTGAAPILLAHRASMGYRNLRFRRYCKKNRNSLLRIADFVAPEGEEREGTRRFLVIGKVWGRRQSLGGLVALSQAIRFRAS

SEQ ID NO: 1624 - protein, 340 aa, Microglena sp.
GEARVVVAWPEGVPPAAHVCICTDGVSLSMQYSKTVQVRVSDLKKTSKRSRDEEGMSVSEQYDHKLKTTLPDMGIVVLGVDPGRSNIATVTYLADDKSKTWKLTRGAFYHKSGIKKQKKKQEKRFSDMIPRWESLRENGAALSTSRKDDISAYLKNYATFSDEWWRMALRRRESRDNFQRYIGKRKAMDSFWAGIKRNMELDHPDLRVRIAYGSAITKLKATGPGEVAVPTGSMFASCKRLFKEEVHVTDEFKTTLMSWETGAKKECVYKIPSVQITTEGQIRLGYELLGHTPLKETPKVSYRDQLAVRVYCTRKQIQEKTQEGWLSPLSCRQQLDQAVP

SEQ ID NO: 1625 - protein, 283 aa, Microglena sp.
EGWAIEMDQKNVSKDGDKLFIFKDILGNMRYFGSKQLHKLMPEVNPTHDPKVHKSRFSEYFLVLSVAARDRRAERKPVHPDKVATASIDPGVRKTMVTYSPENEESFMLGQGQASDLVKLLLVHDKLQSRLDTEKTLRSKERMKIKMQMIRIRKRIFYLKKEFRDQTTNFLAARYDVLLVPQLETAKMTISAERELTTKVARQMLTLSHSVLFNRLKEKCEEYGTVFLHVLEHYTSQTCPMCGFLNKCGETYTCKNCQFTCDRDIVGAAGIFLKAVRTENPCS

SEQ ID NO: 1626 - protein, 392 aa, Microglena sp.
SFSAWGDSPLESVSGDGRYENHTMLWRKYFNVQGLETKRSRFDNRILSDGKGVSVQMKQKGKEEVVEEGENAGYPKDANIVECKDAVGALRVGVDPGMTDIVTVASSAGRIESFSSARFSEVAGYNTSKRRTNKWNDETQDLVKSIPSPNTSNMVDLQDHVRAYLKALPILLQHRANKGYRSMRFFRYVGKQKTIEKVCDVIAPRAQTTVVGFGNWSNQGYGISRPCSGPIKEIRRCLSRHKNVLFNNVDERNTSCKCHGCFQRLVNMKADSRSLARSLQRVPIDESITVEKQKMVVKNVKVHKVLHCRDSVKSASSNVRCGATWNRDVNAAKNLLLLLTTWMDGRERPEAFCVPSPPPKTTVSIEASVSAKRPTTGFVSSLPCYPLGQLKC

SEQ ID NO: 1627 - protein, 317 aa, Microglena sp.
RVSVQMKQKGKEEFVEEGENAGYPKDANIVECKDAVGALRVGVDPGMTDIVTVASSAGRIESFSSARFSEVAGYNTSKRRTYKWNDETQDLVKSIPSPNTSNMVDLQDHVRAYLKALPILLQHRANKGYRSMRFFRYVGKQKTIEKVCDVIAPRAQTTVVGFGNWSNQGYGISRSCSGPIKEIRRCLSRRKNVLFKNVDERNTSCKCHGCFQRLVNMKADSIVWRGVCKESPIDGSITVEKQKMVVKNVKVHKVLHCRDSVKSASSNVRCGATWNRDVNAAKNLLLLLTTWMDGRERPEAFCVPSPPPKPQFPSRRV

SEQ ID NO: 1628 - protein, 282 aa, Microglena sp.
RIWQTIKNKTWKLTRGAFYHKSGIKKQTRQKELRFADMIPMWESLRENGAALSTSRTDKISAYLSNYAKFSDEWWRLALRRRESRDNLQRYIGKRKVKDSFWAGIKRCMMKELPGMKVCVAYGSAITKLKPTGPGEVAVPTGAMFASCKRIFKEDVSVTDEFKTTLMSWETGKEKERVYKIPSVCSADVNLRLGGERFGHTKSKTMPKVADCDHLGVRLYNKRKGAQEKHRRVASPLPLSILKNRSSGTQRYEDCDSLQKHAFTRTGIALLLSQSQGCTAWN

SEQ ID NO: 1629 - protein, 460 aa, Microglena sp.
PCLCTTRYCRRPSKKNEKTKNEKHRTFSLLPYKSGFTLSHIPISKMAFFYMVNECHFDSCKADVASKNHQGIWERFANLKKVETVSRKFGYRIVTDGFAVSILMNKPTCLTCSMPAGAFSTRAHEYVTTDEGGIVSFLDNVVVSAVDPGVTDIVTVTGLNGGTRSYSSAKYYRKGLIFKSQRQTDVWNLETADIVVGIIPDRDSSSSEQIGAYARFYMGAAPILLAHRASRGYRNLRFRRYCKKQKLIVEIADFVAPRKKSAKVLVGFGDWKGLGATPISRRTCGPLQAIRFELRSRENVIMEDIDEFRTSQRCSCCENHLCNMVALTHRKKQDGTGWECTEGRKRIHKILHCKSSQSGAPRQQSGGMLHCGKTWDRDVNASRNILMLTLHQVFGRERPLAFRRDAPRSSSTTPPPPPDTDMGTQTVERFTKEATRNIFENLFNLLHPPTLPKSNDLQSG

SEQ ID NO: 1630 - protein, 227 aa, Microglena sp.
RSDKKWLSNIQDCLDDLKDNSPKRTSLESFDAYVTVMVNHWDSRWGEMSKSRWGAQRLRLYGGKKRVLARFFNEVQADVGERKTIVIAYGSSKFAPGGKGELSVPTTSAFNAFRDRFKGRVAVIDEFRTTKIWHKDSTTVLQSVQSEKKGRTVRGLLWCSSTMENSKLFVNRDLNAAINIHNCFTMYPTRPGILARPKKYCKLEVVVGRTIDYKLTGSLQNAVSSEV

SEQ ID NO: 1631 - protein, 378 aa, Microglena sp.
PCLCTTRYCRRPSKKNEKTKNEKHRTFSLLPYKSGFTLSHIPISKMAFFYMVNECHFDSCKADVASKNHQGIWERFANLKKVETVSRKFGYRIVTDGFAVSILMNKPTCLTCSMPADAFSTRAHEYVTTDEGGIVSFLDNVVVAAVDPGVTDIVTVTGLNGGTRSYSSAQYYRKGLIFKSQRQTDVWNLETADIVGGIIPDRDSSSSEQIGAYARFYMGAAPILLAHRASRGYRNLRFRRYCKKQKLIVEIADFVAPRKKSAKVLVGFGDWKGLGATPISRRTCGPLQAIRFELRSRENVIMEDIDEFRTSQRCSCCENHLCNMVALTHRKKQDGTGWECTEGRKRIHKILHCKSSQSGAPRQQSGGMLHCGRLGTAM

SEQ ID NO: 1632 - protein, 251 aa, Microglena sp.
SSSLSVKLTFGTSRRLISSVVSFRIETLRVLNRLVRTPDSTWVPPQSFLPIVLPGGTETSALRRYCKRNRKLIVEIADFVAPRKKSAKVLVGFGDWKGLGATPISRRTCGPLQAIRFELRSRENVIMEDIDEFRTSQRCSCCENHLANMVALTHRKKQDGTGWECTEGRKRIHKILHCKSSQSGAPRQQSGGMLHCGKTWDRDVNASRNILMLTLHQVFGRERPLAFRRDAPRSSSTTPPPPLILIWGHRR

SEQ ID NO: 1633 - protein, 550 aa, Microglena sp.
TMACNSVWANVDSVVIKYLRLKHPSLKKHFNKIVKAVVQYPDSDIDKIIPAGLVHANLIKDVVRRLRDLLPLPRGKQFNTRAHLTMRLFHHVLTELGADLKEKTTKKRPRLFSILPRKSGFTISYVPISSMTLMKLLSMGDSPLESVRGDGRHENHSMLWRKYFNVQGLETKGSRFDNRILSDGKGVSVQMKHQVGKDIAGGGDNAGYPKDASIEDCQDASLRQGALRVGIDPGMTDIVTIASSDGRVESFSSARFSEAAGYNISNRRTNKWNADTQDLVKSIPSPTTSSMQDHVRGYLSALPTLLQHRANRGYRSMRFFRYVGKQKTIEKVCDLIAPKAQKKTIEEKGCDVIAPKAKKTVVGFGNWSNQGYGISRSCSGPVKEIRKCLSRRQNVLFKNVDERNTSCTCHGCFQKLVNMKADSVVWRRVQNEPSALIDGAPTTTTTIEKQKTVVKNVKVHKVLHCRNSVKSASSNVRCGATWNRDVNAAKNLLLLLTTWMDGKERPAAFCVPSSSPPLKNTVSGEANVGAQQTDPPGSVSSLQLLSSGPA

SEQ ID NO: 1634 - protein, 265 aa, Microglena sp.
HDSYVESLRENGAALSTSRTDKISAYLSNYAKFSDEWWRLALRRRESRDNLQRYIGKRKVKDSFWAGIKRCMMKELPGMKVCVAYGSAITKLKPTGPGEVAVPTGAMFASCKRIFKEDVSVTDEFKTTLMSWETGKEKERVYKIPSVCSADVKLRLGGERFGHTKSKTMPKVADCDHLGVRLYNKRKGAQEKHRRGGFATSLVDSQKSIDRYPEVRGLRFSPETCIYSDRDRSSALTIARLHCMELMGLGRPLPFAHSSSVVVDE

SEQ ID NO: 1635 - protein, 391 aa, Microglena sp.
QPSGNTFASRAHMTLPLYHKILSETIEEKRKTKNEKHRTFSLLPYKSGFTLSHIPISKMAFFYMVNECHFDSCKADVASKNHQGIWERFANLKKVETVSRKFGYRIVTDGFAVSILMNKPTCLTCSMPADAFSTRAHEYVTTDEGGIVSFLNNVVVAAVDPGVTDIVTVTGLNGGTRSYSSAQYYRKGLIFKSQRQTDVWNLETADIVGGIIPDRDSSSSEQIGAYARFYMGAAPILLAHRASRGYRNLRFRRYCKKQKLIVEIADFVAPREKSAKVLVGFGDWKGLGATQSLGGLVALSKLFVSSFVAEKTSSWRISMSSEHLNDAAVVRTTFATWWHSLIVRSKTVQVGNVQKDASGFIRFSTAKAVKEERHANRAVVCFTAGRLGTAM

SEQ ID NO: 1636 - protein, 237 aa, Microglena sp.
ASQNSMTINSKRHCPIWVSSFWVWILVGATSLQSRIWQTTKARHGSLHAELFYHKSGIKKQKKQQEKRFSDMIPRWESLRENGAALSTSRTDDISAYLKNYDTFSDEWWRMALLRRESRDNFQRYIGKRKAMDSFWAGIKRNMKLDHPDLRVRVAYGSAITTLKATGPGEVAVPTGSMFASCKRLFKEEVHVTDEFKTTLMSWETGAKKECVYKIPSVQITTEGQIRLGYELLGHTH

SEQ ID NO: 1637 - protein, 468 aa, Microglena sp.
PCLCTTRYCRRPSKKNEKLKTKNIAHSRCCLTNLDSLCRTFRFRKWPFSIWSTSATLIHARQTLLPKTIKEYGSASQTSRKWRQFSRKFGYRIVTDGFAVSILMNKPTCLTCSMPADAFSTRAHEYVTTDEGGIVSFLDNVVVAAVDPGVTDIVTVTGLNGGTRSYSSAQYYRKGLIFKSQRQTDVWNLETADIVGGIIPDRDSSSSEQIGAYARFYMGAAPILLAHRASRGYRNLRFRRYCKKQKLIVEIADFVAPRKKSAKVLVGFGDWKGLGATPISRRTCGPLQAIRFELRSRENVIMEDIDEFRTSQRCSCCENHLCNMVALTHRKKQDGTGWECTEGRKRIHKILHCKSSQSGAPRQKSGGMLHCGKTWDRDVNASRNILMLTLHQVFGRERPLAFRRDAPRSSSTTPPPPPDTDMGHRRLNGLPKRLLGISSRTSSTFCTPQRCPKATICSLDDYKVSHFI

SEQ ID NO: 1638 - protein, 275 aa, Microglena sp.
TLTVSKDGDKLFIFKEILGNMRYFGSKQLHKLMPEENPTHDPKVQKSRFGEYFLVLSVAARDRRAERKPVNPDKVATASIDPGVRKTMVTYSPENEESFMLGQGQASDLVKLLLVHDKLQSRLDTEKTLRSKERMKIKKLMIRIRKTIFYLKKEFRDQTTNFLAARYDVLLVPQLETAKMTISAERELTTKVARQMLTLSHSVLFNRLKEKCEEYGTVFLHVLEHYTSQTCPMCGFLNKCGETYTCKNCQFTCDRDIVGAAGIFLKAVRTENPCS

SEQ ID NO: 1639 - protein, 213 aa, Microglena sp.
ISNFSSNVKLVRTWIHARCAVHEASVDCIGENESVHDHMSEGHVCDLVKLLLVHDKLQSRLDTEKTLRSKERMKIKKLMIRIRKTIFYLKKEFRDQTTNFLAARYDVLLVPQLETAKMTISAERELTTKVARQMLTLSHSVLFNRLKEKCEEYGTVFLHVLEHYTSQTCPMCGFLNKCGETYTCKNCQFTCDRDIVGAAGIFLKAVRTENPCS

SEQ ID NO: 1640 - protein, 303 aa, Microglena sp.
EQHRYSHVSGRRQKQDMEAYTRSFLPQVWYQETEKNSKKNVFSDMIPRWESLRENGAALSTSRTDDISAYLKNYDTFSDEWWRMALLRRESRDNFQRYIGKRKAMDSFWAGIKRNMKLDHPDLRVRVAYGSAITTLKATGPGEVAVPTGSMFASCKRLFKEEVHVTDEFKTTLMSWETGAKKECVYKIPSVQITTEGQIRLGYELLGHTPLKETPNVSYRDQLAVRVYCTRKQIQEKHRRGGLAPSLVDNKSIKRYPEVRGLRFSPETSTYSDRDRSSALTIARLHCMELLGQGRPLPFCRDA

SEQ ID NO: 1641 - protein, 702 aa, Microglena sp.
PRMEHVCDVCIKSSVMYKLCKMATKPPTVAKLKELLKLAEVAYSSKDKKDDIVRLCEDNGLIARPPPEYKTVEKMCVVKCALKKAMSLDDEEFGKFREHVDQLVNVVSRMLRRSSLVLTFHITSLLEKGLDIPDLYNMKDTYWKDWLRIGVDGIFPDEESKISYEAVKDSIGDVIGNDDADYIKSYPIYFDQVLNYAGHTLSTVVSNNAWVPLIPRLARLTSTTLNKLNAPKTLDTSKIIRGYDVMQAIQQEVQNMEGWPESVQEYVNEVREMLSVPDGSRVYDNYGKDMDFPTMVRFNYWIQTRLEDMDARRIRLMPIFNVQRVHVRLDLKTLVNLFRHMFPNDQNIVELSKWEHVKNPESFMLPQRPAQKKKKSCGPGEWDAYKSVLKQYDDDVKDIKATDEYRHAKGLYDTLVNARKTVAGSFFRKPPVKNGWVFDCSICTDGVSLSMQYSKTVQVLVSDLKKTCKKPRKEEGIKIAEKYDGSLKTILPDMGIVVLGVDPGRSNIATVTYLADDKNKTWKLTRGAFYHKSGIKKQTRQKELRFADMIPMWESLRENGAALSTSRTDKISAYLSNYAKFSDEWWRLALRRRESRDNLQRYIGKRKVKDSFWAGIKRCMMKELPGMKVCVAYGSAITKLKPTGPGEVAVPTGAMFASCKRIFKEDVSVTDEFKTTLMSWETGKEKERVLQDPKCLFSRRES

SEQ ID NO: 1642 - protein, 506 aa, Microglena sp.
AKLGSPRRTLGWTQITRNASLHAKWHSVSGGSTFTIRKHFCVSGSHDLPLYHKILSETIEEKRKTKNEKHRTFSLLPYKSGFTLSHIPISKMAFFYMVNECHFDSCKADVASKNHQGIWERFANLKKVETVSRKFGYRIVTDGFAVSILMNKPTCLTCSMPADAFSTRAHEYVTTDEGGIVSFLDNVVVAAVDPGVTDIVTVTGLNGGTRSYSSAKYYRKGLIFKSQRQTDVWNLETADIVGGIIPDRDSSSSEQIGAYARFYMGAAPILLAHRASRGYRNLRFRRYCKKQKLIVEIADFVAPRKKSAKVLVGFGDWKGLGATPISRRTCGPLQAIRFELRSRENVIMEDIDEFRTSQRCSCCENHLCNMVALTHRKKQDGTGWECTEGRKRIHKILHCKSSQSGAPRQQSGGMLHCGKTWDRDVNASRNILMLTLHQVFGRERPLAFRRDAPRSSSTTPPPPPDTDMGTQTVERFTKEATRNIFENLFNLLHPPTLPKSNDLQSG

SEQ ID NO: 1643 - protein, 528 aa, Microglena sp.
LWQRHGLSDMVRFNYWIQTRLEDMDARRIRLMPIFNVQRVHVRLDLKTLVNLFRHMFPNDQNIVELSKWEHVKNPESFMLPQRPAQKKKKSCGPGEWEAYKSVLKQYDDDVKDIKATDEYRHAKGLYDTLVNARKTVAGSFFRKPPVKNGWVFDCSICTDGVSLSMQYSKTVQVLVSDLKKTCKKPRKEEGIKIAEKYDGSLKTILPDMGIVVLGVDPGRSNIATVTYLADDKNKTWKLTRGAFYHKSGIKKQTRQKELRFADMIPMWESLRENGAALSTSRTDKISAYLSNYAKFSDEWWRLALRRRESRDNLQRYIGKRKVKDSFWAGIKRCMMKELPDMKVCVAYGSAITKLKPTGPGEVAVPTGAMFASCKRIFKEDVSVTDEFKTTLMSWETGKEKERVYKIPSVCSADVKLRLGGERFGHTKSKTMPKVADCDHLGVRLYNKRKGAQEKHRRGVFATSLVDSQKSIERYPEVRGLRFSPETCIYSDRDRSSALTIARLHCMELMGLGRPLPFAHSSSVVVDE

SEQ ID NO: 1644 - protein, 575 aa, Microglena sp.
TNIWKHEENLDVIFKMSPHTTKLPTKLPTSRLRSAKSAVALAKKRVGRKEPEGSPLRVRLTKLQERLEKLSEAWLSSKNLRVDADNAKRFFAREVAFCLRGVLPLPSGNTFASRAHMTLPLYHKILSETIEEKRKTKNEKHRTFSLLPYKSGFTLSHIPISKMAFFYMVNECHFDSCKADVASKNHQGIWERFANLKKVETVSRKFGYRIVTDGFAVSILMNKPTCLTCSMPADAFSTRAHDYVTTDEGGIVSFLDNVVVAAVDPGVTDIVTVTGLNGGTRSYSSAKYYRKGLIFKSQCQTDVWNLETADIVGGIIPDRDSSSSEQIGAYARFYMGAAPILLAHRASRGYRNLRFRRYCKKQKLIVEIADFVAPRKKSAKVLVGFGDWKGLGATPISRRTCGPLQAIRFELRSRENVIMEDIDEFRTSQRCSCCENHLCNMVALTHRKKQDGTGWECTEGRKRIHKILHYKSSQSGAPRQQSGGMLHCGKTWDRDVNASRNILMLTLHQVFGRERPLAFRRDAPRSSSTTPPPDTDMGTQTVERFTKEATRNIFENLFNLLHPPTLHKSNDLQSG

SEQ ID NO: 1645 - protein, 441 aa, Microglena sp.
SLQLRKKSCGPGEWEAYKLAQQKYDADVNDIKDTDEYRHAKGRYDTLVNARKTVAGSFFKKPPVKTGWVFDCSICTDGVSLSMQYSKTVQVRVSDLKKTSKRSRDDEGMSVSEQYDHKLKTTLPDMGIVVLGVDPGRSNIATVTYLADDKSKTWKLTRGAFYHKSGIKKQKKQQEKRFSDMIPRWEFLRENGAALSTSRTDDISAYLKNYATFSDEWWRMALLRRESRDNFQRYIGKRKAMDSFWAGIKRNMKLDHPDLRVRVAYGSAITTMKATGPGEVAVPTGSMFASCKRLFKEEVHVTDEFKTTLMSWETGAKKECVYKNPSVQITTEGQIRLGYELLGHTPLKETPNVSYRDQLAVRMYCTRKQIQEKHRRGGLAPSLVDNNSIKRYPEVRGLRFSPETSTYSDRDRSSALTIARLHCMELLGQGRPLPFCRDACC

SEQ ID NO: 1646 - protein, 243 aa, Microglena sp.
CLRKTRPTIRRSKNPASANISSYCLLLLGTEGQSGSLSIQTRLQLPPSTQASERQWSRTHLRMRKSFMLGQGQASDLVKLLLVHDKLQSRLDTEKTLRSKERMKIKKLMIRIRKTIFYLKKEFRDQTTNFLAARYDVLLVPQLETAKMTISAERELTTKVARQMLTLSHSVLFNRLKEKCEEYGTVFLHVLEHYTSQTCPMCGFLNKCGETYTCKNCQFTCDRDIVGAAGIFLKAVRTENTCS

SEQ ID NO: 1647 - protein, 257 aa, Microglena sp.
RVSVQMKQKGKEEVVEEGENAGYPKDANIVECKDAVGALRVGVDPGMTDIVTVASSAGRIESFSSARFSEVAGYNTSKRRTYKWNDETQDLVKSIPSPNTSNMSDLQDHVRAYLKALPILLQHRANKGYRSMRFFRYVGKQKTIEKVCDVIAPRAQTTVVGFGNWSNQGYGISRSCSGPIKEIRRCLSRRKNVLFKNVDERNTSCKCHGCFQRLVNMKADSVVWRGVCKESPIDGSITVEKQKMVVKKRQGPQSTAL

SEQ ID NO: 1648 - protein, 254 aa, Microglena sp.
SPFHRPNTSNMSDLQDHVRAYLKALPILLQHRANKGYRSMRFFRYVGKQKTIEKVCDVIAPRAQTTVVGFGNWSNQGYGISRSCSGPIKEIRRCLSRRKNVLFKNVDERNTSCTCHGCFQKLVNMKADSVVWRRVQNEPPSLINGAPTTTIEKQKTVVKNVKVHKVLHCRNSVKSASSNVRCGATWNRDVNAAKNLLLFLTTWMDGKERPATFCVPSSSPTPKTTVSGEANVGAQPTDPPGSVSSLQLLSSGPA

SEQ ID NO: 1649 - protein, 325 aa, Microglena sp.
NDIARYGIVVLGVDPGRSNIATVTYLADDKNKTWKLTRGAFYHKSGIKKQTRQKELRFADMIPMWESLRENGAALSTSRTDKISAYLSNYAKFSDEWWRLALRRRESRDNLQRYIGKRKVKDSFWAGIKRCMMKELPDMKVCVAYGSAITKLKPTGPGEVAVPTGAMFASCKRIFKEDVSVTDEFKTTLMSWETGKEKERVYKIPSVCSADVNLRLGGERFGHTKSKTMPKVADCDHLGVRLYNKRKGAQEKHRRGGFATSLVDSQKSIERYPEVRGLRFSPETCIYSDRDRSSALTIARLHCMELMGLGRPLPFSHSSSVVVDE

SEQ ID NO: 1650 - protein, 299 aa, Microglena sp.
GMTCCSRSQLSLKKYRFEFTLTVTCTFRRLRSLRKVCNIYNVSKSSLHRWVNADQVGKSKRLKRKRKELSMLLRSTISNNIAEIIPDRDSSSSEQIGAYARFYMGAAPILLAHRASRGYRNLRFRRYCKKQKLIVEIADFVAPRKKSAKVLVGFGDWKGLGATPISRRTCGPLQAIRFELRSRENVIMEDIDEFRTSQRCSCCENHLCNMVALTHRKKQDGTGWECTEGRKRIHKILHCKSSQSGAPRQQSGGMLHCGKTWDRDVNVPPTVMVSLCESTRHVPPTVMVSLCESTRHVPP

SEQ ID NO: 1651 - protein, 491 aa, Microglena sp.
RETLLCTRSGILSQGGSTFTIRKHFCVSGSHDPASVPQDIVGDHRRKTKNEKRKTSHILVVALQSGFTLSHIPISKMAFFYMVNECHFDSCKADVASKNHQGIWERFANLKKVETVSRKFGYRIVTDGFAVSILMNKPTCLACSMPAGAFSTRAHEYVTTDEGGIVSFLDNVVVAAVDPDVTDIVTVTGLNGGTRSYSSAQYYRKGLIFKSQRQTDVWNLETADIVGGIIPDRDSSSSEQIGAYARFYMGAAPILLAHRASRGYRNLRFRRYCKKQKLIVEIADFVAPRKKSAKVLVGFGDWKGLGATPISRRTCGPLQAIRFELRSRENVIMEDIDEFRTSQRCSCCENHLCNMVALTHRKKQDGTGWECTEGRKRIHKILHCKSSQSGAPRQQSGGMLHCGKTWDRDVNASRNILMLTLHQVFGRERPLAFRRDAPRSSSTTPPPPPDTDMGTQTVERFTKEATRNIFENLFNLLHPPTLPKSNDLQSG

SEQ ID NO: 1652 - protein, 546 aa, Microglena sp.
TSIGKSAVALAKKRVGRKEPEGSPLRVRLTKLQERLEKLSEAWLSSKNLRVDADNAKRFFAREVAFCLRGVLPLPSGNTFASRAHMTLPLYHKILSETIEEKRKTKNEKHRTFSLLPYKSGFTLSHIPISKMAFFYMVNECHFDSCKADVASKNHQGIWERFANLKKVETVSRKFGYRIVTDGFAVSILMNKPTCLTCSMPADAFSTRAHEYVTTDEGGIVSFLDNVVVAAVDPGVTDIVTVTGLNGGTRSYSSAKYYRKGLIFKSQRQTDVWNLETADIVGGIIPDRDSSSSEQIGAYARFYMGAAPILLAHRASRGYRNLRFRRYCKKQKLIVEIADFVAPRKKSAKVLVGFGNWKGLGATPISRRTCGPLQAIRFELRSRENVIMEDIDEFRTSQRCSCCENHLCNMVALTHRKKQDGTGWECTEGRKRIHKILHCKSSQSGAPRQQSGGMLHCGKTWDRDVNASRNILMLTLHQVFGRERPLAFRRDAPRSSSTTPPPPPDTDMGTQTVERFTKEATRNIFENLFNLLHPPTLPKSNDLQSG

SEQ ID NO: 1653 - protein, 299 aa, Microglena sp.
GKMYTVSRKFGYRIVTDGFAVSILMNKPTCLTCSMPADAFSTRAHEYVTTDEGGIVSFLDNVVVAAVDPGVTDIVTVTGLNGGTRSYSSAKYYRKGLIFKSQRQTDVWNLETADIVGGIIPDRDSSSSEQIGAYARFYMGAAPILLAHRASRGYRNLRFRRYCKKQKLIVEIADFVARERRALRYSSGLVIGKVWGRRQSLGGLVALSKLFVSSFVAEKTSSWRTSMSSEHLNDAAAVRTTFATWWHSLIVRSKTVQVGNVQKDASGFIRFSTAKAVKAERHANRAVVCFTAGRLGTAM

SEQ ID NO: 1654 - protein, 421 aa, Microglena sp.
RDRIPPIPPLRYPLLGSKGRPHSDTFSPTGANKDVAEDSALDHRQDEINRQWLKSVSNSAKMIRYNVFINRYLEATEDEGYAKLVNIAPIPTVKHSFITIDTDGLLGVLKDVGLVESLEKTLTNKEHWESVFDVENIRSTGKGVFTCTIDTDSVMACTHFLRAEKKKISIKDDGTAIKKQTKTLREFSESDPNVVVVANDPGRCNIAFLTWKKNKVEEKDNGGRKRKRHCEFGSKRLTRERYYVESGVFKSRGPTKKWLSNIQDCLDDLKDNSPKRTSLESFDAYVTVMVNHWDSRWGEMSKSRWGAQRLRLYGGKKRVLARFFNEVQADVGERKTIVIAYGSSKFAPGGKGELSVPTTSAFNAFRDRFKGRVAVIDEFRTTKIWHKDSTTVLQSVQSEKKGERFEACYGAVPPWRTASCL

SEQ ID NO: 1655 - protein, 250 aa, Microglena sp.
VHRGRIISPRTCQITLSFSDEWWRLALRRRESRDNLQRYIGKRKVKDSFWAGIKRCMMKELPDMKVCVAYGSAITKLKPTGPGEVAVPTGAMFASCKRIFKEDVSVTDEFKTTLMSWETGKEKERVYKIPSVCLADVKLRLGGERFGHTKSKTMPKVADCDHLGVRLYNKRKGAQEKHRRGGFATSLVDSQKSIERYPEVRGLRFSPETCIYSDRDRSSALTIARLHCMELMGLGRPLPFAHSSSVVVDE

SEQ ID NO: 1656 - protein, 401 aa, Microglena sp.
FHARQTLLPKTIKEYGSASQNLKKVETVSRKFGYRIVTDGFAVSILMNKPTCLTCSMPAGAFSTRAHEYVTTDEGGIVSFLDNVVVAAVDPGVTDIVTVTGLNGGTRSYSSAKYYRKGLIFKSQRQTDVWNLETADIVGGIIPDRDSSSSEQIGAYARFYMGAAPILLAHRASRGYRNLRFRRYCKKQKLIVEIADFVAPRKKSAKVLVGFGDWKGLGATPISRRTCGPLQAIRFELRSRENVIMEDIDEFRTSQRCSCCENHLCNMVALTHRKKQDGTCWECTEGRKRIHKILHCKSSHSGAPRQQSGGMLHCGKTWDRDVNASRNILMLTLHQVFGRERPLAFRRDAPRSSSTTPTPDTDMGTQTVERFTKEATRNIFENLFNLLHPPTLPKSNDLQSG

SEQ ID NO: 1657 - protein, 478 aa, Microglena sp.
TCSGTCSPMTRTSLSFSKWEHVKNPDSFMLSQRPAQKKKKSCGPGEWEAYKSVMKQYDDDVKDIKATDEYRHAKGLYDTLVNARKTVAGSFFRKPPVKNGWVFDCSICTDGVSLSMQYSKTVQVLVSDMKKTCKNPRKEEGIKIAEKYDGSLKTILPDMGIVVLGVDPGRSNIATVTYLADDKNKTWKLTRGAFYHKSGIKKQTRQKELRFADMIPMWESLREIGAALSTSRTDKISAYLSNYAKFSEEWWRLALRRRESRDNLQRYIGKRKVKDFFWAGIKRCMMKELPDMKVCVAYGSAITKLKPTGPGEVAVPTGAMFASCKRIFKEDVSVTDEFKTTLMSWETGKEKERVYKIPSFCSADVKLRLGGERFGHTKSKTMPKVADCDHLGVRLYNKRKGAQEKHRRGGFATSLVYSQKSIERYPEVRGLRFSPETCIYSDRDRSSALTIARLHCMELMGLGRPLPFAHSSSVVVDE

SEQ ID NO: 1658 - protein, 232 aa, Microglena sp.
KITIRFPTSGWRMALLRRESRDNFQRYIGKRKAMDSFWAGIKRNMKLDHPDLRVRVAYGSAITTLKATGPGEVAVPTGSMFASCKRLFKEEVHVTDEFKTTLMSWETGAKKECVYKIPSVQITTEGQIRLGYELLGHTPLKETPNVSYRDQLAVRVYCTRKQIQEKHRRGGLAPSLVDNKSIKRYPEVRGLRFSPETSTYSDRDRSSALTIARLHCMELLGQGRPLPFCRDA

SEQ ID NO: 1659 - protein, 690 aa, Microglena sp.
WRMGSASHHRWYMRLTNMMTLQNLSIMKGEEDGECAPGRAICVVKMKLSTFIPHDWLRNKIDTLVLDMNKLLGEGYIFANFHIARLFENGIAVPPVNRNFFYRCIIAVSTNKCNGSTLGEDFESSRLLFDLLREPGQSKVDIRGRVKNQIIADLSILMATMASNHLWTNLERRITTYLKWKYPQIAKRLRSDIVAALIKCPTKNLDDIFKMSPHTTKLPTKLPTSRLRSAKSAVALAKKRVGRKEPEGSPLRVRLTKLQDRLEKLSEAWLSSKNLRVDADNAKRFFAREVAFCLRGVLPLPSGNTFASRAHMTLPLYHKILSETIEEKRKTKNEKHRTFSLLPYKSGFTLSHIPISKMAFFYMVNECHFDSCKADVASKNHQGIWERFANLKKVETVSRKFGYRIVTDGFAVSILMNKPTCLTCSMPADAFSTRAHEYVTTDEGGIVSFLDNVVVAAVDPGVTDIVTVTGLNGGTRSYSSAQYYRKGLIFKSQRQTDVWNLETADIVGGIIPDRDSSSSEQIGAYARFYMGAAPILLSHRASRGYRNLRFRRYCKKQKLIVEIADFVAPRKKSAKVLVGLVIGKVWGRRQSLGGLVALSKLFVSSFVAEKTSSWRTSMSSEHLNDAAAVRTTFATWWHSLIVRSKTVQVGNVQKDASGFIRFSTAKAVKAERHANRAVVCFTAGRLGTAM

SEQ ID NO: 1660 - protein, 215 aa, Microglena sp.
LLQKPQKKTIEEKVCDVIAPRHRRPLLLRQLVQPRVWYQSFLFWTRERDQEVPFTSSECLFKNVDERNTSCTCHGCFQKLVNMKADSVVCAEFKTSPPPSSNGLLQQQQQRFEKQKTVVKNVKVHKVLHCRNSVKSASSNVRCGATWNRDVNAAKNLLLLLTTWMDGKERPAAFCVPSSSPTPKTTVSGEANVGAQQTDPPGSVSSLQLLSSGPA

SEQ ID NO: 1661 - protein, 302 aa, Microglena sp.
EQHRYSHVSGRRQKQDMEAYTRSFLPQVWYQETEKQQEKRFSDMIPRWESLRENGAALSTSRTDDISAYLKNYDTFSDEWWRMALLRRESRDNFQRYIGKRKAMDSFWAGIKRNMKLDHPDLRVRVAYGSAITTLKATGPGEVAVPTGSMFASCKRLFKEEVHVTDEFKTTLMSWETGAKKECVYKIPSVQITTEGQIRLGYELLGHTPLKETPNVSYRDQLAVRVYCTRKQIQEKHRRGGLAPSLVDNNSIKRYPEVRGLRFSPETSTYSDRDRSSALTIARLHCMELLGQGRPLPFCRDA

SEQ ID NO: 1662 - protein, 802 aa, Microglena sp.
PRMEHVCDVCIKSSVMYKLCKMATKPPTVAKLKELLKLAEVAYSSKDKKDDIVRLCEDNGLIARPPPEYKTVEKMCVVKCALKKAMSLDDEEFGKFREHVDQLVNVVSRMLRRSSLVLTFHVTRLMEGDLPIPNMYDMKDTYWKDWLRIGVDGVFPDEESRISYEAVKDVIGKVLGSDDPDYINSYPIYFDQVLNYAGHTLSTVVSNNAWVPLVPRLTRLTKATLNALEAPKTIRVYDVMRVIQQEIQEMESWPESVQEYVREVRVRLKVPDGSRLYDDYGKDMDFPTMVRFNYWMQTRLEAIGARRIRLMPIFNVQRAHVRLDMKTLVNLFRHVFPKDPNIVELSKWKDVKDPDRFMLPLKPAFKKKKSCGPGGWEAYKLAQQKYDAGVNDIKDTDEYRHAKGRYDTLVNARKTVAGSFFKKPPVKTGWVFDCSICTDGVSLSMQYSKTVQVRVSDLKKTSKRSRDDEGMSSEQYDHKLKTTLPDMGIVVLGVDPGRSNIATVTYLADDKSKTWKLTRGAFYHKSGIKKQKKQQEKRFSDMIPRWESLRENGAALSTSRTDDISAYLKNYDTFSDEWWRMALLRRESRDNFQRYIGKRKAMDSFWAGIKRNMKLDHPDLRVRVAYGSAITTLKATGPGEVAVPTGSMFASCKRLFKEEVHVTDEFKTTLMSWETGAKKECVYKIPSVQITTEGQIRLGYELLGHTPLKETPKVSYRDQLAVRVYCTRKQIQEKHRRGGLAPSLVDNNSIKRYPEVRGLRFSPETSTYSDRDRSSALTIARLHCMELLGQGRPLPFCRDACC

SEQ ID NO: 1663 - protein, 258 aa, Microglena sp.
ASQNSMTINSKRHCPIWVSSFWVWILVGATSLQSRIWQTTKARHGSLHAELFTTSLVSRNRKNSKKKRFSDMIPRWESLRENGAALSTSRTDDISAYLKNYDTFSDEWWRMALLRRESRDNFQRYIGKRKAMDSFWAGIKRNMKLDHPDLRVRVAYGSAITTLKATGPGEVAVPTGSMFASCKRLFKEEVHVTDEFKTTLMSWETGAQEGMCLQNSKCPNNHGRADSSRLRVVGSHPIEGDSKCLLSRPVGGEGVLHT

SEQ ID NO: 1664 - protein, 463 aa, Microglena sp.
KPQHVGIRPRRVPFSAKTQSRSDYSGNMETREYKPELCCVPTQTLERIQYIPYTAHVNKSKKNHQGIWERFANLKKVETVSRKFGYRIVTDGFAVSILMNKPTCLTCSMPADAFYTRAHEYVTTDEGGIVSFLDNVVVAAVDPGVTDIVIVTGLNGGTRSYSSAQYYRKGLIFKSQRQTDVWNLETADIVGGIIPDRDSSSSEQIGAYARFYMGAAPILLSHRASRGYRNLRFRRYCKKQKLIVEIADFVAPRKKSAKVLVGFGDWKGLGATPISRRTCGPLQAIRFELRSRENVIMEDIDEFRTSQRCSCCENHHCNMVALTHRKKQDGTGWECTEGRKRIHKILHCKSSQSGAPRQQSGGMLHCGKTWDRDVNASRNILMLTLHQVFGESVLSRFAETRREVPRQPHPHPLILIWGHRRLNGLPKRLLGISSRTSSTFCTPQSCPKATICSLDDYKVSHFI

SEQ ID NO: 1665 - protein, 330 aa, Microglena sp.
ASQNSMTINSKRHCPIWVSSFWVWILVGATSLQSRIWQTTKARHGSLHAELFTTSLVSRNRKKQQEKRFSDMIPRWESLRENGAALSTSRTDDISAYLKNYDTFSDEWWRMALLRRESRDNFQRYIGKRKAMDSFWAGIKRNMKLDHPDLRVRVAYGSAITTLKATGPGEVAVPTGSMFASCKRLFKEEVHVTDEFKTTLMSWETGAKKECVYKIPSVQITTEGQIRLGYELLGHTPLKETPKVSYRDQLAVRVYCTRKQIQEKHRRGGLAPSLVDNNSIKRYPEVRGLRFSPETSTYSDRDRSSALTIARLHCMELLGQGRPLPFCRDA

SEQ ID NO: 1666 - protein, 463 aa, Microglena sp.
AFQVGTCKESRQLHVTQRPAQKKKKSCGPGEWEAYKSVMKQYDDDVKDIKATDEYRHAKGLYDTLVNARKTVAGSSFRKPPVKNGWVFDCSICTDGVSLSMQYSKTVQVLVSDLKKTCKKPRKEEGIKIAEKYDGSLKTLLPDMGIVVLGVDPGRSNIATVTYLADDKNKTWTLTRGAFYHKSGIKKQTRQKELRFADMIPMWESLRENGAALSTSRTDKISAYLSNYAKFSDEWWRLALRRREYCDNLQRYIGKRKVKDSFWAGIKRCMMKELPDMKVCVAYGSAITKLKPTGPGEVAVPTGAMFASCKRIFKEDVSVTDEFKTTLMSWETGKEKERVYKIPSVCSADVKLRLGGERFGHTKSKTMPKVADCDHLGVRLYNKRKGAQEKHRRGGFATSLVDSQKSIERYPVVRGLRFSPETCIYSDRDRSSALTIARLHCMELMGLGRPLPFAHSSSVVVDE

SEQ ID NO: 1667 - protein, 217 aa, Microglena sp.
GILHAWSGQASDLVKLLLVHDKLQSRLDTEKTLRSKREDEDKEADDSHSEDNFLPQERILGTRQQISWPLATMCCWYLNWRRRKMTISAERELTTKVARQMLTLSHSVLFNRLKEKCEEYGTVFLHVLEHYTSQTCPMCGFLNKCGETYTCKNCQFTCDRDIVGAAGIFLKAVSNRKSLFVKDSIPWGVDPYDTPMENSLSFLLHVPRAPGCLVRNS

SEQ ID NO: 1668 - protein, 302 aa, Microglena sp.
RIWQTIKNKTWKLTRGAFYHKSGIKKQTRQKELRFADMIPMWESLRENGAALSTSRTDKISAYLSNYAKFSDEWWRLALRRRESRDNLQRYIGKRKVKDSFWAGIKRCMTKELPDMKVCVAYGSAITKLKPTGPGEVAVPTGAMFASCKRIFKEDVSVTDEFKTTLMSWETGKEKERVYKIPSVCSADVKLRLGGERFGHTKSKTMPKVADCDHLGVRLYNKRKGAQEKHRRGGFATSLVDSQKSIERYPEVRGLRFSPETCIYSDRDRSSALTIARLHCMELMGLGRPLPFAHSSSVVVDE

SEQ ID NO: 1669 - protein, 280 aa, Microglena sp.
TPEKTVAGSFFKKPPVKTGWVFDCSICTDGVSLSMQYSKTVQVRVSDLKKTSKRSRDDEGMSVSEQYDHKLKTTLPDMGIVVLGVDPGRSNIATVTYLADDKSKTWKLTRGAFYHKSGIKKQKKQQEKRFSDMIPRWESLRENGAALSTSRTDDISAYLKNYDTFSDEWWRMALLRRESRDNFQRYIGKRKAMDSFWAGIKRNMKLDHPDLRVRVAYGSAITTLKATGPGEVAVPTGSMFASCKRLFKEEVHVTDEFKTTLMSWKPVPRRNVFTKFQVSK

SEQ ID NO: 1670 - protein, 237 aa, Microglena sp.
YLGLLEKLRYVFRRVVEDGTPSQRIRDNFQRYIGKRKAMDSFWAGIKRNMKLDHPDLRVRVAYGSAITTLKATGPGEVAVPTGSMFASCKRLFKEEVHVTDEFKTTLMSWETGAKKECVYKIPSVQITTEGQIRLGYELLGHTPLKETPNVSYRDQLAVRVYCTRKQIQEKHRRGGLAPSLVDNNSIKRYPEVRGLRFSPETSTYSDRDRSSALTIARLHCMELLGQGRPLPFCRDA

SEQ ID NO: 1671 - protein, 339 aa, Microglena sp.
EQHRYSHVSGRRQSKTWKLTRGAFYHKSGIKKQKKQQEKRFSDMIPRWESLRENGAALSTSRTDDISAYLKNYDTFSDEWWRMALLRRESRDNFQRYIGKRKAMDSFWAGIKRNMKLDHPDLRVRVAYGSAITTLKATGPGEVAVPTGSMFASCKRLFKEEVHVTDEFKTTLMSWETGAKKECVYKIPSVQITTEGQIRLGYELLGHTPLKETPNVSYRDQLAVRVYCTRKQIQEKHRRGGLAPSLVDNNRSSGTLRYEDCDSLQKPALTRTGPLLCSHNRKAALHGTVGSRETASILQGCVMVDGLQKNMMVFHCPVGRYTIRLHHKVYRTLQEAVSF

SEQ ID NO: 1672 - protein, 402 aa, Microglena sp.
FMQGRRCFQNHQGIWERFANLKKVETVSRKFGYRIVTDGFAVSILMNKPTCLTCSMPADAFSTRAHEYVTTDEGGIVSFLDNVVVSAVDPGVTDIVTVTGLNGGTRSYSSAKYYRKGLIFKSQRQTDVWNLETADIVGGIIPDRDSSSSEQIGAYARFYMGAAPNPSCPSCFQGYRNLRFRRYCKKQKLIVEIADFVAPRKKSAKVLVGFGDWKGLGATPISRRTCGPLQAIRFELRSRENVIMEDIDEFRTSQRCSCCENHLCNMVALTHRKKQDGTGWECTEGRKRIHKILHCKSSQSGAPRQQSGGMLHCGKTWDRDVNASRNILMLTLHQVFGRERPLAFRRDAPRSSSTTPPPPPDTDMGTQTVERFTKEATRNIFENLFNLLHPPTLPKSNDLQSG

SEQ ID NO: 1673 - protein, 330 aa, Microglena sp.
ASQNSMTINSKRHCPIWVSSFWVWILVGATSLQSRIWQTTKARHGSLHAELFTTSLVSRKKKKQQEKRFSDMIPRWESLRENGAALSTSRTDDISAYLKNYDTFSDEWWRMALLRRESRDNFQRYIGKRKAMDSFWAGIKRNMKLDHPDLRVRVAYGSAITTLKATGPGEVAVPTGSMFASCKRLFKEEVHVTDEFKTTLMSWETGAKKECVYKIPSVQITTEGQIRLGYELLGHTPLKETPNVSYRDQLAVRVYCTRKQIQEKHRRGGLAPSLVDNNSIKRYPEVRGLRFSPETSTYSDRDRSSALTIARLHCMELLGQGRPLPFCRDA

SEQ ID NO: 1674 - protein, 570 aa, Microglena sp.
LDMIRRLGRPCRYRSRAHMTLPLYHKILSETIEEKRKTKNEKHRTFSLLPYKSGFTLSHIPISKMAFFYMVNECHFDSCKADVASKNHQGIWERFANLKKVETVSRKFGYRIVTDGFAVSILMNKPTCLTCSMPADAFSTRAHEYVTTDEGGIVSFLDNVVVSAVDPGVTDIVTVTGLNGGTRSYSSAKYYRKGLIFKSQRQTDVWNLETADIVGGIIPDRDSSSSEQIGAYARFYMGAAPILLAHRASRGYRNLRFRRYCKKQKLIVEIADFVAPRKKSAKVLVGFGDWKGLGATPISRRTCGPLQAIRFELRSRENVIMEDIDEFRTSQRCSCCENHLCNMVALTHRKKQDGTGWECTEGRKRIHKILHCKSSQSGAPRQQSGGMLHCGKTWDRDVNASRNILMLTLHQVFGRERPLAFRRDAPRSSSTTPPPDTDMGTQTVERFYQRGYSEYLREPLQPSAPPNVAQKQRSAVWMIIKCPTLFENNCKLEDISPLSRLTSLTNLDISYTSVEDISPLSRLTSLTHLNISSTYVDNLSPLSGLTALTHLQSTSKRSIELAEHSFHWFI

SEQ ID NO: 1675 - protein, 250 aa, Microglena sp.
VHRRTDKISAYLSNYAKFSDEWWRLALRRRESRDNLQRYIGKRKVKDSFWAGIKRCMMKELPDMKVCVAYGSAITKLKPTGPGEVAVPTGAMFASCKRIFKEDVSVTDEFKTTLMSWETGKEKERVYKIPSVCSADVNLRLGGERFGHTKSKTMPKVADCDHLGVRLYNKRKGAQEKHRRGGFATSLVDSQKSIERYPEVRGLRFSPETCIYSDRDRSSALTIARLHCMELMGLGRPLPFSHSSSVVVDE

SEQ ID NO: 1676 - protein, 460 aa, Microglena sp.
LHQLLPIYFDQVLNYAGHTLSTVVSNNAWVPLVPRLTRLTKATLNALGAPKTIRVYDVMRVIQQEIQEMESWPESVQEYVREVRVRLKVPDGSRLYDDYGKDMDFPTMVRFNYWMQTRLEAIGARRIRLMPIFNVQRSHVRLDMKTLVNLFRHVFPKDPNIVELSKWKDVKDPDRFMLPLKPAVKKKKSCGPGEWEAYKLAQQKYDADVNDIKDTDEYRHAKGRYDTLVNARKTVAGSFFKKPPVKTGWVFDCSICTDGVSLSMQYSKTVQVRVSDLKKTSKRSRDDEGMSVSEQYDHKLKTTLPDMGIVVLGVDPGRSNIATVTYLADDKSKTWKLTRGAFYHKSGIKKQKKQQEKRFSDMIPRWESLRENGAALSTSRTDDISAYLKNYDTFSDEWWRMALLRRESRDNFQRYIGKRKAMDSFWAGIKRNMKLDHPDLRVRVAYGSAITTLKATDQER

SEQ ID NO: 1677 - protein, 285 aa, Microglena sp.
TDVWNLETADIVGGIIPDRDSSSSEQIGAYARFYMGAAPILLAHRASRGYRNLRFRRYCKKQKLIVEIADFVARERKSAKVLVGFGDWKGLGATPISRRTCGPLQAIRFELRSRENVIMEDIDEFRTSQRCSCCENHLCNMVALTHRKKQDGTGWECTEGRKRIHKILHCKSSQSGAPRQKSGGMLHCGKTWDRDVNASRNILMLTLHQVFGRERPLAFRRDAPRSSSTTPPPPLILIWGHRRLNGLPKRLLGISSRTSFNLLHPQRCPKATICSLDDYKVSHFI

SEQ ID NO: 1678 - protein, 513 aa, Microglena sp.
LLDTDTVGDMDARRIRLMPIFNVQRVHVRLDLKTLVNLFRHMFPNDQNIVELSKWEHVKNPDSFMLPQRPAQKKKKSCGPGEWEAYKSVLKQYDDDVKDIKATDEYRHAKGLYDTLVNARKNSRRFLLQKPPVKNGWVFDCSICTDGVSLSMQYSKTVHVLVSDLKKTCKNPRKEGIKIAEKYDGSLKTILPDMGIVVLGVDRGRSNIATVTYLADDKNKTWTLTRGAFYHKSGIKKQTRQKELRFADMIPMWESLRENGAALSTSRTDKISAYLSNYAKFSEEWWRLALRRRESRDNLQRYIGKRKVKDSLWAGIKRCMMKELPDMKVCVAYGSAITKLKPTGPGEVAVPTGAMFASCKRIFKEDVSVTDEFKTTFMSRETGKEKERVYKIPSVCSADVKLRLGGERFGHTKSKTMPKFADCDHLGVRLYNKRKGTQEKHRRGGFATSLVDSQKSIEQYPEVRGLRFSPETCIYSDRDRSSALTIARLHCMELMGLGRPLPFAHSSSVVVDA

SEQ ID NO: 1679 - protein, 252 aa, Microglena sp.
TDWCVRQILHGCRPNPSCPSCFQGYRNLRFRRYCKKQKLIVEIADFVAPRKKSAKVLVGFGDWKGLGATPISRRTCGPLQAIRFELRSRENVIMEDIDEFRTSQRCSCCENHLCNMVALTHRKKQDGTGWECTEGRKRIHKILHCKSSQSGAPRQQSGGMLHCGKTWDRDVNASRNILMLTLHQVFGRERPLAFRRDAPRSSSTTPPPPPDTDMGTQTVERFTKEATRNIFENLFNLLHPPTLPKSKDLQSG

SEQ ID NO: 1680 - protein, 297 aa, Microglena sp.
HLPLRELPVCKFFSGESSCEREPNSISASEFKKSDLRQIGAYARFYMGAAPILLAHRASRGYRNLRFRRYCKKQKLIVEIADFVAPRKNSAKVLVGFGDWKGLGATPISRRTRGPLQAIRFELRSRENVIMEDIYEFRTSQRCSCFENHLCNMVALTHRKKQDGTGWECTEGRKRIHKILHCKSSQSGAPRQQSGGMLHCGKTWDRDVNASRNILMLTLHQVFGESVLSRFAETRREVPRQPHPHPLILIWGHRRLNGLPKRLLGISSRTSSTFCTPQRCPKATICSLDDYKVSHFI

SEQ ID NO: 1681 - protein, 339 aa, Microglena sp.
NQVQVRGSLQIFFEESQEVCNMCPKLTTYRWVNADQVGKSKRLKRKLLRSRYPIILQRTGMHSFLENLLARGSKQHICLRIQEVRFEADWCVRRFYMGAAPILLAHRASRGYRNLRFRRYCKKQKLIVEIADFVAPRKNSAKVLVGFGDWKGLGATPISRRTRGPLQAIRFELRSRENVIMEDIYEFRTSQRCSCFENHLCNMVALTHRKKQDGTGWECTEGRKRIHKILHCKSSQSGAPRQQSGGMLHCGKTWDRDVNASRNILMLTLHQVFGRERPLAFRRDAPRSSSTTPPPPPDTDMGTQTVERFTKEATRNIFENLFNLLHPPTLPKSNDLQSG

SEQ ID NO: 1682 - protein, 688 aa, Microglena sp.
GNVGATLYHQKKKNTHPLLMGVVQDKGDDEINISVVKKTLNSLCMDVSRHQISSRIQSMVLLINHAVAEAYLFANFHITRCLDDGDFDVKQLPHLDRNFYYRCLLAVSTSNVRKDTLGQSFNDTMVAFDALRPAGYVKVDVRPWGQVIADVSIQMATMACNSVWANVDRVVIKYLRLKHPSLKKHFKKIVKAVVLYPESKIDTIIPEGLVHAIHIKEVVSHLRALFPLPRGKQFNTRAHLTMRLFHHVLTELGKVGRVDPKDKKTRKSHPRLFSILPRKNGFTISYVPISSMTFMKLLSMGDSPLENVSGDGRYENHTMLWRKYFNVQGLETKRSRFDNRILSDGKGVSVQMKQKGKEEVVEEGENAGYPKDANIVECKDAVGALRVGVDPGMTDIVTVASSAGRIESFSSARFSEVAGYNTSKRRTYKWNDETQDLVKSIPSPNTSNMSDLQDHVRAYLKALPILLQHRANKGYRSMRFFRYVGKQKTIEKVCDVIAPRAQTTVVGFGNWSNQGYGISRSCSGPIKDIRRCLSRRKNVLFKNVDERNTSCKCHGCFQRLVNMKADSVVWRGVCKESPIDGSITVEKQKMVVKNVKVHKVLHCRDSVKSASSNVRCGATWNRDVNAAKNILLLLTTWMDGRERPEAFCVPSPPPKTTVSIEASVSAKPTDPPGFVSSLHCYPLGQLKC

SEQ ID NO: 1683 - protein, 447 aa, Microglena sp.
ILGHKHNYGKDMDFPTMVRFNYWIQTRLEDMDARRIRLMPIFNVQRVHVRLDLKTLVNLFRHMFPNDQNIVELSKWEHVKNPDSFMLPQRPAQKKKKSCCPGEWDAYKSVLKQYDDDVKDIKATDEYRHAKGLYDTLVNARKTVAGSFFRKPPVKNGWVFDCSICTDGVSLSMQYSKTVQVLVSDLKKTRKKPRKEEGIKIAEKYDGSLKTILPDMGIVVLGVDPGRSNIATVTYLADDKNKTWKLTRGAFYHKSGIKKQTRQKELRFADMIPMWESLRENGAALSTSRTDKISAYLSNYAKFSDEWWRLALRRRESRDNLQRYIGKRKVKDSFWAGIKRCMMKELPDMKVCVAYGSAITKLKPTGPGEVAVPTGAMFASCKRIFKEDVSVTDEFKTTLMSWETGKEKERVYKIPSVCSADVKLRLGGERFGHTKSKTMPKVADCDH

SEQ ID NO: 1684 - protein, 688 aa, Microglena sp.
RNVGTILYHQKKKNTHPLLMGVLQDKGDDDINISFVKKTLNSLCMDVSRHQISSRIQSMVLLINHAVAEAYLFANFHITRCLDDGDFDVKQLPHLDRNFYYRCLLAVSTSNVRKDTLGQSFNDTMVAFDALRPAGYVKVDVRPWGQVIADVSIQMATMACNSVWANVDRVVIKYLRLKHPSLKKHFKKIVKAVVQYPESEIDTIIPEGLVHAIHIKEVVSHLRALFPLPRGKQFNTRAHLTMRLFHHVLTELGEVGRVDPKDKKTRKSHPRLFSILPRKNGFTISYVPISSMTFMKLLSMGDSPLESVSGDGRYENHTMLWRKYFNVQGLETKRSRFDNRILSDGKGVSVQMKQKGKEEVVEEGENAGYPKDANIVECKDAVGALRVGVDPGMTDIVTVASSAGRIESFSSARFSEVAGYNTSKRRTYKWNDETQDLVKSIPSPNTSNMSDLQDHVRAYLKALPILLQHRANKGYRSMRFFRYVGKQKTIEKVCDVIAPRAQTTVVGFGNWSNQGYGISRSCSGPIKEIRRCLSRRKNVLFKNVDERNTSCKCHGCFQRLVNMKADSVVWRGVCKESPIDGSITVEKQKMVVKNVKVHKVLHCRDSVKSASSNVRCGATWNRDVNAAKNLLLLLTTWMDGRERPEAFCVPSPPPKTTVSIEASVSAKPTDPPGFVSSLPCYPLGQLKC

SEQ ID NO: 1685 - protein, 302 aa, Microglena sp.
RIWQTIKNKTWKLTRGAFYHKSGIKKQTRQKELRFADMIPMWESLRENGAALSTSRTDKISAYLSNYAKFSDEWWRLALRRRESRDNLQRYIGKRKVKDSFWAGIKRCMMKELPDMKVCVAYGSAITKLKPTGPGEVAVPTGAMFASCKRIFKEDVSVTDEFKTTLMSWETGKEKERVYKIPSVCSADVKLRLGGERFGHTKSKTMPKVADCDHLGVRLYNKRKGAQEKHRRGGFATSLVDSQKSIERYPEVRGLRFSPETCIYSDRDRSSALTIARLHCMELMGLGRPLPFAHSSSVVVDE

SEQ ID NO: 1686 - protein, 454 aa, Microglena sp.
KFQMEVDFYDDYGKDMDFPTMVRFNYWMQTRLEAIGARRIRLMPIFNVQRAHVRLDMKTLVNLFRHVFPKDPNIVELSKWKDVKDPDRFMLPLKPAFKKKKSCGPGEWDACKLAQQKYDADVNDIKDTDEYRHAKGRYDTLVNARKTVAGSFFKKPPVKTGWVFDCSICTDGVSLSMQYSKTVQVRVSDLKKTSKRSRDDEGMSVSEQYDHKLKTTLPDMGIVVLGVDPGRSNIATVTYLADDKSKTWKLTRGAFYHKSGIKKQKKQQEKRFSDMIPRWESLRENGAALSTSRTDDISAYLKNYDTFSDEWWRMALLRRESRDNFQRYIGKRKAMDSFWAGIKRNMKLDHPDLRVRVAYGSAITTLKATGPGEVAVPTGAMFASCKRLFKEEVHVTDEFKTTLMSWETGAKKECVYKIPSVQITTEGQIRLGYELLGHTPLKETPKVSYRDQLA

SEQ ID NO: 1687 - protein, 277 aa, Microglena sp.
DGSEERFQGWRQTLHLQRHIGNMRYFGSKQLHKLMPEENPTHDPKVQKSRFGEYFLVLSVAARDRRAERKPVHPDKVATASIDPGVRKTMVTYSPENEESFMLGQGQASDLVKLLLVHDKLQSRLDTEKTLRSKERMKIKKHMIRIRMRIFYLKKEFRDQTTNFLAARYDVLLVPQLETAKMTISAERELTTKVARQMLTLSHSVLFNRLKEKCAEYGTVFLHVLEHYTSQTCPMCGFLNKCGETYTCKNCQFTCDRDIVGAAGIFLKAVRTENPCS

SEQ ID NO: 1688 - protein, 329 aa, Microglena sp.
RRPVRSLVKKKVSRSQKKYDGSLKTILPDMGIVVLGVDPGRSNIATVTYLADDKNKTWKLTRGAFLPQVGYQEADKAEGTAFADMIPMWESLRENGAALSTSRTDKISAYLSNYAKFSDEWWRLALRRRESRDNLQRYIGKRKVKDSFWAGIKRCMMKELPDMKVCVAYGSAITKLKPTGPGEVAVPTGAMFASCKRIFKEDVSVTDEFKTTLMSWETGKEKERVYKIPSVCSADVNLRLGGERFGHTKSKTMPKVADCDHLGVRLYNKRKGAQEKHRRGGFATSLVDSQNRSSGTQRYEDCDSLQKHAFTRTGIALLLSQSQGCTAWN

SEQ ID NO: 1689 - protein, 227 aa, Microglena sp.
IISYLSTIVKKKISLNSLKLWSFANLKKVETVSRKFGYRIVTDGFAVSILMNKPTCLTCSMPADAFSTRAHEYVTTDEGGIVSFLDNVVVAAVDPGVTDIVTVTGLNGGTRSYSSAKYYRKGLIFKSQRQTDVWNLETADIVGGIIPDRDSSSSEQIGAYARFYMGAAPILLAHRASRGYRNLRFRRYCKKQKLIVEIADFVAPRKKSAKVLVGFGDWRRSGGDANL

SEQ ID NO: 1690 - protein, 651 aa, Microglena sp.
KMATKPPTVAKLKELLKLAEVPYSSKSNKDDLVRLCEDNGLIARPPPEYKTVEKMCVVKCALKKAMSLDDEEFGKFREHVEQLVNVVSRMLRRSSLVLTFHITSLLEKGLDIPDLYNMKDTYWKDWLRIGVDGIFPDEESKISYEAVKDSIGDVIGNDDADYIKSYPIYFDQVLNYAGHTLSTVVSNNAWVPLIPRLARLTSTTLNKLNAPKTLDTSKIIRGYDVMQAIQQEVQNMEGWPESVQEYVNEVREMLSVPDGSRVYDNYGKDMDFPTMVRFNYWIQTRLEDMDARRIRLMPIFNVQRVHVRLDLKTLVNLFRHMFPNDQNIVELSKWEHVKNPESFMLPQRPAQKKKKSCGPGEWEAYKSVLKQYDDDVKDIKATDEYRHAKGFYDTLVNARKTVACSFFRKPPVKNGWVFDCSICTDGVSLSMQYSKTVQVLVSDLKKTCKKPRKEEGIKIAEKYDGSLKTILPDMGIVVLGVDPGRSNIATVTYLADDKNKTWKLTRGAFYHKSGIKKQTRQKELRFADMIPMWESLRENGAALSTSRTDKISAYLSNYAKFSDEWWRLALRRRESRDNLQRYIGKRKVKDSFWAGIKRCMMKELPDMKVCVAYGSAITKLKPTGPGEVAVPTGAMFASCKRIFQRGRFCDR

SEQ ID NO: 1691 - protein, 559 aa, Microglena sp.
PKQHPRLPHRAGKKKPAVVKSFSTHVCPHTNNNTTCSDSNCSCKPIFLTNIPDASKSRTSDQGSTSSALDFYEYWDSSRQDMYRQLLWLPKTGTQGLVSSSFNGFAHSTPTRSSFSITKTEPLKTSLEKTSCPSFKYIVTDGTVEDATKSNAKPKLRTLKLKLNPTKAQKSMLAEFAGCSRFMYNKAVAARLGVGSTHKSVFRIRDRYVTNKVRGEGKMPNPYFKNRQWLLQCPKSVRQSAIKSALANIKACFSNLKAGNIKQFSAPFRRKKTELERGWVIEMDQKNVSKDGDKLFIFKEILGNMRYFGSKQLHKLMPEENPTHDPKVQKSRFGEYFLVLSVAARDRRAERKPVNPDKVATASIDPGVRKTMVTYSPENEESFMLGQGQASDLVKLLLVHDKLQSRLDTEKTLRSKERMKIKKLMIRIRKTIFYLKKEFRDQTTNFLAARYDVLLVPQLETAKMTISAERELTTKVARQMLTLSHSVLFNRLKEKCEEYGTVFLHVLEHYTSQTCPMCGFLNKCGETYTCKNCQFTCDRDIVGAAGIFLKAVRTENPCS

SEQ ID NO: 1692 - protein, 278 aa, Microglena sp.
GKTRPTIRRSKKSRFGEYFLVLSVAARTEGQSGSLSIQTRLQLPPSTQASERQWSRTHLRMRESFMLGQGQASDLVKLLLVHDKLQSRLDTEKTLRSKERMKIKKLMIRIRKTIFYLKKEFRDQTTNFLAARYDVLLVPQLETAKMTISAERELTTKVARQMLTLSHSVLFNRLKEKCEEYGTVFLHVLEHYTSQTCPMCGFLEQVWRDIHLQELSIHLRQRHCGGSWHLPEGCSNRKSLFVKDSIPWGVDPYDTPMENSLSFLLHVPRAPGCLVRNS

SEQ ID NO: 1693 - protein, 422 aa, Microglena sp.
LLDTDTVGGYGCTSFRLMPIFNVQRVHVRLDLKTLVNLFRNMFPNDQNIVELSKWEHVKNPDSFMLPEPAQKKKKSCGPGEWEAYKSVLKQYDDDVKDIKATDEYRHAKGLYDTLVNARKTVAGSFFRKPPVKNGWVFDCSICTDGVSLSMQYSKTVQVLVSDLKKTCKKPRKEEGIKIAEKYDGSLKTILPDMGIVVLGVDPGRSNIATVTYLADDKNKTWKLTRGAFYHKSGIKKQTRQKELRFADMIPMWESLRENGAALSTSRTDKISAYLSNYAKFSDEWWRLALRRRESRDNLQRYIGKRKVKDSFWAGIKRCMMKELPDMKVCVAYGSAITKLKPTGPGEVAVPTGAMFASCKRIFKEDVSVTDEFKTTLMSWENGYRKRNVFTRIPSVCSADVKLRLGGERFGSHEIENDAKGR

SEQ ID NO: 1694 - protein, 489 aa, Microglena sp.
EISCRFQGGSSSTLEHLTMRLFHHVLTELGADLKEKTTKKRPRLFSILPRKSGFTISYVPISSMTLMKLLSMGDSPLESVRGDGRHENHSMLWRKYFNVQGLETKGSRFDNRILSDGKGVSVQMKHQVGKDIAGEGGGDNAGYPKDASIEDCQDASLRQGALRVGIDPGMTDIVTIASSDGRVESFSSARFSEAAGYNTSNRRTNKWNADTQDLVKSIQSPTTSSMQDHVRGYLSALPTLLQHRANRGYRSMRFFRYVGKQKTIEKVCDLIAPKAQKKTIEEKGCDVIAPKAKKTVVGFGNWSNQGYGISRSCSGPVKEIRKCLSRRQNVLFKNVDERNTSCTCHGCFQKLVNMKADSVVWRRVQNEPSALIDGAPTTTTTTTIEKQKTVVKNVKVHKVLHCRNSVKSASSNVRCGATWNRDVNAAKNLLLLLTTWMDGKERPAAFCGPSSSPPQKPQFPERQMWALNKPTHLGQLAAYNCYPLGQLKC

SEQ ID NO: 1695 - protein, 332 aa, Microglena sp.
ASQNSMTINSKRHCPIWVSSFWVWILVGATSLQSRIWQTTKARHGSLHAELFYHKSGIKKQKKQQEKRFSDMIPRWESLRENGAALSTSRTDDISAYLKNYDTFSDEWWRMALLRRESRDNFQRYIGKRKAMDSFWAGIKRNMKLDHPDLRVRVAYGSAITTLKATGPGEVAVPTGSMFASCKRLFKEEVHVTDEFKTTLMSWETGAKKECVYKIPSVQITTEGQIRLGYELLGHTPLKETPKVSYRDQLAVRVYCTRKQIQEKHRRGGLAPSLVDNNSIKRYPEVRGLRFSPETSTYSDRDRSSALTIARLHCMELLGQGRPLPFCRDACC

SEQ ID NO: 1696 - protein, 684 aa, Microglena sp.
IATSSTGALLQSVPTNVRGSTLGEDVESSRLLFDLLREPGQSKVDIRGRVKNQIIADLSILMATMASNHLWTNLERRITTYLKWKYPQIAKRLRSDIVAALIKCPTKNLDVIFKMSPHTTKLPTKLPTSRLRSAKSAVALAKKRVGRKEPEGSPLRVRLTKLQERLEKLSEAWLSSKNLRVDADNAKRFFAREVAFCLRGVLPLPSGNTFASRAHMTLPLYHKILSETIEEKRKTKNEKHRTFSLLPYKSGFTLSHIPISKMAFFYMVNECHFDSCKADVASKNHQGIWERFANLKKVETVSRKFGYRIVTDGFAVSILMNKPTCLTCSMPADAFSTRAHEYVTTDEGGIVSFLDNVVVAAVDPGVTDIVTVTGLNGGTRSYSSAQYYRKGLIFKSQRQTDVWNLETADIVGGIIPDRDSSSSEQIGAYARFYMGAAPILLAHRASRGYRNLRFRRYCKKQKLIVEIADFVAPRKKSAKVLVGFGDWKGLGATPISRRTCGPLQAIRFELRSRENVIMEDIDEFRTSQRCSCCENHLCNMVALTHRKKQDGTGWECTEGRKRIHKILHCKSSQSGAPRQKSGGMLHCGKTWDRDVNASRNILMLTLHQVFGRERPLAFRRDAPRSSSTTPPHPLILIWGHRRLNGLPKRLLGISSRTSSTFCTPQRCPKATICSLDDYKVSHFI

SEQ ID NO: 1697 - protein, 607 aa, Microglena sp.
QCIRNLHVLNIRMPCMATNASVKLARPPMPVVSPGPSSVDGRIMARSGLQATNVSLTQAASKATSSSRKKKPAVVKSFSTHVCPHTNNNPTCSDSNCSCKPIFLTNIPDASKSLKSRTSDQGSTSSALDFYEYWDSSRQDLYRQLLWLPKTGTQGLVSSSFNGFAHSTPTRSSFSITKTEPLKTSLEKTSCPSFKYIVTDGTVEDATKSNAKPKLRTLKLKLNPTKAQKSMLAEFAGCSRFMYNKAVAARLGVGSTHKSVFRIRDRYVTNKVRGKGKMPNPYFKNRQWLLQCPKSVRQSAIKSALANIKACFSNLKAGNIKQFSAPFRRKKTELERGWVIEMDQKNVSKDGDKLFIFKEILGNMRYFGSKQLHKLMPEENPTHDPKVQKSRFGEYFLVLSVAARDRRAERKPVNPDKVATASIDPGVRKTMVTYSPENEESFMLGQGQASDLVKLLLVHDKLQSRLDTEKTLRSKERMKIKKLMIRIRKTIFYLKKEFRDQTTNFLAARYDVLLVPQLETAKMTISAERELTTKVARQMLTLSHSVLFNRLKEKCEEYGTVFLHVLEHYTSQTCPMCGFLNKCGETYTCKNCQFTCDRDIVGQLASS

SEQ ID NO: 1698 - protein, 346 aa, Microglena sp.
GGRGKMPNPYFKNRQWLLQCPKSIRQSAIKSALANIKACFSNLKAGNIKQFSAPFRRKKTELERGWVIEMDQKNVSKDGDKLFIFKEILGNMRYFGSKQLHKLMPEENPTHDPKVQKSRFGEYFLVLSVAARDRRAERKPVNPDKVATASIDPGVRKTMVTYSPENEESFMLGQGQASDLVKLLLVHDKLQSRLDTEKTLRSKERMKIKKLMIRIRKTIFYLKKEFRDQTTNFLAARYDVLLVPQLETAKMTISAERELTTKVARQMLTLSHSVLFNRLKEKCEEYGTVFLHVLEHYTSQTCPMCGFLNKCGETYSCKNCQFTCDRDIVGAAGIFLKAVRTENPCS

SEQ ID NO: 1699 - protein, 239 aa, Microglena sp.
QPNPQRRQGVSVQMKHQASEDVAVDNAGYPKDAILEDCQDASLRVGVDPGMTDIVTVASSDGRVESFSSARFSEAAGYNTSNRRTKQMECRYARPRESPFHRRLRAVCTTCRTMSEVTSALSRHSFNTEPAEVTDRCDSFGMWVKQKTIEKVCDLIAPKAQKKTIEEKVCDVIAPRAQTTVVGFGNWSNQGYGISRSCSGPIKEIRRCLSRRKNVFVQKTSTNATLLVPATAASRSSST

SEQ ID NO: 1700 - protein, 621 aa, Microglena sp.
QCIRNLHVLNIRMPCMATNASVKLARPPMPLVSPGPSSVDGRIMARSERSGLQATNVSLTQAASKATSSSRKKKQAVVKSFSTHVCPHTNNNPTCSDSNCSCKPIFLTNIPDASKSLKSRTSDQGSTSSAHDFYEYWDSSRQDLYRQLLWLPKTGSQGLVSSSLNGFARSTPARSSFSITKTEPLKTSLENTSCPSFKYIVADGTVEDATKSNAKPKLGTLKLKLNPTKAQKSILAEFAGCSRFMYNKAVAARLGVGSTHKSVFRIRDRYVTNKVRGKGKIPNPYFKNRQWLLQCPKSVRQSAIKAAFANIKACFSNLKAGNIKQFSAPFRRKKTELERGWAIEMDQKSVSKDGDKLFIFKDTLGNMRYFGSKQLHKLMPEENPTHDPKVQKSRFGEYFLVLSVAARDRRAERKPVHPDKVATASIDPGVRKTMVTYSPENEESFMVGQGQASDLVKLLLVHDKLQSRLDTEKTLRSKERMKIKKLMIRIRKRIFYLKKEFRDQTTKFLAARYDVLLVPQLETAKMSISAERELTTKVARQMLTLSHSVLFNRLKEKCEEYGTVFLHVLEHYTSQTCPMCGFLNKCGETYTCKNCQFTCDRDIVGAAGIFLKAVRTENPCS

SEQ ID NO: 1701 - protein, 621 aa, Microglena sp.
QCIRNLHVLNIRMPCMATNASVKLARPPMPLVSPGPSSVDGRIMARSERSGLRATNVSLTQAASKATSSSRKKKQAVVKSFSTHVCPHTNNNPTCSDSNCSCKPIFLTNIPDASKSLKSRTSDQGSTSSAQDFYEYWDSSRQDLYRQLLWLPKTGSQGLVSSSLNGFARSTPARSSFSITKTEPLKTSLENTSCPSFKYIVADGTVEDATKSNAKPKLGTLKLKLNPTKAQKSILAEFAGCSRFMYNKAVAARLGVGSTHKSVFRIRDRYVTNKVRGKGKIPNPYFKNRQWLLQCPKSVRQSAIKAAFANIKACFSNLKAGNIKQFSAPFRRKKTELERGWAIEMDQKSVSKDGDKLFIFKDTLGNMRYFGSKQLYKLMPEENPTHDPKVQKSRFGEYFLVLFVAARDRRAERKPVHPDKVATASIDPGVRKTMVTYSPENEESFMLGQGQASDLVKLLLVHDKLQSRLDTEKTLRSKERMKIKKLMIRIRKRIFYLKKEFRDQTTKFLAARYDVLLVPQLETAKMTISAERELTTKVARQMLTLSHSVLFNRLKEKCEEYGTVFLHVLEHYTSQTCPMCGFLNKCGETYTCKNCQFTCDRDIVGAAGIFLKAVRTENPCS

SEQ ID NO: 1702 - protein, 227 aa, Microglena sp.
ANRGYRSMRFFRYVGKQKTIEKVCDVIAPKAQKTIVGFGNWSNQGYGISRSCSGPVKEIRMCLSRRQNVLFKNVDERNTSCTCHGCFQKLVNMKADSVVWRRVQNEPPSLNNGAPTTTTTTTTIEKQKTVVKNVKVHKVLHCRNSVKSASSNVRCGATWNRDENAAKNLLLLLTTWMDGKERPGAFCVPSSSPTPKTTVSGEANVGAQPTDPPGSVSSLQLLSSGPA

SEQ ID NO: 1703 - protein, 621 aa, Microglena sp.
YHNKKRTLPPSISMGVVTNNGDDDDDLDIMVVKKTLNSLCMDVSRQQICSRIQSMVLVINHAVAEAYLFANFHITRCLDDVAFDVKQLPHLDRNFYYRCILAVSTSNVRKDTLGKSLKDSMVAFDALRPAGYLKVDVRQWGQVIADVSIQMATMACNSVWANVDRVVIKYLRLKHPSLKKHFNKIVKAVVQYPESDIDKTIPSSLVHANLIKYVVRRLRDLLPLPRGKQFNTRAHLTMRLFHHVLTELGADLKEKTTKKRPRLFSILPRKSGFTISYVPISSMTLMKLLSMGNSPLESFRGDGRHENHSMLWRKYFNVQGLETKGSRFDNRILSDGKGVSVQMKHQAGEDVAVEGGDTAGYPKEASLEDCQDASLRQGALRVGIDPGMTDIVTIASSDGRVDSFSSARFSEAAGYNTSNRRTNKWNADTQDLVKSIPSPTTSSMHDMQDHVRGYLSALPTLLQHRANRGYRSMRFFRYVGKQKTIEKVCDVIAPKAQKKTVVGFGNWSNQGYGISRSCSGPVKEIRKCLSRRQNVLFKNVDERNTSCTCHGCFQKLVNMKADSVVWRRVQNEPSALINGAPTTTTTIEKQKTVVKNVKVHKVLHCRNSVKGASSNVRCGAT

SEQ ID NO: 1704 - protein, 788 aa, Microglena sp.
ECSREPVCRSRLHQNVFGVQFVMENGIGESSSLVHEADQHDDVAELVDYEGGEDEECAPGRAICVVKMKLSTFIPHDWLRKKMDTLVLDMNKLLGEGYIFANFHIARLFENGIAVPPVNRNFFYRCLLAVSTNKCKGSTLGEDFESSRLLFDLLREPGQSKVDIRGNVKNQIIADLSILMATMASNHLWTNLERRITTYLKWKYPQIAKRLRSDIVAAVIKCPTKNLDVIFKMSPHTTKLPTKLPTARLRSAKNAIALVKKRVGRKEPEGSPLRVRLTKLQERLEKLSEAWLSSKNLRVDEDNAKRFFARDVAFRLRGVLPLPSGKTFASRAHMTLPLYHKILSETIASDNEKLRTFSLLPYKSGFTLSHIPISKMAFFYMVNECHFDSCKADVASKNHQGIWERFANLKIVETFSRKFGYRIVTDGFAVSILMNKPTCLTCSMPAEAFSTRVDEYMTTDEGGIVSFRDNVTVAAVDPGVTDIVTVTGLDGGTRSYSSAQYYRKGLIFKSQRQTDVWNLETTDIVGDNIPDRDSSRSEQIGTYARFYMGAAPILLAHRASRGYRKLRFRRYCKIQKLIVEIADFVAPREKSTKVIVGFGDWKGLGGTPISRRTCGPLQAIRFELRSRENVIMEDVDEFRTSQRCSCCESRLCNMVALTHRKKQDGTGWECTEGRKRIHKILHCKSSQSGAPRQQSGGRLHCGKTWDRDVNASRNILMLTLHQVFGRERPLAFRRDTPRSSSKNPPPDTDMGTQTVERFTTEATRNIFENLFNLLHPPTLPKRDDLQSG

SEQ ID NO: 1705 - protein, 344 aa, Microglena sp.
DISGEGGGGDNAGYPKDASLEDCQDASLRQGALRVGIDPGMTDIVTIASSDGRVESFSSARFSEAAGYNTSNRRTNKWNADTQDLVKSIPSPTTSSMHDMQDHVRGYLSALPTLLQHRANRGYRSMRFFRYVGKQKTIEKVCDVIAPKAQKKTVVGFGNWSIQGYGISRSCSGPVKEIRKCLSRRQNVLFKNVDERNTSCTCHGCFQKLVNMKADSVVWSRVQNEPSALINGAPTTTTTTIEKQKTVVKNVKVHKVLHCRNSVKSASSNVRCGATWNRDVNAAKNLLLLLTTWMDGKERPGAFCVPSSSPTPKTTVSGEANVGTQPTDPPGSVSSLQLLSSGPA

SEQ ID NO: 1706 - protein, 217 aa, Microglena sp.
NQIRRRTCWAKTDLQDSLLPVLRSIVQRMSRVNPAEASKYKDDAAFLQGGSAGSVTFRAMHRDWDEFRTSQRCSCCESRLCNMVALTYRKKQDGTGWECTEGRKRINKILHCKSSQSEAPRQQSGGRLHCGKTWDRDVNASRNILMLTLHQVFGRERPLAFRRDTPRSFSKNPPPDTDMGTQTVERFTTEATRNIFENLFNLLHPPTLPKRDDLQSG

SEQ ID NO: 1707 - protein, 486 aa, Microglena sp.
CPTAHVRLDMKTLVNLFRHVFPKDPNIVELSKWKDVKDPDRFMLPLKPAVKKKKSCGPGEWEAYKLAQQKYDADVNDIKDTDEYRHAKGRYDTLVNARKTVAGSFFKKPPVKTGWVFDCSICTDGVSLSMQYSKTVQVRVSDLKKTSKRSRDDEGMSVSEQYDHKLKTTLPDMGIVVLGVDPGRSNIATVTYLADDKSKTWKLTRGAFYHKSGIKKKKKQQEKRFSDMIPRWESLRENGAALSTSRTDDISAYLKNYDTFSDEWWRMALLRRESRDNFQRYIGKRKAMDSFWAGIKRNMKLDHPDLRVRVAYGSAITTLKATGPGEVAVPTGSMFASCKRLFKEEVHVTDEFKTTLMSWETGAKKECVYKIPSVQITTEGQIRLGYELLGHTPLKETPNVSYRDQLAVRVYCTRKQIQEKHRRGGLAPSLVDNNSIKRYPEVRGLRFSPETSTYSDRDRSSALTIARLHCMELLGQGRPLPFCRDA

SEQ ID NO: 1708 - protein, 252 aa, Microglena sp.
TDWCVRQILHGCRPNPSCPSCFQGYRNLRFRRYCKKQKLIVEIADFVAPRKKSAKVLVGFGDWKGLGATPISRRTCGPLQAIRFELRSRENVIMEDIDEFRTSQRCSCCENHLCNMVALTHRKKQDGTGWECTEGRKRIHKISPLQKQSKRSATPTERWYASLREDLGPRCERFQKHPDAYTSPSIWRERPLAFRRDAPRSSSTTPPPPPDTDMGTQTVERFTKEATRNIFENLFNLLHPPTLPKSNDLQSG

SEQ ID NO: 1709 - protein, 287 aa, Microglena sp.
SSHQQMECRYARPREVHSIADYEQYARHAGPCQRLPQRSPTLLQHRASRGYRSMRFFRYVGKQKTIEKVCDLIAPKAQKKTIEEKVCDVIAPRAQTTVVGFGNWSNQGYGISRSCSGPIKEIRRCLSRRKNVLFKNVDERNTSCTCHGCFQKLVNMKADSVVWRRVQNEPPSLINGAPTTTTTIEKQKTVVKNVKVHKVLHCRNSVKSASSKVRCGATWNRDVNAAKNLLLLLTTWMDGKERPATFCVPSSSPTPKTTVSGEANVGAQPTDPLGSVSSLQLLSSGPA

SEQ ID NO: 1710 - protein, 303 aa, Microglena sp.
KQVTSSSFSAPFRRKKTELERGWVIEMDQKNVSKDGDKLFIFKEILGNMRYFGSKQLHKLMPEENPTHDPKVQKSRFGEYFLVLSVAARDRRAERKPVNPDKVATASIDPGVRKTMVTYSPENEESFMLGQGQASDLVKLLLVHDKLQSRLDTEKTLRSKERMKIKKLMIRIRKTIFYLKKEFRDQTTNFLAARYDVLLVPQLETAKMTISAERELTTKVARQMLTLSHSVLFNRLKEKCEEYGTVFLHVLEHYTSQTCPMCGFLNKCGETYTCKNCQFTCDRDIVGAAGIFLKAVRTENPCS

SEQ ID NO: 1711 - protein, 403 aa, Microglena sp.
FIARQTLLPKNHQGIWERFANLKKVETVSRKFGYRIVTDGFAVSILMNKPTCLTCSMPADAFSTRAHEYVTTDEGGIVSFLDNVVVSAVDPGVTDIVTVTGLNGGTRSYSSAKYYRKGLIFKSQRQTDVWNLETADIVGGIIPDRDSSSSEQIGAYARFYMGAAPILLAHRASRGYRNLRFRRYCKKQKLIVEIADFVAPRKKSAKVLVGFGDWKGLGATPISRRTCGPLQAIRFELRSRENVIMEDIDEFRTSQRCSCCENHLCNMVALTHRKKQDGTGWECTEGRKRIHKILHCKSSQSGAPRQQSGGMLHCGKTWDRDVNASRNILMLTLHQVFGRERPLAFRRDAPRSSSTTPPPPPDTDMGTQTVERFTKEATRNIFENLFNLLHPPTLPKSNDLQSG

SEQ ID NO: 1712 - protein, 626 aa, Microglena sp.
RTRSLQTCLFSWPQWPLTIFWTNLERRITTYLKWKYPQIAKRLRSDIVAALIKCPTKNLDVIFKMSPHTTKLPTKLPTSRLRSAKSAVALAKKRVGRKEPEGSPLRVRLTKLQERLEKLSEAWLSSKNLRVDADNAKRFFAREVAFCLRGVLPLPSGNTFASRAHMTLPLYHKILSETIEEKRKTKNEKHRTFSLLPYKSGFTLSHIPISKMAFFYMVNECHFDSCKADVASKNHQGIWERFANLKKVETVSRKFGYRIVTDGFAVSILMNKPTCLTCSMPADAFSTRAHEYVTTDEGGIVSFLDNVVVSAVDPGVTDIVTVTGLNGGTRSYSSAKYYRKGLIFKSQRQTDVWNLETADIVGGIIPDRDSSSSEQIGAYARFYMGAAPILLAHRASRGYRNLRFRRYCKKQKLIVEIADFVAPRKKSAKVLVGFGDWKGLGATPISRRTCGPLQAIRFELRSRENVIMEDIDEFRTSQRCSCCENHLCNMVALTHRKKQDGTGWECTEGRKRIHKILHCKSSQSGAPRQQSGGMLHCGKTWDRDVNASRNILMLTLHQVFGRERPLAFRRDAPRSSSTTPPPPPDTDMGTQTVERFTKEATRNIFENLFNLLHPPTLPKSNDLQSG

SEQ ID NO: 1713 - protein, 203 aa, Microglena sp.
GREEKISIKDDGTAIKKQTKTLREFSESDPNVVVVANDPGRCNIAFLTWKKNKVEEKDNGGRKRKRHCEFGSKRLTRERYYVESGVFKSRGPTKKWLSNIQDCLDDLKDNSPKRTSLESFDAYVTVMVNHWDSRWGEMSKSRWGAQRLRLYGGKKRVLARFFNEVQADVGERKTIVIAYGSSKFAPGGKGELSVPTTSAFKCV

SEQ ID NO: 1714 - protein, 787 aa, Microglena sp.
PVCRSRLHQNVFGVQFVMENGIGESSSLVHEADQHDDVAELVDYEGEEDCAPGRAICVVKMKLSTFIPHDWLRNKIDTLVLDMNKLLGEGYIFANFHIARLFENGIAVPPVNRNFFYRCIIAVSTNKCNGSTLGEDFESSRLLFDLLREPGQSKVDIRGRVKNQIIADLSILMATMASNHLWTNLERRITTYLKWKYPQIAKRLRSDIVAALIKCPTKNLDDIFKMSPHTTKLPTKLPTSRLRSAKSAVALAKKRVGRKEPEGSPLRVRLTKLQERRKKLSEAWLSSKNLRVDADNAKRFFAREVAFCLRGVLPLPSGNTLASRAHMTLPLYHKILSETIEEKRKTKNEKHRTFSLLPYKSGFTLSHIPISKMAFFYMVNECHFDSCKADVASKNHQGIWERFANLKKVETVSRKFGYRIVTDGFAVSILMNKPTCLTCSMPADAFSTRAHEYVTTDEGGIVSFLDNVVVAAVDPGVTDIVTVTGLNGGTRSYSSAQYYRKGLIFKSQRQTDVWNLETADIVGGIIPDRDSSSSEQIGAYARFYMGAAPILLAHRASRGYRNLRFRRYCKKQKLIVEIADFVAPRKKSAKVLVGFGDWKGLGATPISRRTCGPLQAIRFELRSRENVIMEDIDEFRTSQRCSCCENHLCNMVALTHRKKQDGTGWECTEGRKRIHKILHCKSSQSGAPRQQSGGMLHCGKTWDRDVNASRNILMLTLHQVFGRERPLAFRRDAPRSSSTTPPPPPDTDMGTQTVERFTKEATRNIFENLFNLLHPPTLPKSNDLQSG

SEQ ID NO: 1715 - protein, 251 aa, Microglena sp.
HTDAVADHRPRMKCKQPFFSINNHQHKKTIEKVCDLIAPKAQKKTIEEKVCDVIAPRAQTTVVGFGNWSNQGYGISRSCSGPIKEIRRCLSRRKNVLFKNVDERNTSCTCHGCFQKLVNMKADSVVWRRVQNEPPSLINGAPTTTTTIEKQKTVVKNVKVHKVLHCRNSVKSASSKVRCGATWNRDVNAAKNLLLLLTTWMDGKERPATFCVPSSSPTPKTTVSGEANVGAQPTDPLGSVSSLQLLSSGPA

SEQ ID NO: 1716 - protein, 358 aa, Microglena sp.
HVRCLQTRSLRGAHEYVTTDEGGIVSFLDNVVVAAVDPGVTDIVTVTGLNGGTRSYSSAQYYRKGLIFKSQRQTDVWNLETADIVGGIIPDRDSSSSEQIGAYARFYMGAAPILLAHRASRGYRNLRFRRYCKKQKLIVEIADFVAPREKSAKVLVGFGDWKGLGATPISRRTCGPLQAIRFELRSRENVIMEDIDEFRTSQRCSCCENHLCNMVALTHRKKQDGTGWECTEGRKRIHKILHCKSSQSGAPRQQSGGMLHCGKTWDRDVNASRNILMLTLHQVFGRERPLAFRRDAPRSSSTTPPHPLILIWGHRRLNGLPKRLLGISSRTSSTCCTPQRCPKATICSLDDYKVSHFI

SEQ ID NO: 1717 - protein, 435 aa, Microglena sp.
VHLSTWIKKFVYSKENRILAKEIKDEHGIDETVFHRYLLYDIHSWGVKEDLIAIHSLLPERTKMWLKIQHSILGRDEINRQWLKSVSNSAKMIRYNVFINRYLEATEDEGYAKLVNIAPIPTVKHAFITIDTDGLLGVLKDVGLIESLEKTLTNKEHWESVFDVENIRSTGKGVFTCTIDTDGVMACTHFLRAEKKKISIKDDGTAIKKQTKTLREFSESDPNVVVVANDPGRCNIAFLTWKKNKVEEKDKGGRKRKRHCEFGSKRLTRERYYVESGVFKSRGPTKKWLSNIQDCLDDLKDNSPKHTSLVSFDADVTVMVNHWDSRWGEMSKSRWGAQRLRLYGGKKRVLARFFNEVQADVGERKTIVVAYGSAKFAPGGKGELSVPTTSAFNAFSDRFKGRVAVIDEFRTTKIWHKDSTTVLQSVQSEKEGRTV

SEQ ID NO: 1718 - protein, 206 aa, Microglena sp.
YVGKQKTIEKVCDVIAPRAQTTVVGFGNWSTQGYDISRSCSGPIKEIRRCLSRRKNVLFKNVDERNTSCKCHGCFQRLVNMKADSVVWRGVCKESPIDGSITVEKQKMVVKNVKVHKVLHCRDSVKSASSNVRCGATWNRDVNAAKNLLLLLTTWMDGRERPGAFCVPSPPPKTTVSIEASVSAKPTDPPGFVSSLPCYPLGQLKC

SEQ ID NO: 1719 - protein, 599 aa, Microglena sp.
NWQGLRCPWCLQDRPSVDGRIMARSERSGLQATNVSLTQAASKATSSSRKKNPAVVKSFSTQVCPHTNNNPTCSDSNCSCKPIFLTNIPDASKSLKSRTSDQGSTSSAQDFYEYWDSSRQDLYRQLLWLPKTGSQGLVSSSLNGFARSTPARSSFSITKTEPLKTSLEKTSCPSFKYIVADGTVEDATKSNAKPKLRTLKLKLNPTKAQKSMLAEFAGCSRFMYNKAVAARLGVGSTHKSVFRIRDRYVTNKVRGKGKMPNPYFKNRQWLLQCPKSVRQSAIKAALANIKACFSNMKAGNIKQFSAPFRRKKRELERGWAIEMDQKNVSKDGDKLFIFKDILGNMRYFGSKQLHKLMPEENPTHDPKVQKSRFGEYFLVLSVASRDRRAEQEPVHPDKVATASIDPGVRKTMVTYSPENEESFMLGQGQASDLVKFLLVHDKLQSRLDTEKTLRSKERMKIKKHMIRIRKRIFYLKKEFRDQTTNFLAARYDVLLVPQLETAKMTISAERELTTKVARQMLTLSHSVLFNRLKEKCAEYGTVFLHVLEHYTSQTCPMCGFLNKCGETYTCKNCQFTCDRDIVGAAGIFLKAVRTENPCS

SEQ ID NO: 1720 - protein, 426 aa, Microglena sp.
KNKKKSHPRLFSILPRKNGFTISYVPISSMTFMKLLSMGDSPLENVSGDGRYENHTMLWRKYFNVQGLETKRSRFDNRILSDGKGVSVQMKQKGKEEVVEEGENAGYPKDANIVECKDAVGALRVGVDPGMTDIVTVASSAGRIESFSSARFSKVAGYNTSKRRTYKWNDETQDLVKSIPSPNTSNMVDLQDHVRAYLKALPILLQHRANKGYRSMRFFRYVGKQKTIEKVCDVIAPRAQTTVVGFGNWSNQGYGISRSCSGPIKEIRRCLSRRKNVLFKNVDERNTSCKCHGCFQRLVNMKADSVVWRGVCKESPIDGSITVEKQKMVVKNVKVHKVLHCRDSVKSASSNVRCGATWNRDVNAAKNLLLLLTTWMDGRERPEAFCVPSPPPKTTVSIEASVSAKPTDPPGFVSSLPCYPLGQLKC

SEQ ID NO: 1721 - protein, 241 aa, Microglena sp.
ASAENTLFAFKSIVIYPILLQHRANKGYRSMRFFRYVGKQKTIEKVCDVIAPRAQTTVVGFGNWSNQGYGISRSCSGPIKEIRRCLSRRKNVLFKNVDERNTSCKCHGCFQRLVNMKADSVVWRGVCKESPIDGSITVEKQKMVVKNVKVHKVLHCRDSVKSASSNVRCGATWNRDVNAAKNLLLLLTTWMDGRERPEAFCVPSPPPKTTVSIEASVSAKPTDPPGFVSSLPCYPLGQLKC

SEQ ID NO: 1722 - protein, 450 aa, Microglena sp.
SAPDNAIVPSRAYRVGRGRTSGSDKKTRKSHPRLFSILPRKNGFTISYVPISSMTFMKLLSMGDSPLESVSGDGRYENHTMLWRKYFNVQGLETKRSRFDNRILSDGKGVSVQMKQKGKEEVVEEGENAGYPKDANIIECKDAVGALRVGVDPGMTDIVTVASSAGRIESFSSARFSEVAGYNTSKRRTYKWNDETQDLVKSIPSPNTSNMVDLQDHVRAYLKALPILLQHRANKGYRSMRFFRYVGKQKTIGKVCDMIAPRAQTTVVGFGNWSNQGYGISRSCSGPIKEIRRCLSRCKNVLFKNVDERNTSCKCHGCFQRLVNMKADSVVWRGVCKESPIDGSITVEKQKMVVKNVKVHKVLHCRDSVKSASSNVRCGATWNRDVNAAKNLLLLLTTWMDGRERPEAFCVPSPPPKTTVSIEASVSAKPTDQPGFVSSLPCYPLGQLKC

SEQ ID NO: 1723 - protein, 228 aa, Microglena sp.
RIAHQRRPRVLLGHGTGKERKPVHPYKVATASIDPGVRKTMVTYSPENEESFMLGQGQASDLVKLLLVHDKLQSRLDTEKTLRSKERMKIKKQMIRIRKRIFYLKKEFRDQTTNFLAARYDVLLVPQLETAKMTISAERELTTKVARQMLTLSHSVLFNWLKEKCEEYGTVFLHVLEHYTSQTCPMCGFLNKCGETYTCKNCQFTCDRDIVGAASIFLKAVRTENPCS

SEQ ID NO: 1724 - protein, 460 aa, Microglena sp.
PCLCTTRYCRRPSKKKRKTKNEKHRTFSLLPYKSGFTLSHIPISKMAFFYMVNECHFDSCKADVASKNHQGIWERFAKLKKVETVSRKFGYRIVTDGFAVSILMNKLTCLTCSMPADAFSTRAHEYVTTDEGGIVSFLDNVVVAAVDPGVTDIVTVTGLNGGTRSYSSAQYYRKGLIFKSQRQTDVWNLETADIVGGIIPDRDSSSSEQIGAYARFYMGAAPILLAHRASRGYRNLRFRRYCKKQKLIVEIADFVAPREKSAKVLVGFGDWKGLGATPISRRTCGPLQAIRFELRSRENVIMEDIDEFRTSQRCSCCENHLCNMVALTHRKKQDGTGWECTEGRKRIHKILHCKSSQSGAPRQQSGGMLHCGKTWDRDVNASRNILMLTLHQVFGRERPLAFRRDAPRSSSTTPPPPPDTDMGTQTVERFTKEATRNIFENLFNLLHPPTLPKSNDLQSG

SEQ ID NO: 1725 - protein, 234 aa, Microglena sp.
KNYATFSNEWWRMALLRRESRDNFQRYIGKRKAMDSFWAGIKRNMKLDHPDLRVRVAYGSAITTLKATGPGEVAVPTGSMFASCKRLFKDEVHVTDEFKTTLMSWETGAKKECVYKIPSVQITTEGQIRLGYELLGHTPLKETPKVSYRDQLAVRVYCTRKQIQEKHRRGGLAPSLVDNNSIKRYPEVRGLRFSPETSTYSDRDRSSALTIARLHCMELLGQGRPLPFCRDACC

SEQ ID NO: 1726 - protein, 365 aa, Microglena sp.
YFNVQGLETKRSRFDNRILSDGKGVSVQMKQKGKEEVVEEGENAGYPKDANIVECKDAVGALRVGVDPGMTDIVTVASSAGRIESFSSARFSEVAGYNTSKRRTYKWNDETQDLVKSIPSPNTSNMSDLQDHVRAYLKALPILLQHRANKGYRSMRFFQYVGKQKTIEKVCDVIAPRAQTTVVGFGNWSNQGYGISRSCSGPIKEIRRCLSRRKNVLFKNVDERNTSCKCHGCFQRLVNMKADSVVWRGVCKESPIDGSITVDKQKMVVKNVKVHKVLHCRDSVKSASSNVRCGAIWNRDVNAAKNLLLLLTTWMDGRERPEAFCVPSPPPKTTVSIEASVSAKPTDPHGFVSSLPCYPLGQLKC

SEQ ID NO: 1727 - protein, 325 aa, Microglena sp.
NDIARYGYRRPGVDPGRSNIATVTYLADDKNKTWTLTRGAFYHKSGIKKQTRQKELRFSDMIPMWESLRENGAALSTSRTDKISVYLSNYANFSDEWWRLALRRRESRDNLQRYIGKRKVKDSFWAGIKRCMMKELPDMKVCVAYGSAITKLKPTGPGEVAVPTGAMFASCKRIFKEDVSVTDEFKTTLMSWETGKEKERVYKIPSVCSADVKLRLGGERFGHTKSKTMPKVADCDHLGVRLYNKRKGAQEKHRRGGFATSLVDSQKSIERYQEVRGLRFSPETCIYSDRDRSSALTIARLHCMELMGLGRPLPFAHSSSVVVDE

SEQ ID NO: 1728 - protein, 303 aa, Microglena sp.
KQVTSSSFQLRSDGRRQSLRGLGPLRWIRRNVSKDGDKLFIFKDILGNMRYFGSKQLHKLMPEENPTHDPKVHKSRFGEYFLVLSVAARDRRAERKPVHPDKVATASIDPGVRKTMVTYSPENEESFMLGQGQASDLVKLLLVHDKLQSRLDTEKTLRSKERMKIKMHMIRIRKRIFYLKKEFRDQTTNLLAARYDVLLVPQLETAKMTISAERELTTKVARQMLTLSHSVLFNRLKEKCAEYGTVFLHVLEHYTSQTCPMCGFLNKCGETYTCKNCQFTCDRDIVGAAGIFLKAVRTENPCS

SEQ ID NO: 1729 - protein, 427 aa, Microglena sp.
MGGIQVGPTEDADVNDIKATDEYRHAKGRYDTLVNARKTVAGSFFKKPPVKTGWVFDYSICTDGVSLSMQYSKTVQVRVSDLKKTSKRSRDDEGMSVSEQYDHKLKTTLPDMGIVVLGVDPGRSNIATVTYLADDKSKTWKLTRGAFYNKSGVKKQKKQQEKRFSDMIPRWESLRENGAALSTSRKDDISAYLKNYATFSDEWWRMALRRRESRDNFQRYIGKRKSMDSFWAGIKRNMKLDHPDLRVRVAYGSAITTLKATGPGEVAVPTGSMFASCKRLFKEEVHVTDEFKTTLMSWETGAKKECVYKIPSVQITTEGQIRLGYELLGHTPLKETPKVSYRDQLAVRVYCTRKQIQEKHRRGGLAPSLVDNNSIKRYPEVRGLRFSPETSTYSDRDRSSALTIARLHCMELLGQGRPLPFCRDACC

SEQ ID NO: 1730 - protein, 216 aa, Microglena sp.
CGYPKDASIEDCQDASLRQGALRVGIDPGMTDIVTIASSDVESSLFSSARFSEAAGYNTSNRRTNKWNADTQALVKSIPSPTTSSMHDMQDHVRGYLSALPTLLQHRANRGYRSMRFFRYVGKQKTIEKVCDLIAPKAQKKTIEEKVCDVIAPKAKKTVVGFRNWSNQGYGISRSCSGPVKEIRKCLSRRQNVLFKNVDERNTSCTCHGCFQSSST

SEQ ID NO: 1731 - protein, 242 aa, Microglena sp.
EQHRYSHVSGRRQKQDMEAYTRSFLPQVWYQETEKKQQEKRFSDMIPRWESLRENGAALSTSRKDDISAYLKNYATFSDEWWRMALRRRESRDNFQRYIGKRKAMDSFWEGIKRNMKLDHPDLRVRVAYGSAITTLKATGPGEVAVPTGSMFASCKRLFKEEVHVTDEFKTTLMSWETGAKKECVYKIPSVQITTEGQIRLGYELLGHTPLKETPKVSYRDQLAVRVYCTRKQIQEKHRRGG

SEQ ID NO: 1732 - protein, 381 aa, Microglena sp.
RNISRRLSKRWSSTQNRKSTQSSQRASCMRSTSKEVVSHLRALFPLPRGKQFNTRAHLTMRLFHHVLTELGEVGRVDPKDKKTRKSHPRLFSILPRKNGFTISYVPISSMTFMKLLSMGDSPLESVSGDGRYENHTMLWRKYFNVQGLETKRSRFDNRILSDGKGVSVQMKQKGKEEVVEEGENAGYPKDANIVECKAAVGALRVGVDPGMTDIVTVASSAGRIESFSSARFSKVAGYNTSKRRTYKWNDETQDLVKSIPSPNTSNMSDLQDHVRAYLKALPILLQHRANKGYRSMRFFRFVGKQKTIEKVCDVIAPRAQTTVVGFGNWSNQGYGISRSCSGPIKEIRRCLSRRKECFVQKTSTNATLLVNVTAASRGLST

SEQ ID NO: 1733 - protein, 740 aa, Microglena sp.
PRMEQVCDVCIKSSVMYTLCKMATKPPTVAKLKELLKLAEVAYSSKDKKDDIVRLCEDNGLIARPPPEYKTVEKMCVVKCALKKAMSLDDEEFGKFRGHVDQLVNVVCRMLRRSSLVLTFHVTRLMEGDLPIPNMYDMKDTYWKDWLRIGVDGVFPDEESRISYESVKDVIGKVLGSDDPDYINSYPIYFDQVLNYAGHTLSTVVSNNAWVPLVPRLTRLTKATLNALGAPKTIRVYDVMRVIQQEIQEMESWPESVQEYVREVRVRLKVPDGSRLYDDYGKDMDFPTMVRFNYWMQTRLEAIGARRIRLMPIFNVQRAHVRLDMKTLVNLFRHVFPKDPNIVELSKWENVKDPDRFMLPLKPSIKMKKSCGPGEWEAYKLAQHKYDADVKDIKATDEYRHSKGRYDTLVNARKTVAGSFFKKPPVKTGWVFDCSICTDGVSLSMQYSKTVQVRVSDLKKTSKRSRDEEGMSVSEQYDHKLKTTLPDMGIVVLGVDPGRSNIATVTYLADDKSKTWKLTRGAFYHKSGIKKQKKQQEKRFSDMIPRWESLRENGAALSTSRKDDISAYLKNYATFSDEWWRMALRRRESRDNFQRYIGKRKAMDSFWAGIKRNMKLDHPDLRVRVAYGSAITKLKATGPGEVAVPTGSMFASCKRLFKEEVHVTDEFKTTLMSWETGAKKECVYKIPSVQITAEGQIRLGYELLGHTPLKETPKVSYRDQLAVRVYCTRKKIQEKHRRVA

SEQ ID NO: 1734 - protein, 347 aa, Microglena sp.
ARNKRRTTVHINQKTPHYDGANTRTHVNVVVAAVDPGVTDIVTVTGLDGGTRSYSSVQYYRKGLIFKSQRQTDVWNLETADIVGDIIPDRDSSRSEQIGAYARFYMGAAPILLAHRASRGYRNLRFRRYCKKQKLIVEIADFVAPREKSAKVLVGFGDWKGLGATPISRRTCGPLQAIRFELRSRGNVIMEDVDEFRTSQRCSCCENRLCNMVALTHRKKQDGTGWECTEGRKRIHKILHCKSSQSGAPRQQSGGRLHCGKTWDRDVNASRNILMLTLHQVFGRERPLAFRRDAPRSSSRTPPPPNTDMGTQTVERFTKEATRNIFENLFNLLHPPTFPNSNDLQSG

SEQ ID NO: 1735 - protein, 585 aa, Microglena sp.
IATFFYRCLLAVSTNKCHGSTLGEDFESSRILFDLLREPGQSKVDIRGSMKNQIIADLTIIMATMASNHLWTNLERRIMTYLNWKYPKISKHLRADIVAAVIKCPTKYLDVIFKMSAHVVKLPTKLPTARLRVAKYAVDLAKKSVGRKEPKGSHLREKLAKLQARFKKLSEAWISSKNLRVDEDNVKRFIARDVAFCLRGVIPLPSGNNFSSRAHMTLPLYHKILSETIASGNEKLCTFSLLPYKSGFTISHIPISKMAFLYLVKECKLDSCKVDVASKNHHGIWERFANLKMVETVSRKFGYRIVTDGFAVSILMNKPTSLTCSMPKDEFSKRANEYMTTDESGLVSFRDNVVVAAIDPGVTDILTVTGLDGCTRSYSSAQYYRKGLIFKSQRQTGIWNLETTDIVADIPDRDSSNSEQIGQYARFYMGAAPMLLAHRAERGYRNLRFRRHCRKQKLIVEIADFVAPREKRTKVLVGFGDWKGLGATPISRRTSGPLQAIKFELRSRGNVIMEDVDEFRTSQRCSCCESSLCNMVALTHRKKQDGIGWECTEGRKRMHKILHCKSSQSGAPRQQSGCRLHCGKT

SEQ ID NO: 1736 - protein, 737 aa, Microglena sp.
LWKMATKPPTVAKLKELLKLAEVPYSSKSNKDDLVRLCEDNGLIARPPPEYKTVEKMCVVKCALKKAMSLNDEEFGKFREHVDKLVNVVSRMLRRSSLVLTFHITSLLEKGLEIPDLYNMKDTYWKDWLRIGVDGIFPDEESKISYEAVKDSIGDVIGNDDADYIKSYPIYFDQVLNYAGHTLSTVVSNNAWVPLIPRLARHTSTTLNKLNAPKTLDTSKIIRGYDMMQAIQQEVQNMEGWPESVQEYVNEVREMLSVSDGSRVYDNCGKDMDFPTMVRFNYWIQTRLEDMDARRIRLMPIFNVQRVHVRLDLKTLVNLFRHMFPNDQNIVELSKWEHVKNPDSFMLPQRPAQKKKKSCGPGEWEAYKSVPKQYDDDVKDIKATDEYRHAKGLYDTLVNARKTVAGSFFRKPPVKNGWVFDCSICTDGVSLSMQYSKTVQVLVSDLKKTCKNPRKEEGIKIAEKYDGSLKTILPDMGIVVLGVDPRRSNIATVTYLADDTNKTWTLTRGAFYHKSGIKKQTRQKELRFADMIPMWESLRENGAALSTSRTDKISVYLSNYAKFSEEWWRLALRRRESRDNLQRYIGKRKVKDSFWAGIKRCMMKELPDMKVCVAYGSAITKLKPTGLEEVAVPTGAMFASCKRIFKEDVSVTDEFKTTLMSWETGKEKERVYKIPSVCSADVKLRLGGERFGHTKSKTMPKVADCDHLGVRLYNKRKGAQEKHRRGGFATSLVDSQK

SEQ ID NO: 1737 - protein, 524 aa, Microglena sp.
ANVDRVVIKYLRLKHPSRKKHFKKIVKAVVQYPESKIDTIIPEGLVHAIHIKEVVSHLRALFPLPRGNQFNTRAHLTMRLFHHVLTELGEVGRVDPKDKKTRKSHPRLFSILPRKNGFTISYVPISSMTFVKLLSMGDSPLESVSGDGRYENHTMLWRKYFNVQGLETKRARFDNRILSDGEGVSVQMKQKGKEEVVEERENAGYPKDANIVECKDAVGALRVGVDPGMTDIVTVASSAGRIESFSSARFSEVAGYNTSKRRTCKWNDETQDLVKSIPSPNTSNMSDLQDHVRAYLKALRILLQHRANKGYRSMRFFRYVGKQKKIEKVCDVIAPRAQTTVVGFGNWSNQGYGISRSCSGPIKEIRRCLSRRKNVLFKNVDERNTSCKCHGCFQRLVNMKADSVVWRGVCKESPIDGSITVEKQKMVMKNVKVHKVLHCRDSVKSASSNVRCGATWNRDVNAAKNLLLLLTTWMDGRERPEAFCVPSPPPKTTVSIKASVSAKPTDPPGFVSSLPCYPLGQLKC

SEQ ID NO: 1738 - protein, 423 aa, Microglena sp.
VYCCRWNGRRRYKVKCQTQVEDLKAEAEPNQGSEIDAGRVCRVQPVHVQQGGGSTVGRRKHSQVCLPNSRQVCDEQGEGEGKMPNPYFKNRQWLLQCPKSVRQSAIKGALANIKACFSNLKAGNIKQFSAPFRRKKTELERGWAIEMDQKNVSKDGDKLFIFKEILGNMRYFGSKQLHKLMPEENPTHDPKVQKSRFGEYFLVLSVAARDRRAEWKPVHPDKVATTSIDPGVRKTMVTYSPENEESFMLGQGQASDLVKLLLVHDKLQSRLDTEITLRSKERMKIKMQMIRIRKRMFYLKKEFRDQTTNFLAARYDVLLVPQLETAKMTISAERELTTKVARQMLTLSHFVLFNRLKEKCEEYGTVFLHVLEHYTSQTCPMCGFLNKCGETYTCKNCQFTRDRDIVGAAGIFLKAVRTENPCS

SEQ ID NO: 1739 - protein, 686 aa, Microglena sp.
METIVNKEPPDKRTRPDRTAKIKDRKNGEENVVKCTLSRIIADKDNKDVIIKVIKERVDSVSKRTYLAGVAVNRILKEVFEGVPDAQLHTVSVPSVDQNFIRQLMVGSRQAHMETRDATVERFFHNNYWFREKIEGREVIVKKKKQYVGAIARYDGDRNLYSHASKKYLTNFNNHYRVHLSTWIKKFVYSKENRILAKEIKDEHGIDETVFHRYLLYDIHSWGVKEDLIAIHLLLPERTKMLLKIQHSILGRDKINRQWLKSVSNSAKMIRYNVFINRYLEATEDEGYAKLVNITPIPTVKHAFITIDTDGLLGVLKDVGLIKSLEKTLTNKEHWESVFDVENIRSTGKGVFTCTIDTDGVMACTHFLRAEKKKISIKDDGTAIKKQTKTLREFSESDPNVVVVANDPGRCNIAFLTWKKNKVKEKDKGGRKRKRHCEFGSKRLTRERYYAESGVFKSRGPTKKWLSNIQDCLDDLKDNSPKRTSLVSFDAYVTVMVNHWDSRWGEMSKSRWGAQRLRLYGGKKRVLARFFNEVQEDVGERKTIVVAYGSAKFAPGGKGELSVPTTSAFKAFSDRFKGRVAVIDEFRTTKIWHKDSTTVLQSVQSEKEGRTVRGLLWCSSTMENSKLFVNRDLNAAINIHNCFTMYPIRPGILARPKKYCKLEVVVGRKIDYKLTGSLQNAVSSEV

SEQ ID NO: 1740 - protein, 352 aa, Microglena sp.
RENGKVVTYRQIVSSRLLHDNIGINRRGLEGPAFKKKKSCGPGEWEAYKLAQQKYDADVKDINATDEYRHAKGRYDTLVNARKTVAGSFFKKPPVKTGWVFDCSICTDGVSLSMQYSKTVQVRVSDLKKTSKRSRDDEGMSVSEQYDHKLKTTLPDMGIVVLGVDPGNIVTVTYLADDKSKTWKLTRGAFFYHKSGIKNRKKQQEKRFSDMIPRWESLRENGAALSTLRKDDISAYLKNYATFSDEWWRMALRRRESRDNFQRYIGKRKAMDSFWAGIKRNMKLDHPDLRVRVAYGSAITKLKATGPGEVAVPTGSMFASCKRLFKEEVHVMGVPASRPILTGCETWYGADL

SEQ ID NO: 1741 - protein, 350 aa, Microglena sp.
HVRCLQARSLRGAHEYVTTDEGGIVSFLDNVVVSAVDPGVTDIVTVTGLNGGTRSYSSAKYYRKGLIFKSQRQTDVWNLETADIVGGIIPDRDSSSSEQIGAYARFYMGAAPILLAHRASRGYRNLRFRRYCKKQKLVVEIADFVAPRKKSAKVLVGFGDWKGLGATPISRRTCGPLQAIRFELRSRENVIMEDIDEFRTSQRCSCCENHLCNMVALTHRKKQDGTGWECTEGRKRIHKILHCKSSQSGAPRQQSGGMLHCGKTWDRDVNASRNILMLTLHQVFGRERPLAFRRDAPRSSSTTPPPPPDTDMGTQTVERFTKEATRNIFENLFNLLHPPTLPKSNDLQSG

SEQ ID NO: 1742 - protein, 400 aa, Microglena sp.
FMQGRHCFQKPSRNMERFANLKKVETVSRKFGYRIVTDGFAVSILMNKPTCLTCSMPADAFSTRAHEYVTTDEGGIVSFLDNVVVAAVDPGVTDIVTVTGLNGGTRSYSSAKYYRKGLIFKSQRQTDVWNLETADIVGGIIPDRDSSSSEQIGAYARYYMGAAPILLAHRASRGYRNLRFRRYCKKQKLIVEIADFVAPRKKSAKVLVGFGDWKGLGATPVSRRTCGPLQAIRFELRSRENVIMEDIDEFRTSQRCSCCENHLCNMVALTHHKKQDGTGWECTEGRKRIHKILHCKSSQSGAPRQQSGGMLHCGKTWDRDVNASRNILMLTLHQVFGRERPLAFRRDAPRSSSTSPPPDTDMGTQTVERFTKEATRNIFENLFNLLHPPTLPKSNDLQSG

SEQ ID NO: 1743 - protein, 246 aa, Microglena sp.
HACERPKNSRRFLLQKTTCQEWVVFDCSICTDGVSLSMQYSKTVQVLVSDLKKTCKKPRKEEGIKIAEKYDGSLKTILPDMGIVVLGVDPGRSNIATVTYLADDKNKTWKLTRGAFYHKSGIKKQTRQKELRFADMIPMWESLRENGAALSTSRTDKISAYLSNYAKFSDEWWRLALRRRESRDNLQRYIGKRKVKDSFWAGIKRCMMKELPDMKVCVAYGICHHETEAYWTGRSCSSHWGHVRIV

SEQ ID NO: 1744 - protein, 550 aa, Microglena sp.
TSIGKKSAVALAKKRVGRKEPEGSPLRVRLTKLQERLEKLSEAWLSSKNLRVDADNAKRFFAREVAFCLRGVLPLPSGNTFASRAHMTLPLYHKILSETIEEKRKTKNEKNIAHSRCLPYKSGFTLSHIPISKMAFFYMVNECHFDSCKADVASKNHQGIWERFANLKKVETVSRKFGYRIVTDGFAVSILMNKPTCLTCSMPADAFSTRAHEYVTTDEGGIVSFLDNVVVAAVDPGVTDIVTVTGLNGGTRSYSSAQYYRKGLIFKSQRQTDVWNLETADIVGGIIPDRDSSSSVQIGAYARFYMGAAPILLAHRASRGYRNLRFRRYCKKQKLIVEIADFVAPREKSAKVLVGFGDWKGLGATPISRRTCGPLQAIRFELRSRENVIMEDIDEFRTSQRCSCCENHLCNMVALTHRKKQDGTGWECTEGRKRIHKILHCKSSQSGAPRQQSGGMLHCGKTWDRDVNASRNILMLTLHQVFGRERPLAFRRDAPRSSSTTPPPPPDTDMGTQTVERFTKEATRNIFENLFNLLHPPTLPKSNDLQSGLL

SEQ ID NO: 1745 - protein, 697 aa, Microglena sp.
DGNETSDSREIEGATKIGRRLMEGDLPIPNMYDMKDTYWKDWLRIGVDGVFPDEESRISYEAVKDVIGKVLGSDEPDYINSYPIYFDQVLNYAGHTLSTVVSNNAWVPLVPRLTRLTKATLNALKAPKTIRVYDVMRVIQQEIQEMESWPESVQEHVREVRVRLKVPDGSRLYDDYGKDMDFPTMVRFNYWMQTRLESIGARRIRLMPIFNVQRAHVRLDMKTLVNLFRHVFPKDPNIVELSKWKDVKDPDRFMLPLKPAVKKKKSCGPGEWEAYKLAQQKYDADVNDIKDTDEYRHAKGRYDTLVNARKTVAGSFFKKPPVKTGWVFDCSICTDGVSLSMQYSKTVQVRVSDLKKTSKRSRDDEGMSVSEQYDHKLKTTLPDMGIVVLGVDPGRSNIATVTYLADDKSKTWKLTRGAFYHKSGIKKQKKQQEKRFSDMIPRWESLRENGAALSTSRTDDISAYLKNYDTFSDEWWRMALLRRESRDNFQRYIGKRKAMDSFWAGIKRNMKLDHPDLRVRVAYGSAITTLKATGPGEVAVPTGSMFASCKRLFKEEVHVTDEFKTTLMSWETGAKKECVYKIPSVQITTEGQIRLGYELLGHTPLKETPNVSYRDQLAVRVYCTRKQIQEKHRRGGLAPSLVDNNSIKRYPEVRGLRFSPETSTYSDRDRSSALTIARLHCMELLGQGRPLPFCRDA

SEQ ID NO: 1746 - protein, 793 aa, Microglena sp.
KMATKPPTVAKLKELLKLAEVPYSSKSNKDDLVRLCEDNGLIARPPPEYKTVEKMCVVKCALKKAMSLDDEEFGKFREHVDQLVNVVSRMLRRSSLVLTFHITSLLEKGLDIPDLYNMKDTYWKDWLRIGVDGIFPDEESKISYEAVKDSIGDVIGNVDTDYIKSYPIYFDQVLNYAGHTLSTVVSNNAWVPLIPRLTRLTSTTLNKLNAPKTLDTSKIIRGYDVMQAIQQEVQNMEGWPESVQEYVNEVREMLSVPDGSRFYDNYGKDMDFPTMVRFNYWIQTRLEDMDARRIRLMPIFNVQRVHVRLDLKTLVNLFRHMFPNDQNIVELSKWEHVKNPDSFMLPQRPAQKKKKSCGPGEWEAYKSVLKQYDDDVKDIKATDEYRHAKGLYDTLVNARKTVAGSFFRKPPVKNGWVFDCSICTDGVSLSMQYSKTVQVLVSDLKKTCKKPRKEEGIKIAEKYDGSLKTILPDMGIVVLGVDPGRSNIATVTYLADDKNKTWKLTRGAFYHKSGIKKQTRQKELRFADMIPMWESLRENGADLSTSRTDKISAYLSNYAKFSDEWWRLALRRRESRDNLQRYIGKRKVKDSFWAGIKRCMMKELPDMKVCVAYGSAITKLKPTGPGEVAVPTGAMFASCKRIFKEDVSVTDEFKTTLMSWETGKEKERVYKIPSVCSADVKLRLGGERFGHTKSKTMPKVADCDHLGVRLYNKRKGAQEKHRRGGFATSLVDSQKSIERYPEVRGLRFSPETCIYSDRDRSSALTIARLHCMELMGLGRPLPFAHSSSVVVDE

SEQ ID NO: 1747 - protein, 557 aa, Microglena sp.
YHGCFRRPKTCRICEVGRSSLGTSNRRRLNTNGDDGVQQRLGKRGQGRYQVLRLKHPSLKKHFKKIVKAVVQYPESKIDTIIPEGLVHAIHIKEVVTHLRVIFPLPRGKQFNTRAHLTMRLFHHVLTALGEVGRVDPKDKKTRKSHPRLFSILPRKNGFTISYVPISSMTFMKLLSMGDSPLESVSGDGRYENHTMLWRKYFNVQGLETKRSRFDNRILSDGKGVSVQMKQKGKEEVVEEGENAGYPKDANIVECKDAVGALRVGVDPGMTDIVTVASSAGRIESFSSARFSEVAGYNTSKRRTYKWNDETQDLVKSIPSPNTSNMSDLQDHVRAYLKALPILLQHRANKGYRSMRFFRYVGKQKTIEKVCDVIAPRAQTTVVGFGNWSNQGYGISRSCSGPIKEIRRCLSRRKNVLFKNVDERNTSCKCHGCFQRLVNMKADSVVWRGVCKESPIDGSITVEKQKMVVKNVKVHKVLHCRDSVKSASSNVRCGATWNRDVNAAKNLLLLLTTWMDGRERPEAFCVPSPPPKTTVSIEASVSAKPTDPPGFVSSFPC

SEQ ID NO: 1748 - protein, 330 aa, Microglena sp.
VGYRQNHPSESRACEPHQRRCQTPERSLAAAKGEAVQHSSAPDNETVSSRAYRVGSGSKRENNKKTPPSVQYPSTQERLQPFLTSLISSMTLMKLLSMGDSPLESFRCDGRHENHSMLWRKYFNVQGLETKGSRFDNRILSGGKGVSVQMKHQASEDVAVDNAGYPKDAILEDCQDASLRVGVDPGMTDIVTVASSDGRVESFSSARFSEAAGYNTSNRRTNKWNVDTQDLVKSIPSPTTSSMHDMQDHVRGYLSALRDTPFNTEPAEVTDRCDSFGNVGKQKTIEKVCDLIAPKATERRRSKKKVCDVIAPKGTDDRCWLRQLVQPRVW

SEQ ID NO: 1749 - protein, 508 aa, Microglena sp.
VGYQQNHPSESRACEPHQRRCQTPERSFAAAKGEAVQHSSAPDNETVSSRAYRVGSGSKRETTKKRPRLFSILPRKSGFTISYVPISSMTLMKLLSMGDSPLESFLGDGRHENHSMLWRKYFNVQGLETKGSRFDNRILSDGKGVSVQMKHQESEDVAVDNAGYPKDAILEDCQDASLRVGVDPGMTDIVTVASSAGRVESFSSARFSEAAGYNTSNRRTNKWNVDTQDLVKSIPSPTTSSMHDIQDHVRGYLSALPTLLRHRASRGYRSMRFFRYVGKKKTIEKVCDLIAPKAQKKTIKEKVCDVIAPRAQTTVVGFGNWSNQGYGISRSCSGPIKEIRRCLSRRKNVLFKNVDERNTSCTCHGCFQKLVNMKADSVVWRRVQNEPPSLINGAPTTTTTTTIEKQKTVVKNVKVHKVLHCRNSVKSASSKMRCGATWNRDVNAAKNLLLLLTTWMDGKERPATFCVPSSSPTPKPQFPERQMWALNQPTHLGQLAAYNCYPLGQLKC

SEQ ID NO: 1750 - protein, 377 aa, Microglena sp.
TPTAYWASSRTWVSSRVSKKTLTNKEHWESVFDVENIRSTGKGVFTCTIDTDGVMACTHFLRAEKKKISIKDDGTAIKTKTLREFSESDPNVVVVANDPGRCNIAFLTWKKNKVEEKDKGGRKRKRHCEFGSKRLTRERYYVESGVFKSRGPTKKWLSNIQDCLDDLKDNSPKRTSLVSFDAYVTVMVNHWDSRWGEMSKSRWGAQRLRLYGGKKRVLARFFNEVQADVGERKTIVVAYSSANFAPGGKGELSVPTTSAFNAFSDRFKGRVAVIDEFRTTKIWHKESTTVLQSVQSEKEGRTVRGLLWCSSTMENSKLFVNRDLNAAINIHNCFTMNPIRPGILARPKKYCKLEVVVGRKIDYKLTGSLQNAVSSEV

SEQ ID NO: 1751 - protein, 209 aa, Microglena sp.
RRKYVGKQKTIEKVCDVIAPRAQTSVVGFGNWSNQGYGISRSCSGPIKEIRRCLSRRKNVLFKNVDERNTSCKCHGCFQRLVNMKADSVVWRGVCKESPIDGSITVEKQKMVVKNVKVHKVLHCRDSAKSASSNVRCGATWNRDVNAAKNLLLLLTTWMDGRERPEAFCVPSPPPKTTVSIEASVSAKPTDPPGFVSSLPCYPLGQLKC

SEQ ID NO: 1752 - protein, 524 aa, Microglena sp.
STNHAVAEAYLFANFHITRCLDDGDFDVKQLPHLDRNFYYRCLLAVSTSNVRKDTLGQSFNDTMVAFDALRPAGYVKVDVRPWGQVIADVSIQMATMACNSVWANVDRVVIKYLRLKHPSLKKHFKKIVKAVVQYPESKIDTIIPESLVHAIHIKEVVSHLRALFPMPRGKQFNTRAHLTMRLFHHVLTELGEVGRVDPKDKKTKTNHPRLFNILPCKNGFTISYVLISSMTFMKLLSMGDSPLESVSGDGRYENHTMLWRKYFNVQGLETKRSRFDNQILSDGKGVSVQMKQKGKEEVAEEGENAGYPKDANIVECKDAVGALRVGVDPRMTDIVTVASSAGRIESFSSARFSEVAGYNTSKRRTYKWNDETQDLVKSIPSPNTSNMVDLQDHVRAYLKALPILLQHRANKGYRSMRFFRYVGKQKTIEKVCDMIAPREQTTVVGFGNWSNQGYGISRSCSGPIKEIRRCLSRRKNVLFKNVDERNTSCKMSRLLPEACQHEGRQRSLARSLQRVPNRRVYNC

SEQ ID NO: 1753 - protein, 290 aa, Microglena sp.
FMQGRRCFQKPSRNMERFANLKKVETVSRKFGYRIVTDGFAVSILMNKPTCLTCSMPADAFSTRAHEYVTTDEGGIVSFLDNVVVAAVDPGVTDIVTVTGLNGGTRSYSSAQYYRKGLILKSQRQTDVWNLETADIVGGIIPDRDSSSSEQIGAYAGFYMGAAPILLAHRASRGYRNLRFRRYCKKQKLIVEIADFVAPREKSAKVLVGFGDWKGLGATPISRRTCGPLQAIRFELRSRENVIMEDIDEFRTSQRCSCCENHLCNMVALTHRNKQDGYRLGMYRRTQADS

SEQ ID NO: 1754 - protein, 327 aa, Microglena sp.
VFSFPASLRRRGDARVFKESYFGVRPCLRDGLHYSLQITHAHLKWRNRMGVPASRSILIGCETWLRDMQDHVRGYLSALPTLLQHRASRGYRSMRFFRYVGKQKTIEKVCDLIAPKAQKKTIEGKVCDVIAPRAQTTVVGFGNWSNQGYGISRSCSGPIKEIRRCLSRRKNVLFKNVDERNTSCTCHGCFQKLVNMKAESVVRRRVQNEPPSLINGAPPTTIEKQKTVVKNVKVHKVLHCRNSVKSASSNVRCGATWNRDVNAAKNLLLLLTTWMDGKERPATFCVPSSSPTPKPQFPERQMWALNQPTHLCQLAAYNCYPLDQLKC

SEQ ID NO: 1755 - protein, 448 aa, Microglena sp.
KRKTSHILVVAYKSGFTLSHIPISKMAFFYMVNECHFDSCKADVASKNHQGIWERFANLKKVETVSRKFGYRIVTDGFAVSILMNKPKCLTCSMPADAFSTRAHEYVTTDEGGIVSFLDNVVVAAVDPGVTDIVTVTGLNGGTRSYSSAQYYRKGLIFKSQRQTDVWNLETADIVGGIIPDRDSSSSEQIGAYARFYMGAAPILLAHRASRGYRNLRFRRYCKKQKLIVEIADFVAPREKSAKVLVGFGDWKGLGATPISRRTCGPLQAIRFELRSRENVIMEDIDEFRTSQRCSCCENHLCNMVALTHRNKQDGTGWECTEGRKRIHKILHCKSSQSGAPRQQSGGMLHCGKTWDRDVNASRNILMLTLHQVFGRERPLAFRRDAPRSSSTTPPHPLILIWGHRRLNGLPKRLLGISSRTSLTFCTPQRCPKATICSLDDYKVSHFI

SEQ ID NO: 1756 - protein, 443 aa, Microglena sp.
RFSTRSSDGTRSTDSGLRAFPTPGKMIRYNVFINRYLEAQRTRATPSWSHRSHPNSQALLHHDRHRRPTGRPQGRGSRRESRKDADEQGALGVGLRCAKNIRSTGKGCFTCTIDTDGVMACTHFPRAEKKKISIKDDGTAIKKQTKTLLEFSESDPNVVVVANDPGRCNIAFLTWKKNKVEEKDKGGRKRKRHCEFGSKRLTRERYYVESGVFKSRGPTKKWLSNIQDCLDELKDNSPKRTSLELFDAYVTVMVNHWDSRWGEMSKSRWGAQRLRLYGGKKRVLARFFNEVQADVGERKTIVIAYGSSKFAPGGKGELSVPTTSAFYAFSDRFKGRVAVIDEFRTTKIWHKDSTTVLQSVQSEKEGRTVRGLLWCSSTMENSKLFVNRDLNAAINIHNCFTMYPTRPGILARPKKYCKLEVVVGRTIDYKLTGSLQNAVSSEV

SEQ ID NO: 1757 - protein, 531 aa, Microglena sp.
GRMRRGAMLLKEVKIQSIVQSIVQRIQSMVLLINHAVAEAYLFANFHITRCLDDGDFDVKQLPHLDRNFYYRCLFAVSTSNVRKDTLGQSFNDTMVAFDALRPAGYVKVDVRPWGQVIADVSIQMATMACNSVWANVDRVVIKYLRLKHPSLKKHFKKIVKAVVQYPESKIDTIIPEGLVHAIHIKEVVSHLRALFPLPRGKQFNTRAHLTMRLFHHVLTELGEVGRVDPKDKKTRKSHPRLFSILPRKNGFTISYVPISSMTFMKLLSMGDSPLESVSGDGRYENHTMLWRKYFNVQGLETKRSRFDNRILSDGKGVSVQMKQKGKEEVVEEGENAGYPKDANIVECKDAVGALRVGVDPGMTDIVTVASSAGRIESFSSARFSEVAGYNTSKRTYKWNDETQDLVKSIPSPNTSNMSDLQDHVRAYLKALPILLQHRANKGYRSMRFFRYVGKQKTIEKVCDVIAPRAQTTVVGFGNWSNQGYGISRSCSGPSKRSGGASHVVRMFCSKTSTNATLLVNVTAASRGLST

SEQ ID NO: 1758 - protein, 238 aa, Microglena sp.
GGRKRKRHCEFESKRLTRERYYVESGVFKSRGPTKKWLSNIQDCLDDLKDNSPKRTSLVSFDAYVAVMVNHWDSRWGEMSKSRWGAQRLRLYGGKKRVLARFFNEVQEAVGERKTIVVAYGSAKFAPGGKGELSVPTTSAFKSFSDRFKGRVAVIDEFRTTKIWHKDSTTVLQSVQSEKEGRTVQGLLWCSSTMEKSKFFVNRDLNAAINIHNCFTMYPIRPGILARPKKILQNWKLW

SEQ ID NO: 1759 - protein, 205 aa, Microglena sp.
GTRRFGDWKGLGATPISRRTCGPLQAIRFELRSRENVIMEDIDEFRTSQRCSCCENHLCNMVALTHRNKQDGTGWECTEGRKRIHKILHCKSSQSGAPRQQSGGMLHCGKTWDRDVNASRNILMLTLHQVFGRERPLAFRRDAPRSSSTTPPPPLILIWGHRRLNGLPKGLLGISSRTSLTFCTPQRCPKATICSLDDYKVSHFI

SEQ ID NO: 1760 - protein, 349 aa, Microglena sp.
RRPVRSLVKKKVSRSQKNTTAHLKRYCPIWVSSSWVWTQDGANIATVTYLADDKNKTWKLTRGEFYHKSGIKKQTRQKELRFADMIPMWESLRENGAALSTSRTDKISAYLSNYAKFSDEWWRLALRRRESRDNFQRYIGKRKVKDSFWAGIKRCMMKELPDMKVCVAYGSAITKLKPTGPGEVAVPTGAMFASCKRIFKEDVSVTDEFKTTLMSWETGEEKERVYKIPSVCSADVKLRLGGERFGHTKSKTMPKVADCDHLGVRLYNKRKGAQEKHRRGGFATSLVDSQKSIERYPEVRGLRFSPETCIYSDRDRSSALTIARLHCMELMGLGRPLPFAHSSSVVVDE

SEQ ID NO: 1761 - protein, 651 aa, Microglena sp.
KMATKPPTVAKLKELLKLAEVPYSSKSNKDDLVRLCEDNGLIARPPPEYKTVEKMCVVKCALKKAMSLDDEEFGKFREHVDQLVNVVSRMLRRSSLVLTFHITSLLEKGLDIPDLYNMKDTYWKDWLRIGVDGIFPDEESKISYEAVKDSIGDVIGNDDADYIKSYPIYFDQVLNYAGHTLSTVVSNNAWVPLIPRLARLTSTTLNRLNAPKTLDTSKIIRGYDVMQAIQQEVQNMEGWPESVQEYVNEVREMLSVPDGSRVYDNYGKDMDFPTMVRFNYWIQTRLEDMDARRIRLMPIFNVQRVHVRLDLKTLVNLFRHMFPNDQNIVELSKWEHVKNPESFMLPQRPARKKKKSCGPGEWDAYKSVLKQYDDDVKDIKATDEYRHAKGLYDTLVNARKTVAGSFFRKPPVKNGWVFDCSICTDGVSLSMQYSKTVQVLVSDLKKTCKKPRKEEGIKIAEKYDGSLKTILPDMGIVVLGVDPGRSNIATVTYLADDKNKTWKLTRGAFYHKSGIKKQTRQKELRFADMIPMWESLRENGAALSTSRTDNISAYLSNYAKFSDEWWRLALRRRESRDNLQRYIGKRKVKDSFWAGIKRCMMKELPDMKVCVAYGSAITKLKPTGPGEVAVPTGAMFASCKRIFKRGRFCDR

SEQ ID NO: 1762 - protein, 539 aa, Microglena sp.
VFQMEVEFMITYGKDMDFPTMVRFNYWIQTRLEDMDARRIRLMPIFNVQRVHVRLDLKTLVNLFRHMFPNDQNIVELSKWEHVKNPDSFMLPQRPAQKKKKSCGPGEWEAYKSVLKQYDDDVKDIKATDEYRHAKGLYDTLVNARKTVAGSFFRKPPVKNGWVFDCSICTDGVSLSMQYSKTVQVLVSDLKKTCKKPRKEEGIKIAEKYDGSLKTILPDMGIVVLGVDPGRSNIATVTYLADDKNKTWKLTRGAFYHKSGIKKQTRQKELRFADMIPMWESLRENGAALSTSRTDKISAYLSNYAKFSDEWWRLALRRRESRDNLQRYIGKRKVKDSFWAGIKRCMMKELPDMKVCVAYGSAITKMKPTGPGEVAVPTGAMFASCKRIFKEDVSVTDEFKTTLMSWETGKEKERVYKIPSVCSADVKLRLGGERFGHTKSKTMPKVADCDHLGVRLYNKRKGAQEKHRRGGFATSLVDSQKSIERYPEVRGLRFSPETCIYSDRDRSSALTIARLHCMELMGLGRPLPFAHSSSVVVDE

SEQ ID NO: 1763 - protein, 458 aa, Microglena sp.
TCSGTCSPNDQNIVELSKWEHVKNPDSFMLPQRPAQKKKKSCGPGEWEAYKSVLKQYDDDIKDIKATDEYRHAKGLYDTLVNARKTVAGSFFRKPPVKNGWVFDCSICTDGVSLSMQYSKTVQVLVSDLKKTCKKPRKEEGIKIAEKYNGSLKTILPDMGIVVLGVDPGRSNIATVTYLADDKNKTWTLTRGAFYHKSGIKKQTRQKELRFADMIPMWESLRENGAALSTSRTDKISAYLSNYAKFSDEWWRLALRRRESRDNLQRYIGKRKVKDSFWAGIKRCMMKELPDMKVCVAYGSAITKLKPTGPGEVAVPTGAMFASCKRIFKEDVSVTDEFKTTLMSWETGKEKERVYKIPSVCSADVKLRLGGERFGHTKSKTMPKVADCDHLGVRLYNKRKGAQDKHRRGNFATSLVDSQKSIERYPEVRGLRLSLETCIIWTGIALLLSQSQGCTAWN

SEQ ID NO: 1764 - protein, 444 aa, Microglena sp.
RRPEHSKENRILAKEFKDEHGIDETVFHRYLLYDIHSWGVKEDLIAIHSLLPERTKMLLKIQHSIIGRDEINRQWLKSVSNSAKMIRYNVFINRYLEATEDEGYAKLVNIAPIPTVKHSFITIDTDGLLGVLKDVGLVESLKKTLTNKEHWESVFDVENIRSTGKGVFTCTIDTDGVMACTHFLSDEKKKISIKDDRTAIKKQTKTLREFSESDPNVVVVANDPGRCNIAFLTWKKNKVEEKDKGGRKRKRHCEFGSKRLTRERYYVESGVFKSRGPTKKWLSNIQDCLDDLKDNSPKRTSLESFDAYVTVMVNHWDSRWGRCPSRGGARSACGSTVVRKRVLARFFNEVQADVGERKTIVIAYGSSKFAPGGKGELSVLQRARSMRLATVSRGELPSLTNSVPQRSGTRTAPPSSRVCSPKKKGARFEACYGAVPPWRTASCL

SEQ ID NO: 1765 - protein, 393 aa, Microglena sp.
TPEKQSQVPSSRNHLSRRGGCFDCSICTDGVSLSMQYSKTVQVRVSDLKKTSKRSRDDEGMSVSEQYDHKLKTTLPDMGIVVLGVDPGRSNIATVTYLADDKSKTWEAYTRSFLHKSGIKKQKKQQEKRFSDMIPRWESLRENGAALSTSRTDDISAYLKNYDTFSDEWWRMALLRRESRDNFQRYIGKRKAMDSFWAGIKRNMKLDHPDLRVRVAYGSAITTLKATGPGEVAVPTGSMFASCKRLFKEEVHVTDEFKTTLMSWETGAKKECVYKIPSVQITTEGQIRLGYELLGHTPLKETPKVSYRDQLAVRVYCTRKQIQEKHRRVAYPPLLSTTTRSSGTLRYEDCDSLQKPALTRTGTAPLLSQSQGCTAWNCWVKGDRFHFAGMRDG

SEQ ID NO: 1766 - protein, 290 aa, Microglena sp.
PCLCTKRYCRRPSKKNEKHRTFSLLPYKSGFTLSHIPISKMAFFYMVNECHFDSCKADVASKNHQGIWERFANLKKVETGSRKFGYRIVTDGFAVSILMNKPTCLTCSMPADAFSTRAHEYVTTDEGGIVSFLDNVVVSAVDPGVTDIVTVTGLNGGTRSYSSAKYYRKGLIFKSQRQTDVWNLETADIVGGIIPDRDSSSSEQIGAYARFYMGAAPILLAHRASRGYRNLRFRRYCKKQKLIVEIADFVAPRKKSAKVLVGFGDWKGLGATPISRRTCGPLQAIRFRAS

SEQ ID NO: 1767 - protein, 364 aa, Microglena sp.
ACSTARQYRSLSQILKKTCKKPRKEEGINIAEKYDGSLKTILPDMGIVVLGVDPGRSNIATVTYLADDKKKTWTLTRGAFYHKPGIKKQTRQKELRFADMIPMWESLRENGAALSTSRTDKISAYLSNYAKFSDEWWRLALRHGESRDNLQRYIGKRKVKDSFWAGIKRCMMKELPDMKVCVAYGSAITKLKPTGPGEVAVPIGAMFASCKRIFKEDVSVTDELKTTLMSWETGKEKERVYKIPSVCSADVKLRLGGERFGHTKSKTMPKVADCDHLGVRLYNKRKGSQEKHRRGGFATSLVDSQKSIERYPEVRGLRFSPETCIYLDRDRSSALTIARLHCMELMGLGRPLPFAHSSSVVVDE

SEQ ID NO: 1768 - protein, 679 aa, Microglena sp.
RMKKNTHPLLMGVVQDKGDDDINISVVKKTLNSLCMDVSRHQISSRIQSMVLLINHAVAEAYLFANFHITRCLDDGDFDVKQLPHLDRNFYYRCLLAVSTSNVRKDTLGQSFNDTMVAFDALRPAGYVKVDVRPWGQVIADVSIQMATMVCTSVWANVDRVVIKYLRLKHPSLKKHFKKIVKAVVQYPESKIDTIIPEGLVHAIHIKEVVSHLRALFPLPRGNQFNTRAHLTMRLFHHVLTELGEVGRVDPKDKKTRKSHPRLFSILPRKNGFTISYVPISSMTFMKLLSMGDSPLESVSGDGRYENHTMLWRKYFNVQGLETKRSRFDNRILSDGKGVSVQMKQKGKEEVVEEGENPGYPKDANIVECKDAVGALRVGVDPGMTDIVTVASSADRIESFSSARFSEVAGYNTSKRRTYKWNDETQDLVKSIPSPNTSNMSDLQDHVRAYLKALPILLQHRANKGYRSMRFFRYVGKQKTIEKVCDVIAPRAQTTVVGFGNWSNQGYGISRSCSGPIKEIRRCLSRRKNVLFKNVDEHNTSCKCHGCFQRLVNMKADRVVWRGVCKESPIDGSITVEKQKMVVKNVKVHKVLHCRDSVKSASSNVRCGATWNRDVNAAKNLLLLLTTWMDGRERPEAFCVPSPPPKTTVSIEASVSAKPTDPPGFVSSFPCYPLGQLKC

SEQ ID NO: 1769 - protein, 243 aa, Microglena sp.
YEQHVRPAGPCQSLSQSAPDPPTTQSNKGYRSMRFFRYVGKHKTIEKVCDVIAPRAQTTVVGFGNWSNQGYGISRSCSGPIKEIRRCLSHRKNVLFKNVDERNTSCKCHGCFQRLVNMKADRVVWRGVCKESPIDGSITVEKQKMVVKNIKVHKVLHCRDSVKSASSNVRCGATWNRDVNAAKNLLLLLTTWMDGRERPEAFCVPSPPPKTTVSIEASVIAKPTDPPGFVSSLPCYPLGQLKC

SEQ ID NO: 1770 - protein, 250 aa, Microglena sp.
VHRGRIRISAYLSNYAKFSDECGRLALRRRESRDNLQRYIGKRKVKDSFWAGIKRCMMKELPDMKVCVAYGSAITKLKPTGPGEVAVPTGAMFASCKRIFKEDVSVTDEFKTTLMSWETGKEKERVYKIPSVCSADVKLRLGGERFGHTKSKTMPKVADCDHLGVRLYNKRKGAQEKHRRGGFATSLVDSQKSIERYPEVRGLRFSPETCIYSDRDRSSALTIARLHCMELMGLGRPLPFSHSSSVVVDE

SEQ ID NO: 1771 - protein, 722 aa, Microglena sp.
PRMEHVCDVCIKSSVMYKLCKMATKPPTVAKLKELLKLAEVAYSSKDKKDDIVRLCEDNGLIARPPPEYKTVEKMCVVKCALKKAMSLDDEEFGKFREHVDQLVNVVSRMLRRSSLVLTFHVTRLMEGDLPIPNMYDMKDTYWKDWLRIGVDGVFPDEESRISYESVKDVIGKVLGSDDPDYINSYPIYFDQVLNYAGHTLSTVVSNNAWVPLVPRLTRLTKATLNALEAPKTIRVYDVMRVIQQEIQEMESWPESVQKYVREVRVRLKVPDGSRLYDNYGKDMDFPTMVRFNYWMQTRLEAIGARRIRLMPIFNVQRAHVRLDMKTLVNLFRHVFPKDPNIVELSKWKDVKDPDRFMLPLKPAFKKKKSCGPGEWEAYKLAQQKYDADVNDIKDTDEYRHAKGRYDTLVNARKTVAGSFFKKPPVKTGWVFDCSICTDGVSLSMQYSKTVQVRVSDLKKTSKRSRDDEGMSVSEQYDHKLKTTLPDMGIVVLGVDPGRSNIATVTYLADDKSKTWKLTRGAFYHKSGIKKQKKQQEKRFSDMIPRWESLRENGAALSTSRTDDISAYLKNYDTFSDEWWRMALLRRESRDNFQRYIGKRKAMDSFWAGIKRNMKLDHPDLRVRVAYGSAITTLKATGPGEVAVPTGSMFASCKRLFKEEVHVTDEFKTTLMSWETGAKKECVYKIPSVQITTEGQIRLGYELLGHTPLKEAPKSLIATSWR

SEQ ID NO: 1772 - protein, 861 aa, Microglena sp.
IFCYTPPYSPEFNAIELCFAKVKKDFRRLNYIPNDTKTHVSDMISLAFSNLTDKIIMGCFDHVWNTYVMFVKSSVMYKLCKMATKPPTVAKLKELLKLAEVAYSSKDKKDDIVRLCEDNGLIARPPPEYKTVEKMCVVKCALKKAMSLDDEEFGKFREHVDQLVNVVSRMLRRSSLVLTFHVTRLMEGDLPIPNMYDMKDTYWKDWLRIGVDGVFPDEESRISYEAVKDVIGKVLGSDDPDYINSYPIYFDQVLNYAGHTLSTVVSNNAWVPLVPRLTRLTKATLNALKSPKTIRVYDVMRVIQQEIQEMESWPESVQEYVREVRVRLKVPDGSRLYDDYGKDMDFPTMVRFNYWMQTRLESIGARRIRLMPIFNVQRAHVRLDMKTLVNLFRHVFPKDPNIVELSKWKDVKDPDRFMLPLKPAVKKKKSCGPGEWEAYKLAQQKYDADVNDIKDTDEYRHAKGRYDTLVNARKTVAGSFFKKPPVKTGWVFDCSICTDGVALSMQYSKTVQVRVSDLKKTSKRSRDDEGMSVSEQYDHKLKTTLPDMGIVVLGVDPGRSNIATVTYLADDKSKTWKLTRGAFYHKSGIKKQKKQQEKRFSDMIPRWESLRENGAALSTSRTDDISAYLKNYDTFSDEWWRMALLRRESRDNFQRYIGKRKAMDSFWAGIKRNMKLDHPDLRVRVAYGSAITTLKATGPGEVAVPTGSMFASCNRLFKEEVHVTDEFKTTLMSWETGAKKECVYKIPSVQITTEGQIRLGYELLGHTPLKETPKVSYRDQLAVRVYCTRKQIQEKHRRGGLAPSLVDNNSIKRYPEVRGLRFSPETSTYSDRDRSSALTIARLHCMELLGQGRPLPFCRDA

SEQ ID NO: 1773 - protein, 551 aa, Microglena sp.
GARGNCEKEETIRGCHRSLRWRSKPVQHASKKYLTNFNNHYRVHLSTWIKKFVYSKENRILAKEFKDEHGIDETVFHRYLLYDIHSWGVKEDLIAIHSLLPERTKMLLKIQHSIIGRDEINRQWLKSVSNSAKMIRYNVFINRYLEATEDEGYAKLVNIAPIPTVKHSFITIDTYGLLGVLKDVGLVESLEKTLTNKEHWESVFDVENIRSTGKGVFTCTIDTDGVMACTHFLRAEKKKISIKDDGTAIKKQTKTLREFSESDPNVVVVANDPGRCNIAFLTWKKNKVEEKDKGGRKRKRHCEFGSKRLTRERYYVESGVFKSRGPTKKWLSNIQDCLDDLKDNSPKRTSLESFDAYVTVMVNHWDSRWGEMSKSRWGAQRLRLYGGKKRVLARFFNEVQADVGERKTIVIAYGSSKFAPGGKGELSVPTTSAFNAFSDRFKGRVAVIDEFRTTKIWHKDSTTVLQSVQSEKEGRTVRGLLWCSSTMENSKLFVNRDLNAAINIHNCFTMYPTRPGILARPKKYCKLEVVVGRTIDYKLTGSLQNAVSSEV

SEQ ID NO: 1774 - protein, 636 aa, Microglena sp.
GNVGAILYHQKKKNTHPLLMGVVQDKGDDDINISVVKKTLNSLCMDVSRHQISSRIQSMVLLINHAVAEAYLFANFHITRCLDDGDFDVKQLTHLDQNFYYRCLLAVSTSNVRKDTLGQSFNDTMVAFDALRPAGYVKVDVRPWGQVIADVSIQMATMACNSVWANVDRVVIKYLRLKHPSLKKHFKKIVKAVVQYPESKIDTIIPEGLVHAIHIKEVVGHLRALFPLPRGKQFNTRAHLTMRLFHHVLTELGEVGRVDPKDKKTKKSHPRLFSILPRKNGFTISYVPISSMTFMKLLSMGDSPLESVSGDGRYENHTMLWRKYFNVQGLETKRSRFDNRILSDGKGVSVQMKQKGKEEVVEEGENAGYPKDANIVECNDAVGALRVGVDPGMTDIVTVASSAGRIESFSSARFSEVAGYNTSKRRTYKWNDETQDLVKSIPSPNTSNMVDLQDHVRAYLKALLILLQHRANKGYRSMRFFRYVGKQKTIEKVCDVIAPRAQTTVVGFGNWSNQGYGISRSCSGPIKEIRRCLSRRKNVLFKNVDERNTSCKCHGCFQRLVNMKADSVVWRGVCKESPIDGSITVEKQKMVVKNVKVHKVLHCRDSVKSASSNVRCGATWNRDVNAAKNLLLLLTT

SEQ ID NO: 1775 - protein, 203 aa, Microglena sp.
GGRKRKRHCEFGSKRLTRERYYVESGVFKSRGPTKKWLSNIQDCLDDLKDNSPKRTSLVSFDAYVTVMVNHWDSRWGEMSKSRWGAQRLRLYGGKKRVLARFFNEVQADVGERKTIVVAYGSAEFAPGGKGELSVPTTSAFKAFSDRFKGRVAVIDEFRTTKIWHKDSTTVLQSVQSEKEGRTVRGLLWCSSTMENSKLFVNR

SEQ ID NO: 1776 - protein, 783 aa, Microglena sp.
ECSREPVCRSRLHQNVFGVQFVMENGIGESSSLVHEADQHDDVAELVDYEGEEDEECAPGRAICVVKMKLSTFIPHDWLRKKIDTLVLDMNKLLGEGYIFANFHIARLFENGIAVPPVNRNFFYRCLIAVSTNKCKGSTLGEDFESSRLLFDLLREPGQSKVDIRGNVKNQIIADLSILMATMASNHLWTNLERRITTYLKWKYPQIAKRLRSDIVAAVIKCPTFKMSPHTTKLPTKLPTARLRSAKSAVALAKKRVGRKEPEGSPLRVRLTKLQERLEKLSEAWLSSKNLRVDADNAKRFFARDMAFCLSGVLPLPSGNTFASRAHMTLPLYHKILSETIEEKRKTKNEKHRTFSLLPYKSGFTLSHIPISKMAFFYMVNECHFDSCKADVASKNHQGIWERFANLKKVETVSRKFGYRFAVSILMNKPTCLTCSMPADAFSTRAHEYVTTDEGGIVSFLDNVVVAAVDLGVTDIVTVTGLNGGTRSYSSAQYYRKGLIFKSQRQTDVWNLETADIVGGIIPDRDSLSSEHIGAYARFYMGAAPILLAHRASRGYRNLRFRRYCKKQKLIVEIADFVAPREKSAKVLVGFGDWKGLGATPISRRTCGPLQAIRFELRSRENFIMEDIDEFRTSQRCSCCENHLCNMVALTHRKKQDGTGWECTEGRKRIHKILHCKSSQSGAPRQQSGGMLHCGKTWDRDVNASRNILMLTLHQVFGRERPLAFRRDAPRRSSTPPPPPPDTDMGTQTVERFTKEATRNIFENLFNLLHPPTLPKSNDLQSG

SEQ ID NO: 1777 - protein, 435 aa, Microglena sp.
KTKRSHPRLFSILPRKNGFTISYVPISSMTFMKLLSMGDSPLESVSGDGRYENHTMLWRKYFNVQGLETKRSRFDNRILSDGKGVSVQMKQKGKEEVVEEGENAGYPMDANIVECKDAVGALRVGVDPGMTDIVTVASSAGRIESFSSARFSEVAGYNTSKRRTYKWNDETQDLVKSIPSPNTSNMVDLQDHVIAYLKALPILLQHRANKGYQSMRFFRYVGKQKTIEKVCDVIAPRAQTTVVGFGNWSNQGYGISRSCSGPIKEIRRCLSRRKNVLFKNVDERNTSCKCHGCFQRLVNMKADSVVWRGVCKESPIDGSITVEKQKMVVKNVKVHKVLHCRDSVKSASSNVRCGATWNRDVNAAKNLLLLLTTWMDGRERLEAFCVPSPPPKTTVSIEASVSAKPTDPPGFVSSLPCYPLGQNGRSCFPTDFLFY

SEQ ID NO: 1778 - protein, 790 aa, Microglena sp.
ECSREPVCRSRLHQNVFGVQFVMENGIGESSSLVHEADQHDDVAELVDYEGEEDEECAPGRAICVVKMKLSTFIPHDWLRKKIDTLVLDMNKLLGEGYIFANFHIARLFENGITVPPVNRNFFYRCLIAVSTNKCKGSTLGEDFESSRLLFDLLREPGQSKVDIRGNVKNQIIADLSILMATMASNHLWTNLERRITTYLKWKYLQIAKRLRSDIVAAVIKCPTKNLDVIFKMSPHTTKLPTARLRSAKSAVALAKKRVGRKEPEGSPLRIRLTKLQERLEKLSEAWLSSKNLRVDADNAKRFFARDVALCLRGVLPLPSGNTFASRAHMTLPLYHKILSETIEEKRKTKNEKHRTFSLLPYKSGFTLSHIPISKMAFFYMVNECHFDSCKADVASKNHQGIWERFANLKKVETVSRKFGYRIVTDGFAVSILMNKPTCLTCSMPADAFSTRAHEYVTTYEGGIVSFLDNVVVAAVDPGVTDIVTVTGLNGGTRSYSLAQYYRKGLIFKSQRQTDVWNLETADIVGGIIPDRDSSSSEQIGAYARFYMGAAPILLAHRASRGYRNLRFRRYCKKQKLIVEIADFVAPREKSAKVLVEFGDWKGLGATPISRRTCGPLQAIRFELRSRENVIMEDIDEFRTSQRCSCCENHLCNMVALTHRKKQDGTGWECTEGRKRIHKILHCKSSQSGAPRQQCGGMLHCGKTWDRDVNASRNILMLTFHQVFGRERPLAFRRDAPRRSSTTPPPPPDTDMGTQTVERFTKEATRNIFENLFNLLHPPTLPKSNDLQSG

SEQ ID NO: 1779 - protein, 395 aa, Microglena sp.
TQPRLRNRCWQSLRGAAGSCTTRRCSTVGRREHSQVCLPNSRQVCDEQGEGEGNMPNPYFKNRQWLLQCPKSVRQSAIKAALANIKACFSNLKAGNIKQFSAPFRRKKTELERGWAIEMDQKNVSKDGDKLVIFKDILGNMRYFGSKQLHKLMPEENPTHDPKVQKSRFGEYFLVLSVAARDRRAERKPVHPDKVATASIDPGVRKTMVTYSPENEESFMLGQGQASDLVKLLLVHDKLQSRLDTEKTLRSKERMKIKMQMIRIRKRIFYLKKEFRDQTTNFLAARYDVLLVPQLETAKMTISAERELTTKVARQMLTLSHSVLFNRLKEKCAEYGTVFLQVLEHYTSQTCPMCGFLNKCGETYTCMNCQFTCDRDIVGAADIFLKAVRTENPCS

SEQ ID NO: 1780 - protein, 793 aa, Microglena sp.
ECSREPVCRSRLHQNVFGVQFVMENGIGESSSLVHEADQHDDVAELVDYEGEEDEECAPVRAICVVKMKLSTFIPHDWLRKKIDTLVLDMNKLLGEGYIFANFHIARLFENGIAVPPVNRNFFYRCLIAVSTNKCKGSTLGEDFESSRLLFDLLREPGQSKVDSWNVKNQIIADLSILMATMASNHLWTNLERRITTYLKWKYPQIAKRLRSDIVAAVIKCPTKNLDVIFKMSPHTTKLPTKLPTARLRSAKSAVALAKKRVGRKEPEGSPLRVRLTKLQERLEKLSEAWLSSKNLRVDADNAKRFFARDVAFCLRGVLPLPSGNTFASRAHMTLPLHHKILSETIEEKRKTKNEKHRTFSLLPYKSGFTLSHIPISKMAFFYMVNECHFDSCKADVASKNHQGIWERFANLKKVETVSRKFGYRIVTDGFAVSILMNKPTCLTCSMPADAFSTRAHEYVTTDEGGIVSFLDNLVVAAVDPGVTDIVTVTGLNGGTRSYSSAQYYRKGLIFKSQRQTDVWNLETADIVGGIIPDRDSSSSEQIGAYARFYMGVAPILLAHRASRGYRNLRFRRYCKKQKLIVEIADFVAPREKSAKVLVGFGDWKGLGATPISRRTCGPLQAIRFKLRSRENVIMEDIDEFRTSQRCSCCENHLCNMVALTHRKKQDGTGWECTEGRKRIHKILHCKSSQSGAPRQQSGGMLHCGKTWDRDVNASMNILMLTLHQVFGRERPLAFRRDAPRSSSTTPPTPPDTDMGTQTVERFTKEATRNIFENLFNLLHPPTLPKSNDLQSG

SEQ ID NO: 1781 - protein, 464 aa, Microglena sp.
CNVMTLPLYHKILSETIEEKRKTKNEKHRTFSLLPYKSGFTLSHIPISKMAFFYMVNECHFDSCKADVASKNHQGIWERFANLKKVETVSRKFGYRIVTDGFAVSILMNKPTCLTCSMPADAFSTRAHEYVTTDEGGIVSFLDNVVVAAVDPGVTDIVTVTGLNGGTRSYSLAQYYRKGLIFKSQRQTDVWNLETADIVGGIIPDRDSSSSEQIGAYARFYMGAAPILLAHRASRGYRNLRFRRYCKKQKLIVEIADFVAPREKSAKVLVGFGDWKGLGATPISRRTCGPLQAIRFELRSRENVIMEDIDEFRTSQRCSCCENHLCNMVALTHRKKQDGTGWECTEGRKRIHKILHCKSSQSGAPRQQSGGMLHCGKTWDRDVNASRNILMLTLHQVFGRERPLAFRRDAPRRSSTTPPPPLDTDMGTQTVERFTKEATRNIFENLFNLLHPPTLPKSNDLQSG

SEQ ID NO: 1782 - protein, 600 aa, Microglena sp.
RQAVATPGSELLLQVPPCGIDLQCSKGTLGQSFNDTMVAFDALRPAGYVKVDVRPWGQVIADVSIQMATMACNSVWANVDRVVIKYLRLKHPSLKKHFKKIVKAVVQYPESKIDTIIPEGLVHAIHIKEVVSHLSALFPLPRGKQFNTRAHLTMRLFHHVLTELGEVGRVDPTDQKTKKSNPRLFSILPRKNGFTILYVPISSMTFMKLLSMGDSPLESVSGDGRYENHTMLWRKYFNVQGLETKRSRFDNRILSDGKGVSVQMKQKGKEEVVEEGENAGYPKDANIVECKDAVGALRVGVDPGMTDIVTVASSAGRIESFSSDRFSEVAGYNTSKRRTYKWNDETQDLVKSIPSPNTSNMVDLQDHVRAYLKALPILLQHRANKGYRFMRFFRYVGKQKTIEKVCDVIAPRAQTTVVGFGNWSNQGYGISRSCSGPIKEIRRCLSRRKNFLFKNVDERNTSCKCHGCFQRLVNMKADSVVWRGVCKEPPVDGSITVEKQKMVVKNVKVHKVLHCRDSVKSASSNVRCGATWNRDVNAAKNLLLLLTTWMDGRERPEAFCVPSPPPKTTVSIEASVSAKPTDPPGFVSSLPCYPLGQLKC

SEQ ID NO: 1783 - protein, 410 aa, Microglena sp.
DNYGKDMDFPTMVRFNYWIHTRLEDMDARRIRLMPIFNVQRVHVRLDLKTLVNLFRHMFPNDQNIVELSKWEHVKNPDSFMLPQRPAQKKKKSCGPGEWEAYKSVLKQYDDDVKDIKATDEYRHAKGLYDTLVNARKTVAGSFFRKPPVKNGWVFDCSICTDGVSLSMQYSKTVHVLVSDLKKTCKKPRKEEGIKIAEKYDGSLKTILPDMGIVVLGVDPGQSNIATVTYLADDKNKTWTLTRGAFYHKSGIKKQTRQKELRFADMIPMWESLRENGAALSTSRTDKISAYLSNYAKFSDEWWRLALRRRESRDNLQRDIGKRKVQDSFWAGIKRCMMKELPDMKVCVAYGSAITKLKPIGPGEVAVPTGAMFASCKIIFKDDVSVTDEFGGRDNIRLHHKVCRTRSGFI

SEQ ID NO: 1784 - protein, 234 aa, Microglena sp.
KNYATFSDEWWRMALLRRESRDNFQRYIGKRKAMDSFWAGIKRNMKLDHPDLRVRVAYGSAITTLKATGPGEVAVPTGSMFASCKRLFKEEVHVTDEFKTTLMSWETGAKKECVYKIPSVQITTEGQIRLGYELLGHTALKETPKVSYRDQLAVRVYCTRKQIQEKHRRGGLAPSLVDNNSIKRYPEVRGLRFSPETSTYSDWDRSSALTIARLHCMELMGQGRPLPFCRDACC

SEQ ID NO: 1785 - protein, 302 aa, Microglena sp.
RIWQTIKNKTWTLTRGAFYHKSGIKKQTRQKELRFADMIPMWESLRENGAALSTSRTDKISAYLSNYAKFSEEWWRLALRRRESRDNLQRYIGKRKVKDSFWAGIKRCMMKELPDMKVCVAYGSAITKLKPNGPGEVAVPTGAMFASCKRIFKEDVSVTDEFKTTLMSWETGKEKERVYKIPSVCSADVKLRLGGERFGHTKSKTMPKVADCDHLGVRLYNKRKGAQEKHRRGGFASSLVDSQKSIERYPEVRGLRFSPETCIYSDRDRSSALTIARLHCMELMGLGRPLPFAHSSSVVVDE

SEQ ID NO: 1786 - protein, 332 aa, Microglena sp.
ASQNSMTINSKRHCPIWVSSFWVWILVGATLLQSRIWQTTKARHGSLHVELFTTSLVSRNRKNSKKNVFSDMIPRWESLRENGAALSTSRTDDISAYLKNYDTFSDEWWRMALLRRESRDNFQRYIGKRKAMDSFWAGIKRNMKLDHPDLRVRVAYGSAITTLKATGPGEVAVPTGSMFASCKRLFKEEVHVTDEFKTTLMSWETGAKKECVYKIPSVQITTEGQIRLGYELLGHTPLKETPKVSYRDQLAVRVYCTRKKIQEKHRRGGLAPSLVDNNSIKRYPEVRGLRFSPETSTYSDRDRSSALTIARLHCMELLGQGRPLPFCRDACC

SEQ ID NO: 1787 - protein, 366 aa, Microglena sp.
SAPDNAIVHHVLTELGEVGRVDPKDKKTKKKSPRLFSILPRKNGFTILYVPISSMTFMKLLSMGDSPLESVSGDGRYENHTMLWQKYFNVQGLETKRSRFDNRILSDGKGVSVQMKQKGKEEVVEEGENAGYPKDANIVECKDAVGALRVGVDPGMTDIVTVASSAGRIESFSSARFSEVAGYNTSKRRTYKWNDETQDLVKSIPSPNTSNMVDLQDHVRAYLKALPILLQHRANKGYRSMRFFRYVGKQKTIEKVCDVIAPRAQTTVVGFGNWSNQGYGISRSCSGPIKEIRRCLSRRKNVLFKNVDERNTSCKCHGCFQRLVNMKADSVVWRGVCKESPIDGSITVEKQKMVVENVKVHKVLHC

SEQ ID NO: 1788 - protein, 289 aa, Microglena sp.
HLLQVASSLSARLALAKLLGTNTSKRRTYKWNDETQDLVESIPSPNTSNMSDLQDHVRAYLKALPILLQHRANKGYRSMRFFRYVGKQKTIEKVCDVIAPRAQTTVVGFGNWSNQGYGISRSCSGPIKEIRRCLSRRKNVLFKNVDERNTSCKCHGCFQRLVNMKADSVVWRGICKESPIDGSITVEKQKMVVKNVKVHKVLHCRDSVKSASSNVRCGATWNRDVNAAKNLLLLLTTWMDGRERPEAFCVPSPPPKTTVSIEASVSAKLTDPPGFVSSLPCYILGQLKC

SEQ ID NO: 1789 - protein, 240 aa, Microglena sp.
YLGLLEKLRYVFPTSGGGMALRRRESRDNFQRYIGKRKAMDSFWAGIKRNMKLDHPDLRVRVAYGSAITKLKATGPGEVAVPTGSMFASCKRLFKEEVHVTDEFKTTLMSWETGAKKECVYKIPSVQITAEGQIRLGYELLGHTPLKETPKVSYRDQLAVKVYCTRKQIQEKHRRGGLAPSLVDNNSIKRYPEVRGLRFSPETSTYSDRDRSSALTIARLHCMELLGQGRPLPFCRDACC

SEQ ID NO: 1790 - protein, 686 aa, Microglena sp.
METIVNKEPPDKRTRPDRASKIKDRRNGEENVVKCTLSRIIADKDNKDVIIKVIKERVDSVSKRTYLAGVAVNRILKEVFEGVPDAQLHTVSVPSVDQNFIRQLMVGSRQANMETRDATVERFFHNNYWFREKIEGREVIVKKKKQYVGAIARYDGDQNLYSHASKKYLTNFNNHYRVHLSTWIKKFVYSKENRILAKEFKDEHGIDETVFQRYLLYDIHSWGVKEDLIAIHSLLPERTKMLLKIQHSIIGRDEINRQWLKSVSNSAKMIRYNVFINRYLEATEDEGYAKLVNIAPIPTVKHAFITIDTDGLLGVLKDVGLVESLEKTLTNKEHWESVFDVENIRSTGKGVFTCTIDTDGVMACTHFLRAEKKKISIKDDGTAIKKQTNTLREFSESDPNVVVVANDPGRCNIAFLNWKKNKVEEKDKGGRKRKRHCEFGSKRLTRERYYVESGVFKSRGPTKKWLSNIQDCLDDLKDNSPKRTSLKSFDAYVTVIVNHWDSRWGEMSKSRWGAQRLRLYGGKKRVLARFFNEVQADVGERKTIVIAYGSSKFAPGGKGELSVPTTSAFNAFSDRFKGRVAVIDEFRTTKIWHKDSTTVLQSVQSEKRRAHGSRLAIVQFTMENSKLFVNRDLNAAINIHNCFTMYPTRPGILARPKKYCKLEVVVGRTIDYKLTGSLQNAVSSEV

SEQ ID NO: 1791 - protein, 226 aa, Microglena sp.
SSSLSVKLTFGTSRRLISSVVSFRIETLRVLNRLVRTPDSTWVPPQSFLPIVLRGYRFRRYCKKQKLIVEIADFVAPREKSAKVLVGFGDWKDLQAIRFELRSRENVIMEDIDEFRTSQRCSCCENHLCNMVALTHRKKQDGTGWECTEGRKRIHKILHCKSSQSGAPRQQSGGRLHCGKTWDRDVNASRNILMLTLHQVFGRERPLAFRRDAPRSSSTPPPPPPP

SEQ ID NO: 1792 - protein, 285 aa, Microglena sp.
KNKKSHPRLFSILPRKNGFTISYVPISSMTFMKLLSMGDSPLESVSGHGCYENHTMLWRKYFNVQGLETKRSRFDNRILSDGKGVSVQMKQKGKEEVVEEGENAGYPKDANIVECKDAVGALRVGVDPGMTDIVTVASSAGRIESFSFSEVAGYNTSKRRTYKWNDETQDLVKSIPSPNTSNMVDLQDHVRAYLKALPILLQHRANKGYRSMRFFRYVGKQKTIEKVCDVIAPRAQTTVVGFGNWSNQGYGISRSCSGPIKEIRRCLSRRKNVLFKKRRRTQHFL

SEQ ID NO: 1793 - protein, 686 aa, Microglena sp.
METIVNKEPPDKRTRPDRAAKIKDRKNGEENVVKCTLSRIIADKDNKDVIIKVIKERVDSVSKRTYLAGVAVNRILKEVFEGVPDAQLHTVSVPSVDQNFIRQLMVGSRQAHMETSDATVERFFHNNYWFREKIEGREVIVKKKKQYVGAIARYNGDRNLYSHASKKYLINFNNHYRVHLSTWIKEFVYSKENRILAKEIKDEHGIDETVFHRYLLYDIHSWGVKEDLIAIHSLLPERTKMLLKIQHSILGRDEINRQWLKSVSNSAKMIRYNVFINRYLEATEDEGYAKLVNIAPIPTVKHAFITIDTDGLLGVLKDVGLIESLEKTLTNKEHWDSVFDVENIRSTGKGVFTCTIDTDGVMACTHFLRAEKKKISIKDDGTAIKKQTKTLREFSESDPNVVVVANDPGRCNIAFLTWKKNKVEEKDKGGRKRKRHCEFGSKRLTRERYYVESGVFKSRGPTKKWLSNIQDCLDDLKDNSPKRTSLVSYDAYVTVMVNHWDSRWGEMSKSRWGAQRLRLYGGKKRVLARFFNEVQEDVGERKTIVVAYGSAKFAPGGKGELSVPTTSAFKAFSDRFKGRVAVIDEFRTTKIWHKDSTTVLQSVQSEKEGRTVRGLLWCSSTMENSKLFVNRDLNAAINIHNCFTMYRIRPGILARPKKYCKLEVVVGRKIDYKLTGSLQNAVSSEV

SEQ ID NO: 1794 - protein, 666 aa, Microglena sp.
GSTLGEDFESSRLLFDLLREPGQSKVDIRGSVKNQIIADLSILMATMASNHLWTNLERRITTYLKWKYPQIAKRLRSDIVAALIKCPTKNLDVIFKMSPHTTKLPTKLPTSRLRSAKSAVALAKKRVGRKEPEGSPLRVRLTKLQERLEKLSEAWLSSKNLRVDADNAKRFFAREVAFCLRGVLPLPSGNTFASRAHMTLPLYHKILSETIEEKRKTKNEKHRTFSLLPYKSGFTLSHIPISKMALFYMVNECHFDSCKADVASKNHQGIWERFANLKKVETVSRKFGYRIVTDGFAVSILMNKPTCLTCSMPADAFSTRAHEYVTTDEGGIVSFLDNVVVAAVDPGVTDIVTVTGLNGGTRSYSSAKYYRKGLIFKSQRQTDVWNLETADIVGGIIPDRDSSSSEQIGAYARFYMGAAPILLAHRASRGYRNLRFRRYCKKQKLIVEIADFVAPREKSAKVLVGFGDWKGLGATPISRRTCGPLQAIRFELRSRENVIMEDIDEFRTSQRCSCCENHLCNMVALTHSKKQDGTSWECTEVRKRIHKILHCKSSQSGAPRQQSGGMLHCGKTWDRDVNASRNILMLTLHQVFGRERPLAFRRDAPRSSSTTPPHPLILIWGHRRLNGLPKRLLGISSRTSSTFCTPQRCPKATICSLDDYKVSHFI

SEQ ID NO: 1795 - protein, 237 aa, Microglena sp.
ASQNSMTINSKRHCPIWVSSFWVWILVGATSLQSRIWQTTKARHGSLHAELFTTSLVSRNRKNSKKKRFSDMIPRWESLRENGAALSTSRTDDISAYLKNYATFSDEWWRMALLRRESIDNFQRYIGKRKAMDSFWAGIKRNMKLDHPDLRVRVAYGSAITTLKATGPGEVAVPTGSMFASCKRLFKEEVHVTDEFKTTLMSWETGAKKECVYKIPSVQITTEGQIRLGYELLGHTH

SEQ ID NO: 1796 - protein, 397 aa, Microglena sp.
TPEKTVAGSFFRKPPVKNGWVFDCSICTDGVSLSMQYSKTVQVLVSDLKKTCKKPRKEEGIKIAEKYDGSLKTILPDMGIVVLGVDPGRSNIATVTYLADDKNKTWKLTRGAFYHKSGIKKQTRQKELRFADMIPMWESLRENGAALSTSRTDKISAYLSNYAKFSDEWWRLALRRRESRDNLQRYIGKRKVKDSFWAGIKRCMMKELPDMKVCVAYGSAITKLKPTGPGEVAVPTGAMFASCKRIFKEDVSVTDEFKTTLMSWETGKEKERVYKIPSVCSADVKLRLGGERFGHTKSKTMPKVADCDHLGVRLYNKRKGAQEKHRRGGFATSLVDSQKSIERYPEVRGLRFSPETCIYSDRDRSSALTIARLHCMELMGLGRPLPFAHSSSVVVDE

SEQ ID NO: 1797 - protein, 314 aa, Microglena sp.
TRVFTDIVTVTGLNGGTRSYSSVQYYRKGLIFKSQRQTDVWNLETADIVGGIIPDRDSSSSEQIGAYARFYMGAAPILLAHRASRGYRNLRFRRYCKKQKLIVEIADFVAPREKSAKVLVGFGDWKGLGATPISRRTCGPLQAIRFELRSRENVIMEDIDEFRTSQRCSCCENHLCNMVALTHRKKQDGTGWECTEGRKRIHKILHCKSSQSGAPRQQSGGMLHCGKTWDRDVNASRNILMLTLHQVFGRERPLAFRRDAPRSSSTTPPPPPDTDMGTQTVERFTKEATRNIFENLFNLLHPPTLPKSNDLQSG

SEQ ID NO: 1798 - protein, 505 aa, Microglena sp.
VGYRQNHPRESRACEPHQRRCQTPERSLAAAKGGAVQHSSAPDNETVSSRAYRVGSGSKRENNKKTPPSVQYPSTQERLHHFLRPYISSMTLMKLLSMGDSPLESFRGDGRHENHSMLWRKYFNVQGLETKGSRFDNRILSDGKGVSVQMKHQASEDVAVDNAGYPKDAILENCQDASLRVGVDPGMTDIVTVASSDGRVESVSSARFSEAAGYNTSNRRTNKWNVDTQDLVKSIPSPTTSSMHDMQDHVRGYLSALPTLLQHRASRGYRSMRFFRYVGKQKTIEKVCDLIAPKAQKKTIEEKVCDVIAPRAQTTVVGFGNWSNQGYGISRSCSGPIKEIRRCLSRRKNVLFKNVDERNTSCTCHGCFQKLVNMKADSVVWRRVQNEPPSLINGAPTTTTTIEKQKTVVKNVKVHKVLHCRNSVKSASSKVRCGATWNRDVNAAKNLLLLLTTWMDGKERPATFCVPSSSPTPKTTVSGEANVGAQPTDPLGSVSSLQLLSSGPA

SEQ ID NO: 1799 - protein, 214 aa, Microglena sp.
GTQVQAHISKSFDAYVTVMVNHWDSRWGEMSKSRWGAQRLRLYGGKKRVLARFFNEVQADVGERKTIVIAYGLLSLPLVARVNFLSLQRARSMRLATVFKGLVAVIDEFRTTKIWHKDSTTVLQSVQSEKRRAHGSRLAMVQFHHGEQQVVVNRDLNAANYIHTIALQCTTTRPGNSCEAKEIIAKLEVVVGRTIDYKLTKVLYRTQCRAKCRR

SEQ ID NO: 1800 - protein, 254 aa, Microglena sp.
RSLFEHAVQQDSTGPCLRFEEDCKKPRKEEGIKIAEKYDGSLKTILPDMGIVVLGVDPGRSNIATVTYLADDKNKTWTLTRGAFYHKSGIKKQTRQKELRFADMIPMWESLRENGAALSTSRTDKISAYLSNYAKFSDEWWRLALRRRESRDNLQRYIGKRKVKDSFWAGIKRCMMKELPDMKVCVAYGSAITKLKPTGPGEVAVPTGAMFASCKRIFKEDVSVTDEFKTTLMSWETGKEKERVYKIQVFVQQT

SEQ ID NO: 1801 - protein, 793 aa, Microglena sp.
KMATKPPTVAKLKELLKLAEVPYSSKSNKDDLVRLCEDNGLIARPPPEYKTVEKMCVVKCALKKAMSLDDEEFGKFREHVDQLVNVVSRMLRRSSLVLTFHITSLLEKGLDIPDLYNMKDTYWKDWLRIGVDGIFPDEESKISYEAVKDSIGDVIGNDDADYIKSYPIYFDQVLNYAGHTLSTVVSNNAWVPLIPRLTRLTSTTLNKLNAPKTLDTSKIIRGYDVMQAIQQEVQNMEGWPESVQEYVNEVREMLSVPDGSRVYDNYGKDMDFPTMVRFNYWIQTRLEDMDARRIRLMPIFNVQRVHVRLDLKTLVNLFRHMFPNDQNIVELSKWEHVKNPDSFMLPQRPAQKKKKSCCPGEWDAYKSVLKQYDDDVKDINATDEYRHAKGLYDTLVNARKTVAGSFFRKPPVKNGWVFDCSICTDGVSLSMQYSKTVQVLVSDLKKTCKKPRKEEGIKIAEKYDGSLKTILPDMGIVVLGVDPGRSNIATVTYLADDKNKTWTLTRGAFYHKSGIKKQTRQKELRFADMIPMWESLRENGAALSTSRTDKISAYLSNYAKFSDEWWRLALRRRESRDNLQRYIGKRKVKDSFWAGIKRCMMKELPDMKVCVAYGSAITKLKPTGPGEIAVPTGAMFASCKRIFKEDVSVTDEFKTTLMSWETGKEKERVYKIPSVCSADVKLRLGGERFGHTKSKTMPKVADCDHLGVRLYNKRKGAQEKHRRGGFATSLVDSQKSIERYPEVRGLRFSPETCIYSDRDRSSALTIARLHCMELMGLGRPLPFAHSSSVVVDE

SEQ ID NO: 1802 - protein, 802 aa, Microglena sp.
ECSREPVCRSRLHQNVFGVQFVMENGIGESSSLVHEADQHDDVAELVDYEGEEDGECAPGRAICVVKMKLSTFIPHDWLRNKIDTLVLDMNKLLGEGYIFANFHIARLFENGIAVPPVNRNFFYRCLIAVSTNKCKGSTLGEDFESSRLLFDSLREPGQSKVDIRGRVKNQIIADLSILMATMASNHLWTNLERRITTYLKWKYPQIAKRLRSDIVAALIKCPTKNLDVIFKMSPHTTKLPTKLPTSRLRSAKSAVALAKKRVGRKEPEGSPLRVRLTKLQERLEKLSEAWLSSKNLRVDADNAKRLFAREVAFCLRGVLPLPSGNTFASRAHMTLPLYHKILSETIEEKRKTKNEKHRTFSLLPYKSGFTLSHIPISKMAFFYMVNECHFDSCKADVASKNHQGIWERFANLKKVETVSRKFGYRIVTDGFAVSILMNKPTCLTCSMPADAFSTRAHEYVTTDEGGIVSFLDNVVVAAVDPGVTDIVTVTGLNGGTRSYSSAKYYRKGLIFKSQRQTDVWNLETADIVGGIIPDRDSSSSEQIGAYARFYMGAAPILLAHRASRGYRNLRFRRYCKKQKLIVEIADFVAPRKKSAKVLVGFGDWKGLGATPISRRTCGPLQAIRFELRSRENVIMEDIDEFRTSQRCSCCENHLCNMVALTHRKKQDGTGWECTEGRKRIHKILHCKSSQSGAPRQQSGGMLHCGKTWDRDVNASRNILMLTLHQVFGRERPLAFRRDAPRSSSTTPPPPLILIWGHRRLNGLPKRLLGISSRTSSTFCTPQRCPKATICSLDDYKVSHFI

SEQ ID NO: 1803 - protein, 585 aa, Microglena sp.
MPRRRWDTSKIIRGYDVMQAIQQEVQNMEGWPESVQEYVNEVREMLSVPDGSRVYDNYGKDMDFPTMIRFNYWIQTRLEDMDARRIRLMPIFNVQRVHVRLDLKTLVNLFRHMFPNDQNIVELSKWEHVKNPDSFMLPQRPAQKKKKSCCPGEWDAYKSVLKQYDDDVKDIKATDEYRHAKGLYDTLVNARKTVAGSFFRKPPVKNGWVFDCSICTDGVSLSMQYSKTVQVLVSDLKKTRKKPRKEEGIKIAEKYDGSLKTILPDMGIVVLGVDPGRSNIATVTYLADNKNKTWKLTRGAFYHKSGIKKQTRQKELRFADMIPMWESLRENGAALSTSRTDKISAYLSNYAKFSDEWWRLALRRRESRDNLQRYIGKRKVKDSFWAGIKRCMMKELPDMKVCVSYGSAITKLKPTGPGEVAVPTGAMFASCKRIFKEDVSVTDEFKTTLMSWETGKEKERVYKIPSVCSADVKLRLGGERFGHTKSKTMPKVADCDHLGVRLYNKRKGAQEKHRRGGFATSLVDSQKSIERYPEVRGLRFSPETSTYSDRDRSSALTIARLHCMEFMGLGRPLPFAHSSSVVVDE

SEQ ID NO: 1804 - protein, 235 aa, Microglena sp.
ERVFKSRGPTKKWLSNIQDCLDDLKDNSPKRTSLESFDAYVTVMVNHWDSRWGEMSKSRWGAQRLRLYGGKKRVLARFFNEVQADVGERKTIVIAYGSSKFAPGGKGELSVPTTSAFNAFSDRFKGRVAVIDEFRTTKIWHKDSTTVLQSVQSEKEGRTVRGLLWCSSTMENSKLFVNRDLNAAINIHNCFTMYPTRPGILARPKKYCKLEVVVGRTIDYKLTGSLQNAKCRAKV

SEQ ID NO: 1805 - protein, 290 aa, Microglena sp.
FMQGRRCFQKPSRIWERFANLKKVETVSRKFGYRIVTDGFAVSILMNKPTCLTCSMPADAFSTRAHEYVTTDEGGIVSFLDNVVVAAVDPGVTDIVTVTGLNGGTRSYSSAQYYRKGLIFKSQRQTDVWNLETADIVGGIIPDRDSSSSEQIGAYARFYMGAAPILLAHRASRWYRNLRFRRYCKKQKLIVEIADFVAPREKSAKVLVGFGDWKGLGATPISRRTCGPLQAIRFELRSRENVIMEDIDEFRTSQRCSCCENHLCNMVALTHRKKARRYRLGMYRRTQADS

SEQ ID NO: 1806 - protein, 302 aa, Microglena sp.
RIWQTIKNKTWKLTRGAFYHKSGIKKQTRQKELRFADMIPMWESLRENGAALSTSRTDKISAYLSNYAKFSDEWWRLALRRRESRDNLQRYIGKRKVKDSFWAGIKRCMMKELPDMKVCVAYGSAITKLKPTGPGEVAVPTGAMFASCKRIFKEDVSVTDEFKTTLMSWETGKEKELVYKIPSVCSADVKLRLGGERFGHTKSKTMPKVADCDHLGVRLYNKRKRAQEKHRRGGFATSLVDSQKSIERYPEVRGLRFSPETSTYSDRDRSSALTIARLHCMELMGLGRPLPFAHSSSVVVDE

SEQ ID NO: 1807 - protein, 509 aa, Microglena sp.
YPESDIYKIIPASLVHANLIKDVVRRLRDLLPLPRGKQFNTRAHLTMRLFHHVLTELGADLKEKTNKKRPRLFSILPRKSGFTISYVPISSMTLMKLLSMGDSPLESFRGDGRHENHSMLLWRKYFNVQGLETKGSRFDNRILSDGKGVSVQMKHQASEDVAVDNAGYPKDAILEDCQDASLRVGVDPGMTDIVTVASSAGRVESFSSARFSEAAGYNTSNRRTNKWNVDTQDLVKSIPSPTTSSMHDMQDHVRGYLSALPTLLQHRASRGYRSMRFFRYVGKQKTIEKVCDLIAPKAQKKTIEEKVCDVIAPRAQTTVVGFGNWSNQGYGISRSCSGPVKEIRKCLSRRQNVLFKNVDERNTSCTCHGCFQKIVNMKADSVVWRRVQNEPPSLINGAPTTTTTTFEKQKTVVKNVKVHKVLHCRNSVKSASSNVRCGATWNRDVNAAKNLLLLLTTWMDGKERPAAFCVPSSSPTPKTTVSGEANVGAQQTDPPGSVSSLQLLSSGPA

SEQ ID NO: 1808 - protein, 727 aa, Microglena sp.
VLTMKEFGKFREHVDQLVNVVSRMLRRSSLVLTFHITSLLEKGLEIPDLYNMKDTYWKDWLRIGVDGIFPDEKSKISYEAVKDSIGDVIGNDDADYIKSYPIYFDQVLNYAGHTLSTVVSNNAWVPLIPRLARLTSTTLNKLNAPKTLDTSKIIRGYDVMQAIQQEVQNMEGWPESVQEYVNEVREMLSVPDGSRVYDNYGKDMDFPTMVRFNYWIQTRLEDMDARRIRLMPIFNVQRVHVRLDLKTLVNLFRHMFPNDQNIVELSKWEHVKNPDSFMLPQRPAQKKKKSCGPGEWEAYKSVLKQYDDDVKDIKATDEYRHAKGLYDTLVNARKTVADSFFRKPPVKNGWVFDCSICTDGVSLSMQYSKTVQVLVSDLKKTCKNPRKEKGIKIAEKYDGSLKTILPDMGIVVLGVDPGRSNIATVTYLADDKNKTWTLTRGAFYHKSGIKKQTRQKELRFADMIPMWESLRENGAALSTSRTDKISAYLSNYAKFSEEWWRLALRRRESRDNLQRYIGKRKVKDSFWAGIKRCMMKELPDMKVCVAYGSAITKLKPTGPGEVAVPTGAMFASCTRIFKEDVSVTDEFKTTLMSWETGKEKERVYKIPSVCSADVKLRLGGERFGHTKSKTMPKVVDCDHLGVRLYNKRKGAQEKHRRGGFATSLVDSQKSIERYPEVRGLRFSPETCIYSDRDRSSALTIARLHCMELMGLGRPLPFAHSSSVVVDE

SEQ ID NO: 1809 - protein, 709 aa, Microglena sp.
LWKMATKPPTVAKLKELLKLAEVPYSSKSNKDDLVRLCEDNGLIARPPPEYKTVEKMCVVKCALKKAMSLDDEEFGKFREHVDQLVNVVSRMLRRSSLVLTFHITSLLEKGLEIPDLYNMKDTYWKDWLRIGVDGIFPDEESKISYEAVKDSIGDVIGNDDADYIKSYPIYFDQVLNYAGHTLSTVVSNNAWVPLIPRLARRTSTTLNKLNAPKTLDTSKIMRGYDVMQAIQQEVQNMEGWPESVQEYVNEVREMLSVPDGSRVYDNYGKDMDFPTMVQFNYWIQTRLEDMDARRIRLMPIFNVQRVHVRLDLKTLVNLFRHMFPNDQNIVELSKWEHVKNPDSFMLSQRPAQKKKKSCGPGEWEAYKSVLKQYDDDVKDIKATDEYRHAKGLHDTLVNARKTVAGSFFRKPPVKNGWVFDCSICTDGVSLSMQYSKTVQVLVSDLKKTCKKPRKEEGIKIAEKYNGSLKTILPDMGIVVLGVDPGRSNITTVTYLADDKNKTWTLTRGAFYHKSGIKKQTRQKELRFAEMIPMWESLRENGAALSTSRTDKISAYLSNYAKFSEEWWRLALRRRESRDNLQRYIGKRKVKDSFWAGIKRCMMKELPDMKVCVAYGSAITKLKPTGPGEVAVPTGAMFASCKRIFKEDVSVTDEFKTTLMSWETGKEKERVYKIPSVYSADVKLRLGGERFGHTKSKTMPKVVDCDHLG

SEQ ID NO: 1810 - protein, 239 aa, Microglena sp.
TRPTIQRSTNHGSANISSSCLSLPWTGGQSGSLSIQTRLQLHPSTQASAKQWSRTHQRMRNPSCLVRDRHPTLSNSCWFMTSCSQGWILRKTLRTKERMKIKMQMIRIRKRIFYLKKEFRDQTTNFLAARYDVLLVPQLETAKMTISAERELTTKVARQMLTLSHSVLFNRLKEKCEEYGTVFLHVLEHYTSQTCPMCGFLNKCGETYTCKNCQFTCDRDIVGAAGIFLKAVRTENPCS

SEQ ID NO: 1811 - protein, 289 aa, Microglena sp.
HVVHFTTSRVSRSRQGRRNCVFADMIPMWESLRENGAALSTSRTDKISAYLSNYAKFSDEWWRLALRRRESRDNLQRYIGKRKVKDSFWAGIKRCMMKELPDMKVCVAYGSAITKLKPTGPGEVAVPTRAMFASCKRIFKEDVSVTDEFKTTLMSWETGKEKERVYKIPSVCSADVKLRLGGERFGHTKSKTMPKVADCDHLGVRLYNKRKGAQEKHRRGGFATSLVDSQKSIERYPEVRGLRFSPETCIYSDRDRSSALTIARLHCMELMGLGRPLPFAHSSSVVVDE

SEQ ID NO: 1812 - protein, 293 aa, Microglena sp.
NKTWTLTRGAFYHKSGIKKQTRQKELRFADMIPMWESLRENGAALSTSRTDKISAYLSNYAKFSEEWWRLALRRRESRDNLQRYIGKRKVKDSFWAGIKRCMMKELPDMKVCVAYGSAITKLKPTGPGEVAVPTGAMFASCKRIFKEDVSVTDEFKTTLMSWETGKEKERVYKIPSVCSADVKLRLGGERFGHTKSKTMPKVVDCDHLGVRLYNKRKGAQEKHRRGGFATSLVDSQKIDRAVPRGTRTAILSRNMHLLGPGSLFCSHNRKAALHGIDGSRTTSSICPQQLCCC

SEQ ID NO: 1813 - protein, 205 aa, Microglena sp.
RVSVQMKQKGKEEVVEEGENAGYPKDANIVECKDAVGVLRVGVDLGMTDIVTVASSAGRIESFSSARFSEVAGYNTSKRRTYKWNDETQDLVKSIPSPNTSNMSDLQDHVRAYLKALPILLQHRANKGYRSMRFFRYVGKQKTIEKVCDVIAPRAQTTVVGFGNWSNQGYGISRSCSGPIKEIRRCLSRRKNVLFKKRRRTQHLL

SEQ ID NO: 1814 - protein, 457 aa, Microglena sp.
EYVNEVREMLSVPDGSRVYDNYGKDMDFPTMVRFNYWIQTRLEDMDARRIRLMPIFNVQRVHVRLDLKTLVNLFRHMFPNDQNIVELSKWEHVKNPDSFMLPQRPAQKKKKSCGPGEWEAYKSVLKQYDDDVKDIKATDEYRHAKGLYDTLVNARKTVAGSFFRKPPVKNGWVFDCSICTDGVSLSMQYSKTVQVLVSDLKKTCKNLRKEEGIKIAEKYDGSLKTILPDMGIVVLGVDPGRSNIATVTYLADDKNKTWTLTRGAFYHKSGIKKQTRQKELRFADMIPMWESLRENGAALSTSRTDKISAYLSNYAKFSEEWWRLALRRRESRDNLQRYIGKRKVKDSFWAGIKRCMMKELPDMKVCVAYGSAITKLKPTGPGEVAVPTGAMFASCKRIFKEDVSVTDEFKTTLMSWETGKEKERVYKIPSVCSADVKLRLGGERFWSHEIENDAKGR

SEQ ID NO: 1815 - protein, 682 aa, Microglena sp.
KMATKPPTVAKLKELLKLAEVPYSSKSNKDDLVRLCEDNGLIARPPPEYKTVEKMCVVKCALKKAMSLDDEEFGKFREHVDQLVNVVSRMLRRSSLVLTFHITSVLEKGLDIPDLYNMKDTYWKDWLRIGVDGIFPDEESKISYEAVKDSIGDVIGNDDADYIKSYPIYFDQVLNYAGHTLSTVVSNNAWVPLIPRLARLTSTTLNKLNAPKTLDTSKIIRGYDVMQAIQQEVQNMEGWPESVQEYVNEVREMLSVPDGSRVYDNYGKDMDFPTMVRFNYWIQTRLEDMDARRIRLMPIFNVQRVHVRLDLKTLVNLFRHMFPNDQNIVELSKWEHVKNPRSFMLPQRPAQKKKKSCGPGVWEAYKSVLKQYDDDVKDIKATEEYRHAKGLYDTLVNARKTVAGSFFRKPPVKNGWVFDCSICTDGVSLSMQYSKTVQVLVSDLKKTCKKPRKEEGIKIAEKYDGSLKTILPDMGIVVLGVDPGRSNIATVTYLADDKNKTWKLTRGAFYHKSGIKKQTRQKELRFADMIPMWESLRENGAALSTSRTDKISAYLSNYAKFSDEWWRLALRRRESRDNFQRYIGKRKVKDSFWAGIKRCMMKELPDMKVCVAYGSAITKLKPTRPGEVAVPAGAMFASCKRIFKEDVSVTDEFKTTLMSWETGKEKETCLQDPKCLFSRREA

SEQ ID NO: 1816 - protein, 448 aa, Microglena sp.
KRKQQKKRPRLFSILPRKSGFTISYVPISSMTLMKLLSMGDSPLESFRGDGRHENHSMLWRKYFNVQGLETKGSRFDNRILSDGKGVSVQMKHQGSEDVDVEGGDNAGYPKDAILEDCQDASLRVGVDPGMTDIVTVASSAGRVESFSSARFSEAAGYNTSNRRTKKWNVDTQDLVKSIPSPTTSSMHDMQDHVRGYLSALPTLLQHRASRGYRSMRFFRYVGKQKTIEKVCDLIAPKAQKKTIEEKVCDVIAPRAQTTVVGFGNWSNQGYGISRSCSGPIKVIRRCLSRRKNVLFKNVDERNTSCTCHGCFQKLVNMKGDSVVWRRVQNEPPSLINGAPTTTTIEKQKTVVKNVKVHKVLHCRNSVKSASSNVRCGATWNRDVNAAKNLLLLLTTWMDGKERPATFCVPSSSPTPKTTVSGEANVGAQPTDPPGSVSNLQLLSSGPA

SEQ ID NO: 1817 - protein, 661 aa, Microglena sp.
YQDKKRTLPPSISMGVVTNNGDDDDDLDIMVVKKTLNSLCMDVSRQQICSRIQSMVLVINHAVAEAYLFANFHITRCLDDVDFDVKQLSHLDRNFYYRCILAVSTSNVRKDTLGQSLKDSMVAFDALRPAGYLKVDVRQWGQVISDVSIQMATMACNSVWANVDRVVIKYLRLKHPSLKKHFNKIVKAVVQYPESDIDKIIPASLVHANLIKDVVRRLRDLLPLPRGKQFNTRAHLTMRLFHHVLTELGADLKEKTTKKRPRLFSILPRKSGFTISYVPISSMTLMKLLSMGDSPLESFRGDGRHENHSMLWRKYFNVQGLETKGSRFDNRILSDGKGVSVQMKHQASEDVAVEGGDNAGYPKDAILEDCQDASLRVGVDPGMTDIVTVASSAGRVESFSSARFSEAAGYNTSNRRTNKWNVDTQDLVKSIPSPTTSSMHDMQDHVRGYLSALPTLLQHRASRGYRSMRFFRYVGKQKTIEKVCDLIAPKAQKKTIEEKVCDVIAPKAQKTIVGFGNWSNQGYGISRSCSGPVKEIRKCLSRRQNVLFKNVDERNTFCTCHGCFQKLINMKADSVVWRRVQNEPPSLINGAPTTTTTTTLWCNLEPRRERCQEPSSASDDVDGRERATGDILCALIIAHPKNHSFRRGKCGRSTNRPTWVS

SEQ ID NO: 1818 - protein, 503 aa, Microglena sp.
SQGRRIRAQLQAPRTFTSIGTRHGRLVSSIVVASKDRLARFGFELIEWICSQHSCSIIVLDHQDGAPEDELGKDLMSIVQVYCCRWNGRRRYKVKCQTQVEDLKAEAEPNQGSEIDAGRVCRVQPVHVQQGGGSTVGRRKHSQVCLPNSRQVCDEQGEGEGKMPNPYFKNRQWLLQCPKSVRQSAIKAALANIKACFSNLKACNIKQFSAPFRRKKTELERGWVIEMDQKNVSKDGDKLFIFKDILGNMRYFGSKQLHKLMPEGNPTHDPKVQKSRFGEYFLVLSVAVRDRRAERKPVHPDKVATASIDPGVRKTMVTYSPENEESFMLGQGQASDLVKLLLVHDKLQSRLDTEKTLRSKERMKIKMQMIRIRKRIFYLKKEFRDQTTNFLAARYDVLLVPQLETAKMTISAERELTTKVARQMLTLSHSVLFNRLKEKCEEYGTVFLHVLEHYTSQTCPMCGFLNKCGETYTCKNCQFTCDRNIVGAAGIFLKAVRTENPCS

SEQ ID NO: 1819 - protein, 258 aa, Microglena sp.
ASQNSMTINSKRHCPIWVSSFWVWILVGATSLQSRIWQTTTARHGSLHAELFTTSLVSRNRKNSKKKRFSDMIPRWESLRENGAALSTSRKDDISAYLKNYATFSDEWWRMALRRRESRDNFQRYIGKRKAMDSFWAGIKRNMKLDHPDLRVRVAYGSAITTLKATGPGEVAVPTGSMFASCKRLFKDEVHVTDEFKTTLMSWENRCQEGMCLQNSKCPNNHGRADSSRLRVVGSHPIEGDSKGLLSRPVGGEGVLHT

SEQ ID NO: 1820 - protein, 289 aa, Microglena sp.
HVVHFTTSRVSRSRQGRRNCVFADMIPMWESLRENGAALSTSRTDKISAYLSNYAKFSDEWWRLALRRRESRDNLQRYIGKRKVKDSFWAGIKRCMMKELPDMKVCVAYGSAITKLKPTGPGEVAVPTGAMFASCKRIFKEDVSVTDEFKTTLMSWETGKEKERVYKIPSVCSADVKLRLGGERFGHTKSKTMPKVADCDHLGVRLYNKRKGAQEKHRRGGFATSLVDSQKSIERYPEVRGLRFSPETCIYSDRDRSSALTIARLHCMELMGLGRPLPFAHSSSVVVDE

SEQ ID NO: 1821 - protein, 314 aa, Microglena sp.
RIPTASCCPQRPAQKKKKSCGPGEWEAYKSVLKQYDDDVKDIKATDEYRHAKGLYDTLVNARKTVAGSFFRKPPVKNGWVFDCSICTDGVSLSMQYSKTVQVLVSDLKKTCKKPRKEEGIKIAEKYDGSLKTILPDMGIVVRGVDPGRSNIATVTYLADDKNKTWTLTRGAFYHKSGIKKQTRQKELRFADMIPMWESLRENGAALSTSRTDKISAYLSNYAKFSDEWWRLALRRRESRDNLQRYIGKRKVKDSFWAGIKRCMMKELPDMKVCVAYGSAITKVKPTGPGEVAVPTGAMFASCKRIFKRGRFCDR

SEQ ID NO: 1822 - protein, 220 aa, Microglena sp.
QEKRFSNMIPRWESLRENGAALSTSRKDDISAYLKNYATFSDEWWRMALRRRESRDNFQRYIGKRKAMDSFWAGIKRNMKLDHPDLRVRVAYGSAITKLKATGPGEVAVPTGSMFASCKRLFKEEVHVTDEFKTTLMSWETGAKKECVYKIPSVQITTEGQIRLGYELLGHTPLKETPKVSYRDQLAVRVYCTRKKNPRKTQEGWLSPLSCRQQIDQAVP

SEQ ID NO: 1823 - protein, 803 aa, Microglena sp.
PRMEHVCDVCIKSSVMYKLCKMATKPPTVAKLKELLKLAEVAYSSKDKKDDIVRLCEDNGLIARPPPEYKTVEKMCVVKCALKKAMSLDDEEFGKFRGHVDQLVNVVSRMLRRSSLVLTFHVTRLMEGDLPIPNMYDMKDTYWKDWLRIGVDGVFPDEQSRISYKAVNDVIGKVLGSDDPDYINSYPIYFGQVLNYAGHTLSTVVSNNAWVPLVPRLTRLTKATLNALGAPKTIRVYDVMRVIQQEIQEMESWPESVQEYVREVQVRLKVPDGSRLYDDYGKDMDFPTMVRFNYWMQTRLEAIGARRIRLMPIFNVQRAHVRLDMKTLVNLFRHVFPKDPNIVELSKWENVKDPDRFMLPLKPSVKKKKSCGPGEWEAYKLAQQKYDADVKDIKATDEYRHAKGRYDTLVNARKTVAGSFFKKPPVKTGWVFDCSICTDGVSLSMQYSKTVQVRVSDLKNKSKRSRDEEGMSVSEQYDHKLKTTLPDMGIVVLGVDPGRSNIATVTYLADDKSKTWKLTRGAFYHKSGIKKQKKQQEKRFSDMIPRWESLRENGAALSTSRKDDISAYLKNYATFSDEWWRMALRRKESRDNFQRYIGKRKAMDSFWAGIKRNMKLDHPDLRVRVAYGSAITKLKATGPGEVAVPTGSMFASCKRLFKEEVHVTDEFKTTLMSWETGAKKECVYKIPSVQITTEGQIRLGYELLGHTPLKETPKVSYRDQLAVRVYCTRKKIQEKHRRGGLAPSLVDNNSIKRYPEVRGLRFSPETSTYSDRDRSSALTIARLHCMELLGQGRPLPFCRDACC

SEQ ID NO: 1824 - protein, 510 aa, Microglena sp.
VGYRQNHPSESRACEPHQRRCQTPERSLAAAKGEAVQHSSAPDNETVSSRAYRVGSGSKRENNKKTPPSVQYPSTQERLHHFLRPYIVHDTHEASQHGRFAARELPWRWTSRESVHVVEKVLQCQGLETKGSRFDNRILSDGKGVSVQMKHQASEDVAVDNAGYPKDAILEDCQDASLRVGVDPGMTDVVTVASSAGRVESFSSARFSEAAGYNTSNRRTNKWNVDTQDLVKSIPLPTTSSMHDMQDHVRGYLSALPTLLQHRASRGYRSMRFFRYVGKQKTIEKVCDLIAPKAQKKTIEKKVCDVIAPKAQKTIVGFGNWSNQGYGISRSCSGPVKEIRKCLSRRQNVLFKNVDERNTSCTCHGCFQKLINMKADSVVWRRVQNETPSLINGAPTTTTTTTTTTTIEKQKTVVKNVKVHKVLHCRNSVKSASSNVRCGATWNRDVNAAKNLLLLLTTWMDGKERPATFCVPSSSPTPKTTVSGEANVGAQPTDPPGSVSSLQLLSSGPT

SEQ ID NO: 1825 - protein, 341 aa, Microglena sp.
RRRYQDRRKYDGSLKTILPDMGIVVLGVDPGRSNIATVTYLADDKNKTWTLTRGAFYHKSGIKKQTRQKELRFADMIPMWESLRENGAALSTSRTDKISAYLSNYAKFSDEWWRLALRRRESRDNLQRYIGKRKVKDSFWAGIKRCMMKELPDMKGCVAYGSAITKLKPTGPGEVAVPTGAMFASCKRIFKEDVSVTDEFKTTLMSWETGKEKERVYKIPSVCSADVKLRLGGERFGHTKSKTMPKVADYRDHLGVRLYNKRKGAQEKHRRGGFATSLVDSQKSIERYPEVRGLRFSPETCIYSDRDRSSALTIARLHCMELMGLGRPLPFAHSSSVVVDE

SEQ ID NO: 1826 - protein, 618 aa, Microglena sp.
QCIRNLHVLNIRMPCMATKASVKLARPPMPLVSPGPSSVDGQIMARSERSGLQATNVSLTQAASKATSSSRKKKPAVVKSFSTHVCPHTNNNTTCSDSNCSCKPIFLTNIPDASKSRTSDQGSTSSALDFYEYWDSSRQDMYRQLLWLPKTGTQGLVSSSFNGFAHSTPTRSSFSITKTEPLKTSLEKTSCPSFKYIVTDGTVEDATKSNAKPKLRTLKLKLNPTKAQKSMLAEFAGCSRFMYNKAVAARLGVGITHKSVFRIRDRYVTNKVRGEGKMPNPYFKNRQWLLQCPKSVRQSAIKSALANIKACFSNLKAGNIKQFSAPFRRKKTELERGWVIEMDQKNVSKDGDKLFIFKEILGNMRYFGSKQLHKLMPEENPTHDPKVQKSRFGEYFLVLSVAARDRRAERKPVNPDKVATASIDPGVRKTMVTYSPENEESFMLGQGQASDLVKLLLVHDKLQSRLDTEKTLRSKERMKIKKLMIRIRKTIFYLKKEFRDQTTNFLAARYDVLLVPQLETAKMTISAERELTTKVARQMLTLSHSVLFNRLKEKCEEYGTVFLHVLEHYTSQTCPMCGFLNKCGETYTCKNCQFTCDRDIVGAAGIFLKAVRTENPCS

SEQ ID NO: 1827 - protein, 491 aa, Microglena sp.
RETLLCTRSGILSQGVLPLPSGNTFASRAHMTLPLYHKILSETIEEKRKTKNEKHRTFSLLPYKSGFTLSHIPISKMAFFYMVNECHFDSCKADVASKNHQGIWERFANLKKVETVSRKFGYRIVTDGFAVSILMNKPTCLTCSMPADAFSTRAHEYVTTDEGGIVSFLDNVVVAAVDPGVTDIVTVTGLNGGTRSYSSAQYYRKGLIFKSQRQTDVWNLETADIVGGIIPDRDSSSSEQIGAYARFYMGAAPILLAHRASRGYRNLRFRRYSKKQKLIVEIADFVAPRKKSAKVLVGFGDWKGLGATPISRRTCGPLQAIRFELRSRENVIMEDIDEFRTSQRCSCCENHLCNMVALTHRKKQDGTGWECTEGRKRIHKILHCKSSQSGAPRQKSGGMLHCGKTWDRDVNASRNILMLTLHQVFGRERPLAFRRDAPRSSSTTPPPPPDTDMGTQTVERFTKEATRNIFENLFNLLHPPTLPKSNDLQSG

SEQ ID NO: 1828 - protein, 801 aa, Microglena sp.
PRMEHVCDVCIKSSVMYKLCKMATKPPTVAKLKELLKLAEVAYSSKDKKDDIVRLCEDNGLIARPPPEYKTVEKICVVKCALKKAMSLDDEEFGKFREHVDQLVNVVSRMLRRSSLVLTFHVTRLMEGDLPIPNMYDMKDTYWKDWLRIGVDGVFPDEESRISYEAVKDVIGKVLGSDDPDYINSYPIYFDQVLNYAGHTLSTVVSNNAWVPLVPRLTRLTKATLNALKAPKTIRVYDVMRVIQQEIQEMESWPESVQEYVREVRVRLKVPDGSRLYDDYGKDMDFPTMVRFNYWIQTRLEDMDARRIRLMPIFNVQRVHVRLDLKTLVNLFRHMFPNDQNIVELSKWKDVKDPDRFMLPLKPAVKKKKSCGPGEWEAYKLAQQKYDADVNDIKDTDEYRHAKGRYDTLVNARKTVAGSFFKKPPVKTGWVFDCSICTDGVSLSMQYSKTVQVRVSDLKKTSKRSRDDEGMSVSEQYDHKLKTTLPDMGIVVLGVDPGRSNIATVTYLADDKSKTWKLTRGAFYHKSGIKKQKKQQEKRFSDMIPRWESLRENGAALSTSRTDDISAYLKNYDTFSDEWWRMALLRRESRDNFQRYIGKRKAMDSFWAGIKRNMKLDHPDLRVRVAYGSAITTLKATGPGEVAVPTGSMFASCKRLFKEEVHVTDEFKTTLMSWETGAKKECVYKIPSVQITTEGQIRLGYELLGHTPLKETPKVSYRDQLAVRVYCTRKQIQEKHRRGGLAPSLVDNNSIKRYPEVRGLRFSPETSTYSDRDRSSALTIARLHCMELLGQGRPLPFCRDA

SEQ ID NO: 1829 - protein, 623 aa, Microglena sp.
VNLTVYKEFACTKYQNAMYGNQSFCKIGKASDALGVSRTVLRRWADNGTIRTIRTIRTPGNQRLFDPSSIQGYLIEQEKQPSSRQVILYARVSSHKQQPDLLRQQLFLQTHISDKHSGCEQVIEIKDVGSGLNFKRPGLLRVLGLVTAGLVSSIVVASKDRLARFGFELIEWICSQHSCSITKTEPLKTSLEKTSCPSFKYIVADGTVEDATKSNAKPKLRTLKLKLNPTKAQKSMLAEFAGCSRFMYNKAVAARLGVGSTHKSVFRIRDRYVTNKVRGKGKMPNPYFKNRQWLLQCPKSVRQSAIKSALANIKACFSNLKAGNIKQFSAPFRRKKTELERGWVIEMDQKNVSKDGDKLFIFKEILGNMRYFGSKQLHKLMPEENPTHDPKVQKSRFGEYFLVLSVAARDRRAERKPVNPDKVATASIDPGVRKTMVTYSPENEESFMLGQGQASDLVKLLLVHDKLQSRLDTEKTLRSKERMKIKKLMIRIRKTIFYLKKEFRDQTTNFLAARYDVLLVPQLETAKMTISAERELTTKVARQMLTLSHSVLFNRLKEKCEEYGTVFLHVLEHYTSQTCPMCGFLNKCGETYTCKNCQFTCDRDIVGAAGIFLKAVRTENPCS

SEQ ID NO: 1830 - protein, 801 aa, Microglena sp.
PRMEHVCDVCIKSSVMYKLCKMATKPPTVAKLKELLKLAEVAYSSKDKKDDIVRLCEDNGLIARPPPEYKTVEKMCVVKCALKKAMSLDDEEFGKFREHVDQLVNVVSRMLRRSSLVLTFHVTRLMEGDLPIPNMYDMKDTYWKDWLRIGVDGVFPDEESRISYESVKDVIGKVLGSDDPDYINSYPIYFDQVLNYAGHTLSTVVSNNAWVPLVPRLTRLTKATLNALEAPKTIRVYDVMRVIQQEIQEMESWPESVQKYVREVRVRLKVPDGSRLYDNYGKDMDFPTMVRFNYWMQTRLEAIGARRIRLMPIFNVQRAHVRLDMKTLVNLFRHVFPKDPNIVELSKWKDVKDPDRFMLPLKPAFKKKKSCGPGEWEAYKLAQQKYDADVNDIKDTDEYRHAKGRYDTLVNARKTVAGSFFKKPPVKTGWVFDCSICTDGVSLSMQYSKTVQVRVSDLKKTSKRSRDDEGMSVSEQYDHKLKTTLPDMGIVVLGVDPGRSNIATVTYLADDKSKTWKLTRGAFYHKSGIKKQKKQQEKRFSDMIPRWESLRENGAALSTSRTDDISAYLKNYDTFSDEWWRMALLRRESRDNFQRYIGKRKAMDSFWAGIKRNMKLDHPDLRVRVAYGSAITTLKATGPGEVAVPTGSMFASCKRLFKEEVHVTDEFKTTLMSWETGAKKECVYKIPSVQITTEGQIRLGYELLGHTPLKETPNVSYRDQLAVRVYCTRKQIQEKHRRGGLAPSLVDNNSIKRYPEVRGLRFSPETSTYSDRDRSSALTIARLHCMELLGQGRPLPFCRDA

SEQ ID NO: 1831 - protein, 309 aa, Microglena sp.
AFQVGTCKESRKLHVAPEACTEEEKSCSPGEWEAYKSVLKQYDDDVKDIKATDEYRHAKGLYDTLVNARKTVAGSFFRKPPVKNGWVFDCSICTDGVSLSMQYSKTVQVLVSDLKKTCKKPRKEEGIKIAEKYDGSLKTILPDMGIVVMGVDPGRSNIATVTYLADDKNKTWKLTRGAFYHKSGIKKQTRQKELRFADMIPMWESLRENGAALSTSRTDNISAYLSNYAKFSDEWWRLALRRRESRDNLQRYIGKRKVKDSFWAGIKRCMMKELPDMKVCVAYGSAITKLKPTGPGEVAVAHWGHVRIV

SEQ ID NO: 1832 - protein, 598 aa, Microglena sp.
GFIQQEIQEMESWPESVQEYVREVRVRLKVPDGSRLYDDYGKDMVFPTMVRFNYWMQTRLEAIGARRIRLMPIFNVQRAHVRLDMKTLVNLFRHVFPKDPNIVELSKWKNVKDPDLFMLPLKPAFKKKKSCGPGEWEAYKLAQQKYDADVNDVKDTDEYRHAKGRYDTLVNARKTVAGSFFKKPPVKTGWVFDCSICTDGVSLSMQYSKTVQVRVSDLKKTSKRSRDDEGMSVSEQYDHKLKTTLPDMGIVVLGVDPGRSNIATVTYLADDKSKTWKLTRGAFYHKSGIKKQKKQQEKRFSDMIPRWESLRENGAALSTSRKDDISAYLKNYATFSDEWWRMALRRRESRDNFQRYIGKRKAMDSFWAGIKRNMKLDHPDLRVRVAYGSAITTLKATGPGEVAVPTGSMFASCKRLFKEEVHVTDEFKTTLMSWETGAKKECVYKIPSVQITTEGQIRLGYELLGHTPLKETPKVSYRNQLAVRVYCTRKQIQEKHRRGGLVPSLVDNNSIKRYPEVRGLRFSPETALTRTGTAPLLSQSQGCTAWNCWVKGDRFHFAGMRVVDGLQKNMMVFHCPVGCYTIRLHHKVYRTLQKAVSF

SEQ ID NO: 1833 - protein, 792 aa, Microglena sp.
ECSREPVCRSRLHQNVFGVQFVMENGIGESSSLVHEADQHDDVAELVDYEGEEDGECAPGRAICVVKMKLSTFIPHDWLRNKIDTLVLDMNKLLGEGYIFANFHIARLFENGLAVPPVNRNFFYRCLIAVSTNKCNGSTLGEDFESSRLLFDLLREPGQSKVDIRGRVKNQIIADLSILMATMASNHLWTNLERRITTYLKWKYPQIAKRLRSDIVAALIKCTTKNLDVIFKMSPHTTKLPTKLPTSRLRSAKSAVALAKKRVGRKEPEGSPLRVRLTKLQERLEKLSEAWLSSKNLRVDADNAKRFFAREVAFCLRGVLPLPSGNTFASRAHMTLPLYHKILSETIEEKRKTKNKKHRTFSLLPYKSGFTLSHIPISKMAFFYMVNECHFDSCKADVASKNHQGIWERFANLKKVETVSRKFGYRIVTDGFAVSILMNKPTCLTCSMPADAFSTRAHEYVTTDEGGIVSFLDNVVVAAVDPGVTDIVTVTGLNGGTRSYSSAKYYRKGLIFKSQRQTDVWNLETADIVGGIIPDRDSSSSEQIGAYARFYMGAAPILLAHRASRGYRNLRFRRYCKKQKLIVEIADFVAPRKKSAKVLVGFGDWKGLGATPISRRTCGPLQAIRFELRRRENVIMEDIDEFRTSQRCSCCENHLCNMVALTHRKKQDGTGWECTEGRKRIHKILHCKSSQSGAPRQQSDGMLHCGKTWDRDVNASRNILMLTLHQVFGRERPLAFRRDAPRSSSTTPPPDTDMGTQTVERFTKEATRNIFENLFNLLHPPTLPKSNDLQSG

SEQ ID NO: 1834 - protein, 330 aa, Microglena sp.
ASQNSMTIKLKTTLPDMGIVVLGVDPGRSNIATVTYLADDKSKTWKLTRGAFYHKSGIKKQKKQQEKRFSDMIPRWESLRENGAALSTSRTDDISAYLKNYDTFSDEWWRMALLRRESRDNFQRYIGKRKAMDSFWAGIKRNMKLDHPDLRVRVAYGSAITTLKATGPGEVAVPTGSMFASCKRLFKEEVHVTDEFKTTLMSWETGAKKECVYKIPSVQITTEGQIRLGYELLGHTPLKETPKVSYRDQLAVRVYCTRKQIQEKHRRGGLAPSLVNNNSIKRYPEVRGLRFSPETSTYSDRDRSSALTIARLHCMELLGQGRPLPFCRDA

SEQ ID NO: 1835 - protein, 704 aa, Microglena sp.
GACGSARQCSEPHVAAFQSGADFPCHEAHGGDLPIPNMYDMKDTYWKDWLRIGVDGVFPDEESRISYEAVKDVIGKVLGSDDPDYINSYPIYFDQVLNYAGHTLSTVVSNNAWVPLVPRLTRLTKATLNALKSPKTIRVYDVMRVIQQEIQEMESWPESVQEYVREVRVRLKVPDGSRLYDDYGKDMDFPTMVRFNYWMQTRLESIGARRIRLMPIFNVQRAHVRLDMKTLVNLFRHVFPKDPNIVELSKWKDVKDPDRFMLPLKPAVKKKKSCGPGEWEAYKLAQQKYDADVNDIKDTDEYRHAKGRYDTLVNARKTVAGSFFKKPPVKTGWVFDCSICTDGVSLSMQYSKTVQVRVSDLKKTSKRSRDDEGMSVSEQYDHKLKTTLPDMGIVVLGVDPGRSNIATVTYLADDKSKTWKLTRGAFYHKSGIKKQKKQQEKRFSDMIPRWESLRENGAALSTSRTDDISAYLKNYDTFSDEWWRMALLRRESRDNFQRYIGKRKAMDSFWAGIKRNMKLDHPDLRVRVAYGSAITTLKATGPGEVAVPTGSMFASCKRLFKEEVHVTDEFKTTLMSWETGAKKECVYKIPSVQITTEGQIRLGYELLGHTPLKETPKVSYRDQLAVRVYCTRKKIQEKHRRGGLAPSLVDNNSIKRYPEVRGLRFSPETSTYSDRDRSSALTIARLHCMELLGQGRPLPFCRDA

SEQ ID NO: 1836 - protein, 470 aa, Microglena sp.
KVDVCQWGQVIADVSIQMATMACNSVWANVDRVVIKYLRLKHPSLKKHFNKIVKAVVQYPDSDIDKIIPASLVHANLIKDVVRRLRDLCRCQGEAVQHSSAPDNETVSSRACRVGSESKRENNKKTPRLFSILPRKSGFTISYVPISSMTLMKLLSMGDSPLESVRGDGRHENHSMLWRKYFNVQGLETKGSRFDNRILSDGKGVSVQMKHQVGKDIAGEGGGDNAGYPKDASIEDCQDASLRQGALRVGIDPGMTDIVTIASSDGRVESFSSARFSEAAGYNTSNRRTNKWNADTQDLVKSIPSPTTSSMHDMQDHVRGYLSALPTLLQHRANRGYRSMRFFRYVGKQKTIEKVCDLIAPKAQKKTIEEKVCDVIAPKAKKTVVGFGNWSNQGYGISRSCSGPVKEIRKCLSRRQNVLFKNVDERNTSCTCHGCFQKLVNMKADSVAWRRVKKRALRPHRRGSYNNNNV

SEQ ID NO: 1837 - protein, 340 aa, Microglena sp.
RRRYQDRRKYDGSLKTILPDMGIVVLGVDPGRSNIATVTYLADDKNKTWTLTRGAFYHKSGIKKQTRQKELRFADMIPMWESLRENGAALSTSRTDKISAYLSNYAKFSDEWWRLALRRRESRDNLQRYIGKRKVKDSFWAGIKRCMMKELPDMMVCVAYGSAITKLNPTGPGEVAVPNGAMFASCKIIFKEDVSVTDEFKTTLMSWETGKEKERVYKIPSVCSADVKLRLGGERFGHTKSKTLPKVADCDHLGVRLYNKRKGAQEKHRRGGFATSLVDSQKSIERYPEVRGLRFSPETCIYSDRDRSSALTIARLHCMELMGLGRPLPFAHSSSVVVDE

SEQ ID NO: 1838 - protein, 656 aa, Microglena sp.
GSELTVSSQMKESRISYESVKDVIGKVLGSDDPDYINSYPIYFDQVLNYAGHTLSTVVSNNAWVPLVPRLTRLTKATLNALGAPKTIRVYDVMRVIQQEIQEMESWPESVQEYVREVRVRLKVPDGSRLYDDYGKDMDFPTMVRFNYWMQTRLEAIGARRIRLMPIFNVQRAHVRLDMKTLVNLFRHVFPKDPNIVELSKWKDVKDPDRFMLPLKPAVKKKKSCGPGEWEAYKLAQQKYDADVNDIKDTDEYRHAKGRYDTLVNARKKVAGSFFKKPPVKTGWVFDCSICTDGVSLSMQYSKTVQVRVSDLKKTSKRSRDDEGMSVSEQYDHKLKTTLPDMGIVVLGVDPGRSNIATVTYLADDKSKTWKLTRGAFYHKSGIKKQKKQQEKRFSDMIPRWESLRENGAALSTSRTDDISAYLKNYATFSDEWWRMALLRRESRDNFQRYIGKRKAMDSFWAGIKRNMKLDHPDLRVCVAYGSAITTLKATGPGEVAVPTGSMFASCKRLFKEEVHVTDEFKTTLMSWETGAKKECVYKIPSVQITTEGQIRLGYELLSHTPLKETPNVSYRDQLAVRVYCTRKQIQEKHRRGGLAPSLVDNNSIKRYPEVRGLRFSPETSTYSDRDRSSALTIARLHCMELLGQGRPLPFCRDACC

SEQ ID NO: 1839 - protein, 624 aa, Microglena sp.
VNLTVYKEFACTKYQNAMYGNQRFCKIGKASDAHGVSRTVLRRWADNGTIRTIRTPGNQRLFDPSSIQGYLIEQEKKTSSRKVILYARVSSHKQQPDLLRQQLFLQTHISDKHSGCEQVIEVKDVGSGLNFECPGLLRVLGLVTAGLVSSIVVASKDRLARFGFKLIEWICSQHSCSIIVLNHQDGAPEDELGKDLVSIVQVYCCRWNGRRRYKVKCQTQVEDLKAEAEPNQGSEIDAGRVCRVQPVHVQQGGGSTVGRRKHSQVCLPNSRQVCDEQGEGGGKMPNPYFKNRQWLLQCPKSVRQSAIKAALANIKACFSNLKAGNIKQFSAPFRRKKTELARGWAIEMDQKNVSKDGDKLFIFKDILGNMRYFGSKQLHKLMPEENPTHDPKVKKSRFGEYFLVLSVAARDRRAERKPVHPDKVATASIDPGVRKTMVTYSPENEESFMLGQGQASNLVKLLLVHDKLQSRLDTEKTLLSKERMKIKKQMIRIRKRIFYLKKEFRDQTTNFLAARYDVLLVPQLETAKMTISAEWELTTKVARQMLTLSHSVLFNRLKEKCEEYGTVFLHVLEHYTSQTCPMCGFLNKCGETYTCKNCQFTCDRDIVGAAGIFLKAVRTENPCL

SEQ ID NO: 1840 - protein, 642 aa, Microglena sp.
STTQLQRHTYSQIFHITRCLDDGDFDVKQLPHLDRNFYYRCILAVSTSNVRKDTLGQSLKDSMVAFDALRPAGYLKVDVCQWGQVIADVSIQMATMACNSVWANVDRVVIKYLRLKHPSLKKHFNKIVKAVVQYPDSDIDKIIPASLVHANLIKDVVRRLRDLLPLPRGKQFNTRAHLTIRLFHHVLTELGADLKEKTTKKRPRLFSILPRKSGFTISYVPISSMTLMKLLSMGDSPLESVRGDGRHENHSMLWRKYFNVQGLETKGSRFDNRILSDGKGVSVQMKHQVGKNGGGDNAGYPKDASIEDCQDASLRQGALRVGIDPGMTDIVTIASSDGRVESFSSARFSEAAGYNTSNRRTNKWNADTQDLVKSIPSPTTSSMQDHVRGYLSALPTLLQHRANRGYRSMRFFRYVGKQKTIEKVCDLIAPKAQKKTIEEKVCDVIAPKAKKTVVGFGNWSNQGYGISRSCSGPVKEIRKCLSRRQNVLFKNVDERNTSCTCHGCFQKLVNMKSESVVWRRVQNEPSALIDGAPTTTTTFEKQKTVVKNVKVHKVLHCRNSVKSASSNVRCGATWNRDVNAAKNLLLLLTTWMDGKERPAAFCVPSSSPTPKTTVSGEANVGAQPTDPPGSVSSLQLLSSGPA

SEQ ID NO: 1841 - protein, 709 aa, Microglena sp.
GNCQLVWYHQNNNHSLSMGVVTNNRDDDDLDIMVVKKTLNSLCMDVSRQQICSRIQSMVLVINHAVAEAYLFANFHITRCLDDGDFDIKQLPHLDRNFYYRCILAVSISNVRNDTLDQSLKDSMVAFDALRPAGYVKVDVRPWGQVIADVSIQMATMACNSVWGNVDRVVIKYLRLKHPSLKKHFKKIVKAVVQYPDSDIDKIIPAGLVHANLIKDVVRRLRDLLPLPRGKQFNTRAHLTMRLFHHVLTELGADLKEKTTKKRPRLFSILPRKSGFTISYVPISSMTLMKLLSMGDSPLESVRGDGRHENHSMLWRKYFNVQGLETKGSRFDNRILSDGKGVSVQMKHQVGKEGGGDNAGYPKDASIEDCQDASLRQGALRVGIDPGMTDIVTIASSDGRVESFSSARFSEAAGYNTSNCRTNKWNADTQDLVKSIPSPTTSSMHDMQDHVRGYLSALPTLLQHRANRGYRSMRFFRYVGKQKTIEKVCDLIAPKAQKKTIEEKVCDVIAPKAKKTVVGFGNWSNQGYGISRSCSGPVKEIRKCLSRRQNVLFKNVDERNTSCTCHGCFQKLVNMKADSVVWRRVKNEPSALIDGAPTTTTTTTTFEKQKTVVKNVKVHKVLHCRNSVKSASSNVRCGATWNRDVNAAKNLLLLLTTWMDGKERPAAFCVPSSSPTPKTTVSGEANVGAQPTDPPGSVSSLQLLSSGPA

SEQ ID NO: 1842 - protein, 306 aa, Microglena sp.
VESFSSARFSEAAGFNTSNRRTNKWNADTQDLVKSIPSPTTSSMHDMQDHVRGYLSALPTLLQHRANRGYRSMRFFRYVGKQKTIEKVCDLIAPKAQKKTIEEKVCDVIAPKAKKTVVGFGNWSNQGYGISRSCSGPVKEIRKCLSRRQNVLFKNVDERNTSCTCHGCFQKLVNMKADSVSWRRVQNEPSALIDGAPTTTTTFEKQKTVVKNVKVHKVLHCRNSVKSASSNVRCGATWNRDVNAAKNLLLLLTTWMDGKERPAAFCVPSSSPTPKTTVSGEANVGAQPTDPPGSVSSLQLLSSGPA

SEQ ID NO: 1843 - protein, 236 aa, Microglena sp.
GAHDCLGFRGRVAWNGRLPVEYGVRVGGGRSIQRFRCRQKVHGAFDARSELFVIKSLWHTDKHYGGVTLRPVNNVTLRPVNNEVQADVGERKTIVIAYGSSKFAPGGKAELSVPTTSAFNAFSDRFKGRVAVIDKFRTTKIWHKDSTTVLQSVQSKKEGRTVRGLLWCSSTMENSKLFVNSDLNAAINIHNCFTMYPTRPGILARPKKYCKLEVVVGRTIDYKLTGSLQNAVSSEV

SEQ ID NO: 1844 - protein, 487 aa, Microglena sp.
RETLLCTRSGILSQGGSTFTIRKHCCVSGSHDPASVPQDIVGDHRRKTKNEKHRTFSLLPYKSGFTLSHIPISKMAFFYMVNECHFDSCKADVASKNHQGIWERFANLKKVETVSRKFGYRIVTDGFAVSILMNKPTCLTCSMPADAFSTRAHEYVTTDEGGIVSFLDNVVVAAVDPGVTDIVTVTGINGGTRSYSSAKYYRKGLIFKSQRQTDVWNLETADIVGGIIPDRDSSSSEQIGAYARFYMGAAPILLAHRASRGYRNLRFRRYCKKQKLIVEIADFVAPRKKSAKVLVGFGDWKGLGATPISRRTCGPLQAIRFELRSRENVIMEDIDEFRTSQRCSCCENHLCNMVALTHRKKQDGTGWECTEGRKRIHKILHCKSSQSGAPRQQSGGMLHCGKTWNRDVNASRNILMLTLHQVFGRERPLAFRRDAPRSSSTTPPPPPDMGTQTVERFTKEGTRNVFENLFNLLHPPTLPKSNDLQSG

SEQ ID NO: 1845 - protein, 366 aa, Microglena sp.
QTAFAVSILMNKPTCLTCSMPADAFSTRAHEYVTTDEGGIISFLDNVVVAAVDPGVTDIVTVTGLNGGTRSYSSAQYNRKGLIFKSQRQTDVWNLETADIVGGIIPDRDSSSSEQIGAYARFYMGAAPILLAHRASRGYRNLRFRRYCKKQKLIVEIADFVAPREKSAKVLVGFGDWKGLGATPISRRTCGPLQAIRFELRSRENVIMEDIDEFRTSQRCSCCENHLCNMVALTHRKKQDGTGWECTEGRKRIHKILHCKSSQSGAPRQQSGGMLHCGKTWDRDVNASRNILMLTLHQVFGRERPLAFRRDAPRSSSTTPPPPPDTDMGTQTVERFTKEATRNIFENLFNLLHPPTLPKSNDLQSG

SEQ ID NO: 1846 - protein, 368 aa, Microglena sp.
RSLLEHAVQQDSTGLVSDLKKTCKKPRKEEGIKIAEKYDGSLKTILPDMGIVVLGVDPGRSNIATVTYLADDKNKTWKLTRGAFYHKSGIKKQTRQKELRFADMIPMWESRRENGAALSTSRTDKISAYLSNYAKFSDEWWRLALRRRESRDNLQRYIGKRKVKDSFWAGIKRCMMKELPDMKVCVSYGSAITKLKPTGPGEVAVPTGAMFASCKRIFKEDVSVTDEFKTTLMSWETGKEKERVYKIPSVCSADVKLRLGGERFGHTKSKTMPKVADCDHLGVRLYNKRKGAQEKHRRGGFATSLVDSQKSIERYPEVRGLRFSPETCIYSDRDRSSALTIARLHCMELMGLGRPLPFAHSSSVVVDE

SEQ ID NO: 1847 - protein, 470 aa, Microglena sp.
PCLCTTRYCRRPSKKNEKRKTKNEKHRTFSLLPYKSGFTLSHIPISKMAFFYMVNECHFNSCKADVASKNHQGIWERFANLKKVETVSRKFGYRIVTDGFAVSILMNKPTCLTCSMPADAFSTRAHEYVTTDEGGIVSFLDNVVVAAVDPGVTDIVTVTGLNGGTRSYSSAKYYRKGLIFKSQRQTDVWNLETADIVGGIIPDRDSSSSEQIGAYARFYMGTAPILLAHRASRGYRNLRFRRYCKKQKLIVEIADFVAPRKKSAKVLVGFGDWKGLGATPISRRTCGPLQAIRFELRSRENVIMEDIDEFRTSQRCSCCENHLCNMVALTHRKKQDGTGWECTEGRKRIHKILHCKSSQSGAPRQQSGGMLHCGKTWNRDVNASRNILMLTLHQVFGRERPLAFRRDAPRSSSTTPPPPPDTDMGTQTVERFTKEATRNIFENLFNLLHPQRCPKATICSLDDYKVSHFI

SEQ ID NO: 1848 - protein, 309 aa, Microglena sp.
RETLLCTRRGILSQGGFSLTIRKHFCVSGSHDPASVPQDIVGDHRRKTKNEKLRTLSLLPYKSGFTMSHIPISKMAFFYMVNECHFDSCKADVASKNHQGIWERFANLKKVDTVSRKFGYRIVTDGFAVSILMNKPTCLTCSMPADSFSTRAHEYVTTDEGGIVSFRDNVVVAAVDPGVTDIVTVTGLDGGTRSYSSAQYYRKGLIFKSQRQTDVWNLETADIVGDIIPDRDSSRSEQIGAYARFYMGAAPILLAHRASRGYRNLRFRRYCKNRKLIVEIADFVAPREKSAKVLVGFCVIGKVWGDANL

SEQ ID NO: 1849 - protein, 330 aa, Microglena sp.
PGPPYRYTLHIMNGCVDATVFRRLRVHGAAALACKNKTWTLTRGAFYHKSGIKKQTRQKELRFADMIPMWESLRENGAALSTSRTDKISAYLSNYAKFSDEWWRLALRRRESRDNLQRYIGERKVKDSFWAGIKRCMMKELPDMKVCVSYGSAITKLKPTGPGEVAVPTGAMFASCKRIFKEDVSVTDEFKTTLMSWEAGKEKESFYKIPSVCSADVKLRLGGERFGHTKSKTMPKVADCNHTGVRLYNKRKGAQEKHRRGGFATSIVDSQKSIERYPEVRGLRFSPETCIYSDRDRSSALTIARLHCMELMGLGRPLPFAHSSSVVVDE

SEQ ID NO: 1850 - protein, 299 aa, Microglena sp.
HQAVSAPFRRKKTELERGWAIEMDQKNVSKDGDKLFIFKDILGNMRYFGSKQLHKLMPEEKPTHDPKVHKSRFGEYFLVLSVAATDRREERKPVHPDKVATASIDPGVRKTMVTYSPDNEESFMLGQGQASDLVKLLLVHDKLQSRLDTEKTLRSKDRMKIKKHMIRIRKRIFYLKKEFRDQTTNFLAARYDVLLVPQLETAKMTISAERELTTKVARKMLTLSHSVLFNRLKEKCAEYGTVFLHVLEHYTSQTCPMCGFLNKCGETYTCKNCQFTCDRDIVGAAGIFLKAVRTENPCS

SEQ ID NO: 1851 - protein, 517 aa, Microglena sp.
PTSITTTESISPHGSRSSFTRRKTGSWPRRSKMSTALTRPYSTDTLLYDIHSWGVKEDLIAIHSLLPERTKMLLKIQHSILGRDEINRQWLKSVSNSAKMIRYNVFINRYLEATEDEGYAKLVNIAPIPTVKHAFITIDTDGLLGVLKDVGLIESLEKTLTNKEHWESVFDVENIRSTGKGAFTCTIDTDGVMACTHFFRAEKKKISIKDDGTAIKKQTKTLREFSESDPNVVVVANDPGRCNIAFLTWKKNKVEEKDNGGRKRKRHCEFGSKRLTRERYYVESGVFKSRGPTKKWLSNIQDCLDDLKGNSPKRTSLVSFDAYVTVMVNHWDSRWGEMSKSRWGAQRLRLYGGKKRVLARFFNEVQEDVGERKTIVVAYSSAKFAPGGKGELSVPTTSAFKAFSYRFKGRVAVIDEFRTTKIWHKDSTTVLQSVQSEKEGRTVRGLLWCSSTMENSKLFVNRDLNAAINIHNCFTMYPIRPGILARPKKYCKLEVVVGRKIDYKLTGSLQNAVSSEV

SEQ ID NO: 1852 - protein, 239 aa, Microglena sp.
CLRKTRPTIQRSTNPASANISSSCLSLPRTGGQSGSLSIQTRLQLHPSTQASAKQWSRTHQIMRNPSCLVRDLVKLLLVHDKLQSRLDTEKTLRSKDRMKIKKHMIRIRKRIFYLKKEFRDQTTNFLAARYDVLLVPQLETAKMTISAERELTTKVARQMLTLSHSVLFNRLKEKCAEYGTVFLHVLEHYTSQTCPMCGFLNKCGETYTCKNCQFTCNRDIVGAAGIFLKAVRTENPCS

SEQ ID NO: 1853 - protein, 297 aa, Microglena sp.
ISEAAGYNTSNRRTNKWNADTQDLVKSIPSPTTSSMHDMQDHVRCYLSALPTLLQHRANRGYRSMQFFRYVGKQKTIEKVCDLIAPKAQKKTIEEKVCDVIAPKAKKTVVGFGNWSNQGYGISRSCSGPVKEIRKCLSRRQNVLFKNVDERNTSCTCHGCFQKLVNMKADSVVWRRVQNEPSALIDGAPTTTTFEKQKTVVKNVKVHKVLHCRNSVKSASSNVRCGATWNRDVNAAKNLLLLLTTWMDGKERPAAFCVPSSSPTPKTTFSGEANVGAQPTDPPGSVSSLQLLSSGPA

SEQ ID NO: 1854 - protein, 390 aa, Microglena sp.
SMGDSPLESVSGDGRYENHTMLWRKYFNVQGLETKRSRFDNRILSDGKGVSVQMKQKGKEEVVEEGENAGYPKDANIVECKDAVGALRVGVDPGMTDIVTVASSAGRIESFSSARFSEVAGYNTSKRRTYIWNDETQDLVKSIPSPYTSNMSDLQDHVRAYLKALPILLQHRANKGYRSMRFFRYVGKQKTIEKVCDVIAPRAQTTVVGFGNWSNQGYGISRSCSGPIKEIRRCLSRRKNVLFKNVDERNTSCKCHGCFQRLVNMKADSVVWRGVCKESPMDGSITVEKQKMVVKNVKVHKVLHCRDSVKSASSNVRCGATWNRDVNAGKNLLLLLTTWMDGRERPEAFCVPSPPPKTTVSIEASVSVKPTDPPGFVSSLPCYPLGQLKC

SEQ ID NO: 1855 - protein, 643 aa, Microglena sp.
DISTKESQIRSIPCFATSQNRPGGRNAHYVLNIRMPCMATNASVKLARPPMPLVSPGPSSVDGRIMARSERSGLQATNVSLTQAASKATSSSRKKNPAVVKSFSTHVCPHTNNNPTCSDSNCSCKPIFLTNIPDASKSLKSRTSDQGSTSSAQDFYEYWDSSRQDLYRQLLWLPKTGSQGLVSSSLNGFARSTPARSSFSITKTEPLKTSLEKTSCPSFKYIVADGTVEDATKSNAKPKLRTLKLKLNPTKAQKSMLAEFAGCSRFMYNKAVAARLGVGSTHKSVFRIRDRYVTNKVRGEGKMPNPYFKNRQWLLQCPKSVRQSAIKAALANIKACFSNLKAGNIKQFSAPFRRKKTELERGWAIEMDQKNVSKDGDKLFIFKDILGNMRYFGSKQLHKLMPEEKPTHDPKVQKSRFGEYFLVLSVAARDRRAERKPVHPDKVATASIDPGVRKTMVTYSPENEESFMLGQGQASDLVKLLLVHDKLQSRLDTEKTLRSKERMKIKMQMIRIRKRIFYLKKEFRDQTTNFLAARYDVLLVPQLETAKMTISAERELTTKVARQMLTWSHSVLFNRLKEKCEEYGTVFLHVLEHYTSQTCPMCGFLNKCGETYTCKNCKFTCDRDIVGAAGIFLKAVRTENPCS

SEQ ID NO: 1856 - protein, 336 aa, Microglena sp.
SRRVKKRSLKKEKNAGYPKDANIVECKDAVGALRVGVDPGMTDIVTVASSAGRIESFSSARFSEVAGYNTSKRRTYKWNDETQDLVKSIPSPNMSNMVDLQDHVRAYLEALPILLQHRANKGYRSMRFFRYVGKQKTIEKVCDVIAPRAQTTVVGFGNWSNQGYGISRSCSGPIKEIRRCLSRRKNVLFKNVDERNTSCKCHGCFQRLVNMKADSVVWRGVCKESPIDGSITVEKQKMVVKNVKVHKVLHCRDSVKSASSNVRCGATWNRDVNAAKNLLLLLTTWMDGRERPEAFCVPSPPPKTAVSIEASVSAKPTDPPGFVSSLPCYPLGQLKC

SEQ ID NO: 1857 - protein, 327 aa, Microglena sp.
CPKSVRQSAIKAALANIKACFSNLKAGNIKQFSAPFRRKKTELERGWAIEMDQHNISKDGDKLFIFKDTLGNMRYFGRKQLQKLMPEKNPTHDPKVQKSRFGEYFLVLSVAARDRREERKPVHPGKVATASIDPGVRKTMVTYSPENEESFMLGKGQASNLVKLLLVHDKLHSRLDTEKTLRSKERMKIKMQMIRIRKIIFYLKKEFRDQTTNFLAARYDVLLVPQLETAKMTISAERELTTKVARQMLTLSHSVLFNRLKEKCEEYGTVFLHVLEHYTSQTCPMCGFLNKCGETYTCKNCQFTCDRDIVGAAGIFLKAVRTENPCS

SEQ ID NO: 1858 - protein, 655 aa, Microglena sp.
GSELTASFQMKSRISYESVKDVIGKVLGSDDPDYINSYPIYFDQVLNYAGHTLSTVVSNNAWVPLVPRLTRLTKATLNALGAPKTIRVYDVIRVIQQEIQEMESWPESVQEYVREVRVRLKVPDGSRLYDDYGKDMDFPTMVRFNYWMQTRLEAIGARRIRLMPIFNVQRAHVRLDMKTLVNLFRHVFPKDPNIVELSKWKNVKDPDRFMLPLKPAVKKKKSCGPGEWEAYKLAKQKYDADVNDIKATDEYRHAKGRYDTLVNARKTVAGSFFKKPPVKTGWVFDCSICTDGVSLSMQYSKTVQVRVSDLKKTSKRSRDDEGMSVSEQYDHKLKTTLPDMGIVVLGVDPGRSNIATVTYLADDKSKTWKLTRGAFYHKSGIKKQKKQQEKRFSDMIPRWESLRENGAALSTSRTDDISVYLKNYATFSDEWWRMALRRRESRDNFQRYIGKRKAMDSFWAGIKRNMKLDHPDLRVRVAYGSAITTLKATGPGEVAVPTGSMFASCKRLFKEEVHVTDEFKTTLMSWETGAKKECVYKIPSVQITTEGQIRLGYELLGHTPLKETPKVSYRDQLAVRVYCTRKQIQEKHRRGGLAPSLVDNKSIKRYPEVRGLRFSPETSTYSDRDRSSALTIARLHCMELLGQGRPLPFCRDACC

SEQ ID NO: 1859 - protein, 397 aa, Microglena sp.
TPEKTVAGSFFRKPPVKNGWVFDCSICTDEVSLSMQYSKTVQVLVSDLKNTCKKPRKEEGIKIAEKYDGSLKTILPDMGIVVLGVDPGRSNIATVTYLADDKNKTWTLTRGAFYHKSGIKKQTRQKELRFADMIPMWESLRENGAALSTSRTDKISAYLSNYAKFSDEWWRLALRRRESRDNLQRYIGKRKVKDSFWAGIKRCMMKELPDMKVCVAYGSAITKLKPTGPGEVAVPTGAMFASCKRIFKEDVSVTDEFKTTLMSWETGKEKERVYKIPSVCSADVKLRLGGERFGHTKSKTMPKVADCDHLGVRLYNKRKGAQEKHRRGGFATSLVDSQKSIERYPEVRGLRFSPETCIYSDRDRSSALTIARLHCMELMGLGRPLPFAHSSSVVVDE

SEQ ID NO: 1860 - protein, 451 aa, Microglena sp.
KRKQQKKRPRLFSILPRKSGFTISYVPISSMTLMKLLSMGDSPLESFRGDGRHENHSMLWRKYFNAQGLETKGSRFDNRILSDGKGVSVKMKHQASEDVAVEGGDNAGYPKDAILEDCQDASLRVGVDPGMTDIVTVASSDGRAESFSSARFSEAAGYNTSNRRTNKWNVDTQDLVKSIPSPTTSSMHDMQDHVRGYLSALPTLLQHRASRGYRSMRFFRYVGKQKTIEKVCDLIAPKAQKKTIEEKVCDVIAPKAQKTIVGFGNWSNQGYGISRSCSGPVKEIRKCLSRRQNVLFKNVDERNTSCTCHGCFQKLINMKADSVVWRRVQNEPPSLINGAPTTTTTTTIEKQKTVVKNVKVHKVLHCRNSVKSASSNVRCGATWNRDVNAAKNLLLLLTTLMDGKERPATFCVPSSSPTPKNTVSGEANVGAQPTDPPGSVSSLQLLSSGPA

SEQ ID NO: 1861 - protein, 424 aa, Microglena sp.
AFQVGTCKESRHLHVAPEAAQKKKKSCGPGEWEAYKSVLKQYDDDVKDIKATDEYRHAKGLYDTLVNAQKTVAGSFFRKPPVKNGWVFDCSVCTDGVSLSMQYSKTVQVLVSDLKKTCKNPRKEEGIKIAEKYDGSLKTILPDMGIVVLGVDPGRSNIATVTYLADDKKKTWTLTRGAFYHKSGIKKQTRQKELRFADMIPMWESLRENGAALSTSRTDKISAYLSNYAKFSEEWWRLALRRRESRDNLQRYIGKRKVKDSFWAGIKRCMMKELPDMKVCVAYGSAITKLKPTGPGEVAVPTGAMFASCKRIFKEDVSVTDEFKTTLMSWETGKEKERVYKIPSVCSADVKLRLGGERFGHTKSKTMPKVADCDHLGVRLYNKRKGAQEKHRRGGFSTSLVDSQKSIERYPEVRGLRFSPETCI

SEQ ID NO: 1862 - protein, 371 aa, Microglena sp.
GGRGRCQTRTSRIANGCFSAPKAYAKSAIKAALANIKACFSNLKAGNIKQFSAPFRRKKTELERGWAIEMDQKNVSKDGDKLFIFKDILGNMRYFGSKQLHKLMPEENPTHDPKVHKSRFGEYFLVLSVAARDRRAERKPVHPDKVATASIDPGVRKTMVTYSPENEESFMLGQGQASDLVKLLLVHDKLQSRLDTEKTLRSKERMKIKMQMIRIRKRIFYLKKEFRDQTTNFLAARYDVLLVPQLETAKMTISAERELTIKVARQMLTLSHSVLFNWLKEKCEEYGTVFLHVLEHYTSQTCPMCGFLNKCGETYTCKNCQFTCDRDIVGAAGIFLKAVRTEKSPGELTPMIPIWRIHCLSYYMSPGPPDV

SEQ ID NO: 1863 - protein, 289 aa, Microglena sp.
HLLQVASSLSARLVLAKLLGTIQASVAPTKWNDETQDLVKSIPSPNTSNMVDLQDHVRAYLKALPILLQHRANKGYRSMRFFRYVGKQKTIEKVCDVIAPRAQTTVVGFGNWSNQGYGISRSCSGPIKEIRRCLSRRKNVLFKNVDERNTSCKCHGCFQRLVNMKADSVVWRGVCKESPIDGSISVEKQKMVVKNVKVHKVLHCRDSVKSASSNVRCGATWNRDVNAAKNLLLLLTTWMDGRERPEAFCVPSPPPKTTVSIEASVSAKPTDPPGFVSSLPCYPLGQLKC

SEQ ID NO: 1864 - protein, 331 aa, Microglena sp.
GGRGRCQTRTSRIANGFASVPKSVRQSAIKAALANIKACFSNLKAGNIKQFSAPFRRKKTELERGWAIEMDQKNVSKDGDKLFIFKDILGNMRYFGSKQLHKLMPEENPTHDPKVHKSRFGEYFLVLSVAARDRRAERKPVHPDKVATASIDPGVRKTMVTYSPENEESFMLGQGQTSDLVKLLLVHDKLQSRLDTEKTLRSKERMKIKMQMIRIRKRIFYLKKEFRDQTTNFLAARYDVLLVPQLETAKMTISAERELTTKVARQMLTLSHSVLFNRLKEKCEEYGTVFLQVLEHYTSQTCPMCGFLNKCGETYTCHLRQRHCGGSWHLP

SEQ ID NO: 1865 - protein, 321 aa, Microglena sp.
TPTAYWASSRTWVSSRVSKKTLTNKEHWESVFDVEKHPFYWKGVFTCTIDTDGVMACTHFLRAEKKKISIKDDGTAIKKQTKTLREFSESDPNVVVVANDPGRCNIAFLTWKKNKVEEKDNGGRKRKRHCEFGSKRLTRERYYVESGVFKSRGPTKKWLSNIQDCLDDLKDNSPKRTSLESFDAYVTVMVNHWDSRWGEMSKSRWGAQRLRLYGGKKRVLARFFNEVQADVGERKTIVIAYGSSKFAHGGKGELSVPTTSAFNAFRDRFKGELPSLTNSVPQRSGTRTAPPSSRVCSPKKKGARFEACYGAVPPWRTASCL

SEQ ID NO: 1866 - protein, 510 aa, Microglena sp.
TSLSEETFQEDCQSGGPVPRIENRHNHPRGPRACDPHQRGCQSLEGSLSAARGKQFNTRAHLTMRLFHHVLTELGEVGRVDPKDRKTKKSHPRLFSILPRKNGFTISYVPISSMTFMKLLSMGDSPLESVSGDGRYENHTMLWRKYFNVQGLETKRSRFDNRILSDGKEVSVQMKQKGKEEVVEEGENAGYPKDANIVECKDAVGALRVGVDPGMTDIVTVASSAGRIESFSSARFSEVAGYNTSKRRTYKWNDETQDLVKSIPSPNTSNMVDLQDHVRAYLTALPILLQHRANKGYRSMRFFRYVGKQKTIEKVCDVIAPRAQTTVVGFGNWSNQGYGISRSCSGPIKEIRRCLSLRKNVLFKNVDERNTSCKCHGCFQRLVNMKADIVVWRGVCKESPIDGSITVGKQKMVVKNVKVHKVLHCRDSVKSASSNVRCGATWNRDVNAAKNLLLLLTTWMDGRERPEAFCVPSPPPKTTVSIEASVSAKPTDPPGFVTSLPCYPLGQLKC

SEQ ID NO: 1867 - protein, 789 aa, Microglena sp.
ECSREPVCRSRLHQNVFGVQFVMEHGVVLVHEADQHDDVAELVDYEGDKDEECAPARAICVVKMKLSTFIPHDWLRKKIDTLVLDMNKLLGEGYIFANFHIARLFENGIAVPPVNCNFFYRCLLAVSTNKCKGSTLGEDFESSCLLFDLLREPGQSKVDIRGNVKNQIIADLSILMATMASNHLWTNLERRITTYLKWKYPQIAKRLRSDIVAAVIKCPTKNLDVIFKMSPHVAKLPTKLPIARLRSAKSAVALAKKRVGRKEPEVSPLRVRLTKHQARFEKLSEAWLSSKNLRVDEDNAKRFFARDVAFCLRGVLPLPSGNTFASRAHMTLPLYHKILSETIEEKRKTKNEKLCTFSLLPYKSGFTLSHIPISKMAFFYMVNECHFDSCKADVASKNHQGIWERFANLKKVETVSRKFGYRIVTDGFAVSILMNKPTCLTCSMPADSFSTRAHEYVTTDEGGIVSFRNNVVVAAVDPGVTDIVTVTGLDGGTRSYSSAQYYRKGLIFKSQRQTDVWNLETADIVGGIIPDRDSSRTEQIGAYARFYMGAAPILLAHRASRGYRNLRFRRYCKKQKLIVEIADFVAPREKSAKVLVGFGDWKGLGATPISRWTCGPLQAIRFELRSRGNVIMEDVNEFRTSQRCSCCENRLCNMVALTHRKKQDGNGWECTEGRKRIHKILHCKSSQSGAPRQQSGGRLHCGKTWDRDVNASRNILMLTLHQVFGRERPLAFCRDAPRSSSKTPPPPDTDMGTQTVERFTKEATRNIFENLFNLLHPPTLPKSNDLQSG

SEQ ID NO: 1868 - protein, 788 aa, Microglena sp.
CTKLCKMATKPPTVAKLKELLKLAEVAYSSKDKKDDIVRFCEDNGLIARPPPEYKTVEKMCVVKCALKKAMSLDDEEFGKFRGHVDQLVNVVSRMLRRSSLVLTFHVTRLMEGDLPIPNMYDMKDTYWKDWLRIGVDGVFPDEESRISYEAVKDVIGKVLGSDDPDYINSYPIYFNQVLNYAGHTLSTVVSNNAWVPLVPRLTRLTKGTLKALGAPKTIRVYDVMRFIQQEIQEMESWPESVQEYVREVRVRLKVPDGSRLYDDYGKDMDFPTMVRFNYWMQTRFEAIGARRIRLMPIFNVQRAHVRLDMKTLVNLFRHVFPKDPNIVELSKWENVKDPDRFMLPLKPAFKKKKSCGPGEWEAYKLAQQKYDADVKDIKATDEYRHAKGRYDTLVNARKTVAGSFFKKPPVKTGWVFDCSICTDGVSLSMQYSKTVQVRVSDLKKTSKRSRDEEGMSVSEQYDHKLKTTLPDMGIVVLGVDPGRSNIATVTYLADDKSKTWKLTRAAFYHKSGIKKQKKQQEKRFSDMIPRWESLRENGAALSTSRKDDISAYLKNYATFSDEWWRMALRRRESRDNFQRYIGKRKAMDLFWAGIKRNMKLDHPDLRVRVAYGSAITKLKATGPGEVAVPTGSMFASCKRLFKEEVHVTDEFKTTLMSWETGAKKECVYKIPSVQITTEGQIRLGYELLGHTPLKETPKVSYRDQLAVRVYCTRKKIQENHRRGGLAPSLVDNKSIKRYPEVQGLRFSPETSTYSDRDRSSALTIARLHCVGLLGQGRPLPFCRDACC

SEQ ID NO: 1869 - protein, 459 aa, Microglena sp.
PFLCTTRYCRRPSKKNEKRKTKSFAHSRCCLTNLDSLCRTFRFPKMAFFYMVNECHFDSCKADVASKNHQGIWERFANLKKVETVSRKFGYRIVTDGFAVSILMNKPTCLTCSMPADSFSTRAHEYVTTDEGGIVSFRDNVVVAAVDPGVTDIVTVTGLDGGTRSYSSAQYYRKGLIFKSQRQTDVWNLETADIVGDIIPDRDSSRSEQIGAYARFYMGAAPILLAHRASRGYRNLRFHRYCKKQKLIVEIADFVAPREKSAKVLVGFGDWKGLGATPISRRTCGPLQAIRFELRSRGNVIMEDVDEFRTSQRCSCCENRLCNMVALTHRKKQDGTGWECTEGRKRIHKILHCKSSQSGAPRQQSGGRLHCGKTWDRDVNASRNILMLTLHQVFGRERPLAFRRDAPRSSSRTPPPPDTDMGTQTVERFTKEATRNIFENLFNLLHPPTLPKSNDLQSG

SEQ ID NO: 1870 - protein, 257 aa, Microglena sp.
RVSVQMKQKGKEEVVEEGENAGYPKNANIVECKDAVGALRCRSRPWNDNIVTVASSACRIESFSSARFSEVAGYNTSKRRTYKWNDETQDLVKSIPSPNTSNMSDLQDHVRAYLKALPILLQHRANKGYRSMRFFRYVGKQKTIEKVCDVIAPRAQTTVVGFGNWSNQGYGISRSCSGPIKEIRRCLSRRKNVLFKNVDGRNTSCKCHGCFQRLVNMKADSVVWRGVCKESPIDGSITVEKQKMVGEERQGPQSTAL

SEQ ID NO: 1871 - protein, 562 aa, Microglena sp.
PKQHPRLPHRAGKKNPAVVKSFSTHVCPHTNNNPTCSDSNCSCKPIFLTNIPDASKSLKSRTSDQGSTSSAQDFYEYWDSSRQDWYRQLLWLPKTGSQGLVSSSLNGFARSTPARSSFSITKTEPLKTSLDKTSCPSFKYIVADGTVEDATKSNAKTKLRTLKLKLNPTKAQKSMLAEFAGCSRFMYNKAVAARLGVGSTHKSVFRIRDRYVTNKVRGKGKMPNPYFKNRQWLLQCPKSVRQSAIKAALANIKACFSNLKAGNIKQFSAPFRRKKTELERGWAIEMDQKNVSKDGDKLFIFKDILGNMRYFGSKQLHKLMPEENPTHDPKVQKSRFGEYFLVLSVAARDRRAERKPVHPDKVATASIDPGVRKTMVTYSPENEESFMLGQGQASDLVKLLLVHDKLQSRLDTEKTLRSKERMKIKKQMIRIRMRFFYLKKEFSDQTTNFLAARYDVLLVPQLETAKMTISAEQELTTKVARQMLTLSHSVLFNRLKEKCAEYGTVFLHVLEHYTSQTCPMCGFLNKCGETYTCKNCQFTCDRDIVGAAGIFLKAVRTENPCS

SEQ ID NO: 1872 - protein, 595 aa, Microglena sp.
HTPQRTRRTILSVYAKTMVSSPDPPEYKTVEKMCVVKCALKKAMSLDDEEFGKFRGHVDQLVNVVSRMLRRSSLVLTFHVTRLMEGDLPIPNMYDMKDTYWKDWLRIGVDGVFPDEESRISYEAVKDVIGKVLDSDDPDYINSYPIYFDQVLNYAGHTLSTVVSNNAWVPLVPRLTRLTKATLKALGAPKTIRVYDVMRVIQQEIQEMESWPESVQEYVREVRVRLKVPDGSRLYDDYGKDMDFPTMVRFNYWMQTRLEAIGERRIRLMPIFNVQRAHVRLDMKTLVNLFRHVFPKDPNIVELSKWENVKDPDRFMLPLKPAVKKKKSCGPGEWEAYKLAQQKYDADVKDIKATDEYRHAKGRYDTLVNARKTVAGSFFKKPPVKTGWVFDCSICTDGVSLSMQYSKTVQVRVSDLKKTSKRSRDEEGMSVSEQYDHKLKTTLPDMGIVVLGVDPGRSNIATVTYLADDKSKTWKLTRGAFYHKSGIKKQKKQQEKRFSDMIPRWESLRENGAALSTSRKDDISAYLKNYATFSDEWWRMALRRRESRDNFQRYIGKRKAMDSFWAGIKRNMKLDHPDLRVRIAYGSAIKTMKAT

SEQ ID NO: 1873 - protein, 555 aa, Microglena sp.
PSCQPSCQQLDFVRQRVQWLLRRRGSVGRNQRSPLRVRLTKLQARFEKLSEAWLSSKNLRVDEDNAKRFFARDVAFCLRGVLPLPSGNTFASRAHMTLPLYHKILSETIEEKRKTKNEKLRTFSLLPYKSGFTMSHIPISKMAFFYMVNECHFDSCKADVASKNHQGIWERFANLKKVDTVSRKFGYRIVTDGFAVSILMNKPTCLTCSMPSDSFSTQAHEYVTTDEGGIVSFRDNVVVAAVDPGVTDIVTVTGLDGGTRSYSSAQYYRKGLIFKSQRQTDVWNLETADIVGDIIPDRDSSRSEQIGAYARFYMGAAPILLAHRASRGYRNLRFRRYCKKQKLIVEIADFVAPREKSAKVLVGFGDWKGLGATPISRRTCGPLQAIRFELRSRGNVIMEDVDEFRTSQRCSCCENRLCNMVALTHRKKQDGTGWECTEGRKRIHKILHCKSSQSGAPRQHSGGRLHCGKTWDRDVNASRNILMLTLHQVFGRERPLAFRRDAPRSSSKTPPPPDTDMGTQTVERFTKEATRNIFENLFNLLHPPTLPKSNDLQSG

SEQ ID NO: 1874 - protein, 319 aa, Microglena sp.
IKDANIVECKDSVGALRVGVDPGMTDIVTVASSAGRIESFSSARFSEVAGYNTSKRRTYKWNDETQDLVKSIPSPNTSNMSDLQDHVRAYLKALPILLQHRANKGYRSMRFFRYVGKQKTIEKVCDVIAPRAQTTVVGFGNWSNQGYGISRSCSGPIKEIRRCLSRRKNVLFKNVDERNTSCKCHGCFQRLVNMKADSVVWRGVCKESPIDGSITVEKQKMVVKNVKVHKVLHCRDSVKSASSNVRCGATWNRDVNAAKNLLLLLTTWMDGRERPEAFCVPSPPPKTTVSIEASVSAKPTDPPGFFSSFPCYPLGQLKC

SEQ ID NO: 1875 - protein, 331 aa, Microglena sp.
TPEKKVAGSFFKKPPVKTGWVFDCSICTDGVSLSMQYSKTVQVRVSDLKKASKRSRDDEGMSVSEQYDHKLKTTLPDMGIVVLGVDPGRSNIATVTYLADDKSKTWKLTRGAFYHKSGIKKQKKQQEKCFSDMIPRWESLRENGAALSTSRTDDISAYLKNYATFSDEWWRMALLRRESRDNFQRYIGKRKAMDSFWAGIKRNMKLDHPDLRVRVAYGSAITTLKATGPGEVAVPTGSMFASCKRLFKEEVHVTDEFKTTLMSWETGAKKECVYKNSKCPNNHGRADSSRLRVVESHPIEGDSKCLLSRPVGGEGVAAHVNKSKKNTGGVA

SEQ ID NO: 1876 - protein, 349 aa, Microglena sp.
RRPVRSLVKKKVSRSQKNTTAHLKRYCPIWVSSSWVWTQDGATSLTVTYLADDKNKTWTLTRGAFYHKSGIKKQTRQKELRFADMIPMWESLRENGAALSTSRTDKISAYLSNYAKFSDEWWRLALRRRESRDNLQRYIGKRKVKDSFWAGIKRCMMKELPDMKVCVAYGSAITKLKPTGPEEVAVPTGAMFASCKRIFKEDVSVTDEFKTTLMSWETGKEKERVYKIPSVCSADVKLRLGGERFGHTKSKTMPKVADCDHLGVRLYNKRKGAQEKHRRGGFATSLVDSQKSIERYPEVRGLRFSPETCIYSDRDRSSALTIARLHCMELMGLGRPLPFAHSSSVVVDE

SEQ ID NO: 1877 - protein, 793 aa, Microglena sp.
KMATKPPTVAKLKELLKLAEVPYSSKSNKDDLVRLCEDNGLIARPPPEYKTVEKMCVVKCALKKAMSLDDEEFGKFREHVDQLVNVVSRMLRRSSLVLTFHITSLLEKGLDIPDLYNMKDTYWKDWLRIGVDGIFPDEESKISYEAVKDSIGDVIGNDDADYIKSYPIYFDQVLNYAGHTLSTVVSNNAWVPLIPRLARLTSTTLNRLNAPKTLDTSKIIREYDVMQAIQQEVQNMEGWPESVQEYVNEVREMLSVPDGSRVYDNYGKDMDFPTMVRFNYWIQTRLEDMDARRIRLMPIFNVQRVHVRLDLKTLVNLFRHMFPNDQNIVELSKWEHVKNPESFMLPQRPAVKKKKSCGPGEWEAYKSVLKQYDDDVKDIKATDEYRHAKGLYDTLVNARKTVAGSFFRKPPVKNGWVFDCSICTDGVSLSMQYSKTVQVLVSDLKKTCKKPRKEEGIKIAEKYDGSLKTILPDMGIVVLGVDPGRSNIATVTYLADDKNKTWKLTRGAFYHKSGIKKQTRQKELRFADMIPMWESLRENGAALSTSRTDNISAYLSNYAKFSDEWWRLALRRRESRDNLQRYIGKRKVKDSFWAGIKRCMMKELPDMKVCVAYGSAITKLKPTGPGEVAVPTGAMFASCKRIFKEDVSVTDEFKTTLMSWETGKEKERVYKIPSVCSADVKLRLGGERFGHTKSKSMPKVADCDHLGVRLYNKRKGAQEKHRRGGFATSLVDSQKSIERYPEVRGLRFSPETCIYSDRDRSSALTIARLHCMELMGLGRPLPFAHSSSVVVDE

SEQ ID NO: 1878 - protein, 631 aa, Microglena sp.
SEKVLGSDDPDYINSYPIYFDQVLNYAGHTLSTVVSNNAWVPLVPRLTRLTKATLNALKAPKTIRVYDVMRVIQQEIQEMESWPESVQEYVREVRVRLKVPDGSRLYDDYGKDMDFPTMVRFNYWMQTRLESIGAHRIRLMPIFNVQRAHVRLDMKTLVNLFRHVFPKDPNIVELSKWKDVKDPDRFMLPLKPAVKKKKSCGPGEWEAYKLAQQKYDADVNDIKDTDEYRHAKGRYDTLVNARKTVAGSFFKKPPVKTGWVFDCSICTDGVSLSMQYSKTVQVRVSDLKKTSKRSRDNEGMSVSEQYDHKLKTTLPDMGIVVLGVDPGRSNIATVTYLADDKSKTWKLTRGAFYHKSGIKKQKKQQEKRFSDMIPRWESLRENGAALSTSRTDDISAYLKNYDTFSDEWWRMALLRRESRDNFQRYIGKRKAMDSFWAGIKRNMKLDHPDLRVRVAYGSAITTLKATGPGEVAVPTGSMFASCKRLFKEEVHVTDEFKTTLMSWETGAKKECVYKIPSVQITTEGQIRLGYELLGHTPLKETPNVSYRDQLAVRVYCTRKQIQEKHRRGGLAPSLVDNNSIKRYPEVRGLRFSPETSTYSDRDRSSALTIARLHCMELLGQGRPLPFCRDA

SEQ ID NO: 1879 - protein, 479 aa, Microglena sp.
NKKSVRKQERPIYAGHTLSTVVSNNAWVPLVPRLTRLTKATLKALKAPTTIRVYDVMRVIRQEVQEMESWPDSVQKYVREVRVRLKVPDGDRLYDDYGKCVDFQTMVRFNYWMQTRLETMEERRIRLMPIFSVHRVHVRLDLKTLVNMFRHYFPKDPNIAELSKWKHVKNPDNFMLPQRPAQKKKKSCGPGEWEVYKSALKKYDDDVKDIKATEEYRHANGLYDTLVNARKTVACSFFKNPPVKNGWVFDCSICTDGVSSSMQYSKKVQIRVSDLKKTSMRSRDNEGLSVAKQYDRKLEPTLTEMGIVVLGVDPGRSNIETVTYLAKGKSKTWQLTRGAFYHKSGIKKQKKQQEKRFSDMILRWESLRENGAALGTSRKDDISAYLKNYATFSDEWWRMALRRRESRDNFQRYIGKRKAMDSFWAGIKRNMKLDHPDLRVRIAYGSAIKTMKATGPGEVAVPTDLCSLPASASSKRRFM

SEQ ID NO: 1880 - protein, 336 aa, Microglena sp.
SRRVKKRSLKKEKTQAIPKTQNIVECKDAVGALRVGVDPGMTDIVTVASSAGRIESFSSARFSEVAGYNTSKRRTYKWNDETQDLVKSIPSPNTSNMVDLQDHVRAYLKALPILLQHRANKGYRSMRFFRYVGKQKTIEKVCDVIAPRAQTTVVGFGNWSNQGYGISRSCSGPIKEIRRCLSRRKNVLFKNVDKRNTSCKCHGCFQRLVNMKADSVVWRGVCKESPIDGSITVEKQKMVVKNVKVHKVLHCRDSVKSASSNVRCGATWNRDVNAAKNLLLLLTTWMDGRERPEAFCVPSPPPKTTVSIEASVSAKPTDPPGFVSSLPCYPLGQLKC

SEQ ID NO: 1881 - protein, 300 aa, Microglena sp.
KKQKKSHPRLFSILPRKNGFTISYVPISSMTFMKLLSMGDSPLESVSGDGRYENHTMLWRKYFNVQGLETKRSRFDNRILSDGKGVSVQMKQKGQEEVVEEGENAGYPKDTNIVECKDAVGAMRVGVDHGMTDIVTVASIAGRIESFSSARFSEVAGYNTSKRRTYKWNDETQDLVKSIPSPNTSNMVDLQDHVRAYLKALPILLQHRANKGYRFMRFFRYVGKQKTIEKVCDVIAPRAQTTVVGFGNWSNQGYGISRSCSGPSKRSGGASHVVRMFCSKTSTNATLLVNVTAASRGLST

SEQ ID NO: 1882 - protein, 595 aa, Microglena sp.
AYLFAHFHITRCLDDGDFDVKQLPHLDRNFYYRCLLAVSTSNVRKDTLGQSFNDTMVAFDALRPAGYVKVDVRPWGQVIADVSIQMATMACNSVWANVDRVVIKYLRLKHPSLKKHFKKIVKAVVQYPESKIDTIIPEGLVHAIHIKEVVSHLRTLFPLPRGKQFNTRAHLTMRLFHHVLTELGEVGRVDPKDKKTKKSHPRLFSILPRKNGFTISYVPILSMTFMKLLSMGDSPLKSVSGDGRYENHTMLWRKYFNVQGLETKRSCFDNRILSDGKGVSVQMKQNGKEEVVEEGENAGYPKDANIVECKDAVGALRVGVDPGMTDIITIASSACRIESFSSARFSEVAGYNTSKRRTYKWNDETQDLVKSIPSPNTSNMVDLQDHVRAYLKALPILLQHRANKGYRSMRFFRYVGKQKTIEKVCDVIAPRAQTTVVGFGNWSNQGYGISRSCSGPIKEIRRCLSRRKNVLFKNDDERNTSCKCHGCFQRLVNMKADSVVWRGVCKESPIDGSITVEKQKMVVKNVKVHKVLHCRDSVKSASSNVRCGATWNRDVNAAKNLLLLLTTWMDGRESDLRHSVFPRLPPKPQFPSRRV

SEQ ID NO: 1883 - protein, 655 aa, Microglena sp.
CMRNLHVLNIRMPCMATNASVKLARPPMPLVSPGPSSVDWRIMARSERSGLQATNVSLTQAASKATSSSWKKNPAVVKSFSTHVCPHTNNDPTCSDSNCSCKPIFLTNIPDASKSRTSDQGSTSSAQDFYEYWDSSRQDLYRQLLWLPKTGSQGLVSSSLNGFARSTPVRSSFLITKTEPLKTSLEKTSCPSFKYIVADGTVKDATKSNAKPKLRTLKLKLNPTKAQKSMLAEFAGCSRFMYNKAVAARLGVGSTHKSVFRIRDRYVTNKVKGEGKMPNRYFKNRQWLLQCTKSVRQSAIKAALANIKACFSNLKAGNIKQFSAPFRRKKTELERGWAIEMDQHNISKDGDKLFIFKDTLGNMRYFGSKQLQKLMPEKNPTHDPKVQKSRFGEYFLVLSVAARDRREERKPVHPGKVATASIDPGVRKTMVTYSPENEESFMLGKGQASDLVKLLLVHDKLHSRLDTEKTLRSKERMKIKKQMIRIRKRFFYLKKEFRDQTTNFLAARYDVLLVPQLETAKMTISAERELTTKVARQMLTLSHSVLFNRLNEKCEEYGTVFLHVLEHYTSQTCPMCGFLKQVWEERHTPARTVNSPATEILWGSWHLPEDSSNRKSLFVKDSSPGGVDPYDTPMENSLSFLLHVPRTPGCVIRNS

SEQ ID NO: 1884 - protein, 399 aa, Microglena sp.
NCFYCHLKDPNIVELSKWKNVKDPDRFMLPLKPAFKKKKSCGPGEWEAYKLAQQKYDADVKDIEATDEYRHAKGRYGTLVNARKTVAGSFFKKPPVKTGWVFDCSICTDGVSLSMQYSKTVQVRVSDLKKTSKRSRDDEGMSVSEQYDHKLKTTLPDMGIVVLGVDPGRSNIATVTYLADDKSKTWKLTRGAFYHKSGIKKQKKQQEKRFSDMIPRWESLRENGAALSTSRKDDISAYLKNYATFSDEWWRMALRRRESRDNFQRYIGKRKAMDSFWAGIKRNMKLDHSDLRVRVAYGSAITNLKATGPGEVAVPTGSMFASCKRLFKEEVHVTDEFQDDSHVLGNRCQEGMCSQNSKCPNNHGRADSSRLRVVGSHPIEGDSKGLLSRPVGGEGVLHT

SEQ ID NO: 1885 - protein, 622 aa, Microglena sp.
QCIRNLHVLNIRMPCMATNASVKLARPPMPLVSPGPSSVDGRIMARSERSGLQATNVSLTQAASKATSSSRKKKPAVVKSFSTHVCPHTNNNPTCSDSNCSCKPIFLTNIPDASKSLKSRTSDQGSTSSAQDFYEYWDSSRQYLYRQLLWLPKTGSQGLVSSSLNGFARSTPARSSFSITKTEPLKTSLEKTSCPSLKYIVADGTVEDATKSNAKPKLRTLKLKQNPTKAQKSMLAGFAGCSRFMYNKAVAARLGVGSTHKSVFRIRDRYVTNKVRGEGKMPNPYFKNRQWLLQCPKSVRQSAIKAALANIKACFSNLKAGNIKQFSAPFRRKKTELERGWAIEMDQKNVSKDGDKLFIFKDILGNMRYFGSKQLHKLMPEENPTHDPKVQKSRFGEYFLVLSVAARDRRADRKPVHPDKVATASIDPGVRKTMVTYSPENEESFMLGQGHASDLVKLLLVHDKLQSRLDTEKTLRSKKRMKIKMQMIRIRKRIFYLKKEYRDQTTNFLAARYDVLLVPQLETAKMTISAERELTTKVARQMLTLSHSVLFNRLKEKCEEYGTVFLHVLEHYTSQTCPMCGFLNKCGGETYTCKNCQFTCDRDIVGAAGIFLKAVRTENPCS

SEQ ID NO: 1886 - protein, 268 aa, Microglena sp.
QTIELAPSSISLNNRILKILPRTFKDDCILKISNKNTKKHKNLTIENNVDVVRYKGEYFSHILDVVVNNVKNESKDYTMCGIDPGVRSFATVYSCSILDNGKVFSYNTGDYTHRIDLLKKLNKKKSDMMTRRVVRKKQYNKIEKKKKDVVDCLHWETINHVLNHNDIVFYGDIKSQDITKVNKNKTLNQDFNDLKFYIFKNRLEYKASVLQKKVVIMNECYTTKTCSSCGTLNDDVGNKKVFTCPICNLVTGRDANASKNILMKGLLS

SEQ ID NO: 1887 - protein, 801 aa, Microglena sp.
PRMEHVCDVCIKSSVMYKLCKMATKPPTVAKLKELLKLAEVAYSSKDKKDDIVRLCEDNGLIAKPPPEYKTVEKMCVVKCALKKAMSLDDEEFGKFREYVDQLVNVVSRMLRRSSLVLTFHVTRLMEGDLPIPNMYDMKDTYWKDWLRIGVDGVFPDEESRISYEAVKDVIGKVLGSDDPDYINSYPIYFDQVLNYAGHTLSTVVSNNAWVPLVPRLTRLTKATLNALKAPKTIRVYDVMRVIQQEIQEMESWPESVQEYVREVRVRLKVPDGSRLYDDYGKEMDFPTMVRFNYWMQTRLEAIGARRIRLMPIFNVQRAHVRLDMKTLVNLFRHVFPKDPNIVELSKWKDVKDPDRFMLPLKPAFKKKKSCGPGEWEACKLAQQKYDADVNDIKDTDEYRHAKGRYDTLVNARKTVAGSFFKKPPVKTGWVFDCSICTDGVSLSMQYSKTVQVRVSDLKKTSKRSRDDEGMSVSEQYDHKLKTTLPDMGIVVLGVDPGRSNIATVTYLADDKSKTWKLTRGAFYHKSGIKKKKKQQEKRFSDMIPRWESLRENGAALSTSRTDDISAYLKNYDTFSDEWWRMALLRRESRDNFQRYIGKRKAMDSFWAGIKRNMKLDHPDLRVRVAYGSAITTLKATGPGEVAVPTGSMFASCKRLFKEEVHVTDEFKTTLMSWETGAKKECVYKIPSVQITTEGQIRLGYELLGHTPLKETPNVSYRDQLAVRVYCTRKQIQEKHRRGGLAPSLVDNNSIKRYPEVRGLRFSPETSTYSDRDRSSALTIARLHCMELLGQGRPLPFCRDA

SEQ ID NO: 1888 - protein, 786 aa, Microglena sp.
CIKLCKMATKPPTVAKLKELLKLAEVAYSSKDKKDDIVRLCEDNGLIARPPPEYKTVEKMCVVKCALKKAMSLDDEEFGKFREHVDQLVNVVSRMLRRSSLVLTFHVTRLMEGDLPIPNMYDMKDTYWKDWLRIGVDGVFPDEESRISYEAVKDVIGKVLGSDDPDYINSYPIYFDQVLNYAGHTLSTVVSNNAWVPLVPRLTRLTKATLNALKAPKTIRVYDVMRVIQQEIQEMESWPESVQEYVREVRVRLKVPDGSRLYDDYGKEMDFPTMVRFNYWMQTRLESIGARRIRLMPIFNVQRAHVRLDMKTLVNLFRHVFPKDPNIVELSKWKDVKDPDRFMLPLKPAFKKKKSCGPGEWEAYKLAQQKYDADVNDIKDTDEYRHAKGRYDTLVNARKTVAGSFFKKPPVKTGWVFDCSICTDGVSLSMQYSKTVQVRVSDLKKTSKRSRDNEGMSVSEQYDHKLKTTLPDMGIVVLGVDPGRSNIATVTYLADDKSKTWKLTRGAFYHKSGIKKQKKQQEKRFSDMIPRWESLRENGAALSTSRTDDISAYLKNYDTFSDEWWRMALLRRESRDNFQRYIGKRKAMDSFWAGIKRNMKLDHPDLRVRVAYGSAITTLKATGPGEVAVPTGSMFASCKRLFKEEVHVTDEFKTTLMSWETGAKKECVYKIPSVQITTEGQIRLGYELLGHTPLKETPNVSYRDQLAVRVYCTRKQIQEKHRRGGLAPSLVDNNSIKRYPEVRGLRFSPETSTYSDRDRSSALTIARLHCMELLGQGRPLPFCRDA

SEQ ID NO: 1889 - protein, 679 aa, Microglena sp.
PRMEHVCDVCIKISVMYKLCKMATKPPTVAKLKELLKLAEVAYSSKDKKDDIVRLCEDNGLIARPPPDYKTVEKMCVVKCALKKAMSLDDEEFGKFRGHVDQLVNVVSRMLRRSSLVLTFHVTRLMEGDLPIPNMYDMKDTYWKDWLRIGVDGVFPDEESRISYESVKDVIGKVLGSDDPDYINSYPIYFDQVFNYAGHTLSTVVSNNAWVPLVPRLTRLTKATLNALGAPKTIRVYDVMRVIQQEIQEMESWPESVQEYVREIRVRLKVPDGSRLYDDYGKDMDFPTMVRFNYWMQTRLEAIGARRIRLMPIFNVQRAHVRLDMKTLVKLFRHVFPKDPNIVELSKWENVKDPDRFMLPLKPSVKKKKSCGPGEWEAYKLAQQKYDADVKDIKATDEYRHSKGRYDTLVNAQKTVAGSFFKKPPVKTGWVFDCSICTDGVSLSMQYGKTVRFRVSDLKKSSKRSRDEEGKSVSEQYDHKLKTTLPDMGIVVLGVDPGRSNIATVTYLADDKSKTWKLTRRAFYHKSGIKKQKKQQEKRFSDMIPRWESLRENGAALSTSRKDDISAYLKNYATFSDEWWRMALRRRESRDNFQRYIGKRKAMDSFWAGIKRNMKLDHPDLRVRVAYGSAITKLKATGPREVAVPTGSMFASCKRLFKEEVHVTDEFKTTLMSWETGAK

SEQ ID NO: 1890 - protein, 586 aa, Microglena sp.
IKCPEDAGHIEDHSGYDVMQAIQQEVQNMEGWPESVQEYVNEVRERLSVPDGSRVYDNYGKDMDFPTMVRFNYWIQTRLEDMDARRIRLMPIFNVQRVHVRLDLKTLVNLFRHMFPNDQNIVELSKWEHVKNPESFMLPQRPAQKKKKSCGPGEWEAYKSVLKQYDDDVKDIKATDEYRHAKGLYDTLVNARKTVAGSFFRKPPVKNGWVFDCSICTDGVSLSMQYSKTVQVLVSDLKKTCKKPRKEEGIKIAEKYDGSLKTILPDMGIVVLGVDPGRSNIATVTYLADDKNKTWKLTRGAFYHKSGIKKQTRQKELRFADMIPMWESLRENGAALSTSRTDKISAYLSNYAKFSDEWWRLALRRRESRDNLQRYIGKRKVKDSFWAGIKRCMMKELPDMKVCVAYGSAITKLKPTGPGEVAVPTGAMFASCKRIFKEDVSVTDEFKTTLMSWETGKEKERVYKIPSVCSADVNLRLGGERFGHTKSKTMPKVADCDHLGVRLYNKRKGAQEKHRRGGFATSLVDSQKSIERYPEVRGLRFSPETCIYSDRDRSSALTIARLHCMELMGLGRPLPFSHSSSVVVDE

SEQ ID NO: 1891 - protein, 507 aa, Microglena sp.
VGYRQNHPSESRACEPHQRRCQTPERSLAAAKGKQFNTRAHLTMRLFHHVLTELGADLKEKTTKKRPRLFSILPRKSGFTISYVPISSMTLMKLLSMGDLPLESFRGDGRHENHSMLWRKYFNVQGLETKGSRFDNRILSDGKGVSVQMKHQASEDVAVEGGDNAGYPKDASIEDCQDASLRVGVDPGMTDIVTVASSAGRVESFSSACFSEAAGYNTSNRRTNKWNVDTQDLVKSIPSPTTSSMHDMQDHVRGYLSALPTLLQHRASRGYRSMRFFRYVGKQKTIEKVCDLIAPKAQKKTIEEKVCDVIAPKAQKTIVGFGNWSNRGYGISRSCSGPVKEIRKCLSRRQNVLFKNVDERNTSCTCHGCFQKLINMKADSVVWRRVQNEPPSLINGAPTTTTTIEKQKTVVKNVKVHKVLHCRNSVKSASSNVRCGATWNRDVNAANNLLLLLTTWMDGKERPATFCVPSSSPTPKTTVSGEANVGAQPTDPPGSVSSLQLLSSGPA

SEQ ID NO: 1892 - protein, 620 aa, Microglena sp.
STTQLQRHTYSQTFISQDASMMETLTSSSCHTWIGTFITGASLRYQPPMFERILWARASMIPWLLSTQVKVDVRPWGQVIADVSIQMATMACNSVWANVDRVVIKYLRLKHPSLKKHFKKIVKAVVQYPESKIDTIIPEGLVHAIHIKEVVSHLRALFPLPRGKQFNTRAHLTMRLFHHVLTELGEVGRVDPKDKKNKKKSPPSVQYPSSQERLHNLYVPISSMTFMKLLSMGDSPLESVSGDGRYENHTMLWRKYFNVQGLETKRSRFDNRILSDGKGVSVQMKQKGKEEVVEEGENAGYPKDANIVECKDAVGALRVGVDPGMTDIVTVASSAGRIESFSSARFSEVAGYNKSKRRTYKWNDETQDLVKSIPSPNTSNMVDLQDHVRAYLKALPILLQHRANKGYRSMRFFRYVGKQKTIEKVCDVIAPRAQTTVVGFGNWSNQGYGISRSCSGPIKEIRRCLSRRKNVLFKNVDERNTSCKCHGCFQRLVNMNADSVVWHGVCKESPIDGSITVEKQKMVVKNVKVHKVLHCRDSVKSASSNVRCGATWNRDVNAAKNLLLLLTTWMDGRERPEAFCVPSPPPKTTVSIEASVSAKPTDPPGFVSSLPCYPLGHLKC

SEQ ID NO: 1893 - protein, 621 aa, Microglena sp.
QCIRNLHVLNIRMPCMATNASVKLARPPMPLVSPGPSSVDGRIMARSERSGLQATNVSLTQAASKATSSSRKKKPAVVKSFSTHVCPHTNNNPTYSDSNCSCKPIFLTNIPDASKSLKSRTSDQGSTSSTQDFYEYWDSSRQDLYRQLLWLPKTGSQGLVSSSLNGFARSTPARSSFSITKTEPLKTSLEKTSCPSFKYIVADGTVEDATKSNAKTKLRTLKLKLNPTKAQKSMLAEFAGCSRFMYNKAVAARLGVGSTHKSVFRIRDRYVTNKVRGEGKMPNPYFKNRQWLLQCPKSVRQSAIKAALANFKACFSNMKAGNIKHFSAPFRRKKTELERGWAIEMDQKNVSKDGDKLFIFKDILGNMRYFGSKQLHKLMPEENPTHDPKVQKSRFGEYFLVLSVATRDRRGDRKPVHPEKVATASIDPGVRKTMVTYSPENEESFMFGQGQASDLVKLLLVHDKLQSRLDTEKTLRSKERMKIKNQMIRIRKRIFNLKKEFRDQTTNFLAARYDVLLVPQLETAKMTISAERELTTKVARQMLTLSHSVLFNRLKEKCEEYGTVFLHVLGHYTSQTCPMCGFLNKCGETYTCKNSQFTCDRDIVGAAGIFLKAVRTENPCS

SEQ ID NO: 1894 - protein, 451 aa, Microglena sp.
KPTKKRPRLFSILPRKSRFTISYVPISSMTLMKLLSMGDSPLESVRGDGRHENHSMLWRKYFNVQGLETKGSRFDNRILSDGKGVSVQMKHQVGKDIAGEGGGDNAGYPKDASIEDCQDASLRQGALRVGIDPGMTDIVTIASSDGRVESFSSARFSEAAGYNTSNRRTNKWNADTQDLVKSIPSPTTSSMQDHVRGYLSALPTLLQHRANRGYRSMRFFRYVGKQKTIEKVCDLIAPKAQKKTIEEKVCDVIAPKAKKTVVGFGNWSNQGYGISRSCSGPVKEIRKCLSRRQNVLFKNVDERNTSCTCHGCFQKLVNMKADSVVWRRVQNEPSALIDGAPTTTTTTFEKQKTVVKNVKVHKVLHCRNSVKSASSNVRCGATWNRDVNAAKNLLLLLTTWMDGKERPAAFCVPSSSPTPKTTVSGEANVGAQPTDPPGSVSSLQLLSSGPA

SEQ ID NO: 1895 - protein, 399 aa, Microglena sp.
AEAEPNQGSEIDAGRVCGVQPVHVQQGGGSTVGRREHSQVCLPNSRQVCDEQGEGEGKMPNPYFKNRQWLLQCPKSVRQSAIKAALANIKACFSNLKAGNIKQFSAPFRRKKTELERGWAIEMDQRNVSKDGDKLFIFKDILGNMRYFGSKQLHKLMPEENPTHDPKVHKSRFGEYFLVLSVAATDRRAERKPVHPDKVATASIDPGVRKTMVTYSPENEESFMLGQGQASDLVKLLLVHDKLQSRLDTEKTLRSKERMKIKKHMIRIRKRIFYLKKEFRDQTTNFLPARYDVLLVPQLETAKMTISAERELTTKVARQMLTLSHSVLFNRLKEKCAEYGTVFLHVLEHYTSQTCPMCGFLNKCGETYTCKNCQFTCDRDIVGAAGIFLKAVRTENPCS

SEQ ID NO: 1896 - protein, 586 aa, Microglena sp.
IKCPKTLDTSKIIRGYNVMQAIQQEVQNMEGWPESVQEYVNEVREMLSVPDGSRVYDNYGKDMDFPTMVRFNYWIQTRLEDMDARRIRLMPIFNVQRVHVRLDLKTLVNLFRHMFPNDQNIVELSKWEHVKNPDSFMLPQRPAQKKKKSCGPGEWEAYKSVLKQYDDDVKDIKATDEYRHAKGLYDTLVNARKTVAGSFFRKPPVKNGWVFDCSICTDGVSLSMQYSKTVQVLVSDLKKTCKKPRKEEGIKIAEKYDGSLKTILPDMGIVVLGVDPRRSNIATVTYLADDKNKTWTLTRGAFYHKSGIKKQTRQKELRFADMIPMWESLRENGAALSTSRTDKISAYLSNYAKFSDEWWRLALRRRESRDNLQRYIGKRKVKDSFWAGIKRCMMKELPDMKVCVAYGSAITKLKPTGPEEVAVPTGAMFASCKRIFKEDVSVTDEFKTTLMSWETGKEKERVYKIPSVCSADVKLRLGGERFGHTKSKTMPKVADCDHLGVRLYNKRKGAQEKHRRGGFATSLVDSQKSIERYPEVRGLRFSPETCIYSDRDRSSALTIARLHCMELMGLGRPLPFAHSSSVVVDE

SEQ ID NO: 1897 - protein, 553 aa, Microglena sp.
AGKKNQQSSSHSLRTHVCPHTNNNPTCSDSNCSCKPIFLTNIPDASKSLKSRTSDQGSTSSAQDFYEYWDSSLQDLYRQLLWLPKTGSQGLVSSSLNGFARSTPARSSFSITKTEPLKTSLEKTSCPSFKYIVTDGTVEDATKSNAKPKLRTLKLKLNPTKAQKSMLAEFAGCSRFMYNKAVAARLGVGSTHKSVFRIRDRYVTNKVRGKGKMPNPYFKNRQWLLQCPKSVRQSAIKSALANIKACFSNLKAGNIKQFSAPFRRKKTELERGWVIEMDQKNVSKDGDKLFIFKEILGNMRYFGSKQLHKLMPEENPTHDPKVHKSRFGEYFLVLSVAARDRRAERKPVHPDKVATASIDPGVRKTMVTYSPENEESFMLGQGQASDLVKLLLVHDKLQSRLDTEKTLRSKERMKIKKHMIRIRKRIFYLKKEFRDQTTNFLAARYDVLLVPQLETAKMTISAERELTTKVARQMLTLSHSVLFNRLKEKCEEYGTVFLHVLEHYTSQTCPMCGFLNKCGETYTCKNCQFTCDRDIVGAAGIFLKAVRTENPCS

SEQ ID NO: 1898 - protein, 628 aa, Microglena sp.
METIVNKEPPDKRTRPDRASKIKDRRNGEVNVVKCTLSRIIADKDNKDVIIKVIKERVDSVSKRTYLAGVAVNRILKEVFEGVPDAQLHTVSVPSVDQNFIRQLMVGSRQANMETRDATVERFFHNNYWFREKIEGREVIVKKKKQYAGAIARYDGDRNLYSHASKKYLTNFNNHYRVHLSTWIKKFVYSKENRILAKEFKDEHGIDETVFQRYLLYDIHSWGVKEDLIAIHSLLPERTKMLLKIQHSIIGRDEINRQWLKSVSNSAKMSRYNVFINRYLEATEDEGYAKLVNIAPIPTVKHAFITIDTDGLLGVLKDVGLVESLEKTLTNKEHWESVFDVENIRSTGKGVFTCTIDTDGVMACTHFLRAEKKKISIKDDGTAIKKQTNTLREFSESDPNVVVVANDPGRCNIAFLTWKKNKVEEKDKGGRKRKRHCEFGSKRLTRERYYVESGVFKSRGPTKKWLSNIQDCLDDLKDNSPKRTSLESFDAYVTVMVNHWDSRWGEMSKSRWGAQRLRLYGGKKRVLARFFNEVQADVGERKTIVIAYGSSKFAPGGKGELSVPTTSAFNAFSDRFKGRVAVINEFRTTKIWHKDSTTVLQSVQSEKKGARFEACYGAVPPWRTASCL

SEQ ID NO: 1899 - protein, 602 aa, Microglena sp.
GNCPLVWYHQNNNHSLSMGVVTNNGDDDDLDIMVVKKTLNSLCMDVSRQQICSRIQSMVLVINHAVAEAYLFANFHITRCLDDGDFDVKQLPHLDRNFYYRCILAVSISNVRNDTLDQSLKDSMVAFDALRPAGFLKVDVCQWGQVIADVSIQMATMACNSVWANVDRVVIKYLRLKHPSLKKHFNKIVKAVVQYPDSDIDKIIPAGLVHANLIKDVVRRLRDLLPLPRGKQFNTRAHLTMRLFHHVLTELGADLKEKTTKKRPRLFSILPRKSGFTISYVPISSMTLMKLLSMGDSPLESVRGDGRHENHSMLWRKYFNVQGLETKGSRFDNRILSDGKGVSVQMKHQVGKDIAGEGGGDNAGYPKDASIEDCQDASLRQGALRVGIDPGMTDIVTIASSDGRVESFSSARFREAAGYNTSNRRTNKWNADTQDLVKSIPSPTTSSMHDMQDHVRGYLSALPTLLQQRANRGYRSMRFFRYVGKQKTIEKVCDLIAPKAQKTTIEKVCDVIAPKAKKTVVGFGNWSNQGYGISRSCSGPVKEIRKCLSRRQNVLFKNVDERNTSCTCHGCFQKLVNMKADSVVWRRVQNEPSALIDNNNNV

SEQ ID NO: 1900 - protein, 397 aa, Microglena sp.
TPEKTVAGSFFRKPPVKNGWVFDCSICTDGVSLSMQYSKTVQVLVSDLKKTCKKPRKEECIKIAEKYDGSLKTILPDMGIVVLGVDPGRSNIATVPYLADDKNKTWTLTRGAFYHKSGIKKQTRQKELRFADMIPMWESLRENGAALSTSRTDKISAYLSNYAKFSDEWWRLALRRRESRDNLQRYIGKRKVKDSFWAGIKRCMMKELPDMKVCVAYGSAITKLKPTGPGEVAVPIGAMFASCKRIFKEDVSVTDEFKTTLMSWETGKEKERVYKIPSVCSADVKLRLGGERFGHTKSKTMPKVVDCDHLGVRLYNKRKGAQEKHRRGGFATSLVDSQKSIERYPEVRGLRFSPETCIYSDRDRSSALTIARLHCMELMGLGRPLPFAHSSSVVVDE

SEQ ID NO: 1901 - protein, 711 aa, Microglena sp.
GNCQLVWYHQNNNHSLSMGVVTNNGDDDDLDIMVVKKTLNSLCMDVSRQQICSRIQSMVLVINHAVAEAYLFANFHITRCLDDGDFDVKQLPHLDRNFYYRCILAVSISNVRNDTLDQSLKDSMVAFDALRPAGYLKVDVCQWGQVIADVSIQMATMACNSVWANVDRVVIKYLRLKHPSLKKHFNKIVKAVVQYPDSDIDKIIPAGLVHANLIKDVVRRLRDLLSLPRGKQFNTRAHLTMRLFHHVLTELGADLKEKTTKKRPRLFSILPRKSGFTISYVPISSMTLMKLLSMGDSPLESVRGDGRQENHSMLWRKYFNVQGLEKKGSRFDNRILSDGKGVSVQMKHQVGKDVAGEGRGDNAGYPKDASIEDCQDASLRQGALRVGIDPGMTDIVTIASSDGRVESFSSARFSEAAGYNTSNRRTKKWNADTQDLVKSIPSPTTSSMHDMQDHVRGYLSALPTLLQHRANRGYRSMRFFRYGGKQKTIEKVCDLIAPKAQKKTIEEKVCDVIAPKAKKTVVGFGNWSNQGYGISRSCSGPVKEIRKCLSRRQNVLFKNVDERNTSCTCHGCFQKLVNMKADSVVWRRVQNEPSALIDGAPTTTTTTFEKQKTVVKNVKVHKVLHCRNSVKSASSNVRCGATWNRDVNAAKNLLLLLTTWMDGKERPAAFCVPSSSPTPKTTVSGEANVGAQPTDPPGSVSSLQLLSSGPA

SEQ ID NO: 1902 - protein, 363 aa, Microglena sp.
ACSTARSTGPCLRSEEDCKNPRKEEGIKIAEKYDGSLKTILPDMGIVVLGVDPGRSNIATVTYLADDKNKKWTLTRGAFYHKSGIKKQTRQKELRFADMIPMWESLRENGAALSTSRTDKISAYLSNYAKFSEEWWRLALRRRESRDNLQRYIGKRKVKDSFWAGIKRCMMKELPDMKVCVAYGSAITKLKPTGPGEVAVPIGAMFASCKRIFKEDVSVTDEFKTTLMSWETGKEKERVYKIPSVCSADVKLRLGGERFGHTKSKTMPKVADCDHLGVRLYNKRKGAQEKHRRGGFATSLVDSQKSIERYPEVRGLRFSPETCIYSDRDRSSALTIARLHCMELMGLGRPLPFAHSSSVVVDE

SEQ ID NO: 1903 - protein, 308 aa, Microglena sp.
LFHHVLTELGEVGRVDPKDKKTRKSHPRLFSILPRKNGFTISYVPISSMTFMKLLSMGDSPLESVSGDGRYENHTMLWRKYFNVQGLETKRSRFDNRILSDGKGVSVQMKQKGKEEVVEEGENAGYPKDANIVECKDAVGALRVGVDPGMTDIVTVASSAGRIESFSSARFSEVAGYNTSKRHTYKWNDETQDLVKSIPSPNTSNMSDLQDHVRAYLKALPILLQHRANKGYRSMRFFRYVGKQKTIEKVCDVIAPRAQTTVVGFGNWSNQGYGISRSCSGPIKEIRRCLSRRKNVLFQKRRRTQHFL

SEQ ID NO: 1904 - protein, 394 aa, Microglena sp.
KFQMEVDFMMTMAKTWTSRPWSGFNYWMQTRLEAIGARRIRLMPIFNVQRAHVRLDMKTLVNLFRHVFPKDPNIVELSKWKNVKDPDRFMLPLKPAVKKKKSCGLGEWEAYKLAQQKYDTDVNDIKATDEYRHAKGRYDTLVNARKTVAGSLFKKPPIKTGWVFDCSICTDGVSLSMQYSKTVQVRVSDLKKTSKRSRYDEGMSVSEQYDHKLKTTLPDMGIVVLGVDPGRSNIATVTYLADDKSKTWKLTRGSFYHKSGIKKQKKQQEKRFSDMIPRWESLRENGAALSTSRTDDISAYLKNYATFSDEWWRMALLRRESRDNFQRYIGKRKAMDSFWAGIKRNMKLDHPDLRVRVAYGSAITTLKATGPGEVAVLRDLCSLPASASSKRRFM

SEQ ID NO: 1905 - protein, 299 aa, Microglena sp.
RSSWVQYQQSSHKKMECRYARPREVHSIADYEQYARHAGPCQRLPQRAPNPPSTPSQERLPIDAILSICGQTEDDLKRLCDLIAPKAQKKTIEEKVCDVIAPKAKKTVVGFGNWSNQGYGISRSCSGPVKEIRKCLSRRQNILFKNVDERNTSCTCHGCFQKLVNMKADSVVWRRVQNEPSALIDGAPTTTTTTTFEKQKTVVKNVKVHKVLYCRNSVKSASSNVRCGATWNQDLNAAKNLLLLLTTWMDGKERPAAFCVPSSSPTPKTTVSGEANVGAQPTDPPGSVSSLQLLSSGPA

SEQ ID NO: 1906 - protein, 669 aa, Microglena sp.
YVRYEGYLLEGLAKDRVDGVFPDEESRISYEAVKDVIGKVLGSDDPDYINSYPIYFDQVLNYAGHTLSTVVSNNAWVPLVPRLTRLTKATLNAMGAPKTIRVYDVMRVIQQEIQEMESWPESVQEYVREVRVRLKVPDGSRLYDDYGKDMDFPTMVRFNYWMQTRLEAIGARRIRLMPIFNVQRAHVRLDMKTLVNLFRHVFPKDPNIVELSKWKNVKDPDRFMLPLKPAFKKKKSCGPGEWEAYKLAQQKYDADVNDLKDTDEYRHAKGRYETLVNAQKTVAGSFFKKPPVKTGWVFDCSICTDGVSLSMQYSKTVQVRVSDLKKTSKRSRDDEGMSVSEQYDHKLKTTLPDMGIVVLGVDPGRSNIATVTYLADDKSKTWKLTRGAFYHESGIKKQKKQQEKRFSDMIPRWESLRENGAALSTSRKDDISAYLKNYATFSDEWWRMALRRRESRDNFQRYIGKRKAMDSFWAGIKRNMKLDHPDLRVRVAYGSAIMTLKATGPGEVAVPTGSMFASCKRLFKEEVHVTDEFKTTLMSWETGAKKECVYKIPSVQITTEGQIRLGYELLGHTPLKETPKVSYRNQLAVRVYCTRKQIQEKHRRGGLAPSLVDNNSIKRYPEVRGLRFSPETSTYSDRDRSSALTIARLHCMELLGQGRPLPFCRDACC

SEQ ID NO: 1907 - protein, 288 aa, Microglena sp.
KNKKKSPRLFSILPRKNGFTISYVPISSMTFMKLLSMGDSPLESVSGDGRYENHTMLWRKYFNVQGLETKRSRFDNRILSDGKGVSVQMKQKGKEEVVEEGENAGNPKDANIVECKDAVGALRVGVDPGMTDIVTVASSAGRIESFSSARFSKVAGYNTSKRRTYKWNDETQDLVKSIPSPNTSNISDLQDHVRAYLKALPILLQHRANKGYRSMRFFRYVGKQKTIEKVCDVIAPRAQTTVVGFGNWSKQGYGISRSCSGPIKEIRRCLSRRKNVLFKNVDERKHFL

SEQ ID NO: 1908 - protein, 236 aa, Microglena sp.
HLLQVASSLSARLALAKLLGTNTSKRRTYKWNDETQDLVKSIPSPNTSNMSDLQDYVRAYLKALPILQQHRANKGYRSMRFFRYVGKQKTIEKVCDVIAPRAQTTVVGFGNWSNQGYGISRSCSGPIKRDQEGASHVVRMFCSKNVDERNTSCKCHGCFQRLVNMNADSVVWRGVCKESPIDGSITVEKQKMVVKNVKVHKVLHCRDSVKSASSNVRLWCNLEPRRERLPRTFFCF

SEQ ID NO: 1909 - protein, 336 aa, Microglena sp.
DPREPVQVRVSPKDPNIVELSKWENVKDPDRFMLPLKPSVKKKKSCGPGEWDAYKLAQQKYDADVKDIKATDEYRHAKGRYDTLVNARKTVAGSFFKKPPVKTGWVFDCSICTDGVSLSMQYSKTVQVRVSDLKNKSKRSRDEEGMSVSEQYDQKLKTTLPDMGIVVLGVDPGRSNIATVTYLADDKSKTWKLTSGAFDHKSGIKKQKKQQENMIPRWESLRENGAALSTSRKDDISAYLKNYATFSDEWWRMALRRRESRDNFQRYIGKRKAMDSFWAGIKRNMKLDHPDLRVRVAYGSAITKLKATGPGEVAVPTGSMFASCKRLFNRGGSCDR

SEQ ID NO: 1910 - protein, 230 aa, Microglena sp.
SRRVKKRFVEEGENAGYPKDANIVECKDAVGALRVGVDPGMTDIVTVASSAGRIESFSSARFSEVAGYNTSKRRTYKWNDETQDLVKSIPSPNTSNMSDLQDHVRAYLKALPILLQHRANKGYRSMRFFRYVGKQKTIEKVCDVIAPRAQTTVVGFGNWSNQGYGISRSCSGPIKEIRRCLSRRKNVLFKNVDERNTSCKCHGCFQRLVNMKADSVVWREVCKESQSTGL

SEQ ID NO: 1911 - protein, 480 aa, Microglena sp.
LVQIGSWPHGKQICTILQGYHLPRGRSFSVGIGEQKTPPGRLKTPPGRLKHPSLKKHFKKIVKAVVQYPDSDIDKIIPAGLVHANLIKDVVRRLRDLLPLPRGKQFNTRAHLTMRLFHHVLTELGADLKEKTTKKRPRLFSILPRKSGFTISYVPISSMTLMKLLSMGDSPLESVRGDGRHENHSMLWRKYFNVQGLETKGSRFDNRILSDGKGVSVQMKHQVGKDIAGEGGGDNAGYPKDASIEDCQDASLRQGALRVGIDPGMTDIVTIASSDGRVESFSSARFSEAAGYNTSNRRTNKWNADTQDLVKSIPSPTTSSMHDMQDHVRGYLSALPTLLQHRANRGYRSMRFFRYVGKQKTIEKVCDLIAPKAQKKTIEEKVCDVIAPKAKKTVVGSGNWSNQGYGISRFVFWTSERDQEVPFTSSECSVQKRRRTQHFLYLPRLLPEARQHEGRQRRLAQSSKRALRPHRRGSYNNNNV

SEQ ID NO: 1912 - protein, 303 aa, Microglena sp.
EQHRYSHVSGRRQKQDMEAYTRSFLPQVWYQETEKTARKRFSDMIPRWESLLENGAALSTSRTDDISAYLKNYATFSDEWWRMALLRRESRDNFQRYIGKRKAMDSFWAGIKRNMKLDHPDLRVRVAYGSAITTLKATGPGEVTVPTGSMFASCKRLFKEEVHVTYEFKTTLMSWETGAKKECVYKIPSVQITTEGQIRLGYELGHTPLKETPKVSYRDQLAVRVYCTRKKIQEKHRRGGLAPSLVDNNSIKRYPEVRGLRFSPETSTYSDRDRSSALTIARLHCMELLGQGRPLPFCRDACC

SEQ ID NO: 1913 - protein, 676 aa, Microglena sp.
IATSFYRCLIAVSTNKCKGSTLGEDFESSRLLFDLLREPGQSKVDIRGNVKNQIIADLSILMATMASNHLWTNLERRITTYLKWKYPQIAKRLRSDIVAAVIKCPTKNLDVIFKMSPHTTKLPTKLPTARLRSAKSAVALAKKRVGRKEPEGSPLRVRLTKLQERLEKLSEAWLSSKNLRVDADNAKRFFARDVAFCLRGVLPLPSGNTFASRAHMTLPLYHKILSETIEEKRKTKNEKHRTFSLLPYKSGFTLSHIPISKMAFFYMVNECHFDSCKADVTSKNHQGIWERFANLKKVETVSRKFGYRIVTDGFAVSILMNKPTCLTCSMPADAFSTRAHEYVTTDEGGIVSFLDNVVVAAVDPGVTDIMTVTGLNGGTRSYSSAQYYRKGLIFKSQRQTDVWNLETADIVGGIIPDRDSSSSEQIGAYARFYMGAAPILLAHRASRGYRNLRFRRYSKKQKLIVEIADFVAPREKSAKVLVGFGDWKGLGATPISRRTCGPLQAIRFELRSRENVIMEDIDEFRTSQRCSCCENHLCNMVALTHRKKQDGTGWECTEGRKRIHKILHCKSSQSGAPRQQSGGMLHCGETWDRDVKASRNILMLTLHQVFGRERPLAFRRDAPRSSSTTPPPPPDTDMGTQTVERFTKEATRNIFENLFNLLHPPTLPKSNDLQSG

SEQ ID NO: 1914 - protein, 223 aa, Microglena sp.
RRRTRRLSQGRKYRRVQGRSGCAACRSRPGMTDIVTVASSAGRIESFSSARFSEVAGYNTSKRRTYKWNDETQDLVKSIPSPNTSNMVDLQDHVRAYLKALPILLQHRANKGYRSMRFFRYVGKQKTIEKVCDVIAPRAQTTVVGFGNWSNQGYGISRSCSGPIKEIRRCLSRRKNVLFKNVDERNTSCKMSRLLPEACQHEGRQRSLARSLQRVPNRRVYNC

SEQ ID NO: 1915 - protein, 292 aa, Microglena sp.
SSSPQRQTDVWNLETADIVGGIIPDRDSSSSEQIGAYARFYMGAAPILLAHRASRGYRNLRFRRYCKKQKLIVEIADFVAPRKKSAKVLVGFGDWKGLGATPISRRTCGPLQAIRFELRSRENVIMEDIDEFRTSQRCSCCENHLCNMVALTHRKKQDGTGWECTEGRKRIHKILHCKSSQSGAPRQQSGGMLHCGKTWDRDVNASRNILMLTLHQVFGRERPLAFRRDAREVFPRQPPPPKILIWGHRRLNGLPKRLLGISSRTSSTFCTPQRCPKATICSLDDYKVSHFI

SEQ ID NO: 1916 - protein, 504 aa, Microglena sp.
SQGRRIRAQLQAPRTFYEYWDSSRQDLYRQLLWLPKTGSQGLVSSSLNGFARSTPAQSSFSITKTEPLKTSLEKTSCPSFKYIVADGTVEDATKSNAKPKLRTLKLKLNPTKAQKSMLAEFAGCSRFMYNKAVAARLGVGSTHKSVFRIRDRYVTNKVRGKGKMPNPYFKNRQWLLQCPKSVRQNAIKSALANIKACFSNLKAGNIKQFSAPFRRKKTELERGWVIEMDQKNVSKDGDKLFIFKEILGNMRYFGSKQLHKLMPEENPTHDPKVQKSRFGEYFLVLSVAARDRRAERKPVNPDKVATASIDPGVRKTMVTYSPENEESFMLGQGQASDLVKLLLVHDKLQSRLDTEKTLRSKERMKIKKLMIRIRKTIFYLKKEFRDQTTNFLAARYDVLLVPQLETAKMTISAERELTTKVARQMLTLSHSVLFNRLKEKCEEYGTVFLHVLEHYTSQTCPMCGFLNKCGETYTCKNCQFTCDRDIVGAAGIFLKAVRTENPCS

SEQ ID NO: 1917 - protein, 325 aa, Microglena sp.
NDIARYGYRRPGCGPGRSNIATVTYLADDKNKTWTLTRGEFYHKSGIKKQTRQKELRFADMIPMWESLRENGAALSTSRTDKISAYLSNYAKFSDEWWRLALRHRESRDNLQRYIGKRKVKDSFWAGIKRCMMKELPDMKVCVAYGSAITKLKPTGPGEVAVPTGAMFASCKRIFKEDVSVTDEFKTTLMSWETGKEKERVYKIPSVCSADVKLRLGGERFGHTKSKTMPKVADCDHLGVRLYNKRKGAQEKHRRGGFATSLVDSQKSIERYPEVRGLRFSPETCIYSDRDRSSALTIARLHCMELMGLGRPLPFAHSSSVVVDE

SEQ ID NO: 1918 - protein, 464 aa, Microglena sp.
PCLCTTRYCRRPSKKNEKTKNEKHRTFSLLPYKSGFTLSHIPISKMAFFYMVNECHFDSCKADVASKNHQGIWERFANLKKVETVSRKFGYRIVTDGFAVSILMNKPTCLTCSMPADAFSTRAHEYVTTDEGGIVSFLDNVVVAAVDPGVTDIVTVTGLNGGTRSYSSAKYYRKGLIFKSQRQTDVWNLETADIVGGIIPDRDSSNSEQIGAYARFYMGAAPILLAHRASRGYRNLRFRRYCKKQKLIVEIADFVAPRKKSAKVLVGFGDWKGLGATPISRRTCGPLQAIRFELRSRENVIMEDIDEFRTSQRCSCCENHLCNMVALTHRKKQDGTGWECTEGRKRIHKILHCKSSQSGAPRQQSGGMLHCGKTWDRDVNASRNILMLTLHQVFGRERPLAFRRDAPRSSSTTPPPPPDTDMGTQTVERFTKEATRNIFENLFNLLHPPTTICSLDDYKVSHFI

SEQ ID NO: 1919 - protein, 782 aa, Microglena sp.
DGNETSDSREIEGATKIGRSSILIKGQEGRYCPFMRRQWSHRQTPPEYKTVEKMCVVKCALKKAMSLDDEEFGKFREHVDQLVNVVSRMLRRSSLVLTFHVTRLMEGDLPIPNMYDMKDTYWKDWLRIGVDGVFPDEESRISYESVKDVIGKVLGSDDPDYINSYPIYFDQVLNYAGHTLSTVVSNNAWVPLVPRLTRLTKATLNALGAPKTIRVYDVMRVIQQEIQEMESWPESVQEYVREVRVRLKVPDGSRLYDDYGKDMDFPTMVRFNYWMQTRLEAIGARRIRLMPIFNVQRAHVRLDMKTLVNLFRHVFPKDPNIVELSKWKDVKDPDRFMLPLKPAVKKKKSCGPGEWEAYKLAQQKYDADVNDIKDTDEYRHAKGRYDTLVNARKKVAGSFFKKPPVKTGWVFDCSICTDGVSLSMQYSKTVQVRVSDLKKTSKRSRDDEGMSVSEQYDHKLKTTLPDMGIVVLGVDPGRSNIATVTYLADDKSKTWKLTRGAFYHKSGIKKQKKQQEKRFSDMIPRWESLRENGAALSTSRTDDISAYLKNYATFSDEWWRMALLRRESRDNFQRYIGKRKAMDSFWAGIKRNMKLDHPDLRVRVAYGSAITTLKATGPGEVAVPTGSMFASCKRLFKEEVHVTDEFKTTLMSWETGAKKECVYKIPSVQITTEGHIRLGYELLGHTPLKETPNVSYRDQLAVRVYCTRKQIQEKHRRGGLAPSLVDNSSIKRYPEVRGLRFSPETSTYSDRDRSSALTIANLHCMELLGQGRPLPFCRDACC

SEQ ID NO: 1920 - protein, 448 aa, Microglena sp.
QCDCSITCLQSWERSDEWIRKIKKQEKSHPRLFSILPRKNGFTISYVPISSMTFMKLLSMGDSPLESVSGDGRYENHTMLWRKYFNVQGLETKRSRFDNRILSDGKGVSVQMKQKGKEEVVEEGENAGYPKDANIVECKDAVGALRVGVDPGMTDIVTVASSAGRIESFSSARFSEVAGYNTSKRRTYKWNDETQDLVKSIPSPNTSNMSDLQDHVRAYLKALPILLQHRANKGYRSMRFFRYVGKQKTIEKVCDVIAPRAQTTVVGFGNWSNQGYGISRSCSGPIKEIRRCLSRRKNVLFKNVDERNTSCKCHGCFQRLVNMKADSVVWRGVCKESPIDGSITVEKQKMVVKNVKVHKVLHCRDSVKSASSNVRCGATWNRDVNAAKNLLLLLTTWMDGRERPEAFCVPSPPPKTTVSIKASVSAKPTDPPGFVSSLPCYPLGQLKC

SEQ ID NO: 1921 - protein, 335 aa, Microglena sp.
HLLTEIHQTSSLYRHYSNGNPSDIVTIASSDGRVESFSSARFSEAAGYNTSNRRTNKWNADTQDLVKSIPSPTTSSMHDMQDHVRGYLSALPTLLQHRANRGYRSMRFFRYVGKQKTIEKVCDLIAPKAQKKTIEEKVCDVIAPKAKKTVVGFGNQGYGISCSCSGRVKEIRKCLSRRQNVLFKNVDERNTSCTCHGCFQKLVNMKADSVVWRRVQNEPSALIDGAPTTTTFEKQKTVVKNVKVHKVLHCRNSVKSASSNVRCGATWNRDVNAAKNLLLLLTTWMDGKERPAAFCVPSSSPTPKTTVSGEANVGAQPTDPPGSVSSLQLLSSGPA

SEQ ID NO: 1922 - protein, 444 aa, Microglena sp.
ILVTHRSAAYKSVLKQYDDDVKDIKATNEYRHAKGLYDTLVNARKTVAGSFFRKPPVKNGWVFDCSICTDGISLSMQYSKTVQVLVSDLKKTCKKPRKEEGIKIAEKYDGSLQTILPDMGIVVLGVDPGRSNIATVTYLADDKDKTWTLTRGAFYHKSGIKKQTRQKELRFADMIPMWESLRENGAALSTSRTDKISAYLSNYAKFSDEWWRLALRRRESRDNLQRYIGKRKVKDSFWAGIKRCMMKELPDMKVCVAYGSAITKLKPTGPGEVAVPTGAMFASCKRIFKEDVSVTDEFKTTLTSWETGKEKERVYKIPSVCSVDVKLRLGGERFGHTKSKTMPKVADCDHLGVRLYNKRRGAQEKHRRGGFATSLVDSQKSIERYPEVRGLRFSPETCIYSDRDRSSALTIARLHCMELMGLGRPLPFAHSSSVIVDESKLVLL

SEQ ID NO: 1923 - protein, 342 aa, Microglena sp.
RVSVQMKQKGKEEVVEEGENAGYPKDANIVECKDAVGALRVGVDPGMTDIVTVASSAGRIESFSSARFSEVAGYNTSKRRTYKWNDETQDLVKSIPSPNTSNMSDLQDHVRAYLKALPILLQHRANKGYRSMRFFRYVGKQKTIEKVCDVIAPRAQTTVVGFGNWSNQGYGISRSCSGPIKEIRRCLSRRKNVLFKNVDERNTSCKCHGCFQRLVNMKADSVVWRGVCKESPIDGSITVEKQKMVVKNVKVHKVLHCRDSVKSASSNVRCGATWNRDVNAAKNLLLLLTTWMDWRERLEAFCVPSPPPKTTVSIEASVSAKPTDPPGFVSSLPCYPLGQLKC

SEQ ID NO: 1924 - protein, 688 aa, Microglena sp.
RNVGAILYHQKKKNTHPLLMGVVQDKGDDDINISVVKKTLNSLCMDVSRHQISSRIQSMVLLINHAVAEAYLFANFHITRCLDDGDFDVKQLPHLDRNFYYRCLLAVSTSNVRKDTLGQSFNDTIVAFDALRPAGYVKVDVRPWGQVIADVSIQMATMACNSVWANVDRVVIKYLRLKHPSLKKHFKKIVKAVVQYPESKIDTIIPEGLVHAIHIKEVVSHLRALFPLPRGKQFNTRAHLTMRLFHHVLTELGEVGRVDPKDKKTRKSHPRLFSILPRKNGSTISYVPIYSMTFMKLLSMGDSPLESVSGDGRYENHTMLWRKYFNVQGLETKRSRFDNRILSDGKGVSVQMKQKGKEEVVEEGENAGYPKVANIVECKDAVGALRVGVDPGMTDIVTVASSAGRIESFSSARFSEVAGYNTSKRRTYKWNDETQDLVKSIPSPNTSNMSDLQDHVRAYLKALPILLQHRANKGYRSMRFFRYVGKQKTIEKVCDVIAPRAQTTVVGFGNWSNQGYGISRSCSGPIKEIRRCLSRRKNVLFKNVDERNTYCKCHGCFQRLVNMKADSVVWRGICKESPIDGSITVEKQKMVVKNVKVHKVLHCRDSVKSASSNVRCGATWNRDVNAAKNLLLLLTTWMDGRERPEAFCVPSPPPKTTVSIEASVSAKPTDPPGFVSSLPCYPLGQLKC

SEQ ID NO: 1925 - protein, 976 aa, Microglena sp.
RGRLLAVIRFTLVRITQRFVRRAQQFEKLLSSIPLAVRRCCPFVRMPFQSCLPVCSPNLLCRCSVCCHPQQFIVAADHDGLRWAFIDVYSCSQIKSKRLKRKRKELSMLLRSTISNNIAENPFITCKDLVGIICKSCNVRLSISTASRHIKQCGFSRKKAFPTVLYGHSKENVEMFCDKYRESSNVVCIDEAGFYAGEHSKYGYSKIGSRLTTKTMSNLRRVKFTLLLAISSQGIIDYQLLEHNCKKEDFIKFFKTLVIPNNTTIVMDNIRFHHSSEIKDISECKGWKLLYTPPYCPRANAIEQIFESMKRDYRASCPLTSTCNFDYLMQICCVLEMWRYKDFSKYMINTRDWVRNVRESLSADPDYIKTFSGVQFVMENGIGESSSLVHEADQHDDVAELVDYEGEEDEECAPGRAICVVKMKLSTFIPHDWLRKKIDTLVLDMNKLLGEGYIFANFHIARLFENGIAVPPVNRNFFYRCLIAVSTNKCKGSTLGKDFESSRLLFDLLREPGQSKVDIRGKVKNQIIADLSILMATMASNHLWTNLERRITTYLKWKYPQIAKRLRSDIVAAVIKCPTKNLDVIFKMSPHTTKLPTKLPTTRLRSAKSAVALAKKRVGRKEPEGSPLRVRLTKLQERLEKLSEAWLSSKNLRVDADNAKRFFARDVAFCLRGVLPLPSGNTFASAHDPASAPQDIVGDHRRKTKNEKRKTSHILVVALQIWIHSAAHSDRFYMGAAPILLAHRASRGYRNLRFRRYCKKQKLIVEIADFVAPREKSAKVLVGFGDWKGLGATPISRRTCGPLQAIRFELRSRENVIMEDIDEFRTSQRCSCCENHLCNMVALTHRKKQDGTGWECTEGRKRIHKILHCKSSQSGAPRQQSGGMLHCGKTWDRDVNASRNILMLTLHQVFGRERPLAFRRDAPRSSSTTPPPPPDTDMGTQTVERFTKEATRNIFENLFNLLHPPTLPKSNDLQSG

SEQ ID NO: 1926 - protein, 302 aa, Microglena sp.
RSRPRLSASFSESDPNVVVVANDPGRCNIAFLTWKKNKVEEKDKGGRKRKRHCEFGSKSLTRERYYVESGVFKSRGPTKKWLSNIQDCLDDLKDNSPKRTSLESFDAYVTVMVNHWDSRWGEMSKSRWGAQRLRLYGGKKRVLARFFNEVQADVGERKQIVIAYGSSKFAPGGKGELSVPTTSAFNAFSDRFKGRVAVIDEFRTTKIWHKDSTTVLQSVQSEKKGRTVRGLLWCSSTMENSKLFVNRDLNAAINIHNCFTMYPTRPGILARPKKYCKLEVVVGRTIDYKLTGSLQNAVSSEV

SEQ ID NO: 1927 - protein, 628 aa, Microglena sp.
KFQKNPPGGRNAHYVLNIRMPCMATNASVKLARPPMPLVSPGPSSVDGRIMARSERSGLQATNVSLTQAASKATSSSRKKKPAVVKSFSTHVCPHTNNNPTCSDSNFSCKSIFLTNIQDASKSLKSRTSDQGSTSSAQDFYEYWDSSRQDLYRQLLWLPKTGSQGLVSSSLNGFARSTPARSSFSITKTEPLKTSLEKTSCPSFKYIVADGTVEDATKPNAKPKLSTLKLKLNPTKAQKSMLAEFAGCSRFMYNKAVAARLGVGSTHKSVFRIRDRYVTNKVRGEGKMPNPYFKNRQWLLQCPKSVRQSAIKAALANIKACFSNLKAGNIKQFSAPFRRKKTELERGWAIEMDQKNVSKDGDKLFIFKDILGNMRYFGSKQLHKLMPEENPTHDPKVKKSRFGEYFLVLSVAARDRRAERKPVHPDKVATASIDPGVRKTMVTYSPENEESFMLGQGQASDLVKLLLVHDKLQSRLDTEKTLRSKERMKLRLQMIRIRKRIFYLKKEFRDQTTNFLAARYDVLLVPQLEKAKMTISAERELTTKVARQMLTLSHSVLFNRLKEKCEEYGTVFLHVLEHYTSQTCPMCGFLNKCGETYTCKNCQFTCDRDIVGAAGIFLKAVRTENPCS

SEQ ID NO: 1928 - protein, 491 aa, Microglena sp.
VNLTVYKEFACTKYQNAMYGNQRFCKIGKASDALGVSRTVLRRWADNGTIRTIRTPGNQRLFDPSSIQGYLIEQEKKPSSRQVILYARVSSHKQQPDLLRQQLFLQTHISDKHSGCEQVIEVKDVGSGLNFKRPGLLRVLGLVTARGEGKMPNPYFKNRQWLLQCPKSVRQSAIKAALANIKACFSNLKAGNIKQFSAPFRRKKTELERGWAIEMDQKNVSKDGDKLFIFKDILGNMRYFGSKQLHKLMPEVNPTHDPKVHKSRFGEYFLVLSVAARDRRAERKPVHPDKVATASIDPGVRKTMVTYSPENEESFMLGQGQASDLVKLLLVHDKLQSRLDTEKTLRSKERMKIKMQMIRIRKRIFYLKKEFRDQTTNFLAARYDVLLVPQLETEKMTISAERELTTKVARQMLTLSHSVLFNRLKEKCEEYGTVFLHVLEHYTSQTCPMCGFLNKCGETYTCKNCQFTCDRDIVGAAGIFLKAVRTENPCS

SEQ ID NO: 1929 - protein, 206 aa, Microglena sp.
AHVCKHQWHDAGCLFWTHVECISGDTQSTVFSNNFGTRFELRSRENVIMEDIDEFRTSQRCSCCENHLCNMVALTHRKKQDGTGWECTEGRKRIHKILHCKSSQSGAPRQQSGGMLHCGKTWDRDVNASRNILMLTLHQVFGRERPLAFRRDAPRSSSTTPPHPLILIWGHRRLNGLPKRLLGISSRTSSTFCTPQRCPKATICSG

SEQ ID NO: 1930 - protein, 449 aa, Microglena sp.
SGSMRASSQNCLLKTTISVFFIFTAILVASQKSLRQSSIACISAVRVSAVRVSAVRVSAVRVSAVRVSDLKKTSKRSRDEEGMSVSEQYDHKLQTTLPDMGIVVLGVDPGRSNIATVTYLADDKSKTWELTRGAFYRKSGIKKQKKQQEKRFSDMIPRWESLRENGAALSTSRKDDISAYLKNYATFSDEWWRMALRRREFRDNFQRYIGKRKAMDSFWAGIKRNMKLDHPDLRVRVAYGSAITKLKATGPGEVAVPTGSMFASCKRLFKEEVHVTDEFKTTLMSWETGAKKECVYKIPSVQITTEGQIRLGYELLGHTPLKETPMVSYRDQLAVRVYCTRKKIQEKHRRGGLAPSLVDNNSIKRYPEVRGLRFSPETSTYSDRDRSSALTIARLHCMELLGQGRPLPFCRDACCWATKNMMVFHFTVGCYTIRLHHKVYRTLQKAVSF

SEQ ID NO: 1931 - protein, 229 aa, Microglena sp.
KKRSLKKEKNAGYPKDANIVECKDAVGALRVGVDPGMTDIVTVASSAGRIESFSSARFSEVAGYNTSKRRTYKWNDETQDLVKSIPSPNTSNMSDLQDHVRAYLKALPILLQHRANKGYRSMRFFRYVGKQKTIEKVCDVIAPRAQTTVVGFGNWSNQGYGISRSCSGPIKEIRRCLSRRKNVLFKNVDERNTSCKCHGCFQRLVNMKADSVVWRGVLQRVPNRRVYNC

SEQ ID NO: 1932 - protein, 795 aa, Microglena sp.
LWKMATKPPTVAKLKELLKLAEVPYSSKSNKDDLVRLCEDNGLIARPLPEYKTVEKMCVVKCALKKAMSLDDEEFGKFREHVDQLVNVVSRMLRRSSLVLTFHITSLLEKGLEIPDLYNMKDTYWKDWLRIGVDGIFPDEESKISYEAVKDSIGDVIGNDDADYIKSYPIYFDQVLNYAGHTLSTVVSNNAWVPLIPRLARLTSTTLNKLNAPKTLDTSKIIRGYDVMQAIQQEVQTMEGWPESVQEYVNEVREMLSVPDGSRVYDNYGKDMDFPTMVRFNYWIQTRLEDMDARRIRLMPIFNVQRVHVRLDLKTLVNLFRHMFPNDQNIVELSKWEHVKNPDSFMLSQRPAQKKKKSCGPGEWEAYKSVLKQYDDDVKDIKATDEYRHAKGLYDTLLNARKTVAGSFFRKPPVKNGWVFDCSICTDGVSLSMQYSKTVQVLVSDLKKTCKNPRKEEGIKIAEKYDGSLKTILPDMGIVVLGVDPGRSNIATVTYLADDKNKTWKLTRGAFYHKSGIKKQTRQKELRFADMIPMWESLRENGAALSTSRTDKISAYLSNYAKFSDEWWRLALRRRESRDNLQRYIGKRKVKDSFWAGIKRCMMKELPDMKVCVAYGSAITKLKPTGPGEVAVPTGAMFASCKRIFKEDVSVTDEFKTTLMSWETGKEKERVYKIPSVCSADVKLRLGGERFGHTKSKTMPKVADCDHLGVRLYNKRKGAQDKHRRGGFATSLVDSQKSIERYPEVRGLRFSPETCIYSDRDCSSALTIARLHCMELMGLGRPLPFAHSSSVVVDE

SEQ ID NO: 1933 - protein, 267 aa, Microglena sp.
HDSYVGVSLRENGAALSTSRTDKISAYLSNYAKFSDEWWRLALRRRESRDNLQRYIGKRKKVKDSFWAGIKRCMMKELPDMKVCVAYGSAITKLKPTGPGEVAVPTGAMFASCKRIFKEDVSVTDEFKTTLMSWETGKEKERVYKIPSVCSADVKLRLGGERFGHTKSKTMPKVADCDHLGVRLYNKRKGAQEKHRRGGFATSLVDSQKSIERYPEVRGLRFSPETCIYSDRDRSSALTIARLHCMELMGLGRPLPFAHSSSVVVDE

SEQ ID NO: 1934 - protein, 323 aa, Microglena sp.
TQNDIARYGYRRSGVDPGRSNIATVTYLADDKSKTWKLTRGAFYHKSGIKKQKKQQEKRFSDMIPRWESLRENGAALSTSRTDNISAYLKNYATFSDEWWRMALLRRESRDNFQRYIGKRKAMDSFWAGIKRNMKLDHPDLRVRVAYGSAITTLKATGPGEVAVPTGSMFASCKRLFKEEVHVTDEFKTTLMSWETGAKKECVYKIPSVQITTEGQIRLGYELLGHTPLKETPKVSYRDQLAVRVYCTRKQIQEKHRRGGLAPSLVGNNSIKRYPQVRGLRFSPETSTYSDRDRSSALTIARLHCMELLGQGRPLPFCRDACC

SEQ ID NO: 1935 - protein, 548 aa, Microglena sp.
SVQEYVREVRVRLKVPDGSRLYDDYGKDMDFPTMVRFNYWMQTRLEAIGARRIRLMPIFNVQRAHVRLDMKTLVNLFRHVFPKDPNIVELSKRKNVKDPDRFMLPLKPAFKKKKSCGSGEWEAYKLSQQKYDADVNDIKATDEYRHAKGRYDTLVNAQKTVAGSFFKKPPVKTGWVFDCSICTDGVSLSMQYSKTVQVRVSDLKKTSKRSRDDEGMSVSEQYDHKLKTTLPDMGIVVLGVDPGRSNIATVTYLADDKSKTWKLTRGAFYHKSGIKKQKKQQEKRFSDMIPRWESLRENGAALSTSRKDDISAYLKNYATFSGEWWRMVLRRRESRDNFQRYIGKRKAMDSFWAGIKRNMKLDHPDLRVRVAYGSAITTLKATGPGEVAVPTGSMFASCKRLFKEEVHVTDEFKTTLMSWETGAKKECVYKIPSVQITTEGQIRLVTSCWVTPPLKETPKVSYRDQLAVRVYCTRKQIQEKHRRGGLAPSLVDNNSIKRYPEVRGLRFSPETSTYSDRDRYSALTIARLHCMELLGQGRPLPFCRDACC

SEQ ID NO: 1936 - protein, 443 aa, Microglena sp.
DSALDPRTGRDQPTVAQERSNSAKMIRYNVFINRYLEATEDEGLRQAGQHRSPSQHFKHAFITIDTDGLLGVLKDVGLIESLEKTLTNKEHWESVFDVENIRSTGKGVFTCTIDTDGVMACTHFLRAEKKKISIKDDGTAIKKQTKTLREFSESDPNVVVVANDPGRCNIAFLTWKKNKVEEKDKGGRKRKRHCEFGSKRLTRERHYVESGVFKSRGPTKKWLSNIQDCLDDLKDNSPKRTSLVSFDAYETVMVNHWDSRWGEMSKSRWGAQRLRLYGGKKRVLARFFKEVQADVGERKTIVVAYGSAKFAPGGKGELSVPTTSAFNAFSDRFKGRVAVIDEFRTTKIWHKDSTTVLQSVQSEKEGRTVRGLLWCSSTMENSKLFVNRDLNAAINIHNCFTMYPTRPGILARPKKYCKLEVVVGRTIDYKLTGSLQNAVPSEV

SEQ ID NO: 1937 - protein, 247 aa, Microglena sp.
HVTFHRCERLLSASSRHEPPGSVWRRRESRDNLQRYIGKRKVKDSFWAGIKRCMMKELPDKKVCVAYGSAITKLKPTEPGEVAVPTGAMFASCKRIFKEDVSVTDEFKTTLMSWETGKEKERVYKIPSVSSADVKLRLGGERFGHTKSKTMPKVADCDHLGVRLYNKRKGAQEKHRRGGFATSLVDSQKSIERYPEVRGLRFSPETCIYSDRDRSSALTIARLHCMELMGLGRPLPFAHSSSVVVDE

SEQ ID NO: 1938 - protein, 248 aa, Microglena sp.
HLLQVASSLFSSARFSEVAGYNTSKRRTYKWNDETQYLVKSIPSPNTSNMVVLQDHVRAYLKALPILLQHRANKGYRSMRFFRYVGKQKTIGKVCDMIAPRAQTTVVGFGNWSNQGYGISRSCSGPIKEIRRCLSRRKNVLFKNVDERNTSCKCHGCFQRLVNMKADSVVWRGVCKESPIDGSITVEKQKMVVKNVKVHKVLHCRDSVKSASSNVRCGATWNRDVNAAKNLLLLLTTCMDGRERPEAF

SEQ ID NO: 1939 - protein, 996 aa, Microglena sp.
NEKGKNCPCFYVPRYPIILQRTNPFITCKDLVGIICKSCNVRLSISTASRHIKQCGFSRKKAFPTVLYGHSKENVEMFCDKYRESSNVVCIDEAGFYAGEHRKYGYSKIGSRLTLLLAISSQGIIDYQLLEHNCKKEDFIKFFKTLVIPKKTTIVMDNIRFHHYSEIKDISECKGWKLLYTPPYCPRANAIEQIFGSMKRDYRSSCPLTSTCNFDYLMQICCVLEMWRYKDLSKYMINTRDWVWNVRESLSADPDYIKNVFGVQFVMENGIGESSSLVHEADQHDDVAELVDYEGEEDEECAPGRAICVVKMKLSTFIPHDWLRNKIDTLVLDMNKLLGEGYIFANFHIARLFENGIAVPPVNRNFFYRCLIAVSTNKCKGSTLGEDFESSRLLFDLLREPGQSKVDIRGNVKNQIIADLSILMATMASNHLWTNLERRITTYLKWKYPQIAKRLRSDIVAALIKCPTKNLDVIFKMSPHTTKLPTKLPTSRLRSAKSAVALAKKRVGRKEPEGSPLRVRLTKLQEGLEKLCEAWLSSKNLRVDADNAKRFFAREVAFCLRGVLPLPSGNTFASRAHMTLPLYHKILSETIEEKRKTKNEKHRTFSLLPYKSGFTLSHIPISKMAFFYMVNECHFDSCKADVASKNHQGIWERFANLKKVETVSRKFGYRIVTDGFAVSILMNKPTCLTCSMPADEFSTRAHEYLTTDEGGIVSFLDNVVVAAVDPGVTDIVTVTGLNGGTRSYSSAQYYRKGLIFKSQRQTDVWNLETADIVGGIIPDRDSSSSEQIGAYARFYMGAAPILLAHRASRGYRNLRFRRYCKKQKLIVEIADFVAPREKSAKVLVGFGDWKGLGATPISRRTCGPLQAIRFELRSRENVIMEDIDEFRTSQRCSCCENHLCNMVALTHRKKQDGTGWECTEGRKRIHKILHCKKQSKRSATPTERWYASLREDLGPRCERFQKHPDAYTSPSLWERASSRVSPRRAEKFLDNPTPTP

SEQ ID NO: 1940 - protein, 249 aa, Microglena sp.
HIVTVASSAGRVESFSSARFSEAAGYNTSNRRTNKWNVDTQDLVKSIPSPTTSSMHDMQDHVRGYLSALPTLLQHRASRGYRSMRFFRYVGKQKTIEKVCDLIAPKAQKKTIEEKVCDMIAPKAQKTIVGFGNWSNQGYGISRSCSGPVKEIRKCLSRRQNVLFKNVDERNTSCTCHGCFQKLINMKADSVVWRRVQNEPPSLINGAPTTTTTIEKQKTVVKNVKYCTVATVSKAHHPMCAVVQPGTET

SEQ ID NO: 1941 - protein, 243 aa, Microglena sp.
CLRKTRPTIQRSTNPASANISSSCLSLPTDRRAERKPVHPDKVATASIDPGVRKTMVTYSPENEESFMLGQGQASDLVKLLLVHDKLQSRLDTEKTLRSKERMKIKKHMIRIRKRIFYLKKEFRDQTTNFLAARYDVLLVPQLETAKMTISAERELTTKVARQMLTLSHSVLFNRLKEKCAEYGTVFLHVLEHYTSQTCPMCGFLNKCGETYTCKNCQFTCDRDIVGAAGIFLKAVRTENPCS

SEQ ID NO: 1942 - protein, 437 aa, Microglena sp.
EEKSCGPGEWEAYKLAQQKYDADVKDIKATDVYRHAKGRYDTLVNARKTVAGSFFKKPPVKTGWVFDCSICTDGVSLSMQYSKTVQVRVSDLKKNSKRSRDEEGMSVAEQYDHKLKTTLPDMDVVVLGVDPGRSNIATVTYLADNKSKTWKLTRGAFYHKSGIKKQKKQQEKSFSDMIPRWESLRENGAALSTSRKDDISTYLKNYATFSDEWWRMALRRRESRDNFQRYIGKRKAMDSFWAGIKRNMKLDHPDLRVRVAYGSAITKLKATGPGEVAVPTGSMFASCKRLFKEEVHVTDEFKTTLMSWETGAKKECVYKIPSVQITTEGQIRLGYELLGHIPLKETPKVSYRDQLAVRVYCTRKKIQEKHRRGGLAPSLVNNKSIERYPEVRGLRFSPETSTYSDRDRSSALTIARLHCMELLGQGRPLPFCRDACC

SEQ ID NO: 1943 - protein, 617 aa, Microglena sp.
YVTVTHVHLQCQMSGNKKHFTLQLERLLSLQDSTPKRFGKWLTRRKFFATEHLPDKEELICKIFKKCVIIIFMIKRSKLFKKKISSMLEYPLKSKWTIFLDKLNSSEDQNTIAIYLFKIFVQESISREKVLQPFWTPAYKIISETLLLPIETGYVDWGSSSSNHWSQKQEDKSQFLTVQTRKLVNKSSQKIYCQSSMSSLAGKWAKEAILEERIKPLKTIQMKIFPTKKQKTILDEFINTSRYVSNKAIECVENGHKPHFPSLRDLLVTSNTKKHSGTYKKLSKEIEDLHTLKHNTVDKLDKQKIIQEINTKNSTMRDEMKEIAYEENHNLQGFETITPKKIRANAVKSVCDAYKSAFTNLNNGILKILPRTFKDDCILKISNKNTKKHKNLTIENNVDIVRYKGEYFAHILDVVVKNVKNESKDYTMCGIDPGVRSFATVYSCSILDNGKVSSYNTGDYTHRIDLLKKLNKKKSDMMTRRVVRKKQYNKMEKKKKDVVDCLHWETINHVLNHHDIVFYGDIKSQDITKGNKNKTLNQDLNDLKFYIFKNRLEYKASVLQKKVVIMNECYTTKTCSSCGTLNDDVGNKKAFTCPICNLVTGRDANASKNILMKGLLS

SEQ ID NO: 1944 - protein, 586 aa, Microglena sp.
IKCPKTLDTSKIIRGYDVMQAIQQEVQNMEGWPESVQEYVNEVREMLSVPDGSRVYDNYGKDMDFPTMVRFNYWIQTRLEDMDARRIRLMPIFNVQRVHVRLDLKTPREPVQAHVPNDQNIVELSKWEHVKNPESFMLPQRPAQKKKKSCGPGEWDAYKSVLKQYDDDVKDIKATDEYRHAKGLYDTLVNARKTVAGSFFRKPPVKNGWVFDCSICTDGVSLSMQYSKTVQVLVSDLKKTCKKPRKEEGIKIAEKYDGSLKTILPDMGIVVLGVDPGRSNIATVTYLADDKNKTWKLTRGAFYHKSGIKKQTRQKELRFADMIPMWESLRENGAALSTSRTDKISAYLSNYAKFSDEWWRLALRRRESRDNLQRYIGKRKVKDSFWAGIKRCMMKELPGMKVCVAYGSAITKLKPTGPGEVAVPTGAMFASCKRIFKEDVSVTDEFKTTLMSWETGKEKERVYKIPSVCSADVNLRLGGERFGHTKSKTMPKVADCDHLGVRLYNKRKGAQEKHRRGGFATSLVDSQKSIERYPEVRGLRFSPETCIYSDRDRSSALTIARLHCMELMGLGRPLPFAHSSSVVVDE

SEQ ID NO: 1945 - protein, 216 aa, Microglena sp.
GLVQTRLQLPVNPDKVATASIDPGVRKTMVTYSPENEESFMLGQGQASDLVKLLLVHDKMQSRLDTEKTLRSKERMKIKKLMIRIRKTIFYLKKECRDQTTNFLAARYDVLLVPQLETAKMTISAERELTTKVARQMLTLSHSVLFNRLKEKCEEYGTVFLHVLEHYTSQTCPMCGFLNQCGETYTCKNCQFTCDRDIVGAAGIFLKAVRTENPCS

SEQ ID NO: 1946 - protein, 261 aa, Microglena sp.
QDSTEVPDRTARRNIYRKGLIFKSQRQTDVWNLETADIVGGIIPDRDSSSSEQIGAYARFYMGAAPILLAHRASRGYRNLRFRRYCKKQKLIVEIADFVAPRKKSAKVLVGFGDWKGLGATPISRRTCGPLQAIRFELRSRENVIMEDIDEFRTSQRCSCCENHLCNMVALTHRKKQDGTGWECTEGRKRIHKILHCKSSQSGAPRQQSGGMLHCGKTWDRDVNASRNILMLTLHQVFGRERPLAFRRDAPRSSSTTPPPP

SEQ ID NO: 1947 - protein, 621 aa, Microglena sp.
VNLTVYKEFACTKYQNAMYGNQSFCKIGKASDALGVSRTVLRRWADNGTIRTPGNQRLFDPSSIQGYLIEQEKKTSSRQVILYARVSSHKQQPDLLRQQLFLQTHISDKHSGCEQVIEVKDVGSGLNFKRPGLLRVLGLVTAGLVSSIIVASKDRLARFGFELIEWICSQHSCSIIVLDHQDGAPEDELGKDLMSIVQVYCCRWNGRRLYKVKCQTQVEDLKAEAEPNQGSEIDAGRVCGVQPVHVQQGGGSTVGRRSTHKSVFRIRDRYVTNKVRGKGKMPNPYFKNRQWLLQCPKSVRQSAIKSALANIKACFSNLKAGNIKQFSAPFRRKKTELERGWVIEMDQKNVSKDGDKLFIFKEILGNMRYFGSKQLHKLMPEENPTHDPKVQKSRFGEYFLVLSVAARDRRAERKPVNPDKVATASIDPGVRKTMVTYSPENEESFMLGQGQASDLVKLLLVHDKLQSRLDTEKTLRSKERMKIKKLMIRIRKTIFYLKKEFRDQTTNFLAARYDVLLVPQLETAKMTISAERELTTKVARQMLTLSHSVLFNRLKEKCEEYGTVFLHVLEHYTSQTCPMCGFLNKCGETYTCKNCQFTCDRDIVGAAGIFLKAVRTENPCS

SEQ ID NO: 1948 - protein, 702 aa, Microglena sp.
TSCLERVIFFANFHIARLFENGIAVPPVNRNFFYRCIIAVSTNKCNGSTLGEDFESSRLLFDLLREPGQSKVDIRGRVKNQIIADLSILMATMASNHLWTNLERRITTYLKWKYPQIAKRLRSDIVAALIKCPTKNLDDIFKMSPHTTKLPTKLPTSRLRSAKSAVALAKKRVGRKEPEGSPLRVRLTKLQERLEKLSEAWLSSKNLRVDADNAKRFFAREVAFCLRGVLPLPSGNTFASRAHMTLPLYHKILSETIEEKRKTKNEKHRTFSLLPYKSGFTLSHIPISKMAFFYMVNECHFDSCKADVASKNHQGIWERFANLKKVETVSRKFGYRIVTDGFAVSILMNKPTCLTCSMPADAFSTRANEYVTTDEGGIVSFLNNVVVAAVDPGVTDIVTVTGLNGGTRSYSSAQYYRKGLIFKSQRQTDVWNLETADIVGGIIPDRDSSSSEQIGAYARFYMGAAPILLAHRASRGYRNLRFRRYCKKQKLIVEIADFVAPREKSAKVLVGFGDWKGLGATPISRRTCGPLQAIRFELRSRENVIMEDIDEFRTSQRCSCCENHLCNMVALTHRKKQDGTGWECTEGRKRIHKILHCKSSQSGAPRQQSGGMLHCGKTWDRDVNASRNILMLTLHQVFGRERPLAFRRDAPRSSSTTPPPDTDMGTQTVERFTKEATRNIFENLFNLLHPPTLPKSNDLQSG

SEQ ID NO: 1949 - protein, 477 aa, Microglena sp.
HEDPREPIQARVPKDPNIVELSKWKDVKDPDRFMLPLKPAFKKKKSCGPGEWEACKLSQQKYDADVNDIKDTDEYRHAKGRYDTLVNARKTVAGSFFKKPPVKTGWVFDCSICTDGVSLSMQYSKTVQVRVSDLKKTSKRSRDDEGMSVSEQYDHKLKTTLPDMGIVVLGVDPGRSNIATVTYLADDKSKTWKLTRGAFYHKSGIKKQKKQQEKRFSDMIPRWESLRENGAALSTSRTDDISAYLKNYDTFSDEWWRMALLRRESRDNFQRYIGKRKAMDSFWAGIKRNMKLDHPDLRVRVAYGSAITTLKATGPGEVAVPTGSMFASCKRLFKEEVHVTDEFKTTLMSWETGAKKECVYKIPSVQITTEGQIRLGYELLGHTPLKETPNVSYRDQLAVRVYCTRKQIQEKHRRGGLSPSLVDNNSIKRYPEVRGLRFSPETSTYSDRDRSSALTIARLHCMELLGQGRPLPFCRDA

SEQ ID NO: 1950 - protein, 309 aa, Microglena sp.
HPHLFCHLNREICNNHTPECPNKGLIFKSQRQTDVWNLETADIVGGIIPDRDSSSSEQIGAYARFYMGAAPILLAHRASRGYRNLRFRRYCKKQKLIVEIADFVAPRKKSAKVLVGFGDWKGLGATPISRRTCGPLQAIRFELRSRENVIMEDIDEFRTSQRCSCCENHLCNMVALTHRKKQDGTGWECTEGRKRIHKILHCKSSQSGAPRQQSGGMLHCGKTWDRDVNASRNILMLTLHQVFGRERPLAFRRDAPRSSSTTPPPPPDTDMGTQTVERFTKEATRNIFENLFNLLHPPTLPKSNDLQSG

SEQ ID NO: 1951 - protein, 394 aa, Microglena sp.
RYIRSYRSEQRCCLRFSTRSSDGTRSTDSGSRAFSNSAKMIRYNVFINRYLEATEDEGYAKLVNIAPIPTVKHAFITIDTDGLLGVLKDVGLNESLEKTLTNKEHWESVFDVENIRSTGKGVFTCTIDTDGIMACTHFLRAEKKKISIKDDGTAIKKHTKTLREFSESDPNVVVVANDPGRCNIAFLTWKKNKVDEKDKGGRKRKRHCEFGSKRLTRERYYVESGVFKSRGPTKKWLSNIQDCLDDLKDNSPKRTSLVSFDAYVTVMVNHWDSRWGEMSKSRWGAQRLRLYGGKKRVLARFFNEVQEDVGERKTILLSLPLVARVNFLSLQRARSRRLAIVSRGELPSLTNSVPQRSGTRTAPPSSRVCSPKKKGAWFEACYGAVPPWRTASCL

SEQ ID NO: 1952 - protein, 392 aa, Microglena sp.
TPEKQSQVPSSRNHLSRRGVFDCSICTDGVSLSMQYSKTVQVRVSDLKKTSKRSRDEEGMSVSEQYDHKLKTTLPDMGIVVLGVDPGRSNSATVTYLADDKSKAWKLTRGAFYHKSGIKKQKKQQEKRFSDMIPRWESLRENGAALSTSRKDDISAYLKNYATFSDEWWRMALRRRESRDNFQRYIGKRKAMDSFWAGIKRNMKLDHPDLRVRVAYGSAITKLKATRPGEVAVPTGSMFASCKRLFKEEVHVTDEFKTTLMSWETGAKKECVYKIPSVQITTEGQIRLGYELLGHTPLKETPKVSYRDQLVVRVYCTRKKIQEKHRRGGLAPSLVDNNSIRRYPEVRGLRFSPETSTYSDRDRSSALTIARLHCMELLGQGRPLPFFRDACC

SEQ ID NO: 1953 - protein, 674 aa, Microglena sp.
METIVNKEPPDKRTRPDRAAKIKDRKNGEENVVKCTLSRIIADKDNKDVIIKVIKERVDSVSKRTYLAGVAVNRILKEVFEGVPDAQLHTVSVPSVDQNFIRQLMVGSRQVHMETRDATVQRFFHNNYWFREKIEGREVIVKKKKQYVGAIARYDGDRNLYSHASKKYLTNFNNHYRVHLSTWIKKFVYSKENRILAKEIKDEHGIDETVFHRYLLYDIHSWGVKEDLIAIHSLLPERTKMLLKIQHSILGRDEINRQWLKSVSNSAKMIRYNVFINRYLEATEDEGYAKLVNIASIPTVKHAFITIDTDGLLGVLKDVGLIESLEKTLTNKEHWESVFDVENIRSTGKGVFTCTIDTDGVMACTHFLRAEKKKISIKDDGTAIKKQTKTLREFSESDPNVVVVANDPGRCNIAFLTWKKNKVEEKDKGGRKRKRHCKFGSKRLTRERYYVESGVFKSRGPTKKWLSNIQDCLDDLKDNSPKRTSLVSFDAYVAVMVNHWDSRWGEMSKSRWGAQRLRLYEVQEAVGERKTIVVAYGSAKFAPGGKGELSVPTTSAFKAFSDRFKGRVAVIDEFRTTKIWHKDSTTVLQSVQSEKEGRTVRGLLWCSSTMENSKLFVNRDLNAAINIHNCFTMYPIRPGILARPKKYCKLEVVVGRKIDYKLTGSLQNVVLSEV

SEQ ID NO: 1954 - protein, 619 aa, Microglena sp.
IATSSTGAFLQSVSTNKCNGSTLGEDFESSRLLFDLLREPGQSKVDIRGNVKNQIIADLSILMATMASNHLWTNLERRITTYLKWKYPQIAKRLRSDIVAAVIKCPTKNLDVIFKMSPHAAKLPTKLPTARLRSTKSAVALAKKRVGRKEPEVSPLRVRLTKLQARFEKLSEAWLSSKNLRVDEDNAKSFFARDVAFCLRGVLPLPSGNTFASRAHMTLPLYHKILSETIEERKTKNEKLRTFSLLPYKSRFTLSHIPISKMAFFYMVNECHFDSCKADVASKNHQGIWERFANLKKVETVSRKFGYRIVTDGFAVSILMNKPTCLTSSMPTDAFSTRAHEYVTTDEGGIVSFRDNVVVAAVDPGVTDIVTVTGLDGGTRSYSSAQYYRKGLIFKSQRQTDVWNLETADIVGDIIPDRDSSRSEQIGAYARFYMGAAPISRRTCGPLQAIRFELRSRENVIMEDVDEFRTSQRCSCCENRLCNMVAHTHRKKQDGTGWECTEGRKRIHKILHCKSSQSGAPRQQSGGRLHCGKTWDRDVNASRDILMLTLHQVFGRERPLAFHRDAPRSSSKTPPPPDTDMGTQTVERFTKEATRNIFENLFNLLHPPTLPKSNDLQSG

SEQ ID NO: 1955 - protein, 332 aa, Microglena sp.
ASQNSMTINSKRHCPIWVSSFWVWILVGATSLQSRIWQTTKARHGSLHAELFTTSLVSRNRKKQQEKRFSDMIPRWESLRENGAALSTSRKDDISAYLKNYATFSDEWWRMALRRRESRDNFQRYIGKRKAMDSFWAGIKRNMKLDHPNLRVRVAYGSAITKLKATGPGEVAVPTGSMFASCKRLFKEEVHVTDEFKTTLVSWETGAKKECVYKIPSVQITTEGQICLGYELLGHTPLKETPKVSYRDQLAVRVYCTRKKIQEKHRRGGLAPSLVDNKSIKRYPEVRGLRFSPETSTYSDRDRSSALTIARLHCMELLGQGRPLPFCRDACC

SEQ ID NO: 1956 - protein, 346 aa, Microglena sp.
MPADAFSTRAHEYVTTDEGGIVSFRDNVVVAAVDPGVTDIVTVTGLDGGTRSYSSAQYYRKGLIFKSQRQTDVWNLETADIVGDIIPDRDSSRSEQIGAYARFYKGAAPILLAHRASRGYRNLRFRRYCKKQKLIVEIADFVAPREKSAKVLVGFGDWKGLGATPISRRTCGPLQAICFELRSRENVIMEDVDEFRTSQRCSCCENRLCNMVALTHRKKQDGTGWECTEGRKRIHKILHCKSSQSGAPRQQSGGRLHCGKTWDRDVNASRNILMLTLHQVFGRERPLAFRRDAPRGSSKTPPPPDTDMGTQTVERFTKEATRNIFENLFNLLHPPTLPKSNDLQSG

SEQ ID NO: 1957 - protein, 592 aa, Microglena sp.
WKYPQIAKRLRSDIVAAVIKCPTKNLDVIFKMSPHVAKLPTKLPTARLRSAKSAMALAKQRVGRKEPEVSPLRVRLTKLQARFEKLSEAWLSSKNLRVDEDNAKRFFARDVAFCLRGVLPLPSGNTFAPRAHMTLPLYQKILSETIKEKRKTKNEKLRTFSLLPYKSGFTLSHIPISKMAFFYMVNECHFDSCKADVASKNHQGIWERFANLKKVETVSRKFGYRIVTDGFAVSILMNKPTCLTCSMPADAFSTRAHEYVTTDEGGILSFRDNVVVAAVDPGVTDIVTVTGLDGGTRSYSSAQYYRKGLIFKSQRQTDVWNLETVDIVGDIIPDRDSSRSEQIGAYARFYKGAAPILLAHRASRGTETSAFAGTAKKQKLIVEIADFVAPREKSAKVLVGFGDWKGLGATPISRRTCGPLQAIRFELRSRENVIMEDVDEFRTSQRCSCCENRLCNMVALTHRKKQDGTGWECTEGRKRIHKILHCKSSQSGAPRQHSGGRLHCGKTWDRDVNASRNILMLILHQVFRRERPLAFRRDAPRSSSKTPPPPDTDMGTQTVERFTKEATRNIFENLFNLLHPPTLPKSNDLQSG

SEQ ID NO: 1958 - protein, 639 aa, Microglena sp.
LWKMATKPPTVAKLKELLKLAEVPYSSKSNKDDLVRLCEDNGLIARPPPEYKTVEKMCVVKCALKKAMSLDDEEFGKFREHVDQLVNVVSRMLRRSSLVLTFHITSLLEKGLEIPDLYNMKDTYWKDWLRIGVDGIFPDEESKISYEAVKDSIGDVIGNDDADYIKSYPIYFDQVLNYAGHTLSTVVSNNAWVPLIPRLARLTSTTLNKLNAPKTLDTSKIIRGYDVMQAIQQEVQNMEGWPESVQEYVNEVREMLSVPDGSRVYDNYGKDMDFPTMVRFNYWIQTRLEDMDARRIRLMPIFNVQRVHVRLDLKTLVNLFRHMFPNDQNIVELSKWEHVKNPDSFMLPQRPAQKKKKSCGPGEWEAYKSVLKQYDDDVKDIKATDEYRHAKGLYDTLVNARKTVAGSFFRKPPVKNGWVFDCSICTDGVSLSMQYSKTVQVLVSDLKKTCKNPHKEEGIKIAEKYDGSLKTILPDMGIVVLGVDPGRSNIATVTYLADDKNKTWTLTRGAFYHKSGIKKLTRQKELRFADMIPMWESLRENGAALSTSRTDKISAYMSNYAKFSEEWWRLALRRRESRDNLQRYIGKRKVKDSFWAGIKRCMMKELPDMKVCVAYGSAITEAYWTGRSRSSHWGHVRIV

SEQ ID NO: 1959 - protein, 278 aa, Microglena sp.
ACSTAKTVQVLVSDLKKTCKNPRKEEGIKIAEKYDGSLKTILPDMGIVVLGVDPGRSNIATVTYLADDKNKTWTLTRGAFYHKSGIKKQTRQKELRFADMIPMWESLRENGAALSTSRTDKISAYLSNYAKFSEEWWRLALRRRESRDNLQRYIGKRKVKDSFWAGIKRCMMKELPDMKVCVAYGSTIMKLKPTGPGEVAVPTGGMFASCKRIFKEDVSVTDEFKTTLMSWKTGKEKERVYKIPSVCSADVKLRLGGERFGHTKSKTMPKVADCDHLG

SEQ ID NO: 1960 - protein, 459 aa, Microglena sp.
EHVKNPDSFMLPQRPAQKKKKSCGPGEWEAYKSVLKQYDDDVKDIKATDEYRHAKGLYDTLVNARKTGAGSFFRKPPVKNGLVFDSSICTDGVSLSMQYSKTVHVLVSDLKKTCKKPRKEEGIKIAEKYDGSLKTILPDMGIVVLGVDPGRSNIATVTYLADDKNKTWTLTRGAFYHKSGIKKQTRQKELRFADMIPMWESLRENGAALSTSRTDKISAYLSNYAKFSDEWWRLALRRRESRDNLQRYIGKRKVKDSFWAGIKRCMMKELPDMKVCVAYGSAITKLKPTGPGEVAVPTGAMFASCKRIFKEDVSVTDEFKTTLMSWETGKEKERVYKIPSVCSADVKLRLGGERFGHTKSKTMPKVADCDHLGVRLYNKRKGAQEKHRRGGFATSLVDSQKSIERYPEVRGLRFSPETCIYSDRDRSSALTIARLHCMELMGLGRPLPFAHSSSVVVDE

SEQ ID NO: 1961 - protein, 403 aa, Microglena sp.
SSCCRQERGPSFLAWVIRHSRASLAMDVTRTIQCCGESTLMSKVLRRKGLALTTESSATAKGVSVQMKQKGKEEVVEEGENAGYPKDANIVECKDAVGALRVGVDPGMTDIVTVASSAGRIESFSSARFSEVAGYNTSKRRTYKWNDETQDLVKSIPSPNTSNMSDLQDHVRAYLKALPILLQHRANKGYRSMRFFRYVGKQKTIEKVCDVIAPRAQTTVVGFGNWSNQGYGISRSCSGPIKEIRRCLSRRKNVLFKNVDERNTSCKCHGCFQRLVNMKADSVVWRGVCKESPIDGSITVEKQKMVVKNVKVHKVLHCRDSVKSASSNVRCGATWNRDVNAAKNILLLLTTWMDGRERPEAFCVPSPPPKTTVSIEASVSAKPTDPPGFVSSLPCYPLGQLKC

SEQ ID NO: 1962 - protein, 278 aa, Microglena sp.
SPFHLRLRAVCTTCRTMSEVTSARSRPSFNTEPNRGYRSMRFFRYVGKQKTIEKVCDLIAPKAQKKTIEEKVCDVIAPKAKKTVVGFGNWSNQGYGISRSCSGPVKEIRKCLSRRQNVLFKNVDERNTSCTCHGCFQKLVNMKADSVVWRRVQNEPSALIDGAPTTTTTTTTTTFEKQKTVVKNVKVHKVLHCRNSVKSASSNVRCGATWNRDVNAAKNLLLLLTTWMDGKERPAAFCVPSSSPTPKTTVSGEANVGAQPTDPPGSVSSLQLLSSGPA

SEQ ID NO: 1963 - protein, 531 aa, Microglena sp.
RKHFNKIVKAVVQYPDSDIDKIIPAGLVHANLIKDVVRRLRDLLPLPRGSSSTLKAHLTMRLFHHVLTELGADLKEKTTKKRPRLFSILPRKSGFTISYVPISSMTLMKLLSMGDSPLESVQWRWTSRESFHLWRKYFNVQGLETKGSRFDNRILSDGKGVSVQMKHQVGKDIAGEGGGDNAGYPKDASIEDCRDASLRQGALRVGIDPGMTDIVTIASSDGRVESFSSARFSEAAGYNTSNRRTNKWNADTQDLVKSIPSLTTSSMHDMQDHVRGYLSALPTLLQHRANRGYRSMRFFRYVGKQKTIEKVCDLIAPKAQKKTIEEKVCDVIAPKAKKTVVGFGNWSNQGYGISRSCSGPVKEIRKCLSRRQNVLFKNVNERNTSCTCHGCFQKLVNMKADSVVWRRVQNEPSALIDGAPTTTTTTTFEKQKMVVKNVKVHKVLHCCNSVKSASSNVRCGATWNRDVNAAKNLLLLLTTWMDVKERPAAICVPSSSPTPKSTVSGEANVGAQPTDPPGSVSSLQLLSSGPA

SEQ ID NO: 1964 - protein, 506 aa, Microglena sp.
RFSDHAIEDSGMIPALTCHRWLVLLINHAVAEAYLFANFHITRCLDDGDFDVKQLPHLDRNFYYRCLLAVSTSNVRKDTLGQSFNDTMVAFDALRPAGYVKVDVRPWGQVIADVSIQMATMACNSVWANVDRVVIKYLRLKHPSLKKHFKKIVKAVVQYPESKIDTIIPEGLVHAIHIKEVVSHLRALLPLPRGKQFNTRAHLTMRLFHHVLTELGADLKEKTTKKRPRLFSILPRKSGFTISYVPISSMTLMKLLSMGDSPLESVRGDGRLENHSMLWRKYFNVQGLEKKGSRFDNRILSDGKGVSVQMKHQVGKDIAGEGGGDNAGYPKDASIEDCQDASLRQGALRVGIDPGMTDIVTIASSDGRVESFSSARFSEAAGVQYQQSSHKQMECRYARPREVHFIADYRAVCTTCRTMSEVTSARSRPSFNTRANRGYRSMRFFRYVGKQKTIEKVCDLIAPKAQKKTIEEKVCDVIAPKARRPLLALATGPTRAMASVVRVLDQ

SEQ ID NO: 1965 - protein, 318 aa, Microglena sp.
NEMEYHVLEYIGQYYENDGFVVITINILLNTHLIFKSQRQTDFWNLETADIVGGIIPDRDSSSSEQIGAYARFYMGAAPILLAHRASRGYRNLRFRRYCKKQKLIVEIADFVAPREKSTKVLVGFGDWKGLGATPISRRTCGPLQAIRFELRSRENVIMEDIDEFRTSQRCSCCETRLCNMVALTHRKKQDGTGWECTEGRKRIHKILHCKSSQSGAPRQQSGGRLHCGKTWDRDVNASRNILMLTLHQVFGRERPLAFRRDAPRGSSKTPPTLDTDMGTQTVLRFTTEATRNIFENLFNLLHPPTLPKSNDLQSGCL

SEQ ID NO: 1966 - protein, 621 aa, Microglena sp.
QCIRNLHVLNIRMPCMATNASVKLARPPMPLVSPGPSSVDGRIMAQSERSGLQATNVSLTQAASKATSSSRKKKPSSRQVILYARVSSHKQQPDLLRQQLFLQTHISDKHSGCEQVIEVKDVGSGLNFKRQDFYEYWDSSRQDLYRQLLWLPKTGSQGLVSSSLNGFARSTPARSSFSITKTEPLKTSLEKTSCPSFKYIVADGTVEDATKSNAKPKLRTLKLKLNPTKAQKSMLAEFAGCSRFMYNKAVAARLGVGSTHKSVFRIRDRYVTNKVRGEGKMPNPSFKNRQWLLQCPKSVRQSAIKAALANIKACFSNLKAGNIKQFSAPFRLKKTELERGWAIEMDQKNVSKDGDKLFIFKDILGNMRYFGSKQLHKLMPEENPTHDPKVQKSRFGEYFLVLSVAARGRRAERKPVHPDKVATASIDPGVRKTMVTYSPENEESFMLGQGQASDLVKLLLFHDKLQSRLDTEKTLRSKERMKIKMQMIRIRKRIFYPKKEFRDQTTNFLAARYDVLLVPQLETAKMTISAERELTTKVARQMLTLSHSVLFNRLKEKCEEYGTVFLHVLEHYTSQTCPMCGFLNKCGETYTCKNCQFTCDRDIVGAAGIFLKAVRTENPCS

SEQ ID NO: 1967 - protein, 305 aa, Microglena sp.
EQHRYSHVSGRRQKQDMEAYTRSFFTTSLVSRNRKKQQEKRFSDMIPRWESLRENGAALSTSRKDDISAYLKNYATFSDEWWRMALRRRESRYNFQRYIGKRKAMDSFWAGIKRNMKLDHPDLRVRVAYGSAITTLKATGPGEVAVPTGSMFASCKRLFKEEVHVTDEFKTTLMSWETGAKKECVYKIPSVQITTEGQIRLGYELLGHTPLKETPKVSYRDQLAVRVYCTRKQIQEKHRRGGLAPSLVDNNLIKRYPEVRGLRFSPETSTYSDRDRSSALTIARLHCMELLGQGRPLPFCRDACC

SEQ ID NO: 1968 - protein, 518 aa, Microglena sp.
ITALHPADSVSFFCRYFRECQLKDQPHLSDRLFPSTVAQKNTGSLLMCNASCQEVSLPDGSFYRTIHSFYCSTDCSPCMPLFTISYVPISSMTLMKLLSMGDLPLESVRGDGRHENHSMLWRKYFNVQGLEKKGSRFDNRILSDGKGVSVQMKHQVGKDIAGEGGGDNAGYPKDASIEDCQDASLRQGALRVGIDPGMTDIVTIASSDGRVESFSSARFSEAAGYNTSNCRTNKWNADTQDLVKSIPSLTTSSMHDMQDHVRGYLSALPTLLQHRANRGYRSMRFFRYVGKQKTIEKVCDLIAPKAQKKTIEEKVCDVIAPKAKKTVVGFGNWSNQGYGISRSCSGPVKEIRKCLSRRQNVLFKNVDERNTSCTCHGCFQKLVNMKADSVVWRRVQNEPSALIDGAPTTTTTTTFEKQKTVVKNVKVHKVLHCRNSVKSASSNVRCGATWNRDVNAAKNLLLLLTTWMDGKERPAAFCVPSSSPTPKTTVSGEANVGAQPTDPPGSVSSLQLLSSGPA

SEQ ID NO: 1969 - protein, 688 aa, Microglena sp.
GNVGAILYHQKKKNTHPLLMGVVQEKGDDDINIRVVKKTLNSLCMDVSRHQISSSIQSMVLLINHAVAEAYLFANFHITRCLDDGDFDVKQLPHLDRNFYYRCLLAVSTSNVRKDTLGQSFNDTMVAFDALRPAGYVKVDVRPWGQVIADVSIQMATMACNSVWANVDRVVIKYLRLKHPSLKKHFKKIVKAVVQYPESKIDTIIPEGLVHAIHIKEVVSHLRALFPLPRGKQFNTKAHLTMRLFHHVLTELGEVGRVDPKDKKTKKSHPRLFSILPRKNGFTISYVPISSMTFMKLLTMGDSQLESVSGDGRYENHTMLWRKYFNVQGLETKRSRFDNRILSDGKGVSVQMKQKGKEEIVEEGENAGYPKDANIVECKDAVGALRVGVDPGMTDIVTVASSAGRIESFRSARFSEVAGYNTSKRRTYKWNDETQDLVKSIPSPNTSNMVDLQDHVRAYLKALPILLQHRANKGYRSMRFFRYVGKQKTIEKVYDVIAPRAQTTVVGFGNWSNQGYGISRSCSGSIKEIRRCLSRRKNVLFKNVDERNTSCKCHGCFQRLVNMKADSVVWRGVCKESPIDGSITVEKQKMVVKNVKVHKVLHCRDSVKSASSNVRCGATWNRDVNAAKNLLLLLTTWMDGRERPEAFCVPSPPPKTTVSIEASVSAKPTDPPGFVSSLPCYPLGQLKC

SEQ ID NO: 1970 - protein, 637 aa, Microglena sp.
CNVITRCLDDGDFDVKQLPHLDRNFYYRCILAVSISNVRNDTLDQSLKDSMVAFDALRPAGYVKVDVRPWGQVIADVSIQMATMACNSVWANVDRVVIKYLRLKHPSLKKHFKKIVKAVVQYPDSDIDKIIPAGLVHANLIKDVVRRLRDLLPLPRGKQFNARAHLTMRLFHHVLTELGEDLKEKTTKKRPRLFSILPRKSGFTISYVPISSMTLMKLLSMGDSPLESVRGNGRHENHSMLWRKYFNVQGLETKGSHFDNRILSDGKGVSVQMKPQCGKDIAGEGGGDNAGYPKDASIEDCQDASLRQGALRVGINPGMTDIVTIASSDGRVESFSSARFREAAGYNTSNRRTNKWNADTQDLVKSIPSPTTSSMHDMQDHVRGYLSALPTLLQHRANRGYRSMRFFRYVGKQKTIEKVCDLIAPKAQKKTIEEKVCDVIAPKTKKTVVGFGNWSNQGYGISRSCSGPVKEIRKCLSRRQNVLFKNVDERNTSCTCHGCFQKLVNMKADSVVWRRVQNEPSALIDGAPTTPTTFEKQKTVVKNVKVHKVLHFRNSVKSASSNVRCGATWNRDMNAAKNLLLLLTTWMDGKERPAAFCVPSSSPTPKTTVSGEANVGAQPTDPPGSVSSLQLLSSGPA

SEQ ID NO: 1971 - protein, 299 aa, Microglena sp.
NHSMLWRKYFNVQGLEKKGSRFDNRILSDGKGVSVQMKHQVGKDIVGVGGRDNAGYPKNASIEDCQDASLRQGALRVGIDPGMTDIVTIASSDGRVESFSSARFSEAAGYNTSNRRTNKWNADTQDLVKSIPSPTTSSMHDMQDHVRGYLSALPTLLQHRANRGYRSMRFFRYVGKQKTIEKVCDLIAPKAQKKTIEEKVCDVIAPKAKKTVVGFGNWSNQGYGISRSCSGPVKEIRKCLSRRQNVLFKKRRRTQHFLYLPRLLPEARQHEGRQRRLAQSSKRALRPHRRGSYNNNNNV

SEQ ID NO: 1972 - protein, 212 aa, Microglena sp.
IPRWESLRENGAALSTSRKDDISAYLKNYATFSDEWWRMALRRREFRDNFQRYIGKRKAMDSFWAGIKRNMKLDHPDLRVRVAYGSAITTLKATGPGEVAVPTGSMFASCKRLFKEEVHVTDEFKTTLMSWETGAKKECVYKIPSVQTTTEGQIRLGYELLGHTPLKETPKVSYRDQLAVRVYCTRKQNPRKTQEGWLSPLSCRQQLDQAVP

SEQ ID NO: 1973 - protein, 436 aa, Microglena sp.
RRAWKRPHVHRFKYIVADGTVEDATKSNAKPKLRTLKLKLNPTKAQKLMLAEFAGCSRFMYNKALAARLASEHSQVCLPNSRQVCDEQGEGEGKMPNPYFKNRQWLLQCPKSVRQSAIKAALANIKACFSNLKAGNIKQFSAPFRRKKTELERGWAIEMDQKNVSKDGDRLFIFKDILGNMRYFGSKQLHKLMPEENPTHDPKVQKSRFGEYFLVLSVAARDRRAERKPVHPDKVATASIDPGVRKTMVTYSPENEESFMLGQGQASDLVKLLLVHDKLQSRLDTEKTFRSKERMKIKKQMIRIRKRIFYLKKEFRDQTTNFLAARYDVLLVPQLETAKMTISAERELATKVARQMLTLSHSVLFNRLKEKCEEYGTVFLHVLEHYTSQTCPMCGFLNKCGGETYTCKNCQFTCDRDIVGAAGIFLKAVRTENPCS

SEQ ID NO: 1974 - protein, 244 aa, Microglena sp.
CLRKTRPTIQRSKNPASANISSSCLSLPGTGGAERKPVHPDKVATASIDPGVRKTMVTYSPENEESFMLGQGQASDLVKLLQVHDKLQSRLDTEKTLQSKERMKIKKQMIRIRKRIFYLKKEFRDQTTNFLAARYDVLLVPQLETAKMTISAERELTTKVARQMLTLSHSVLFNRLKEKCEEYGTVFLHVLEHYTSQTCPMCGFLNKCGGETYTCKNCQFTCDRDIVGAAGIFLKAVRPENPCS

SEQ ID NO: 1975 - protein, 813 aa, Microglena sp.
PRMEHVCDVCIKSSVMYKLCKMATKPPTVAKLKELLKLAEVAYSSKDKKDDIVRLCEDNGLIARPPPEYKTVEKMCVVKCALKKAMSLDDEEFGKFRGHVDQLVNVVSRMLRRSSLVLTFHVTRLMEGDLPIPNMYDMKDTYWKDWLRIGVDGVFPDEESIISYEAVKDVIGKVLGSDDPDYINSYPIYFDQVLNYAGHTLSTVVSNNAWVPLVPRLTRLTKATLKALGAPKTIRVYDVMRVIQQEIQEMESWPESVQEYVREVRVRLKVPDGSRLYDDYGKDMDFPTMVRFNYWMQTRLEAMGARRIRLMPIFNVQRAHVRLDMKTLVNLFRHVFPKDPNIVELSKWENVKDPDRFMLPLKPAVKKKKSCGPGEWEAYKLAQQKYDADVKDIKATDEYRHAKGRYDTLVNARKTVAGSFFKKPPVKTRWVFDCSICTDGFSLSMKYSKTVQVRVSDLKKTSKRSRDEEGMSVAEQYDHKLKTTLPDMGIVVLGVDPGRSNIATVTYLADDKSKTWKLTRGAFYHKSGIKKQKRQQEKRFTDMIPMWASLRENGAALSTSRMDDISVYLSNYATFSDEWWRLALRRRESRDNHQRYIGKRKAMDSFWAGIKRNMMMDHPDLRVRVAYGSAITKLKATGPGEVAVPTGSMFASCKRIFKEEVHVTDEFKTTLMSWETGAKKECVYKIPSVSLNAEGQISIGDEWLLCHTLLKKPPKVAERDQSAVRVYCTRKKIQEKHRKGALATSLFDVNKSIKQYPEVRGLRFSPETSTYSDRDRSSALTITRLHCMELLGLGRPLPFSRCKVRVVDGLQQT

SEQ ID NO: 1976 - protein, 348 aa, Microglena sp.
ALKQYDADVKDIKATDEYRHAKGRYDTLVNARKTVAGSFFRKPPVKNGWVFDCSICTDGVSLSMQYSKKVQVRVSDLKKTSMRSRDNEGLSVAEQYDRKLETTLTEMGIVVLGVDPGRSNIATVTYLAKGKSKTWKLTRGAFYHKSGIEKQKKQQEKRFSDMIPRWESLRENGAALSTSRKGDISAYLKNYATFSDEWWRMALRRRESRDNFQRYIGKRKAMDSFWAGIKRNMKLDHPDLRVRIAYGSAIKTMKATGPGEVAVPTGSMFASCKRLFKEEVHVTDEFKTTLMSWETGAKKECVYKIPSVQITMEGQIRLGYELLGHTPLKETPKVSYRDQVGGEGVLHT

SEQ ID NO: 1977 - protein, 464 aa, Microglena sp.
TRAHRRFYCQSSMSSLVGKWANEAILEEKIKPLKTIQMKLFPTKKQKQILDEFINTSRYVSNKAIEYVDKGHKPYFQTLRDLLVTSNTKKNSNTYKKLSKEIEDLHTLKQGTVDQSDKQKIIEEIKTKNKIMRDEMKEIAYEKNHNLQGFETFTPKEIRANAVKSVCDAYKSAFTNLKNGNIKFFKMKYKTKKNSRQTVELAPSSISFNNGILRILPNTFKYDCVLKISNKNRKKHKNLTIKNNVDIVRHKGQYVIHILDTILNNIDNETNEYTMCGVDPGVRCFATTYSCSIKNNGEVSSYNTRDYTHRIDLLKKLNKKRIDIMERKAVRKKQYNKIEKKKKNIVDCLHWETIHHVLKHNDFVFYGDIKSQDITKGNKNNTLNQDFNDLKFYIFKTRLEYKASVLKRKVVIMNECYTTKTCSNCGTLNNDVGSKKVFTCPICNLVAGRDANASKNILMKGLLS

SEQ ID NO: 1978 - protein, 375 aa, Microglena sp.
KHSGTYKKLSKEIEDLHTLKYNTVDKLDKRKIIQEINTKNKTMRDEMKEIAYEKNHNLQGFETITPKEIRANAVKSVCDAYKSAFTNLKNGNIKFFKMKYKEKKNQRQTIELDPSSISLNNGILKILPRTFKDDCILKISNKNTKKHKNQTIENNVDIVRYKGEYFAHILDVVVKNVKNESKDYTMCGIDPGVRSFATVYSCSILDNGKVSSYNTGDYTHRIDLLKKLNKKKSYMMTRRVVRKKQYNKIEKKKKDVVDCLHWETINHVLNHNHIVFYGDIKSQDITKGNKNKTLNQDFNDLKFYIFKNRLEYKASVLQKKVVIMNECYTTKTCSSCGTLNDDVGNKKVFTCPICNLITGRDANASKNVLMKGLLS

SEQ ID NO: 1979 - protein, 630 aa, Microglena sp.
ECSREPVCRSRLHQNVFGVQFVMEHGVVLVHEADQHDDVAELVDYEGDEDEERAPGRAICVVKMKLSTFIPHDWLRRKIDTLVLDMNKLLGEGYIFANFHIARLFENGIAVPPVNRNFFYRCLLAVSTNKCNGSTLGEDFESIRLLFDLLREPGQSKVDIRGNVKNQIIADLSILMATMASNHLWTNLERRITTYLKWKYPQIAKLLRSDIVAAVIKCPTKNLDVIFKMSPHVAKLPTKLPTARLCLAKSAVALAKKRVGRKEPEVSPLRVRLTKLQARFEKLSEAWLSSKNLRVDEDNAKRFFARDVAFCFRGVLPLPSGNTFASRAHMTLPLYHKILSETIEERKTKNEKLRTFSLLPYKSRFTLSHIPISKMAFFYMVNECHFDSCKADVASKNHQGIWERFANLKKVETVSRKFGYRIVTDGFAVSILMNKPTCLTCSMPADAFSTRAHEYVTTDEGGIVSFRDNVVVAAVDPGVTDIVTVTGLDGGTRSYSSAQYYRKGLIFKSQRQTDVWNLETADIVGDIIPDRDSSRSEQIGAYARFYMGAAPIILAHRASRGYRNLRFRRYCKKQKLIVEIADFVAPREKSAKVLVGFGDWKGLGATPISRRTCGPLQAIRFELRYGDTDG

SEQ ID NO: 1980 - protein, 409 aa, Microglena sp.
KSKKSHPRLFSIPSRKNGFTISYVPKSSMTFMKLLSMGDSPLESVSGDGRYENHTMLWRKYFNVQGLETKRSRFDNRILSDGKGVSVQMKQKGKEEVVEEGENAGYPKDANIVECKDAVGALRVGVDPGMTDIVTVASSAGRIESFSSARFSEVAGYNTSKRRTYKWNDETQDLVKSIPSPNTSNMVDLQDHVRAYLKALPILLQHRANKGYRSMRFFRYVGKQKTIEKVCDVIAPRAQTTVVGFGNWSNQGYGISRSCSGTIKEIRRCLSRRKNVLFKNVDERNTSCKCHGCFQRLVNMKADSVVWRGVCKESPIDGSITVEKQKMVVKNVKVHKVLHCRDSVKSASSNVRCGATWNRDMNAAKNLLLLLTTWTAEDATVTISVIPGSTPTRSAPTASLHSTIFASLG

SEQ ID NO: 1981 - protein, 289 aa, Microglena sp.
HLLQVASSLFSSARFSEVAGYNTSKRRTYKWNDETQDLVKSIPSPNTSNMSDLQDHVRAYLKALPILLQHRANKGYRSMRFFRYVGKQKTIEKVCDVIAPRAQTTVVGFGNWSNQGYGISRSCSGPIKEIRRCLSRRNNVLFKNVDERNTSCKCHGCFQRLVNMKADSVVWRGVCKESPIDGSITVEKQKMVVKNVKVHKVLHCRDSVKSASSNVRCGATWNRDVNAAKNLLLLLTTWMDGRERPEAFCVPSPPPKTTVSIEASVIAKPTDPPGFVSSLPCYPLGQLKC

SEQ ID NO: 1982 - protein, 448 aa, Microglena sp.
QCDCFHHVLTELGEVGRVDPKDKKTRKSHPRLFSTLPRKNGFTISYVPISSMTFMKLLSMGDLPLKSVSGDGRYENHTMLWRKYFNVQGLETKRSRFDNRILSDGKGVSVQMKQKGKEEVVEEGENAGYPKDANIVECKDAVGALRVGVDPGMTDIVTVASSAGRIESFSSARFSEVAGYNTSKRRTYKWNDETQDLVKSIPSPDTSNMSDLQDHVRAYLKALPILLQHRANKGYRSMRFFRYVGKQKTIEKVCDVIAPRAHTTVVGFGNWSNQGYGISRSCSGPIKEIRRCLSRRNNVLFKNVDERNTSCKCHGCFQRLVNMKADSVVWRGVCKESPIDGSITVEKQKMVVKNVKVHKVLHCRDSVKSASSNVRCGATWNRDVNAAKNLLLLLTTWMDGRERPEAFCVPSPPPKTTVSIEASVSAKPTDPTGFVSSLPCYPLGQLKC

SEQ ID NO: 1983 - protein, 425 aa, Microglena sp.
KNKKKSPPSVQYPSSQERLHNFVRPISSMTFMKLLSMGDSPLESVSGDGRYENHTMLWRKYFNVQGLETKRSRFDNRILSDGKGVSVQMKQKGREEVVEEGENAGYPKDANIVECKDAVGALRVGVDPGMTDIVTVASSAGRIESFSSARFSEVAGYNTSKRRTYKWNDETQDLVKSIPSPDTSNLSDLQDHVRAYLKALPILLQHRAIKGYRSMRFFRYVGKQKTIEKVCDVIAPRAQTTVVGFGNWSNQGYGISRSCSGPIKEIRRCLSRRNNVLFKNVDERNTSCKCHGCFQRLVNMKADSVVWRGVCKESPIDGSITVEKQKMVVKNVKVHKVLHCRDSVKSASSNVRCGATWNRDVNAAKNLLLLLTTWMDGRERPEAFCVPSPPPKTTVSIEASVSAKPTDPTGFVSSLPCYPLGQLKC

SEQ ID NO: 1984 - protein, 587 aa, Microglena sp.
IKCPEDAGHIEDHSGGDDVMQAIQQEVQNMEGWPESVQEYVNEVREMLSVPDGSRVYDNYGKDMDFPTMVRFNYWIQTRLEDMDARRIRLMPIFNVQRVHVRLDLKTLVNLFRHMFPNDQNIVELSKWEHVKNPDSFMLPQRPAQKKKKSCGPGEWEAYKSVLKQYDDDVKDIKATDEYRHAKGLYDTLVNARKTVAGSFFRKPPVKNGWVFDCSICTDGVSLSMQYSKTVQVLVSDLKKTCKKPRKEEGIKIAEKYDGSLKTILPDMGIVVLGVDPGRSNIATVTYLADDKNKTWTLTRGAFYHKSGIKKQTRQKELRFAVMIPMWESLRENGAALSTWRTDKISAYLSNYAKFSDEWWRLALRRRESRDNLQRYIGKRKVKDSFWAGIKRCMMKELPDMKVCVAYGSAITKLKPTGPGEVAVPTGAMFASCTRIFKEDVSVTDEFKTTLMSWETGKEKERVYKIPSVCSADVKLRLGGERFGHTKSKTMPKVADCDHLGVRLYNKRKGAQEKHRRGGFATSLVDSQKSIERYPEVRGLRFSPETCIYSDRDRSSALTIARLHCMELMGLGRPLPFAPSSSVVVDE

SEQ ID NO: 1985 - protein, 621 aa, Microglena sp.
QCIRNLHVLNIRMPCMATKASVKLARPPMPLVSPGPSSVDGRIMARSERSGLQATNVSLTQAASKATSLSRKNNPAVVKSFSTHVCPHTNNNPTCSDSNCSCKPIFLTNIPDASKSLKSRTSDQGSTSSAQDFYEYWDSSRQDLYRQLLWLPKTGSQGLVSSSLNGFARSTPARSSFSITKTEPLKTSLEKTSCPSFKYIVADGTVEDATKSNAKPKLRTLKLKLNPTKAQKSMLAEFAGCSRFMYNKAVAARLGVGSTHKSVFRIRDRYVTNKVRGKGKMPNPYFKNRQWLLQCPKSVRQSAIKSALANIKACFSNLKAGNIKQFSAPFRRKKTELERGWVIEMDQKNVSKDGDKLFIFKDILGNMRYFGSKQLHKLMPEENPTHDPKVQKSRFGEYFLVLSVAARDRRAERKPVNPDKVATASIDPGVRKTMVTYSPENEESFMLGQGQASDLVKLLLVHDKLQSRLDTEKTLRSKERMKIKKLMIRIRKTIFYLKKEFRDQTTNFLAARYDVLLVPQLETAKMTISAERELTTKVARQMLTLSHSVLFNRLKEKCEEYGTVFLHVLEHYTSQTCPMCGFLNKCGETYTCKNCQFTCDRDIVGAVGIFLKAVRTENPCS

SEQ ID NO: 1986 - protein, 472 aa, Microglena sp.
IKCPEDAGHIEDHSGYDVMQAIQQEVQNMEGWPESVQEYVNEVREMLSVPDGSRVYDNYGKDMDFPTMVRFNYWIQTRLEDMDARRIRLMPIFNVQRVHVRLDLKTLVNLFRHMFPNDQNIVELSKWEHVKNPDSFMLPQRPAQKKKKSCGPGEWEAYKSVLKKYDDDVKDINATDEYRHAKGLYDTLVNARKTVAGSFFRKPPVKNGWVFDCSICTDGVSLSMQYSKTVQVLVSDLKKTCKKPRKEEGIKIAEKYDGSLKTILPDMGIVVLGVDPGRSNIATVTYLADDKNKTWTLTRGAFYHKSGIKKQTRQKELRFADMIPMWESLRENGAALSTSRTDKISAYLSNYAKFSDEWWRLALRRRESRDNLQRYIGKRKVKDSFWAGIKRCMMKELPDMKVCVAYGSAITKLKPTGPGEVAVPTGAMFASCKRIFKEDVSVTDEFKTTLMSWETGKEKERVYKIQVFVQQT

SEQ ID NO: 1987 - protein, 436 aa, Microglena sp.
EEKKSCGPGELEAYKLAQQKYDADVNDIKDTDEYRHAKGRYDTLVNARKTVAGSFFKKPPVKTGWVFDCSICTDGVSLSMQYSKTVQVRVSDLKKTSKRSRDDEGMSVSEQYDHKLKTTLPDMGIVVLGVDPGRSNIATVTYLADDKSKTWKLTRGAFYHKSGIKKQKKQQEKRFSDMIPRWESLRENGAALSTSRTIDISAYLKNYDTFSDEWWRMALLRRESRDNFQRYIGKRKAMDSFWAGIKRNMKLDHPDLRVRVAYGSAITTLKATGPGEVAVPTGSMFASCKRLFKEEVHVTDEFKTTLMSWETGAKKECVYKIPSVQITTEGQIRLGYELLGHTPLKETPNVSYRDQLAVRVYCTRKQIQEKHRRGGLAPSLVDNNSIKRYPEVRGLRFSPETSTYSDRDRSSALTIARLHCMELLGQGRPLPFCRDA

SEQ ID NO: 1988 - protein, 615 aa, Microglena sp.
QCIRNLHVLNIRMPCMATNASVKLARSPMPVVSPGPSSVDGRIMARSGLQATNVSLTQAASQATSSSRKKKPAVVKSFSTHVCPHTNNNPTCSDSNCSCKPIFLTNIPDASKSRTSDQGSTSSSLDFYEYWDSSRQDLYRQLLWLPKTGTQGLVSSSFNGFAHSTPTRSSFSITKTEPLKTSLEKNLMSIVQVYSYRWNGRRRYKVKCQTQVEDLKAEAEPNQGSEIDAGRVCGVQPVHVQQGGGSTVGRRSTHKSVFRIRDRYVTNKVRGKGKMPNPYFKNRQWLLQCPKSVRQSAIKSALANIKACFSNLKAGNIKQFSAPFRRKKTELERGWVIEMDQKNVSKDGDKLFIFKEILGNMRYFGSKQLHKLMPEENPTHDPKVQKSRFGEYFLVFSVAARDRRAERKPVNPDKVATASIDPGVRKTMVTYSPENEESFMLGQGQASDLVKLLLVHDKLQSRLDTEKTLRSKERMKIKKLMIRIRKTIFYLKKEFRDQTTNFLAARYDVLLVPQLETAKMTISAERELTTKVARQMLTLSHSVLFNRLKEKCEEYGTVFLHVLEHYTSQTCPMCGFLNKCGETYTCKNCQFTCDRDIVGAAGIFLKAVRTENPCS

SEQ ID NO: 1989 - protein, 801 aa, Microglena sp.
PRMEHVCDVCIKSSVMYKLCKMATKPPTVAKLKELLKLAEVAYSSKDKKDDIVRLCEDNGLIARPPPEYKTVEKMCVVKCALKKAMSLDDEEFGKFREHVDQLVNVVSRMLRRSSLVLTFHVTRLMEGDLPIPNMYDMKDTYWKDWLRIGVDGVFPDEESRISYEAVKDVIGKVLGSDDPDYINSYPIYFDQVLNYAGHTLSTVVSNNAWVPLVPRLTRLTKATLNALKAPKTIRVYDVMRVIQQEIQEMESWPESVQEYVREVRVRLKVPDGSRLYDDYGKDMDFPTMVRFNYWMQTRLEAIGARRIRLMPIFNVQRAHVRLDMKTLVNLFRHVFPKDPNIVELSKWKDVKDPDRFMLPLKPAVKKKKSCGPGEWEAYKLVQQKYDADVNDIKDTDEYRHAKGRYDTLVNARKTVAGSFFKKPPVKTGWVFDCSICTDGVSLSMQYSKTVQVRVSDLKKTSKRSRDDEGMSVSEQYDHKLKTTLPDMGIVVLGVDPGRSNIATVTYLADDKSKTWKLTRGAFYHKSGIKKQKKQQEKRFSDMIPRWESLRENGAALSTSRTDDISAYLKNYDTFSDEWWRMALLRRESRDNFQRYIGKRKAMDSFWAGIKRNMKLDHPDLRVRVAYGSAITTLKATGPGEVAVPTGSMFASCKRLFKEEVHVTDEFKTTLMSWETGAKKECVYKIPSVQITTEGQIRLGYELLGHTPLKETPNVSYRDQLAVRVYCTRKQIQEKHRRGGLAPSLVDNNSIKRYPEVRGLRFSPETSTYSDRDRSSALTIARLHCMELLGQGRPLPFCRDA

SEQ ID NO: 1990 - protein, 394 aa, Microglena sp.
HARERPKNSRRFLLQETTCQDGWVFDCSICTDGVSLSMQYSKTVQVRVSDLKKKSKRSRDDEGMSVSEQYDHKLKTTLPDMGIVVLGVDPGRSNIATVTYLADDKSKTWKLTRGAFYHKSGIKKQKKQQEKRFSDMIPRWESLRENGAALSTSRTDDISAYLKNYDTFSDEWWRMALLRRESRDNFQRYIGKRKAMDSFWAGIKRNMKLDHPDLRVRVAYGSAITTLKATGPGEVAVPTGSMFASCKRLFKEEVHVTDEFKTTLMSWETGAKKECVYKIPSVQITTEGQIRLGYELLGHTPLKETPKVSYRDQLAVRVYCTRKQIQEKHRRGGLAPSLVDNNSIKRYPEVRGLRFSPETSTYSDRDRSSALTIARLHCMELLGQGRPLPFCRDA

SEQ ID NO: 1991 - protein, 418 aa, Microglena sp.
PCLCTTRYCRRPSKKKRKTKNEKHRTFSLLPYKSGFTLSHIPISKMAFFYMVNECHFDSCKADVASKNHQGIWERFANLKKVETVSRKFGYRIVTDGFAVSILMNKPTCLTCSMPAGAFSTRAHEYLTTDEGGIVSFLDNVVVAAVDPGVTDIVTVTGLNGGTRSYSSAQYYRKGLIFKSQRQTDVWNLETADIVGGIIPDRDSSSSEQIGAYARFYMGAAPILLAHRASRGYRNLRFRRYCKKQKLIVEIADFVAPRKKKSAKVLVGFGDWKGLGATPISRRTCGPLQAIRFELRSRENVIMEDIDEFRTSQRCSCCENHLCNMVALTHRKKQDGTGWECTEGRKRIHKILHCKSSQSGAPRQQSGGMLHCGKTWDRDVNASRNILMLTLHQVFGRERPLAFRRDAPRSSSTTPPHP

SEQ ID NO: 1992 - protein, 251 aa, Microglena sp.
TDWCVCQVLHGCRPNSSCPSCFEGYRNLRFRRYCKKQKLIVEIADFVAPREKSAKVLVGFGDWKGLGATPISRRTCGPLQAIRFELRSRGNVIMEDVDEFRTSQRCSCCENRLCNMVALTHRKKQDGTGWERTEGRKRIHKILHCKSSQSGAPRQQSGVRLHCGKTWDRDVNASRNILMLTLHQVFGRERPLAFRQDAPRSSSRTPPPPDTDMGTQTVERFTKEATRNIFENLFNLLHPPTLPKSNDLQSG

SEQ ID NO: 1993 - protein, 825 aa, Microglena sp.
PRMEHVCDVCIKSSVMYKLCKMATKPPTVAKLKELLKLAEVAYSSKDKKDDIVRLCEDNGLIARPPPEYKTVEKICVMKCALKKAMSLDDEEFGKFRGHVDQLVNVVSRMLRRSSLVLTFHVTRLMEGDLPIPNMYDMKATHRKDWLRIGVDGVFPDEESRISYKAVKDVIGKVLGSDDPDYINSYPIYFDQVLNYAGHTLSTVVSNNAWVPLVPRLTRLTKDTLKALGAPKTIRVYDVMRVIQQEIQEMESWPESVQEYVREVRVRLKVPDGSRLYDDYGKDMDFPTMVRFNYWMQTRLEDIGARRIRLMPIFNVQRAHVRLDMKTLVNLFRHVFPKDPNIVELSKWENVKDPDRFMLPLKPSVKKKKSCGPGEWEAYKLAQQKYDADVKDIKATDEYRHAKGRYDTLVNARKTVAGSFFEKPPVKTGWVFDCSICTDGVSLSMQYSNTVQVRVSDLKKTSKRSRDEEGMSVSEQYDHKLKTTLPDMGIVVLGVDPGRSNIATVTYMADDKSKTWKLTRGAFYHKSGIKKQKKQQEKRFSDMIPRWESLRENGAALSTSRKDDILAYLKNYATFSDEWWRMALRRRESRDNFQRYIGKRKAMNSFWAGIKRNMKLDHPDLRVRVAYGSAITKLKATGPGEVAVPTGSMFASCKRLFKEEVHVTDEFKTTLMSWETGAKKECVYKIPSLQITTEGQIRLGYELLGHTPLKETPKVSYRDQLAVRVYCTRKKIQEKHRRGGLAPSLVDNNSIKRYPEVRGLRFSPETSTYSDRDRSSALTIARLHCMELLGQGRPLPFCRDACCWATKKYDGVPLQCGLLHHKVTP

SEQ ID NO: 1994 - protein, 228 aa, Microglena sp.
ISNQDLEPPERLASLRHQHQGITNPLHTMFRNQSKSAGRQERPLIVIAYGSAKSAPGGKGELSVPTTSAFKAFSDRFKGRVAVIDEFRTTKIWHKDSTTVLQSVQSEKEGRTVRGLLWCSSTMENSKLFVNRDLNAAINIHNCFTMYPIRPGILARPKKYCKLEVVVGRKIDYKLTGFFTERSVERSVGDKHIQEDFGGLGILCNIIPLSECKANGINMYLRVTRATA

SEQ ID NO: 1995 - protein, 206 aa, Microglena sp.
YVGKQKTIEKVCDVIAPRAQTTVVGFGNWSNQGYGISRSCSGPIKEIRRCLSRRKNVLFKNVDERNTSCKCHGCFQRLVNMKADSVVWRGVCKESPIDGSITVEKQKMVVKNVKVHKVLHCRDSVKSASSNVRCGATWNRDVNAAKNLLLLLTTWMDGRERPGAFCVPSPPPKTTVSIEASVSAKPTDPPGFVSSLPCYPLGQLKC

SEQ ID NO: 1996 - protein, 460 aa, Microglena sp.
IGVLHTLSPLSGVLSKLIKPSVKKKKSCGPGEWEAYKLAQQKYDADVKDIKATDEYRHAKGRYDTLVNARKTVAGSFFKKPPVKTGWVFDCSICTDGVSLSMQYSKTVQVRVSDLKKTSKRSRDEEGMSVSEQYDHKLKTTLPDMGIVVLGVDPGRSNIATVTYLADDKSKTWKLTRGAFYHKSGIKKQKKQQEKRFSDMIPRWESLRENGAALSTSRKDDISAYLKNYATFSDEWWRMALRRRESRDNFQRYIGKRKAMDSFWAGIKRNMKLDHPDLRVRVAYGSAITKLKATGPGEVAVPTGSMFASCKRIFKEEVHVTDEFKTTLMSWETGAKKECVYKIPSVQITTEGQIRLGYELLGHTPLKETPKVSYRDQLAVRVYCTRKKIQENHRRGGLAPSLVDNKSIKRYPEVRGLRFSPETSTYSDRDRSSALTIARLHCMELLGQRRPLPFCRDACC

SEQ ID NO: 1997 - protein, 242 aa, Microglena sp.
VQHRYSHVSGRRQKQDMEAHTRSFLPQVWYQKTEKNSKEKRFSDMIPRWESLRDNGAALSTSRTDDISAYLKNYATFSDEWWRMALRRRESRDNFQRYIGKRKAMDSFWAGIKRNMKLDHPDLRVRVAYGSAITKLKATGPGEVAVPTGSMFASCKRLFKEEVHVTDEFKTTLIVFGKRRQEGMCLQDSKCPNNHGRSDSSRLRVVGSHPLKETPKVSYRDQLAVRVYCTRKKIQENTGGVA

SEQ ID NO: 1998 - protein, 258 aa, Microglena sp.
GGRKRKRHCEFGSKRLTRERYYVESGVFKSRGPTKKWLSNIQECLDNLKDNSPKRTSLVSFDAYVTVMVNHWDSRWGEMSKSRWGAQRLRLYGGKKRVLARFFNEVQEDVGERKTIVVAYGSAKFAPGGKGELSVPTTSAFKAFSDRFKGRVAVIDEFRTTKIWHKDSTTVLQSVQSEKKGRTVRGLLWCSSTMENSKLFVNRDLNAAINIHNCFTMYPIRPGILARPKKYCKLEVVVGRKIDYKLTGSLQNAVSSEV

SEQ ID NO: 1999 - protein, 613 aa, Microglena sp.
WKDWLRIGVDGVFPDEESKISYEAVKDIIGKVLGSDDPDYINSYPIYFDQVLNYAGHTLSTVVSNNAWVPLVPRLTRLTKATLKALGAPKTIRVYDVMRVLQQEIQEMESWPESVQEYVREVRVRLKVPDGSRLYDDYGKDMDFPTMVRFNYWMQTRLEAIGARRIRLMPIFNVQRAHVRLDMKTLVNLFRHVFPKDPNIVELSTWENVNDPDRFMLPLKPAVKKKKSCGPGEWEAYKLAQQKYDADVKDIKATDEYRHAKGRYDTLVKARKTVAGSFFKKPPVKTGWVFDCSICTDGVSLSMQYSKTVQVRVSDLKKTSKRSRDEEGMSVSEQYDHKLKTTLPDMGIVVLGVDPGRSNIASVTYLADDKSKTWKLTRGAFYHKSGIKKQKKQQEKSFSDMIPRWESLRENGAALSTSRKDDISAYLKNYATFSDEWWRMALRRRESRDNFQRYIGKRKAMDSFGAGIKRNMKLDHPDLRVRVAYGSAITKLKATGPGEVAVPMGSMFASCKRLFKEEVHVTDEFKTTLMSWETGAKKECVYKIPSVLITTEGQIRLGYELLGHTPLKETPKVSYRDQLAVRVYCTRKKIQENTQEGWLSPLSCRQQLDQAVP

SEQ ID NO: 2000 - protein, 626 aa, Microglena sp.
STTQLQRHTYSQTFISQRCLDDGDFDVKQLPHLDRNFYYRCLLAVSTSNVRKDTLGQSFNDTMFAFDALRPAGYVKVDVRPWGQVIADVSIQMATMACNSVWANVDRVVIKYLRLKHPSLKKHFKKIVKAVVQYPESKIDTIIPEGLVHAIHIKEAVSHLRALFPLPRGKQFNTRAHLTMRLFHHVLTELGEVGRVDPKDKKTRKSHPCLFSILPRKNGFTISYVPISSMTFMKLLSMGDSPLESVSGDGRYENHTMLWRKYFNVQGLETKRSRFDNRILSDGKGVSVQMKQKGKEEVAEEGENAGYPKDANIVECKDAVGALRVGVDPGMTDIVTVASSAGRIESFSSARFSEVAGYNTSKRRTYKWNDETQDLVKSIPSPNTSNMSDLQDHVRAYLKALPILLQHRANKGYRSMRFFRYVGKQKTIEKVCDVIAPRAQTTVVGFGNWSNQGYGISRSCSGPIKEIRRCLSRRKNVLFKNVDERNTSCKCHGCFQRLVNMKADSVVWRGVCKESPIDGSITVEKQKMVVKNVKVHKVLHCRDSVKSASSNVRCGATWNRDVNAAKNLLLLLTTWMDGRERPEAFCVPSPPPKTTVSIEASVSAKPTDPPGFVSSLPCYPLGQLKC

SEQ ID NO: 2001 - protein, 340 aa, Microglena sp.
RRGIKIAEKYDGSLKTILPDMGIVVLGVDPGRSNIATVTYLADDKNKTWTLTRGAFYHKSGIKKQTRQKELRFADMIPMWESLRENGAALSTSRTDKISAYLSNYAKFSEEWWRLALRRRESRDNLQRYIGKRKVKDSFWAGIKRCMMKELPDMKVCVAYGSAITKLKPTGPGEVAVPTGAMFASCKRIFKEDVSVTDEFRTTLMSWETGKEKERVYKIPSVCSADVKLRLGGERFGHTKSKTMPKVADCDHLGVRLYNKRKRAQEKHRRGGFATSLVDSQKSIERYPEVRGLRFSPETCIYSDRDRSSALTIARLHCMELMGLGRPLPFAHSSSVVVDE

SEQ ID NO: 2002 - protein, 261 aa, Microglena sp.
RRRKRRLSKDANIVECKDAVGALRVGVDPGMTDIVTVASSAGRIESFSSARFSEVAGYNTSKRRTYKWNDETQDLVKFIPSPNTSNMVDLQDHVSAYLKALPILLQHRANKGYRSMRFFRYVGKQKTIEKVCDVIAPRAQTTVVGFGNWSNQGYGISRSCSGPIKEIRRCLSRRKNVLFKNVDERNTSCKCHGCFQRLVNMKADSVVWRGVCKESPIDGSITVEKQKMVVKTSRSTKYCTVETVSKAHHPMCAVVQPGTET

SEQ ID NO: 2003 - protein, 312 aa, Microglena sp.
HLLTVESSLFSSARFSEAAGYNTSNRRTNKWNADTQDLVKSIPSPTTSSMHDMQDHVRGYLSALPTLLQHRANRGYRSMRFFRYVGKQKTIEKVCDLIAPKAQKKTIEEKVCDVIAPKAKKTVVGFGNWSNQGYGISRSCSGPVKEIRKCLSRRQNVLFKNVDERNTSYTCHGCFQKLVNMKADSVAWRRVQNEPSALIDGAPTTTTTFEKQKTVVKNVKVHKVLHCRNSVKSASSNVRCGATWNRDVNAAKNLLLLLTTWMDGKERPAAFCVPSSSPTPKTTVSGEANVGAQQSDPPGSVSSLQLLSSGPA

SEQ ID NO: 2004 - protein, 466 aa, Microglena sp.
WICSKHSCSKHSCSKHSCSIIVLDHQDGAPEDELGKDLMSIVRVYCCRWNGRRRYKVKCQTQVEDLKAEAEPNKGSEIDAGRVCRVQPVHVQQGGAARLGVGSTHKSVFRIRDRYVTNKVRGEGRMPNPYFKNRQWLLQCPKSVRQSAIKAALANIKACFSNLKAGNIKQFSAPFRRKKTELERGWVIEMDQKNVSKDGDKLFIFKDILGNMRYFSSKQLHKLMPELNPTHDPKVHKSRFGEYFLVLSVAARDRRAERKPVHPDKVATASIDPSVRKTMVTYSPENEESFMLGQGQASDLVKLLLVHDKLQSRLDTEKTLRTKERMKIKMQMIRIRKRIFYLKKEFRDQTTNFLAARYNVLLVPQLETAKMTISSERELTTKVARQMLTLSHSVLFNRLKEKCEEYGTVFLHVLEHYTSQTCPMCGFLNKCGETYTCKNCQFTCDRDIVGAAGIFLKAVRTENPCS

SEQ ID NO: 2005 - protein, 621 aa, Microglena sp.
QCIRNLHVLNVRMPCMATNASVKLARPPMPLVSPGPSSVDGRIMARSERSGLQATNVSLTQAASKATSSSRKKKPAVVKSFTTHVCPHTNNNPTCSDSNCSCKPIFLTNIPDASKSSKSRTSDQGSTSSAQDFYEYWDSSRQDLYRQLLWLPKTGSQGLVSSSLNGFARSTPARSSFSITKTEPLKTSLEKTSCPSFKYIVADGTVEDATKSNAKPKLRTLKLKLNPTKAQKSMLAEFAGCSRFMYNKAVAARLGVGSTHKSVFRIRDRYVTNKVRGEGKMPNPYSKNRQWLLQCPKSVRQSAIKAALANIKACFSNLKAGNIKQFSAPFRRKKTELERGWAIEMDQKNVSKDGDKLFIFKDILGNMRYFGSKQLHKLIPEENPTHDPKVQKSRFGEYFLVLSVAARDRRAERKPVHPDKVATASIDPGVRKPMVTYSPENEESFMLGQGQASDLVKLLLVHDKLQSRLDTEKTLRSKERMKIKMQMIRIRKRIFYLKKEFRDQTTNFLAARYDVLLVPQLETAKMTISAERELTTKVARQMLTLSHSVLFNRLKEKCEEYGTVFLHVLEHYTSQTCPMCGFLNKCGETYTCKNCQFTCDRDIVGADGIFLKAVRTENPCS

SEQ ID NO: 2006 - protein, 317 aa, Microglena sp.
GREEKISIKDDGTAIKKQTKTLCEFSESDPNVVVVANDPGRCNIAFLTWKKNKVEEKDKGGRKRKRHCEFGSKRLTRERYYVENGVFKSRGPTKKWLSNIQDCLDDLKDNSPKRTSLVSFDAYVTVMVNHWDSRWGEMSKSRWGAQRLRLYGGKKRVLARFFNEVQADVGERKTIVIAYGSAKFAPGGKGELSVPTTSAFKAFSDRFKGQVAVIDEFRTTKIWYKDSTTVLQSVQSEKEGRTVRGLLWCSSTMENSKLFVNRDLNAAINIHNCFTMYPIRPGILARPKKYCKLEVVVGRTIDYKLTGSLHNAVSSEV

SEQ ID NO: 2007 - protein, 803 aa, Microglena sp.
PRMEHVSDVCIKSSVMYKLCKMATKPPTVAKLKELLKLAEVAYSSKDKKDDIVRLCEDNGLIARPPPEYKTVEKMCVVKCALKKAMSLDDEEFGKFREHVDQLVNVVSRMLRRSSLVLTFHVTRLMEGDLPIPNMYDMKDTYWKDWLRIGVDGVFPDEESRISYESVKDVIGKVLGSDDPDYINSYPIYFDQVLNYAGHTLSTVVSNNAWVPLVPRLTRLTKATLNALKAPKTIRVYDVMRVIQQEIQEMESWPESVQEYVREVRVRLKVPDGSRLYDDYGKDMDFPTMVRFNYWMQTRLEAIGARRIRLMPIFNVQRAHVRLDMKTLVNLFRHVFPKDPNIVELSKWKDVKDPDRFMLPLKPAVKKKKLCGPGEWEAYKLAQQKYDADVNDIKDTDEYIHAKGRYDTLVNARKKVAGSFFKKPPVKTGWVFDCSICTDGVSLSMQYSKTVQVRVSDLKKTSKRSRDDEGMSVSEQYDHKLKTTLPDMGIVVLGVDPGRSNIATVTYLADDKSKTWKLTRGAFHHKSGIKKQKKQQEKRFSDMIPRWESLRENGAALSTSRTDDISAYLKNYATFSDEWWRMALLRRESRDNFQRYIGKRKAMDSFWAGIKRNMKLDHPDLRVRVAYGSAITTLKATGPGEVAVPTGSMFASCKRLFKEEVHVTDEFKTTLMSWETGAKKECVYKIPSVHITTEGQIRLGYELLGHTPLKETPNVSYRDQLAVRVYCTRKQIQEKHRRGGLAPSLVDNNSIKRYPEVRGLRFSPETSTYSDRDRSSALTIARLHCMELLGQGRPLPFCRDACC

SEQ ID NO: 2008 - protein, 325 aa, Microglena sp.
WLVPTFLGPRRKRFQSRTTERRLRSRPRLSASFSESDPNVVVVANDPGRCNIAFLTWKKNKVEEKDNGGRKRKRHCEFGSKRLTRERYYVESGVFKSRGPTKKWLSNIQDCLDDLKDNSPKRTSLESFDAYVTVMVNHWDSRWGEMSKSRWGAQRLRLYGGKKRVLARFFNEVQADVGERKTIVIAYGSSKFAPGGKGELSVPTTSAFNAFSDRFKGRVAVIDEFRTTKIWHKDSTTVLQSVQSEKKGRTVRGLLWCSSTMENSKLFVNRDLNAAINIHNCFTMYPTRPGILARPKKYCKLEVVVGRTIDYKLTGSLQNAVSSEV

SEQ ID NO: 2009 - protein, 443 aa, Microglena sp.
DSALDPRTGRDQPTVAQERFQQRQDDPVQRLYQSIPRGHRGRGLRQAGQHRSHPNSQARLHHDRHPTAYWASSRTWVSSRVSKKTLTNKEHWESVFDVENIRSNGKGVFTCTIDTDGVMACTHFLRAEKKKISIKDDGTAIKKQTKTLREFSESDPNVVVVANDPGRCNIAFLTWKKNKVEEKDKGGRKRKRHCEFRSKRLTRERYYVESGVFKSRGPTKKWLSNIQDCLDDLKDNSPKRTSLVSFDAYVTVMVNHWDSRWGEMSKSRWGAQRLRLYGGKKRVLARFFNEVQEDVGERKTIVVAYGSAKFAHGGKGELSVPTTSAFKAFSDRFKGRVAVIDEFRTTKIWHKDSTTVLQSVQSEKEGRTVRGLLWCSSTMENSKLFVNRDLNAAINIHNCFTMYPIRPGILARPKKYCKLEVVVGRKIDYKLTGSLQNAVSSKV

SEQ ID NO: 2010 - protein, 242 aa, Microglena sp.
EQHRYSHVSGRRQKQDMEAYTRSFFTTSLVSRNRKNSKKKRFSDMIPRWESLRENGAALSTSRKDDISAYLKNYATFSDEWWRMALRRRESRDNFQRYIGKRKAMDSFWAGIKRNMKLDHPDLRVRIAYGSAIKTMKATGPGEVPVPTGSMFASCKRLFKEEVHVTDEFKTTLMSWETGAKKECVYKIPSVQITTEGQIRLGYELLGHTPLKETPKVSYLDQLAVRVYCTRKKSMKNTGGVA

SEQ ID NO: 2011 - protein, 381 aa, Microglena sp.
PVKTGWVFDCSICTDGVSLSMQYSKTVQVRVSDLKKTSKRSRDEEGMSVAEQYDHKLKTTLPDMGIVVLGVDPGRSNIATVTYLADDKSKTWKLTRGAFYHKSGIKKQKKQQEKRFSDMIPRWESLRENGAALSTSRKDDISAYLKNYATFSDEWWRMALRRRESRDNFQRYIGKRKAMDSFWAGIKRNMKLDHPDLRVRIAYGSAIKTMKATGPGEVAVPTGSMFASCKRLFKEEVHVTDEFKTTLMSWENGAKKECVYKIPSVSLNAEGQIRLGDEWFCHTLLKKPPKVAERDQLAVRVYCARKKIQEKHRRGGLAPSLVDNQSIKRYPEVKGLRFSPETSTYSDRDRSSALTIARLHCMELLGLGRPLPFSLCKAACC

SEQ ID NO: 2012 - protein, 285 aa, Microglena sp.
KNKKSHPRLFSILPRKNGFTISYVPISSMTFMKLLSMGDSPLQSISGDGRYENHTMLWRKYFDVQGLETKRSRFDNRILSDGKGVSVQMKQKAKEEVVEEGENAGYPKNANIVECKDAVGALRVGVDPGMTDIVTVASSAGRIEYFSFSEVAGYNTSKRRTYKWNDETQDLVKSIPSPNTSNMVDLQDHVRAYLKALPILLQHRANKGYRSMRFFRYVGKQKTIEKVCDVIAPRAQTTVVGFGNWSNQGYGISRSCSGPIKEIRRCLSRRKNVLFKKRRRTQHFL

SEQ ID NO: 2013 - protein, 713 aa, Microglena sp.
RETRRGFFSKVIEYNFWTLIQGNGDKMETIVNKEPPDKRTLPDGASKIKDRNNGEENVVKCTLSRIIADKDNKDVIIKVIKERVDSVSKRTYLAGVAVNRILKEVFKGVPDAQLHTVSVPSVDQNFIRQLMVGSRQAHMETRDATVERFFHNNYWFREKIEGREVIVKKKKQYVGAIARYDGDRNLYSHASKKYLTNFNNHYRVHLSTWIKKFVYSKENRILAKEIKDEHGIDETVFHRYLLYDIHSWGVKELDLIALHSLLPERTKMLLKIQHSILGRDEINRQWLKSVSNSAKMIWYNVFINRYLEATEDEGYAKLVNIAPIPTVKHAFITIDTDGLLGVLKDVGLIESLEKTLTNKEHWESVFDVENIRSAGKGVFTCTVDTDGVMACTHFLRAEKKKISIKNDGTAIKKQTKTLREFSESDPNVVVVANDPGRCNIACLTWKKNKVEEKYKGGRKRKRHCEFGSKRLTRERYYVESGVFKSRGPTKKWLSNIQECLDDLKDNSPKRTSLVSFDAYVAVMVNHWDSRWGEMSKSRWGAQRLRLYGGKKRVLARFFNEVQEAVGERKTIVVAYGSAKFAPGGKGELSVPTTSAFKAFSDRFKGRVAVIDEFRTTKIWHKDSTTVLQSVQSEKEGRTVRGLLWCSSTMENSKLFVNRDLNAAINIHNCFTMYPVRPGILARPKKYCKLEVVVGRKIDYKLTGSLQNAVSSEV

SEQ ID NO: 2014 - protein, 457 aa, Microglena sp.
RYIRSYRSEQRCCLRFSTRSSDGTRSTDSGSRAFPTAPKMIRYNVFINRYLEATEDEGYAKLVNIAPIPTFKHAFITIDTDGLLGVLKDVGLVESLKKTLTNKEHWESVFDVENIRSTGKGVFTCTIDTDGVMACTHFLRAEKKKISIKDDGTAIKKQTKTLREFSESDPNVVVVANDPGRCNIAFLTWKKNKVEEKDKGGRKRKRHCEFGSKRLTRERYYVESGVFKSRGPTKEWLSNIQDCLDDLKDNSPKRTSLVSFDAYVTVMVNHWDSRWGEMSKSRWGAQRLRLYGGKKRVLARFFNEVQADVGERKTIVVAYGSAKFAPGGKGELSVPTTSAFKAFSDRFKGRVAVIDEFRTTKIWHKDSTTVLQIVHSEKEGRTVRGLLWCSSTMENSKLFVNRDLNAAIHIHNCFTMYPTRPGILARPKKYRKLEVVVGRTIDYKLTGSLQNAVSSEV

SEQ ID NO: 2015 - protein, 575 aa, Microglena sp.
GEHKETMSTITTLNNNKNKYLIEQEKKPSSRQVILYARVSSHKQQPDLLRQQLFLQTHISDKHSGCEQVIEVKDVGSGLNFKRPGLLRVLGLVTAGLVSSIVVASKDRLARFGFELIEWICSQHSCSIIVLDHQDGAPKTSLEKTSCPSFKYIVADGTVEDATKSNAKPKLRTLKLKLNPTKAQKSMLAEFAGCSRFMYNKAVAARLGVGSTHKSVFRIRDRYVTNKVRGEGKMPNPYFKNRQWLLQCPKSVRQSAIKAALANIKACFSNLKAGDIKQFSAPFRRKKTELERGWAIEMDQKNVSKDGDKLFIFKDILGNMRYFGSKQLHKLMPEENPTHDPKVHKSRFGEYFLVLSVAAGDRRTERKPVHPDKVATASIDPGVRKTMVTYSPENEESFMLGQGQASDLVKLLLVHDKLQSRLDTEKTLRSKERMKIKMQMIRIRKRIFYLKKEFRDQTTNFLAARYDVLLVPQLETAKMTISAERELTTKVARQMLTLSHSVLFNRLKEKCEEYGTVFLHVLEHYTSQTCPMCGFLNKCGGETYTCKNCQFTCDRDIVGAAGIFLKAVRTENPCS

SEQ ID NO: 2016 - protein, 246 aa, Microglena sp.
HRFVYLTVLLNVTLRPVNNESMTNKEHWESVFDVENIRSTGKGVFTCTDGVMACTHFLRAEKKNISIKDDRTAIKKQTKILREFSESDPNVVVVANDPGRCNIAFLTWKKNKVEEKDKGGRKRRRHCEFGSKKLTRERYYVESGVFKSRGPTKKWLSNIQDCLDDLKDNSPKRTSLVSFDAYVTVMVNHWDSRWGEMSKSRWGAQRLRLYGDKIRVLARFFNEVQADVGERKTIVVAYGSAKFSPG

SEQ ID NO: 2017 - protein, 245 aa, Microglena sp.
PNTSNMVDLQDHVRAYLKALPILLQHRANKGYRSMRFFRYVGKQKTIEKVCDVIAPRAQTTVVGFGNWSNQGYGISRSCSGPIKEIRRCLSRRKNVLFKNVDERNTSCKCHGCFQRLVNMKADSVVWRGVCKESPIDGSITVEKQKMVVKNVKVHKVLHCKDSVKSASSNVRCGATWNRDVNAAKNLLLLLTTWMDGREQPEAFCVPSPPPKTTVFIEASVSAKPTNPPGFVSSLPCYPLGQLKC

SEQ ID NO: 2018 - protein, 618 aa, Microglena sp.
CIRNLHVLNIRMPCMATNASVKLAGPPMPLVSPGPSSVDGRIMARSERSGLQATNVSLTQAASKATSSSRKKNPAVVKSFSTHVCPHTNNNPTCSDSNCSCKPIFLTNIPYASKSRTSDQGSTSSAQDFYEYWDSSRQDLYRQLLWLPKTGSQGLVSSSLNGFARSTPVRSSFSITKTEPLKTSLEKTSCPSFKYIVADGTVEDATKSNAKPKLRTLKLKVNPTKAQKSMLAEFAGCSRFMYNKAVAARLGVGSTHKSVFRIRDRYVTNKVKGEGKMPNPYFKNRQWLLQCPKSVRQSAIKAALANIKACFSNLKAGNIKQFSAPFRRKKTELERGWAIEMDQHNISKDGDKLFIFKDTLGNMRYFGSKQLQKLMPEKNPTHDPKVQKSRFGEYFLVLSVAARDRREERKPVHPGKVATASIDPSVRKTMVTYSPENEESFMLGKGQASDLVKLLLVHDKLHSRLDTEKTLRSKERMKIKKQMIRIRKRFFYLKKEFRDQTTNFLAARYDVLLVPQLETAKMTISAERELTTKVSRQMLTLSHYVLFNRLNEKCEEYGTVFLHVLEHYTSQTCPMCGFLNKCGGETYTCKNCQFTCDRDIVGAAGIILKTVRTENPCS

SEQ ID NO: 2019 - protein, 564 aa, Microglena sp.
YHGCFRRPKTCRIREGGRSSLGTGIADVSIQMATMACNSVWENVDRVVIKYLRLKHPSLKKHFKKIVKAVVQYPESKIDTIIPEGLVHAIHIKEVVSHLRALFPLPRGKQFNTRAHLTMRLFHHVLTELGEVGRVDPKDKKTRKSHPRLFSILPRKNGFTISYVPISSMTFMKLLSMGDSPLESVSGDGRYENHTMLWRKYFNVQGLETKRSRFDNRILSDGKGVSVQMKQKGKEEVVEEGENAGYPKDANIECKDAVGALRVGVDPGMTDIVTVESSAGRIESFSSARFSEVAGYNTSKRRTYKWNDETQDLVKSIPSPNTSNMSDLQDHVRAYLKALPILLQHRANKGYRSMRFFRYVGKQKTIEKVCDVIAPRAQTTVVGFGNWSNQGYGISRSCSGPIKEIRRCLSRRKNVLFKNVDERNTSCKCHGCFQRLVNMKADSVVWRGVCKESPIDGSITVEKQKMVVKNVKVHKVLHCRDSVKSASSNVRCGATWNRDVNAAKNLLLLLTTWMDGRERLEAFCVPSPPPKTTVSIEASVSAKPTDPPGFVSSLPCYPLGQLKC

SEQ ID NO: 2020 - protein, 552 aa, Microglena sp.
ALSCRTTHGFSLVPRLTRLTKATLNALGAPKTIRVYDVMRVIQQEIQEMESWPESVQEYVREVRVKLKVPDGSRLYDDYGKDMDFPTMVRFNYWMQTRLEAIGARRIRLMPIFNVQRAHVRLDMKTLVNIFRHVFPKDPNIVELSKWKNVKDPTRFMLPLKPAIKKKKSCGPGEWEAYKLAQQKYDSDVNDIKASDEYRHAKGRYDTLVNARKTVACSFFKKPPVKNGWVFDCSICTDGVSLSMQYSKTVQVRVSDLKKTSKRSRDDEGMSVSEQYDHKLKTTLPDMGIVVLGVDPGRSNIATVTYLADDKSKTWKLTRGAFYHKSGIKKQKKQQEKRFSDMIPRWESLRENGAALSTSRTDDISAYLKNYATFSDEWWRMALRRRESRDNFQRYIGKRKAMDSFWAGIKRNMKLDHPDLRVRVAYGSAITTLKATGPGEVAVPTGSMFASCKRLFKEEVHVTDEFKTTLMSWETGAKKECVYKSPSVQITTEGQIRLGYELLGHTPLKETPKVSYRDQFAVRVYCTRKQIKEKHRRGGLAPSLVENNSIKP

SEQ ID NO: 2021 - protein, 539 aa, Microglena sp.
MTQCPQTNNNPTCSDSNCSCKPIFLTNIPDASKSLKSRTSDQGSTSSAQDFYEYWDSSRQDLYRQLLWLPKTGSQGLVLRSFNGFARSTPARSSFSITKTEPLKTSLEKTSCPSFKYIVADGTVEDATKSNAKPKLMTLKLKLNPTKAQKSMLAEFAGCSRFMYNKAVAARLGVGSTHKSVFRIRDRYVTNRVRGEGKMPNPYFKNRQWLLQCPKSVRQSAIKAALANIKACFSNLKAGNIKQFSAPFRRKKTELERGWAIEMDQKNVSKDGDKLFIFKDILGNMRYFGSKQLHKLMPEVNPTHDPKVHKSRFGEYFLVLSVAARDRRAERKPVHPDKVAIASIDPGVRKTMVTYSPENEESFMLGQGQASDLVKLLLVHDKLQSRLDTEKTLRSKERMKIKMQMIRIRKRIFYLKKEFRDQKTNFLAARYDVLLVPQLETAKMTISAERELTTKVARQMLTLSHSVLFNRLKEKCEEYGTVFLHVLEHYTSQTCPMCGFLNKCGETYTCKNCQFTCDRDIVGAAGIFLKAVRTENPCS

SEQ ID NO: 2022 - protein, 624 aa, Microglena sp.
PRMEHVCDVCIKSSVMYKLCKMATKPPTVAKLKELLKLAEVAYSSKDKKDDIVRLCEDNGLIARPPPEYKTVEKMCVVKCALKKAMSLDDEEFGKFREHVDQLVNVVSRMLRRSSLVLTFHVTRLMEGDLPIPNMYDMKDTYWKDWLRIGVDGVFPDEESRISYESVKDVIGKVLGSDDPDYINSYPIYFDQVLNYAGHTLSTVVSNNAWVPLVPRLTRLTKATLNALGAPKTIRVYDVMRVIQQEIQEMESWPESVQEYVREVRVRLKVPDGSRLYDDYSKDMDFPTMVRFNYWMQTRLEAIGARRIRLMPIFNIQRAHVRLDMKTLVNLFRHVFPKDPNIVELSKWKDVKDPDRFMLPLKPAVKKKKSCGPGEWEAYKLAQQKYDADVNDIKDTDEYRHAKGRYDTLVNARKTVAGSFFKKPPVKTGWVFDCSICTDGVSLSMQYSKTVQVRVSDLKKTSKRSRDDEGMSVSEQYDHKLKTTLPDMGIVVLGVDPGRSNIATVTYLADDKSKTWKLTRGAFYHKSGIKKQKKQQEKRFSDMIPRWESLRENGAALSTSRTDDISAYLKNYATFSDEWWRMALLRRESRDNFQRYIGKRKAMDSFWAGIKRNMKLDHPDLRFA

SEQ ID NO: 2023 - protein, 734 aa, Microglena sp.
NHYGLFRPLMEHVCDVCIKSSVMYKLCKMATKPPTVAKLKELLKLAEVAYSSKDKKDDIVRLCEDNGLIARPPPEYKTVEKMCVVKCALKKAMSLDDEEFGKFREHVDQLVNVVSRMVRRSSLVLTFHITSLLEKGLDIPDLYNMKDTYWKDWLRIGVDGIFPDEESKISYEAVKDSIGNVIGNDDADYIKSYPIYFDQVLNYAGHTLSTVVSNNAWVPLIPRLARLTSTTLNKLNAPKTLDTSKIIRGYDVMQAIQQEVQNMEGWPESVQEYVNEVREMLSVPDGSRVYDNYGKDMDFPTMVRFNYWIQTRLEDMDARRIRLMPIFNVQRVHVRLDLKTLVNLFRHMFPNDQNIVELSKWGHVKNPDSFMLPQRPAQKKKKSCGPGEWEAYKSVMKQYDDDVKDIKATDEYRHAKGFYDTLVNARKTVAGSFFRKPPVKNGWVFDCSICTDGVSLSMQYSKTVQVLVSDLKKTCKKPRKEEGIKIAEKYDGSLKTILPDMGIVVLGVDPGRSNIATVTYLADDKNKTWTLTRGEFYHKSGIKKQTRQKELRFADKIPMWESLRENGAALSTSRSDKISAYLSNYAKFSDEWWRLALRRRESRDNLQRYIGKRKVKDSFWAGIKRCMMKELPDMKVCVAYGSAITKLKPTGPGEVAVPTGAMFASCKRIFKEDVSVTDEFKTTLMSWETGKEKERVYKIPSVCSADVKLRLGGERFGHTKSKTMPKVADCDHLG

SEQ ID NO: 2024 - protein, 345 aa, Microglena sp.
TPEKTVAGSFFKKPPVKTGWVFDCSICTDGVSLSMQYSKTVQVRVSDLKKTSKRSRDDEGMSVSEQYDHKLKTTLPDMGIVVLGVDPGRSNIATVTYLADDKSKTWKLTRGAFYHKSGIKKQKKQQEKRFSDMIPRWESLRENGAALSTSRTDDISAYLKNYDTFSDEWWRMALLRRESRDNFQRYIGKRKAMDSFWAGIKRNMKLDHPDLRVRVAYGSAITTLKATGPGEVAVPTGSMFASCKRLFKEEVHVTDEFKTTLMSWETGAKKECVYKIPSVQITTEGQIRLGYELLGHTPLKETPNVSYRDQLAVRVYCTRKQIQEKHRRGGLAPSLCRQQLDQAVP

SEQ ID NO: 2025 - protein, 269 aa, Microglena sp.
DGDKLFIFKDILGNMRYFGSKQLHKLMPEENPTHDPKVQKSRFGKYFLVLSVAARDRRAERKPVHPDKVATASIDPGVRKTMVTYSPENEEYFMLGQGQASDLVKLLLVHDKLQSRLDTEKTLRSKERMKIKKQMIRIRKRIFYLKKEFRDQTTNFLAARYDVLLVPQLETAKMTISAERELTTKVARQMLTLSHSVLFNRLKEKCEEYGTVFLHVLEHYTSQTCPMCGFLNKCGETYTCKNCQFTCDRDIVEAAGIFLKAVRTENPCS

SEQ ID NO: 2026 - protein, 282 aa, Microglena sp.
SSSLSVKLTFGTSRRLISSVVSFRIETLRVLKQIGAYARFYMGAAPILLAHRASRGYQNLRFRRYCKKQKLIVEIADFVAPREKSAKVLVGFGDWKGLGATPISRRTCGPLQAIRFELRSRENVIMEDIDEFRTSQRCSCCENHLCNMVALTHRKKQDGTGWECTEGRKRIHKILHCKSSQSGAPRQQSGGMLHCGKTWDRDVNASRNILMLTLHQVFGRERPLAFRRDAPRSSSTTPPPDTDMGTQTVERFTKEATRNIFENLFNLLHPPTLPKSNDLQSG

SEQ ID NO: 2027 - protein, 755 aa, Microglena sp.
PRMEHVCDVGIKSSVMYKLCKMATKPPTVAKLKELLKLAEVAYSSKDKKDDIVRLCEDNGLIAKPPPEYKTVEKMCVVKCALKKAMSLDDEEFGKFREHVDQLVNVVSRMLRRSSLVLTFHVTRLMEGDLPIPNMYDMKDTYWKDWLRIGVDGVFPDEESRISYEAVKDVIGKVLGSDDPDYINSYPIYFDQVLNYAGHTLSTVVSNNAWVPLVPRLTRLTKATLNALKAPKTIRVYDVMRVIQQEIQEMESWPESVQEYVREVRVRLKVPDGSRLYDDYGKDMDFPTMVRFNYWMQTRLEAIGARRIRLMPIFNVQRAHVRLDMKTLVNLFRHVFPKDPNIVELSKWKDVKDPDRFMLPLKPAFKKKKSCGPGEWEACKLAQQKYDADVNDIKDTDEYRHAKGRYDTLVNARKTVAGSFFKKPPVKTGWVFDCSICTDGVSLSMQYSKTVQVRVSDLKKTSKRSRDDEGMSVSEQYDHKLKTTLPDMGIVVLGVDPGRSNIATVTYLADDKSKTWKLTRGAFYHKSGIKKQKKQQEKRFSDMIPRWESLRENGAALSTSRTDDISAYLKNYDTFSDEWWRMALLRRESRDNFQRYIGKRKAMDSFWAGIKRNMKLDHPDLRVRVAYGSAITTLKATGPGEVAVPTGSMFASCKRLFKEEVHVTDEFKTTLMSWETGAKKECVYKIPSVQITTEGQIRLGYELLGHTPLKETPKVSYRDQLAVRVYCTRKQIQEKHRRGGLSPLSCRQQLDQAVP

SEQ ID NO: 2028 - protein, 270 aa, Microglena sp.
EDLSYKQVWRILLGNMRYFGSKQLHKLMPEENPTHDPKVQKSRFGEYFLVLSVAARDRRAERKPVNPDKVATASIDPGVRKTMVTYSPENEESFMLGQGQASDLVKLLLVHDKLQSRLDTEKTLRSKERMKIKKLMIRIRKTIFYLKKEFRDQTTNFLAARYDVLLVPQLETAKMTISAERELTTKVARQMLTLSHSVLFNRLKEKCEEYGTVFLHVLEHYTSQTCPMCGFLNKCGETYTCKNCQFTCDRDIVGAAGIFLKAVRTENPCS

SEQ ID NO: 2029 - protein, 329 aa, Microglena sp.
HSATSLIKLLWVVLNTLVNAQKTVAGSFFRKPPVKNGWVFDCSICTDGVSLSMQYSKTVQVLVSDLKKTCKKPRKEEGIKIAEKYDGSLKTILPDMGIVVLGVDPGRSNIATVTYLADDKNKTWTLTRGAFYHKSGIKKQTRQKELRFADMIPMWESLRENGAALSTSRTDKISAYLSNYAKFSDEWWRLALRRRESRDNLQRYIGKRKVKDSFWAGIKRCMMKELPDMKVCVAYGSAITKLKPTGPGEVAVPTGAMFASCKRIFKEDVSVTDEFKTTLMSWETGKEKERVYKIPSVCSADVKLRLGGERFGHTKSKTMPKVADCDHLG

SEQ ID NO: 2030 - protein, 793 aa, Microglena sp.
KMATKPPTVAKLKELLKLAEVPYSSKSNKDDLVRLCEDNGLITSPPPEYKTVEKMCVVKCALKKAMSLDDEEFGKFREHVDQLVNVVSRMLRRSSLVLTFHITSLLEKGLEIPDLYNMKDTYWKDWLRIGVDGIFPDEESKISYEAVKDSIGNVIGNDDADYIKSYPIYFDQVLNYAGHTLSTVVSNNAWVPLIPRLARLTSTTLNKLNAPKTLDTSKIIRGYDVMRAIQQEVQNMEGWPESVQEYVNEVREMLSVPDGSRVYDNYGKDMDFPTMVRFNYWIQKRLEDMDARLIRLMPIFNVQRVHVRLDLKTLVNLFRHMFPTDKNIVELSKWEHVKNPDSFMLPQRPAQKKKKSCGPGEWEAYKSVLKQYDDDVKDIKATDEYRHAKSLYDTLVNARKTVAGSFFRKPPIKNGWVFDCSICTDGVSLSMQYSKTVQVLVSDLKKTCKKSRKEEGIKIAEKYDSSLKTILPDMGIVVLGVDPGRSNIATVTYLADDKNKTWKLTRGAFYHKSGIKKQTRQKELRFADMIPMWESLRENGAALSTSRTDKISAYLSNYAKFSDEWWRLALRRRESRDNLQRYIGKRKVKDSFWAGIKRCMMKELPDMKVCVAYGSAITKLKPTGPGEVAVPTGAMFASCKRIFKEDVSVTDEFKTTLMSWETGKEKERVYKIPSVCSADVKLRLGGERFGHTKSKTMPKVADCDHLGVRLYNKRKGAQEKHRRGGFATSLVDSQKSIERYPEVRGLRFSPETCIYSDRDRSSALTIARLHCMELMGLGRPLPFAHSSSVVVDE

SEQ ID NO: 2031 - protein, 360 aa, Microglena sp.
ACSTARQYRFRVSDLKKTSKRSRDDEGMSVSEQYDHKLKTTLPDMGIVVLGVDPGRSNIATVTYLADDKSKTWKLTRGAFYHKSGIKKQKKQQEKRFSNMIPRWESLRENGAALSTSRTDDISAYLKNYATFSDEWWRMALLRRESRDNFQRYIGKRKAMDSFWAGIKRNMKLDHPDLRVRVAYGSALTTLKATGPGEVAVPTGSMFASCKRLFKEEVHVTDEFKTTLMSWETGAKKECVYKIPSVQITTEGQIRLGYELLGHTPLKETPKVSYRDQLAVRVYCTRKQIQEKHRRGGLAPSLVDNNSIKRYPEVRGLRFSPETSTYSDRDRSSALTIARLHCMELLGQGRPLPFCRDACC

SEQ ID NO: 2032 - protein, 358 aa, Microglena sp.
HVRCLQNAFSTRAHEYVTTDEGGIVSFLDNVVVAAVDPGVTDIVTVTGLNGGTRSYSSAQYYRKGLIFKSQRQTDVWNLETADIVGGIIPDRDSSSSEQIGAYARFYMGAAPILLAHRASRGYRNLRFRRYCKKQKLIVEIADFVAPREKSAKVLVGFGGWKGLGATPISRRTCGPLQAIRFELRSRENVIMEDIDEFRTSQRCSCCENHLCNMVALTHRKKQDGTGWECTEGRKRIHKILHCKSSQSGAPRQQSGGMLHCGKTWDRDVNASRNILMLTLHQVFGRERPLAFRRDAPRSSSTTPPTHPDTDMGTQTVERFTKEATRNIFENLFNLLHPQRCPKATICSLDDYKVSHFI

SEQ ID NO: 2033 - protein, 380 aa, Microglena sp.
QPNPQRRQRVSVQMKHQVGKDIAGEGGGDNAGYPKDASIEDCQDASLRQGALRVGIDPGMTDIVTIASSDGRVESFSSARFSEAAGYNTSNRRTNKWNADTQDLVKSIPSPTMSSMHDMQDHVRGYLSALPTLLQHRANRGYRSMRFFRYVGKQKTIEKVCDLIAPKAQKKTIEEKVCDVIAPKAKKTVVGFGNWSNQGYGISRLCSGPVKEIRKCLSRRQNVLFKNVDERNTSCTCHGCFQKLVNMKADSVVWRRVQNEPSALIDGAPTTTTTTTFEKQKTVVKNVKVHKVLHCRNSVKSASSNVRCGATWNRDVNAAKNLLLLLTTWMDGKERPAAFCVPSSSPTPKTTVSGEANVGAQPTDPPGSVSSLQLLSSGPA

SEQ ID NO: 2034 - protein, 244 aa, Microglena sp.
VDAEENPTHDPKVHKSRFGEYFLILSVAARDRRAERKPVHPDKVATASIDPGVRKTMVTYSPENEESFMLGQGQASDLVKLLLVHDKLQSRLDTEKTLRSKERMKIKMQMIRIRKRIFYLKKEFRDQTTNFLAARYDVLLVPQLETAKMTISAERELTTKVARQMLTLSHSVLFNRLKEKCEEYGTVFLHVIEHYTSQTCPMCGFLNKCGETYTCKNCQFTCNRDIVGAAGIFLKAVRTENPCL

SEQ ID NO: 2035 - protein, 807 aa, Microglena sp.
PRMEHVCDVCIKSSVMYKLCKMATKPPTVAKLKELLKLAEVAYSSKDKKDDIVCLCEDNGLIARPPPVYKTVEKMCVVKCALKKAMSLEEFGKFRGHVDQLVNVVSRMLRRSSLVLTFHVTRLMEGDLPIPNMYDMKDTYWKDWLRIGVDGVFPDEESRISYEAVKDVIGKVLGSDDPDYINSYPIYFDQVLNYAGHTLSTVVSNNAWVPLVPRLTRLTKATLNALGSPKTIRVYDVMRVIQQEIQEMESWPESVQEYAREVRVRLKVPDGSRLYDDYGKDMDFPTMVRFNYWMQTRLEAIGARRIRLMPIFNVQRAHVRLDMKTLVNLFRHVFPKDPNIVELSKWKNVKDPDRFMLPLKPAFKKKKSCGPGEWEAYKLAQQKYDADVNDIKATDEYRHAKGRYDTLVNARKTVAGSFFKKPPVKTGWVFDCSICTDGVSLSMQYSKTVQVRVSDMKKTSKRSRDDEGMSVSEQYDHKLKTTLPDMGIVVLGVDPGRSNIATVTYLADDNSKTWKLTRGAFYHKSGIKKQKKQQEKCFSDMIPRWESFRENGAALSTSRKDDISAYLKNYATFSDEWWRMAHRRRESRDNFLRYIGKRKAMDSFWAGIKRNMKLDHPDLRVRVAYGSASTTLKATGPGEVAVPTGSMFASCKRLFKDEVHVTDEFKTTLMSWETGAKKECVYKIPSVQITTEGQIRLGYELLGHTPLKETPKVSYRDQLAVRVYCTRKQIQEKHRRGGLAPLLSTTTRSSGTLRYEDCDSLQKPALTRTGTAPLLSQSQGCTAWNCWVKGDRFHFAGMRVVDGLQKK

SEQ ID NO: 2036 - protein, 323 aa, Microglena sp.
TQNDIADMGIVVLGVDPGRSNIATVTYLADDKRKTWKLTRGAFYHKSGIKKQKKQEEKRFSDMIPRWESLRENGAALSTSRKDDISAYLKNYATFSDEWWRMALRRSESRDNFQRYIGKRKAMESFWAGIKRNMKLDHPDLRVRVAYGSAITKLKATGPGEVAVPTGSMFASCKRLFKEEVHVTDEFKTTLMSWETGAKKECVYKIPSVQITTEGQIRLGYELLGHTPLKETPKVSYRDQLAVRVYCTRKQIQEKHRRGGLAPSLVDNNSIKRYPEVRGLRFSPETSTYSDRDRSSALTIARLHCMELLGQGRPLPFCRDACC

SEQ ID NO: 2037 - protein, 255 aa, Microglena sp.
EEEEALRVREQETHAGAVLRESGVFKSRGPTKKWLSNIQDCLDDLKDNSPKRTSIVSFDAYVTVMVNHWDSRWGEMSKSRWGEQRLRLYGGKKRVLARFFNEVQADVGERKTIVVAYGSAKFAPGGKGELSVPTTSAFKAFSDRFKGRVAVIDEFRTTKIWHKDSTAVLQSVQSEKKGRTVRGLLWCSSTMENSKLFVNRDLNAAINIHNCFTMYPIRPGILARPKKYCKLEVVVGRKIDYKLTGSLQNAVSSEV

SEQ ID NO: 2038 - protein, 729 aa, Microglena sp.
PRMEHACDVCIKSSVMYKLCKMATKPPTVAKLKELLKLAEVAYSSKDKKDDIVRLCEDNGLIARPPPEYKTVEKMCVVKCALKKAMSLDDEEFGKFRGHVDQLVNVVSRMLRRSSLVLTFHVTRLMEGDLPIPNMYDMKDTYWKDWLRIGVDGVFPYEESRISYEAVKYVIGKVLGSDDPDYINSYPIYFDQVFNYAGHTLSTVVSNNAWVPLVPRLTRLTKATLNALGAPKTIRVYDVMRVIQQEIQEMESWPEFVQEYVREVRVRLKVPDGSRLYDDYGKDMDFPTMVRFNYWMQTRLEAIGARCIRLMPIFNVQRAHVRLDMKTLVNLFRHVFPKDPNIVELSKWKNVKDPDRFMLPLKPAFKKKKSCGPGEWEAYKLAQQKNDGDVKDIKATEEYRHAKGRYDTLVNARKTVAGSFFKKPPVKTGWVFDCSICTDGVSLSMQYSKTVQVRVSDLKKTSKRSRDEEGMSVSEQYDHTLKTTLPDMGIVVLGVDPGRSNIATVTYLADDKSKTWKLTRGAFYHKSGIKKQKKQQEKRFSDMIPRWESLRENGAALSTSRKDDISAYLKNYATFSDEWRRMALRRRESRDNFQRYIGKRKAMDSFWAGIKRNMKLDHPDLRVRVAYGSAITKLKATGPGEVAVPTGSMFASCKRLFKEEVRVTDEFKTTLMSWETGAKKECVYKIPSVQITTEGQIRLGYELLGHTPLKETPKVSYRDQLAVRVYCTC

SEQ ID NO: 2039 - protein, 478 aa, Microglena sp.
CPSLMSNGAHVRLDMKTLVNLFRHVFPKDPNIVELSKWKNVKDPDRFMLPLKPAFKKKKSCGPGEWEAYKLAQQKYDADVKDIKATDEYRHAKGRYDTLVNARKTVAGSFFKKPPVKTGWVFDCTICTDGVSLSMQYSKTVQVRVSDLKKTSKRSRDDEGMSVSKQYDHKLKTTLPDMGIVVLGVDPGRSNIATVMYLADDKSKTWKLTRGAFYHKSGIKKQKKQQEKRLSDMIPRWESLRENGAALSTSRKDDISAYLKNYATFSDEWWRMALRRRESRDNFQRYIGKRKAMDSFWAGIKRNMKLDHPDLRVRVAYGSAITKLKATGPGEVAVPTGSMFASCKRLMSWETGAKKECVYKIPSVQITTEGQIRLGYELLGHTPLKETPKVSYRDQLAVRVYCTRKKIQEKHRRGGLAPSLVDNNSIKRYPEVRGLRFSPETSTYSDRDRSSALTIARLHCMELLGQGRPLPFCRDACC

SEQ ID NO: 2040 - protein, 688 aa, Microglena sp.
GNVGAILYHQKKKNTHPLLMGVVQDKGDDDINISVVKKTLNSLCMDVSRHQISSRIQSMVLLINHAVAEAYLFANFHITRCLDDGDFDVKQLPHLDRNFYYRCLLAVSTSNVQKDTLGQSFNDTMVAFDALRPAGYVKVDVRPWGQVIADVSIQMATMACNSVWANVDMVVIKYLRLKHPSLKKHFKKIVKAVVQYPESKIDTIIPEGLVNAIHIKEVVSHLRALLPLPRGKQFNTRAHLTMRLFHHVLTELGEVGRVDPKDKKTKKSHPRLFSILPRKNGFTILYVPISSMTFMKLLSMGDSPLESVSGDGRYENHTMLWRKYFNVQGLEMKRSRFDNRILSDGKGVSVQMKQKGKEEVVEEGENAGYPKDANIVECKDAVGALRVGVDPGMTDIVTVASSAGRIESFSSARFSEVAGYNTSKRRTYKWNDETQDLVKSIPSPNTSNMVDLQDHVRAYLKALPILLQHRANKGYRSMRFFRYVGKQKTIEKVCDVIAPSAQTTVVGFGNWSNQGYGISRSCSGPIKEFRRCLSRRKNVLFKNVDERNTSCKCHCCFRRLVNMKADSVFWRGVCKESPIDGSITVEKQKMVVNNVKVHKVLHCRDSVKSASSNVRCGATWNRDVNAAKNLLLLLTTWMDGRERPEAFCVPSPPPKTTVSIEASVSAKPTDPPGFVSSLPCYPLGQLKC

SEQ ID NO: 2041 - protein, 661 aa, Microglena sp.
PPVVQDKGDDDINISVVKKTLNSLCMDVSRHQISSRIQSIVLLINHAVAEAYLFANFHITRCLDDGDFEVKQLPHLDRNFYYRCLLAVSTSNVRKDTLGQSFNDTMVAFDALRPAGYVKVDVRPWGQVIADVSIQMATMACNSVWANVDRVVIKYLRLKHPSLKKHFKKIVKAVVQYPESKIDTIIPEGLVHAIHIKEVVSHLRALFPLPRGKQFNTRAHLTMRLFHHVLTELGEVGRVDPKDKKTKKSHPRLFSILPRKNGLTISYVPISSMTFMKLLSMGDSPLESVSGDGRYENHIMLWRKYFNVQGLETKRSRFDNRILSDGKGVSVQMKQKGKEEVVEEGDNAGYPKDANIVECKDAVGALRVGVDPGMTDIVTVASSAGRIESFSSARFSEVAGYNTSKRRTYKWNDETQDLVKSIPSPNTSNMVDLQDHVRAYLKALPILLQHRANKGYRSMRFFRYVGKQKTIEKVCDVIAPSAQTTVVGFGNWSNQGYGISRSCSGPIKEIRRCLSRRKNVLFKNVDERNTSCKCHGCFQRLVNMKADSVVWRGVCKESPIDGSITVEKQKMVVKNVKVHKVLHCRDSVKSASSNVRCGATWNRDVNAAKNLLLLLTTWMDGRERPEAFCVPSPPPKTTVSIEASVSAKPTNPPGFVSSLRC

SEQ ID NO: 2042 - protein, 212 aa, Microglena sp.
RPEGHSPKRTSLESFDAYVTGMVNHWDSRWGEMSKSRWGAQRLRLYGGKKRVLARFFNEVQADVGERKTIVIAYGSSKFAPGGKGELSVPTTSAFNAFSDRFKGRVAVIDEFRTTKIWHKDSTTVLQSVQSEKEGRTVRGLLWCSSTMENSMLFVNRDLNAAINIHNCFTMYPTRPGILARPKKYCKLEVVVGRTIDYKLTGSLQNAVSSEV

SEQ ID NO: 2043 - protein, 716 aa, Microglena sp.
GACGPARQCGEPHVTAVQSGADFPHHESIRESLDIPDLYNMKDTYWKDWLRIGVDGIFPDEESKISYEAVKDSIGDVIGNDDADYIKSYPIYFDQVLNYAGHTLSTVVSNNAWVPLIPRLARLTSTTLNRLNAPKTLDTSKIIRGYDVMQAIQQEVQNMEGWPESVQEYVNEVREMLSVPDGSRVYDNYGKDMDFPTMVRFNYWIQTRLEDMDARRIRLMPIFNVQRVHVRLDLKTLVNLFRHMFPNDQNIVELSKWEHVKNPESFMLPQRPAQKKKKSCGPGEWEAYKSVLKQYDDDVKDIKATDEYRHAKGLYDTLVNARKTVAGSFFRKPPVKNGWVFDCSICTDGVSLSMQYSKTVQVLVSDLKKTCKKPRKEEGIKIAEKYDGSLKTILPDMGIVVLGVDPGRSNIATVTYLADDKNKTWKLTRGAFYHKSGIKKQTRQKELRFADMIPMWESLRENGAALSTSRTDNISAYLSNYAKFSDEWWRLALRRRESRDNLQRYIGKRKVKDSFWRGIKRCMMKELPDMKVCVAYGSAITKLKPTGPGEVAVPTGAMFASCKRIFKEDVSVTDEFKTTLMSWETGKEKERVYKIPSVCSADVKLRLGGERFGHTKSKTMPKVADCDHLGVRLYNKRKGAQEKHRRGGFATSLVDSQKSIERYPEVRGLRFSPETCIYSDRDRSSALTIARLHCMELMGLGRPLPFAHSSSVVVDE

SEQ ID NO: 2044 - protein, 300 aa, Microglena sp.
TIRWEAGTPIKSKTWKLTRGAFYHKSGIKKQKKQQEKRFSDMIPGWESLRENGAALSTSRKDDISAYLKNYATFSDEWWRLALRRRESRDNLQRYIGKRKVMDSFWAGIKRNMKLDHPDLRVRVAYGSAIKTMKATGPGEVAVPTGSMFASCKRLFKEEVRVTDEFKTTLMSWETGAKKECVYKIPSVQITTEGQIRIGYELLGHTPLKETPKVSDRDQLAVRVYCTRKKIQEKHRRGGLAPSLVDNKSIERYPEVRGLRFSPETSTYSDRDRSSALTIARLHCMELLGQGRPLPFCRDA

SEQ ID NO: 2045 - protein, 354 aa, Microglena sp.
RKHFKKIVKAVVQYPESKIDTIIPGGLVHAIHIKEVVSHLRALFPLPRGKQFNTRAHLTMRLFHHVLTELGEVGRVYPKDKKTRKSHPRLFSILPRMNAFTISYVPISSMPFMKLLSMGDSPLESVSGDGRYENHTMLWRKYFNVQGLETKRSRFDNRILSDGKGVSVQMKQKGKEEVVEEGENAGYPKDANIVECKDAVGALRVGVDPGMTDIVTVASSAGRIESFSSARFSEVAGYNTSKRRTYKWNDETQDLVKSIPSPNTSNMSDLQDHVRAYLKALPILLQHRANKGYRSMRFFRYVGKQKTIEKVCDVIAPRAQTTVVGFGNWSNQGYGISRSCSGPIKRDQEVPLTS

SEQ ID NO: 2046 - protein, 448 aa, Microglena sp.
QCDCSITCLQSWERSDEWIRKIKKTRKSHPRLFSILPRKNGFTISYVPISSMTFMKLLSMGDSPLESVSGDDGYENHTMLWRKYFNVQGLETKRSRFDNRILSDGKGVSVQMKQKGKEEVVEEGENAGYPKDANIVECKDAVGALRVGVDPGMTDIVTVASSAGRIESFSSARFSKVAGYNTSKRRTYKWNDETQDLVKSIPSPNTSNMSDLQDHVRAYLKALPILLQHRANKGYRSMRFFRYVGKQKTIEKVCDVIAPRAQTTVVGFGNWSNQGYGISRSCSGPIKEIRRCLSRRKNVLFKNVDERNTSCKCHGCFQRLVNMKADSVVWRGVCKESPIDGSITVEKQKMVVKNVKVHKVLHCRDSVKSASSNVRCGATWNREVTPAKNLLLLLTTWMDGRERPEAFCVPSPPPKTTVSIEASVSAKPTDPPGFVSSLPCYPLGQLKC

SEQ ID NO: 2047 - protein, 397 aa, Microglena sp.
TPEKTVAGSFFRKPPVKNGWVFDCSICTDGVSLSMQYSKTVQVLVSDLKKTCKKPRKEEGIKIAEKYDGSLKTILPDMGIVVLGVDPGRSNIATVTYLADDKNKTWKLTRGAFYHKSGIKKQTRQKELRFADMIPMWESLRENGAALSTSRTDKISAYLSNYAKFSDEWWRLALRRRESRDNLQRYIGKRKVKDSFWAGIKRCMMKELPDMKVCVAYGSAITKLKPTGPGEVAVPTGAMFASCKRIFKEDVSVTDEFKTTLMSWETGKEKERVYKIPSVCSADVKLRLGGERFGHTKSKTMPKVADCDHLGVRLYNKRKGAQEKQRRGGFATSLVDSQKSIERYPEVRGLRFSPETCIYSDRDRSSALTIARLHCMELMGLGRPLPFAHSSSVVVDE

SEQ ID NO: 2048 - protein, 349 aa, Microglena sp.
RRPVRSLVKKKVSRSQKNTTAHLKRYCPIWVSSSWVWTQDGATSLRVTYLADDKNKTWTLTRGEFYHKSGIKKQTRQKELRFADMIPMWESLRENGAALSTSRTDKISAYLSNYAKFSEEWWRLALRRRESRDNLQRYIGKRKVKDSFWAGIKRCMMKELPDMKVCVAYGSAITKLKPTGPGEVAVPTGAMFASCKRIFKEDVSVTDEFKTTLMSWETGKEKERVYKIPSVCSADVKLRLGGERFGHTKSKTMPKVADCDHLGVRLYNKRKGAQDKHRRGGFATSLVDSQKSIERYPEVRGLRFSPETCIYSDRDRSSALTIARLHCMELMGLGRPLPFAHSSSVVVDE

SEQ ID NO: 2049 - protein, 309 aa, Microglena sp.
LVEFLPCFFVYCKWYFFPRVETLGSSVWFLGFHHFHVFLVNNTMTRSGCLIRIPCQRSNIATVTYLADDKNKTWKLTRGAFYHKSGIKKQTRQMELRFADMIPMWESLRENGAALSTSRTDKISAYLSNYAKFSDEWWRLALRRRESRDNFQRYIGKRKVKDSFWAGIKRCMMKELPDMKVCVAYGSAITKLKPSGTGEVAVPTGAMFASCKRIFKEDVSVTDEFKTTLMSWETGKEKERVYKIPSVCSADVKLRLGGELFGHTKSKTMPKVADCDHLGVRLYNKRKGAQEKHRRGGFSTSLVDSQKSI

SEQ ID NO: 2050 - protein, 586 aa, Microglena sp.
IKFPEDAGHIEDHSGYEVMQAIQQEVQNMEGWPESVQEYVNEVREMLSVPDGSRVYDNYGKDMDFPTMVRFNYWIQTRLEDMDARRIRLMPIFNVQRVHVRLDLKTLVNLFRHMFPNDQNIVELSKWEHVKNPESFMLPQRPAQKKKKSCGPGEWDAYKSVLKQYDDDVKDIKATDEYRHAKGLYDTLVNARKTVAGSFFRKPPVKNGWVFDCSICTDGVSLSMQYSKTVQVLVSDLKKTCKKPRKKEGIKIAEKYDGSLKTILPDMGIVVLGVDPGRSNIATVTYLADDKNKTWKLTRGAFYHKSGIKKQTRQKELRFADMIPMWESLRENGASLSTSRTDKISAYLSNYAKFSDEWWRLALRRRESRDNLQRYIGKRKVKDSFWAGIKRCMMKELPDMKVCVAYGSAITKLKPTGPGEVAVPTGAMFASCKRIFKEDVSVTDEFKTTLMSWGTGKEKERVYKIPSVCSADVKLRLGGERFGHTKSKTMPKVADCDHLGVRLYNKRKGAQEKHRRGGFATSLVDSQKSIERYPEVRGLRFSPETCIYSDRDRSSALTIARLHCMELMGLGRPLPFAHSSSVVVDE

SEQ ID NO: 2051 - protein, 204 aa, Microglena sp.
RRPVRSLVKKKVSRSQKNTTAHLKRYCPIWVSSSWGVDPGRSNIATVTYLADDKNKTWKLTRGAFYHKSGIKKQTRQKELRFADMIPMWESLRENGAALSTSRTDKISAYLSNYAKFSDEWWRLALRRRESRDNLQRYIGKRKVKDSFWAGIKRCMMKELPDMKVCVAYGSAITKLKPTGPGEVAVPTGPCSHRVKEFSKRTFL

SEQ ID NO: 2052 - protein, 395 aa, Microglena sp.
TPKKTVAGSFFRKPPVKNGWVFDCSICTDGVSLSMQYSKTVQVLVSDLKKTCKKPRKEEGIKIAEKYDGSLKTILPDMGIVVLGVDPGRSNIATVTYLADDKNKTWKLTRGAFYHKSGIKKQTRQKELRFADMIPMWESLRENGAALSTSRTDKISAYLSNYAKFSDEWWRLALRRRESRDNLQRYIGKRKVKDSFWAGIKRCMMKELPDMKVCVAYGSAITKLKPTGPGEVAVPTGAMFASCKRIFKEDVSVTDEFKTTLMSWETGKEKERVYKIPSVCSADVKLRLGGERFGHTKSKTMPKVADCDHLGLYNKRKGAQEKHRRGGFATSLVDSQKSIERYPEVRGLRFSPETCIYSDRDRSSALTIARLHCMELMGLGRPLPFAHSSSVVVDE

SEQ ID NO: 2053 - protein, 684 aa, Microglena sp.
EWYRCPSVNRNFFYRCLIAVSTNKCKGSTLGEDFESSRLLFDLLREPGQSKVDIRGSVKNQIIADLSILMATMASNHLWTNLERRITTYLKWKYPQIAKRLRSDIVAALIKCPTKNLDVIFKMSPHTTKLPTKLPTSRLRSAKSAVALAKKRVGRKEPEGSPLRVRLTKLQERLEKLSEAWLSSKNLRVDADNAKRFFAREVAFCLRGVLPLPSGNTFASRAHMTLPLYHKILSETIEEKRKTKNEKHRTFSLLPYKSGFTLSHIPISKMAFFYMVNECHFDSCKADVASKNHQGIWERFANLKKVETVSRKFGYRIVTDGFAVSILMNKPTCLTCSMPADAFSTRAHEYVTTDEGGIVSFLDNVVVAAVDPGVTDIVTVTGLNGGTRSYSSAKYYRKGLIFKSQRQTDVWNLETADIVGGIIPDRDSSSSEQIGAYARFYMGAAPILLAHRASRGYRNLRFRRYCKKQKLIVEIADFVAPRKKSAKVLVGFGDWKGLGATPISRRTCGPLQAIRFELRSRENVIMEDIDEFRTSQRCSCCENHLCNMVALTHRKKQDGTGWECTEGRKRIHKILHCKSSQSGAPRQQSGGMLHCGKTWDRDVNASRNILMLTLHQVFGRERPLAFRRDAPRSSSTTPPPPPDTDMGTQTVERFTKEATRNIFENLFNLLHPPTLPKSNDLQSG

SEQ ID NO: 2054 - protein, 456 aa, Microglena sp.
RIPKASCCPRGLHRRRKKSCGPGEWEAYKSVLKQYDDDVKDIKATDEYRHAKGLYDTLVNARKTVACSFFRKPPVKNGWVFDCSICTDGVSLSMQYSKTVQVLVSDLKKTCKKPRKEEGIKIAEKYDGSLKTILPDMGIVVLGVDPGRSNIATVTYLADDKNKTWKLTRGAFYHKSGIKKQTRQKELRFADMIPMWESLRENGAALSTSRTDKISAYLSNYAKFSDEWWRLALRRRESRDNLQRYIGKRKVKDSFWAGIKRCMMKELPDMKVCVAYGSAITKLKPTGPGEVAVPTGAMFASCKRIFKEDVSVTDEFKTTLMSWETGKEKERVYKIPSVCSADVKLRLGGERFGHTKSKTMPKVADCDHLGVRLYNKRKGAQEKHRRGGFATSLVDSQKSIERYPEVRGLRFSPETCIYSDRDRSSALTIARLHCMELMGLGRPLPFAHSSSVVVDE

SEQ ID NO: 2055 - protein, 222 aa, Microglena sp.
RYCKKQKLIVEIADFVAPREKSAKVLVGFGDWKGLGATPISRRTCGPLQAIRFELRSRGNVIMEDVDEFRTSQRCSCCENRLCNMVALTHHKKQDGTGWECTEGRKRIYKILHCKSSQSGAPRQQSGGRLHCGKTWDRDVNASRNILMLTLHQVFGRERPLAFRRDALRSSSKTPPPPDTDMGTQTVERFTKEATRNIFENLFNLLHPPTLPKSNVAQKQSG

SEQ ID NO: 2056 - protein, 803 aa, Microglena sp.
PRMEHVCDVCIKSSVMYKLCKMATKPPTVSKLKELLKLAEVAYSSKDKKDDIVRLCEDNGLVARPPPEYKTVEKMCVVKCALKKAMSLDDEEFGKFRGHVDQLVHVVSRMLRRSSLVLTFHVTRLMEGDLPIPNMYDMKDTYWKDWLRIGVDGVFPDEESRISYEAMKEVIGKVLGSDDPDYINSYPIYFDQVLNYAGHTLSTVVSNDAWVPLVPRLTRLTKATLKALGAPKTICVYDVMRVIQQEIQEMESWPESVQEYVREVRVRLKVPDGSRLYDDYGKDMVFPTMVRFNYWMQTRLEAMGARRIRLMPIFNVQRAHVRLDMKTLVNLFRHVFPKDPNIVELSKWENVKDPDRFMLPLKPAVKKKKSCGPGEWEAYKLAQQKYDADVKDIKATDKYRHAKGRYDTLVNAQKTVAGSFFKKPPVKTWWVFDCSICTDGVSVSMQYSKTVQVRVSDLKKTSKRSRDEEGMSVSEQYDHKLKTTLPDMGIVVLGVDPGRSNIATVTYLADDKSKTWKLTRGAFYPKSGIKKQKKQQEKRFSDMIPRWESLRENGAALSTSRKDDISAYLKTYATFSDEWWRMALRRRESRDNFQRYIGKRKAMDSFWAGIKRNMKLDHPDLRVRVAYGSAITKLKATGPGEVAVPTGSMFASCKRLFKEEVHVTDEFKTTLMSWETGAKKECVYKIPSVQITTEGQIRLGYELLGHTPLKETPKVSYRDQLAVRVYCTRKKFQEKHRRGGLAPSLVDNKSIKRYPEVRGLRFSPETSTYSDRDRSSALTIARLHCMELLGQGRPLPFCRDACC

SEQ ID NO: 2057 - protein, 284 aa, Microglena sp.
EQHRYSHVSGRRQKQDMEAYTRSFLPQVWYQETEKTARKRFSDMIPRWESLRENGAALSTSRKDDISAYLKTYATFSDEWWRMALRRRESRDNFQRYIGKRKAMDSFWAGIKRNMKLDHPDLRVRVAYGSAITKLKATGPGEVAVPTGSMFASWKRLFKEEVHVTDEFKTTLMSWETGAKKECVYKIPSVQITTEGQIRLGYELLGHTPLKETPKVSYRDQLAVRVYCTRKKIQEKRRRGGLAPSLVDNKSIKRYPEVRGLRFSPETSTYSDRDRFHFSIPSNV

SEQ ID NO: 2058 - protein, 238 aa, Microglena sp.
WAFPASPVDFYWLRNMVWSGNCDSSVLISQASESFLGATPISRRTCGPLQAIRFELRSRENVIMEDVDEFRTSQRCSCCETRICNMVALTHRKKQDGTWECTEGRKRIHKILHCKSSQSGTPRQQSGGRLHCGKTWDRDVNASRNILMLTLHQVFGRERPLAFRREVPRKTHQHLILIWGHRRLNGLPQRRLGISSRTSSTCCTPQRCPNATICSLDDYKVCPTLFENNCMYYHGRAQ

SEQ ID NO: 2059 - protein, 248 aa, Microglena sp.
AIEMDQKNVSKDGDKLFIFKTYWATCATSVAKQLHKLMPEENPTHDPKVQNPLRRIFPRLVCRFQGQEGRAEACPSRQGCNCIHRPRLRKTMVTYSPENEESSCLVRDRHPTLSNSCLVHDKLQSRLDTERSYDSHSPQERVRDQKTNFLARSLRCVVGTSIGDGEDDNHERELTTKVARQMLTLSHFMLFNRLMEKCAEYGTVFLHVLEHYTSLTCPMCGFLNKCGETYTCKNCQFTCDRDIVGQSS

SEQ ID NO: 2060 - protein, 612 aa, Microglena sp.
TKEKKEVFEGVPDAQLHTVSVPSVDQNFIRQLMVGSRQAHMETRDATVERLFHNNYWFREKIEGREVIVKKKKQYVGAIAPYDGDRNPYSHASKKYLTNFNNHYRVHLSTWIKKFVYSKENRILAKEIKDEHGIDETVFHRYLLYDIHSWGVKEDLIAIHSLLPERTKMLLKIQHSILGRDEINRQWLKSVSNSVKMIRYNVFINRYLEATEDEGYAKLVNIAPIPTVKHAFITIDTDGLLGVLKDGGLIESLEKTLTNKEHWESVFDVENIRSTGKGVFTCTIDTDGVMACTHFLRAEKKKFSIKDDGTAIKKQTKTLREFSESDPNVVVVANDPGRCNIAFLTWKKHKVEEKDKGGRKRKRHCEFGSKRLTRERYYVESGVFKSRGPTKKWLSNIQDCLDDLKDNSPKRTSLVSFDAYVTVMVNHWDSRWGEMSKSRWGAQRLYGGKKRVLARFFNEVQEDVGERKTFVVAHGSAKFAPGGKGELSVPTTSVFNAFSDRFKGRVAVIDEFRTTKIWHKDSTTVLQSVQSEKEGRTVRGLLWCSSTMENSKLFVNRDLNAAINIHNCFTMYPIRPGILARPKKYCKLEVVVGRKIDYKLTGSLQNAVSSEV

SEQ ID NO: 2061 - protein, 697 aa, Microglena sp.
METIVNKEPPDKRTRPDRAAKIKDRKNGEENVVKCTLSRIIVDKDNKDVIIKVIKERVDSVSKRTYLAGVAVNRILKEVFKGVPDAQLHTVSVPSVDQNFIRQLMVGSRQAHMETRDATVERFFHNNYWFRKKIEGREVIVKKKKQYVGAMARYDGDRNLYSHVSKKYLTNFNNHYRVHLSTWIKKFVYSKENRILAKEIKDEHGIDETVFHRYLLYDIHSWGVKEDLIAIHSLLPERTKMLLKIQHSILGRDEINRQWLKSVSNSAKMIRYNVFINRYLEATEDEGYAKLVNIAPIPTVKLVNIAPIPTVKHAFITIDTDGLLGVLKDVGLIESLEKTLTNKEHWESVFDVENIRSTGKGVFTCTIDTDGVMACTHFLRAEKKNISIKDDGTAIKKQTKTLREFSKSDPNVVVVANDPGRCNIAFLTWKKHKVEEKDKGGKKRKGHCEFGSKRLTRERYYVENGVFKSRGPTKKWLSNIQDCLDDLKDNSPKRTSLVSFDAYVTVMVNHWDSRWGEMSKSRWGAQRLRLYGGKKRVLARFFNEVQEDVGERKTIVVAYGSAKFAPGGKGELSVPTTSAFKAFSDRFKGRVAVIDEFRTTKIWHKDSTTVLQSVQSEKEGRTVRGLLWCSSTMENSKLFVNRDLNAAINIHNCFTMYPIRPGILARPNKYCKLEVVVGRKIDYKLTGSLQNAVSSEV

SEQ ID NO: 2062 - protein, 238 aa, Microglena sp.
RRPVRSLVKKKVSRSQKNTTAHLKTILPDMGIVVLGVDPGRSNIATVTYLADDKNKTWTLTRGAFYHKSGIKKQTRQKELRFADMIPMWESLRENGAALSTSRTDKISAYLSNYAKFSDEWWRLALRRRESRDNLQRYIGKRKVKDSFWAGIKRCMMKELPDMKVCVAYGSAIKKLKPTGPGEVAVPTGAMFASCKRIFKEDVSVTDEFKTTLMSWETGKEKERVYKIPSVLFSRREA

SEQ ID NO: 2063 - protein, 510 aa, Microglena sp.
MYNIAVRKLALRMVADLGVLKTSVFTNIIRSPPEYKTVEKMCVVKCALKKAMSLDDEEFGKFREHVDQLVNVVSRMFRRSSLVLTFHITSLLEKGLDIPDLYNMKDTYWKDWLRIGVDGIFPDEESKISYEAVKDSIGDVIGNDDADYIKSYPIYFDQVLNYAGHTLSTVVSNNAWVPLIPRLARLTSTTLNKLNAPKTLDTSKIIRGYDVMQAIQQEVQNMEGWPESVQEYVNGVREMLSVPDGSRVYDNYGKDMDFPTMVRFNYWIKTRLEDMDARRIRLMPIFNVQRVHVRLDLKTLVNLFRHPGRSNIATVTYLADDKNKTWTLTRGAFYHKSGIKKQTRQKELRFADMIPMWESLRENGAALSTSRTDKISAYLSNYAKFSDEWWRLALRRRESRDNLQRYIGKRKVKNSFWAGIKRCMMKELPDMKVCVAYGSAITKLKPTGPGEVAVPTGAMFASCKIIFKEDVSVTDEFKTTLMSWETGKEKERVYKIPSVCSADVKLKVGW

SEQ ID NO: 2064 - protein, 565 aa, Microglena sp.
YHGCFRRPKTCRIREGGRSSLGQVIADVSIQMATMACNSVWANVDRVVINYLRLKHPSLKKHFKKIVKAVVQYQESKIDTIIPEGLVHAIHIKEVVSHLRALFPLPRGKQFNTRAHLTMRLFHHVLTELGEVGRVDPKDKKTRKSHPRLFSILPRKNGFTISYVPISSMTFMKLLSMGDSPLESVSGDGRYENHTMLWRKYFNVQGLETKRSRFDNRILSDGKGVSVQMKQKGKEEVVEEGENAGYPKDANIVECKDEVGALRVGVDPGMTDIVTVASSAGRIESFSSARFSEVAGYNTSKRRTYKWNDETQDLVKSIPSPNTSNMSDLQDHVRAYLKALPILLQHRANKGYRSMRFFRYIGKQKTIEKVCDVIAPRAQTTVVGFGNWSNQGYGISRSCSGPIKEIRRCLSRRKNVLFKNVDERNTSCKCHGCFQRLVNMKADSVVWRGICKESPIDGSITVEKQKMVVKNVKVHKVLHCRDSVKSASSNVRCGATWNRDVNAAKNLLLLLTTWMDGRERPEAFCVPSPPPKTTVSIEASVSAKPTDPPGFVSSLPCYPLGQLKC

SEQ ID NO: 2065 - protein, 397 aa, Microglena sp.
TPEKTVAGSFFRKPPVKNGWVFDCSICTDGVSLSMQYSKTVQVLVSDLKKTCKKPRKEEGIKIAEKYDGSLKTILPDMGIVVLGVDPGRSNIATVTYLADDKNKTWTLTRGAFYHKSGIKKQTRQKELRFADMIPMWESLRENGAALSTSRTDKISAYLSNYAKFSDEWWRLALRRRESRDNLQRYIGKRKVKGSFWAGIKRCMMKELPDMKVCVAYGSAITKLKPTGPGEVAVPTGAMFASCKRIFKEDVSVTDEFKTTLMSWETGKEKERVYKIPSVCSADVKLRLGGERFGHTKSKTMPKVADCDHLGVRLYNKREGAQEKHRRGGFATSLVDSQKSIERYPEVRGLRFSPESCIYSDRDRSSALTIARLHCMELMGLGRPLPFAHSSSVVVDE

SEQ ID NO: 2066 - protein, 395 aa, Microglena sp.
AKLGSPRRTLGGTQITLNASFAREVAFCLRGVLPLPSGNTFASRAHMTLPLYHKILSKTIEEKRKTKNEKHRTFSLLPSKSGFTLSHIPISKMAFFYMVNECHFDSCKADVASKNHQGIWERFANLKKVETVSRKFGYRIVTDGFAVSILMNKPTCLTCSMPADAFSTRAHEYVTTDEGGIVSFLDNVVVAAVDPGVTDIVTVTGLNGGTRSYSSAQYYRKGLIFKSQRQTDVWNLETADIVGGIIPDRDSSSSEQIGAYARFYMGAAPILLAHRASRGYRNLRFRSNCKKQKLIVEIADFVAPREKSAKVLVGFGDWKGLGATPISRRTCGPLQAIRFELRSRENVIMEDIDEFRTSQRCSCCENHLCNMVALTHRKKQDGTGWECTEGRKRIH

SEQ ID NO: 2067 - protein, 607 aa, Microglena sp.
GNCQLVWYHQNNNHSLSMGVVTNNGDDDDLDIMVVKKTLNSLCMDVSRQQICSRIQSMVLVINHAVAEAYLFAIFHITRCLDDGDFDVKQLPHLDRNFYYRCILAVSISNVRNDTLDQSLKDSMVAFDALRPAGYVKVDVRPWGQVIADVSIQMATMACNSVWANVDRVVIKYLRLKHPSLKKHFKKIVKAVVQYPDSDIDKIIPAGLVHANLIKDVVRRLRDLLPLPRGKQFNTRAHLAMRLFHHVLTELGANLKEKTTKKRPRLFSILPRKSGFTISYVPISSMTLMKLLSMGDSPLESVRGDGRHENHSMLWRKYFNVQGLETKGSRFDNRILSDGKGVYVQMKHQVGKDIAGEGGGDNAGYPKDASIEDCQDASLRQGALRVGIDPGMTDIVTIASSDGRVESFSSARFSEAAGYNTSNRRTNKWNADTQDLVKSIPSPTTSSMHDMQDHVRGYLSALPTLLQHRANRGYRSMRFFRYVGKQKTIEKVCDLIAPKAQKKTIEEKVCDVIAPKAKKTVVGFGNWSNQGYGISRSCSGPVKEIRKCLSRRQNVLFKNVDERNTSCTCHGCFQKLVNMKADSVAWRRVQNEPSALIDGAPTTTTNV

SEQ ID NO: 2068 - protein, 252 aa, Microglena sp.
TDWCVRQILHGCRPILLAHRASRGYRNLRFRRYCKKQKLIVEIADFVAPREKSAKVLVGFGDWKGLGATPISRRTCGPLQAIRFELRSRENVIMEDIDEFKTSQRCSCCENHLCNMVALTHRKKQDGTGWECTEGRKRIHKILHCKSSQSGAPRQQSGGMLHCGKTWDRDVNASRNILMLTLHQVFGRERPLAFRRDAPRSSSTTPPPPPDTDMGTQTVERFTKEATRNIFENLFNLLHPPTLPKSNDLQSG

SEQ ID NO: 2069 - protein, 325 aa, Microglena sp.
NDIADMGIVVLGVDPGRSNIATVTYLADDKNKTWTLTRGAFYHKSGIKKQTRQKELRFADMIPMWESLRKKGAALSTSRTDKISAYLSNYAKFSDEWWRLALRRRESRDNLQRYIGKRKVKDSFWAGIKRCMMKELPDMKVCVAYGSAITKLKPIGPGEVAVPTGAMFASCKRIFKEDVSVTDEFKTTLMSWETGKEKERVYKIPSVCSADVKLRLGGERFGHTKSKTMPKVADCDHLGVRLYNKRKRAQEKHRRGGFATSLVDSQKSIERYPEVRGLRFSPETCIYSDRDRSSALTIARLHCMELMGLGRPLPFAHSSSVVVDE

SEQ ID NO: 2070 - protein, 551 aa, Microglena sp.
RNVGTILYHQKKKNTHPLLMGVVQDKGDDDINISVVKKTLNSLCMDVSRHQISSRIQSMVLLINHAVAVAYLFANFHITRCLDDGDFDVKQLPHLDRNFYYRCLLAVSTSNVRKDTLGQSFNDTMVAFDALRPAGYVKVDVRPWGQVIADVSIQMATMACNSVWANVDRVVIKYLRLKHPSLKKHFKKIVKAVVQYPESKIDTIISEGLVHAIHIKEVVSHLRALFPMPRGKQFNTRAHLTMRLFHHVLTELGEVGRVDPKDKKTRTNHPRLFSILPRKNGFTISYVPISSMTFMKILSMGDSPLESVSGDGRYENHTMLCRKYFNVQGLETKRSRFDNRILSDGKGVSVQMKQTGKEEVVEEGENAGYPKDANIVQCNDAVGALRVGVDPGMTDIVTVASSAGRIESFSSARFSEVAGYNTSKRRTYKWNDETQDLVKSIPSPNTSNMSDLQDHVRAYLKALPILLQHRANKGYRSMRFFRYVGKQKTIEKVCDVIAPRAQTTVVGFGNWSNQGYGISRSCSGPIKEIRRCLSRRKNVFVQKRRRTQHFL

SEQ ID NO: 2071 - protein, 408 aa, Microglena sp.
YLEATEDEGYAKLVNIAPIPTVKHSFITIDTDGLLGVLKDVGLVKSLEKTLTNKEHWESVFDVENTRSTGKGVFTCTIDTDGVMACTHFLRAEKKKISIKDDGTAIKKQTKTLREFSESDPNVVVVANDPGRCNIAFLTWKKNKVEEKDKGGRKRKRHCEFGSKRLTRERYYVESGVFKSRGPTKKWLSNIQDCLDDLKDNSPKRTSLESFDAYVTVMVNHWDSRWGEMSKSRCVAQRLRLYGGKKRVLARFFNEVQADVGERKTIVIAYGSSKFAPGGKGELSVPTTSAFNAFSDRFKGRVAVIDEFRTTKIWHKDSTTVLQSVQSEKEGRTVRGLLWCSSTMENSKLFVNRDLNAAINIHNCFTMYPTRPGNLARPKKYCKLEVVVGRTIDYKLTGSLHNAVSSEV

SEQ ID NO: 2072 - protein, 704 aa, Microglena sp.
TSCLERVYIFANFHIARLFENGIAVPPVNRNFFYRCLIAVSTNKCKGLTLGEDFKSSRLLFDLLREPGQSKVDIRGNVKNQIIADLSILMATMASNHLWTNLERRITTYLKWKYPQIAKRLRSDIVAALIKCPTKNLDVIFKMSPHTTKLPTKLPTSRLRSAKSAVALAKKRVGRKEPEGSPLRVRLTKLQERLEKLSEAWLSSKNLRVDADNAKRFFAREVAFCLRGVLPLPSGNIFATRAHMTLPLYHKILSETIEEKRKTKNEKHRTFSLLPYKSGFTLSHIPISKMAFFYMVNECHFDSCKADVASKNHQGIWERFANLKKVETVSRKFGYRIVTDGFAVSILMNKPTCLTCSMPADAFSTRAHEYVTTYEGGIVSFLDNVVVAAVDPGVTDIVTVTGLNGGTRSYSSAQYYRKGLIFKSQRQTDVWNLETADIVGGIIPDRDSSSSEQIGAYARFYMGAAPILLAHRASRGYRNLRFRRYCKKQKLIVEIADFVAPREKSAKVLVGFGDWKGLGATPISRRTCGPLQAIRFELRSRENVIMEDIDEFRTSQRCSCCENHLCNMVALTHRKKQDGTGWECTEGRKRIHKILHCKSSQSGAPRQQSGGMLHCGKTWDRDVNASRNILMLTLHQVFGRERPLAFRRDAPRSSSTTPPPPPDTDMGTQTVERFTKEATRNIFENLFNLLHPPTLPKSNDLQSG

SEQ ID NO: 2073 - protein, 688 aa, Microglena sp.
GNVGAILYHQKKKNTHPLLMWVVQDKGDDDINISVVKKTLNSLCMDVSRHQISSRIQSMVLLINHAVAEAYLFANFHITRCLDDGDFDVKQLPHLDRNFCYRCLLAVSTSNVRKDTLGQSFNDTMVAFDALRPAGYVKVDVRPWGQVIADVSIQMATMACNSVWANVDRVVIKYLRLKHPSLKKHFKKIVKAVVQYPESKIDTIIPEGLVHAIHIKEVVSHLRALFPLPRGKQFNTRAHLTMRLFHHVLTELGEVGRVDPKDKKQKKSHPRLFSILPRKNGFTISYVPISSMTFMKLLSMGDSPLESVSGDGRYENHTMLWRKYFNVQGLETKRSRFDNRILRDGKGVSVQMKQKGKEEVVEEGENEGYPKDANIVECKDAVGALRVGVDPGMTDIVTVASSAGRIESFSSARFSEVAGYNTSKRRTYKWNDETQDLVKSIPSPNTSNMVDLQDHVRAYLKALPILLQHRANKGYRSMRFFRYVGKQKTIEKVCDVIAPRAQTTVVGFGNWPNQGYGISRSCSGPIKEIRRCLSRRKNVLFKNVDERNTSCKCHGCFQRLVNMKADSVVWRGVCKESPIDGSITVEKQKMVVKNVKVHKVLHCRDSVKSASSNVRCGATWNRDVNAAKNLLLLLTTWMDGRERPEAFCVPSPPPKTTVSIEASVSAKPTDPPGFVSSLPCYPLGQLKC

SEQ ID NO: 2074 - protein, 702 aa, Microglena sp.
NNNHSLSMGVVTNNGDDDDDLDIMVVKKTLNSLCMDVSRQQICSRIQSMVLVINHAVAEAYLFANFHITRCLDDVAFDVKQLPHLDRNFYYRCILAVSTSNVRKDTLGQSLKDSMVAFDALRPAGYLKVDVCQWGQVIADVSIQMATMACNSVWANVDRVVIKYLRLKHPSLKKHFNKIVKAVVQYPDSDIDKIIPAGLVHANLIKDVVRRLRDLLPLPRGKQFNTRAHLTMRLFHHVLTELGADLKEKTTKKRPRLFSILPRKSGFTISYVPISSMTLMKLLSMGDSPLESVRGDGRHDNHSMLWRKYFNVQGLETKGSRFDNRILSDGKGVSVQMKHQVGKDIAGEGGGDNAGYPKDASIEDCQDAYLRQGALRVGIDPGMTDIVTIASSDGRVESFSSARFSEAAGYNTSNRRTNKWNADTQDLVKSIPSSTTSSMHDMQDHVRGYHSALPTLLQHRANRGYRSMRFFRYVGKQKTIEKVCDLIAPKAQKKTIEEKVCDVIAPKAKKTVVGFGNWSNQGYGISRSCSGPVKAIRKCLSRRQNVLFKNVDERNTSCTCHGCFQKLVNMKADSVVWRRIQNEPPSLINGAPTTTTTTFEKQKTVVKNVKVHKVLHCRNTVKSASSNVRCGATWNRDVNAAKNLLLLLTTWMDGKERPEAFCVPSSSPTPKTTVSGEANVGAQPTDPHGSVSSLQLLSSGPA

SEQ ID NO: 2075 - protein, 332 aa, Microglena sp.
ASQNSMTINSKRHCPIWVSSFWVWILVGATSLQSRIWQTTKARHGSLHAELFTTSLVSRNRKNSKKKRFSDMIPRWESLRENGAALSTSRKDDISAYLKNYATFSDEWWRMALRRRESRDNFQRYIGKRKAMDSFWAGIKRNMKLDHPDLRVRVAYGSAITTLKATGPGEVAVPTGSMFASCKRLFKEEVHVTDEFKTTLMSWETGAKKECVYKIPSVQITTEGRIRLGYELLGHTPLKETPRVSYCDQLAVRVYCTRKQIQEKHRRGGLAPSLVDNNSIKRYPEVRGLRFSPETSTYSDRDRSSALTIARLHCMELLGQGRPLPFCRDACC

SEQ ID NO: 2076 - protein, 711 aa, Microglena sp.
GNCPLVWYHQNNNHSLSMGVVTNNGDDDDLDIMVVKKTLNSLCMDVSRQQICSRIQSMVLVINHAVAEAYLFANFHITRCLDDGDFDVKQLPHLDRNFYYRCILAVSISNVRNDTLDQSLKDSMVAFDALRPAGYVKVDVRPWGQVIADVSIQMATMACNSVWANVDRVVIKYLRLKHPSLKKHFKKIVKAVVQYPDSDIDKIIPAGLVHANLIKDVVRRLRDLLPLPRGKQFNTRAHLTMRLFHHVLTELGADLKEKTTKKRPRLFSILPRKSGFTISYVPISSMTLMKLLSMGDSPLESVRGDGRHENHSMLWRKYFNVQGLETKGSRFDNRILSDGKGVSVQMKHQVGKDIAGEGGGDNAGYPKDASIEDCQDAYLRQGALRVGIDPGMTDIVTIASSDGRVESFSSARFSEAAGYNTSNRRTNKWNADTQDLVKSIPSPTTSSMHDMQDHVRGYLSALPTLLQHQANRGYRSMRFFRYVGKQKTIEKVCDLIAPKAQKKTIEEKVCDVIAPKAKKTVVGFGNWSNQGYGISRSCSGPVKEIRKCLSRRQNVLFKNVDERNTSCTCHGCFQKLVNMKADSVVWRRIQNEPSALIVGAPTTTTTTFEKQKTVVKNVKVHKVLHCRNSVKSASSNVLCGATWNRDVNAAKNLLLLLTTWMDGKERPAAFCVPSSSPTPKTTVSGEANVGAQPTDPPGSVSSLQWLSSGPA

SEQ ID NO: 2077 - protein, 206 aa, Microglena sp.
YVGKQKTIEKVCDVIAPRAQTTVVGFGNWSNQGYGISRSCSGPIKEIRRCLSRRKNVLFKNVDERNTSCKCHGCFQRLVNMKADSVVWRGIFKESPIDGSITVEKQKMVVKNVKVHKVLHCRDSVKSASSNVRCGATWNRDVNAAKNLLLLLTTWMDGRERPEAFCVPSPPPKTTVSIEASVSAKPTDPPGFVSSLPCYPLGQLKC

SEQ ID NO: 2078 - protein, 803 aa, Microglena sp.
PRMEHVCDVCIKSSVMYKLCKMATKPPTVAKLKELLKLAEVAYSSKDKKDDIVRLCEDNGLIARPPPEYKTVEKMCVVKCALKKAMSLDDEEFGKFRGHVDQLVNVVSRMLRRSSLVLTFHVTRLMEGDLPIPNMYDMKDTYWKDWLRIGVDGVFPDEESRISYEAVKDVIGKVLGSDDPDYINSYPIYFDQVLNYAGHTLSTVVSNNAWVPLVPRLTRLTKATLNALGAPKTIRVYDVMRVIQQEIQEMASWPESVQEYVREVRVRLKVPDGSRLYDDYGKDMDFPTMVRFNYWMQTRLEAIGARRIRLMPIFNVQRAHVRLDMKTLVNLFRHVFPKDPNIVELSKWENVKDPDRFMLPLKPSVKKKKSCGLGEWEAYKLAQQKYDADVKDIKATDEYRHAKGRYDTLVNARKTVAGSFFKKPPVKTGWVFDCSICTDGVSFSMQYSKTVQVRVSDLKNESKRSRDEEGMSVSEQYDHKLKTTLPDMGIVVLGVDPGRSNIATVTYLADDKSKTWKLTRGAFYHKSGIKKQKKQQEKRFSDMIPRWESLRENGAALSTSRKDDISAYLKNYATFSDECRRMALRRRESRDNFQRYIGKRKAMDSFWAGIKRNMKLDHPDLRVRVAYGSAITKLKATGPGEVAVPTGSMFASCKRLFKEEVHVTDEFKTTLMSWETGAKKEFVYKIPSVQITTEGQIRLGYELLGHTPLKETPKVSYRDQLAVRVYCTRKKIQEKHRRGGLAPSLVDNNSIKRYPEVRGLRFSPETSTYSDRDRSSALTIARLHCMELLGQGRPLPFCRDACC

SEQ ID NO: 2079 - protein, 618 aa, Microglena sp.
QCIRNLHVLNIRMPCMATNVSVKLARPPMPLVSPGPSSVDGRIMARSGLQATNVSLTQAASKATSSSRKKNPAVVKSFSTHVCPHTNNNPTCSDSNCSCKPIFLTNIPDASKSLKSRTSDQGSTSSAQDFYEYWDSSRQDLYRQLLWLPKTGSQGLVLSSFNGFARSTPARSSFSITKTEPLKTSLEKTSCPSFKYIVADGTVEDATKSNAKFKLRTLKLKLNPTKAQKSMLAEFAGCSRFMYNKAVAARLGVGSTHKSVLRIRDRYVTNKVRGEGKMRNPYFKNRQWLLQCPKSVRQSAIKAALANIKACFSNLKAGNIKQFSAPSRRKKTELERGWVIEMDQKNVSKDGDKLFIFKDILGNMRYFGSKQLHKLMPEVNPIHDPKVHKSRFGEYFLVLSVAARDRRAERKPVHPDKVATASIDPGVRKTMVTYSPENEESFMLGQGQASDLVKLLLVHDKLQSRLDTEKTLRTKERMKIKMQMIRIRKRIFYLKKEFRDQTTNFLAARYDVLLVPQLETAKMTISAERELTTKVARQMLTLSHSVLFNRLKEKCKEYGTVFLHVLEHYTSQTCPMCGFLNKCGETYTCKNCQFTCDRDIVWAAGIFLKAVRTENPCS

SEQ ID NO: 2080 - protein, 664 aa, Microglena sp.
YYITKRKIVLTPLLMGVVQYKGDDDINISVVKKTLNSLCMDVSRHQISSRIQSMVLLINHAVTEAYLFANFHITRCLDDGDFDVKQLPHLDRNFYYRCLLAVSTSNVRKDTLGQSFNDTMVAFDALRPAEYVKVDGQSVWANVDRVVIKYLRLKHPSLKKHFKKIVKAVVQYPESKIDTIIPEGLVHAIHIKEVVSHLRAVFPLPRGKQFNTRAHLTMRLLHHVLTELGEVGRVDPKDKKTRKSHPRLFSILPRKNGFTISYVPISSMTFMKLLSMGDSPLESVSGDGRYENHTMLWRKYFNVQGLETKRSRFDNRILSDGKGVSVQMKQKGKEEVVEEGENAGYPKDANIVECKDAVGALRVGVDPGMTDIVTVASSAGRIESFSSARFSEVAGYNTSKRRTYKWNDETQDLVKSIPSPNTSNMSDLQDHVRAYLKALPILLQHRANKGYRSMRFFRYVGKQKTIEKVCDVIAPRAQTTVVGFGNWSNQGYGISRSCSGPIKEIRRCLSRRKNVLFKNVDERNTSCKCHGCFQRLVNMKADSVVWRGICKESPIDGSITVEKQKMVVKNVKVHKVLHCRDSVKSASSNVRCGATWNRDVNAAKNLLLLLTTWMDGRERHEAFCVPSPPPKTTVSIEASVSTKPTDPPGFVSSLPCYPLGQLKC

SEQ ID NO: 2081 - protein, 348 aa, Microglena sp.
KTYKNPRKEEGIKIAEKYDGSLKTILPDMGIVVLGVDPGRSNIATVTYLADDKNKTWTLTRGAFYHKSGIKKQTRQKELRFADMIPMWESLRENGAALSTSRTDKISAYLSNYAKFSEEWWRLALRRRKSRDNLQRYIGKRKVKDSFWAGIKRCMMKELPDMKVCVAYGSAITKLKPTGPGEVAVPTGAMFASCKRIFKEDVSVTDEFKTTLMSWETGKKKERVYKIPSVCSADVKLRLGGERFGHTKSKTMPKVADCDHLGVRLYNKRKGAQEKHRRGGFATSLVDSQKLIERYPEVRGLRFSPETCIYSDRDRSSALTIARLHCMELMGLGRPLPFAHSSSVVVDE

SEQ ID NO: 2082 - protein, 322 aa, Microglena sp.
NAGYPKDANIVECKDAVGALRVGVDPGMTDIVTVASSAGRIESFSSARFSEVAGYNTSKRRTYKWNDETQDLVKSIPSPNTSNMVDLQDHVRAYLKALPILLQHRADKGYRSMRFFRYVGKQKTIEKVCDVIAPRAQTTVVGFGNWSNQGSGISRSCSGPIKEIRRCLSRRKNVLFKNVDERNTSCKCHGCFQRLVNMKADSIVWRGVCKESPIDGSITVEKQKMVVKNVKVHKVLHCRDSVKSASSNVRCGATWNRDVNAAKNLLLLLTTWMDGRERPEAFCVPSPPKTTVSIEASVSAKPTDPPGFVSSLPCYPLDQLKC

SEQ ID NO: 2083 - protein, 251 aa, Microglena sp.
SPFHRLIRATCPTCRTMSELISKRSRSYLQHRANKGYRSMRLFRYVGKQKTIEKVCDCDCTKAQTTVVGFGQLGPTKGMVSVVHVLGPSKRSGGASHVVKNVLFKNVDERNTSCKCHGCFQRLVNMKADSVVWRGVCKESPIDGSITVEKQKMVVKNVKVHKVLHCRDSVKSASSNVRCGATWNRDVNAAKNLLLLLTTWMDGRERPEAFCVPSPPPKTTVSIEASVSAKPTDPPGFVSSLPCYPLGQLKC

SEQ ID NO: 2084 - protein, 467 aa, Microglena sp.
PCLCTTRYCRRPSKKNEKLKTKNIAHSRCCLTNLDSSLCRTFRFRKWPFSIWSTSATSIHARQTLLPKTIKEYGSASQTSRKWRQFLGSSVYRILTDGFAVSILMNKPTCLTCSMPADAFSTRAHEYVTTDEGGIVSFLDNVVVAAVDPGVTDIVTVTGLNGGTRSYSSAQYYRKGLIFKSQRQTDVWNLETADIVGGIIPDRDSSSSEQIGAYARFYMGAAPILLAHRASRGYRNLRFRRCCKKQKLIVEIADFVAPREKSAKVLVGFGDWKGLGATPISRRTCGPLQAIRFELRSEKTSSWRTSMSSEHLNDAAAVRTTFATWWHSLIVRSKTVQVGNVQKDPSGFIRFSTAKAVKAERHANRAVVCFTAEDLDRCERFQEHPDAYTSPSLWRERPLAFRRTRREVPRQPHPHPLILIWGHRRLNGLPKRLLGISSRTSSTCCTPQRCPKATICSLDDYKVSHFI

SEQ ID NO: 2085 - protein, 360 aa, Microglena sp.
RIWVTWWQANHHLQYRCGDIPPFVCWARDIVNGGIRSYSSAQYYRKGLIFKSQRQTDVWNLETADIVGGIIPDRDSSSSEQIGAYARFYMGAAPILLAHRASRGYRNLRFRRYCKKQKLIVEIADFVAPREKSAKVLVGFGDWKGLGATPISRRTYGPLQAIRFELRSLENVIMEDIDEFRTSQRCSCCENHLCNMVALTHRKKQDGTGWECTEGRKRIHKILHCKSSQSGAPRQHSGGMLHCGKTWDRDVNASRNILMLTLHQVFGRERPLAFCRDAPRSSSTTPPPPLILIWGHRRLNGLPKRLLGISSRTSSTCCTPQRCPKATICSLDEYKVCPTLFENNCKSGRLLFMQVLGEFN

SEQ ID NO: 2086 - protein, 552 aa, Microglena sp.
GARGNCEKIRKQYVGAIARYDGDRNLYSHASKKYLTNFNNHYRVHLSTWIKKFVYSKENRILAKEFKDEHGIDETVFHRYLLYDIHSWGVKEDLIAIHSLLPERTKMLLKIQHSIIGRDEINRQWLKSVSNSAKMIRYNVFINRYLEATEDEGYAKLVNIAPIPTVKHAFIMIDTDGLLGVLKDVGLVESLEKTLTNKEHWESVFDVENIRSTGKGVFTCTIDTDGVMACTHFLRAEKKKISIKDDGTAIKKQTKTLREFSESDPNVVVVANDPGRCNIAFLTWKKNKVEEKDKGGRKRKRHCEFGSKRLTRERYYVESGVFKSRGPTKKWLSNIQDCLDDLKDNSPKRTSLESFDAYVTVIVNHWDSRWGEMSKSRWGAQRLRLYGGKKRVLARFFNEVQADVGERKTIVIAYGSSKFAPGGKGELSVPTTSAFNAFSDRFKGRVAVIDEFRTTKIWHKDSTTVLQSVQSEKEGRTVRGLLWCSSTMENSKLFVNRDLNAAINIHNCFTMYPIRPGILARPKKYCKLEVVVGRKIDYKLTGSLQNAVSSEV

SEQ ID NO: 2087 - protein, 630 aa, Microglena sp.
MMETLMSISLPHLDRNFYYRCILAVSTSNVRKDTLGQSLKDSMVAFDALRPAGYLKVDVRQWGQVIADVSIQMATMACNSVWANVDRVVIKYLRLKHPSLKKHFNKIVKAVVQYPDSDIDKIIPAGLVHANLIKDVVRRLRDLLPLPRGKQFNTRAHLTMRLFHHVLTELGADLKEKTTKKRPRLFSILPRKSGFTISYVPISSMTLMKLLSMGDSPLESVRGDGRHENHSMLWRKYFNVQGLETKGSRFDNRILSDGKGVSIQMKHQVGKDIAGEGEGGGDNAGYPKDASIEDCQDASLRQGALRVGIDPGMTDIVTIASSDGRVESFSSARFSEAAGYNTSNRRTNKWNADTQDLVKSIPSPTTSSMQDHVRGYLSALPTLLQHRANRGYRSMRFFRYVGKQKTIEKVCDLIAPKAQKKTIEEKGCDVIAPKAKKTVVGFGNWSNQGYGISRSCSGPVKEIRKCLSRRQNVLFKNVDERNTSCTCHGCFQKLVNMKADSVVWRRVQNEPSTLIDGAPTTTTTTTFEKQKTVVKNVKVHKKLHCRNSVKSASSNVRCGATWNRDVNAAKNLLLLLTTWMDGKERPAAFCVPSSSPTPKTTVSGEANVGAQPTDPPGSVSSLQLLSSGPA

SEQ ID NO: 2088 - protein, 401 aa, Microglena sp.
HACERPKKQSQVPSSENHLSRMGGFFDCSICTDGVSLSMQYSKTVQVLVSDLKKTCKKPRKEEGIKIAEKYDGSLKTILPDMGIVVLGVDPGRSNIATVTYLADDKNKTWKLTRGAFYHKSGIKKQTRQKELRFADMIPMWESLRENGAALSTSRTDKISAYLSNYAKFSDEWWRLALRRRESRDNLQRYIGKRKVKDSFWAGIKRCMMKELPDMKVCVAYGSAITKLKPTGPGEVAVPTGAMFASCKRIFKEDVSVTDEFKTTLMSWETGKEKERVYKIPSVCSADVKLRLGGERFGHTKSKTMPKVADCDHLGVRLYNKRKGAQEKHRRGGFATSLVDSQKSIERYPEVRGLRFSPETCIYSDRDRSSALTIARLHCMELMGLGRPLPFAHSSSVVVDE

SEQ ID NO: 2089 - protein, 234 aa, Microglena sp.
ERGLQIERPTKKWLSNIQDCLDDLKDNSPKRTSLVSFDAYVTVMVNHWDSRWGEMSKSRWGAQRLRLYGGKKRVLARFFNEVQEDVGERKTIVVAYGSANFAPGGKGELSVPTTSAFKAFSDRFKGRVAVIDEFRTTKIWHKDSTTVLQSVQSEKEGRTVRGLLWCSSTMENSKLFVNRDLNAAINIHNCFTMYPIRPGILARPKKYCKLEVVVGRKIDYKLTGSLQNAVSSEV

SEQ ID NO: 2090 - protein, 622 aa, Microglena sp.
QCIRNLHVLDIRTPCMATNASVKMARPPMPLVSPPPSSVDGRIMARSERSGLQATNVSLTQAASKATSSSRKKNPAVVKSFSTHVCPHTNNNPTCSDSNCSCKPIFLRNIPDASKSLKSRTSDQGSTSSAQDFYEHWDSSRQDLYRQLLWLPKTGSQSLVSRSLNGFARSTPTRSSFSITKTEPLKTSLEKTSCPSFKYIVADGTVEDATKSNAKPKLRTLKLKLNPTKAQKSMLAEFAGCSRFMYNKAVAARLGVGSTHKSVFRIRDRYLTNKVRGEGKMPNPYFKNRQWLLQCPKSVRQSAIKSALANVKACFSNLKAGNIKQFSAPFRRKKTELERGWAIEMDQHNISKDGDKLFIFKDTLGNMRYFGSKQLHKLMPEENPTHDPKVQKSRFGAYFLVLSVAARDRRAERKPVHPDKVATASIDPGVRKTMVTYSPENEESFMLGQGQASDLVKLLLVHDKLQSRLDTEKTLRSKERMKIKKHMIRIRKRFFYLKKEFRDQTTNFLAARYDVLLVPQLETAKMTISAERELTTKVARQMLTLSHSVQFNRLKEKCAEYGTVFLHVLEHYTSQTCPMCGFLNKCGGETYTCKNCQFTCDRDIVGAAGIFLKAVRTENPCS

SEQ ID NO: 2091 - protein, 273 aa, Microglena sp.
DMEADTWCILPQVGYQEADKQKELRFADMIPVWESLRENGAALSTSRTDKISAYLSNYAKFSDEWWRLALRRRESRDNLQRYIGKRKIKDSFWAGIKRCMMKELPDMKVCVAYGSAITKLKPTGPGEVAVPTGAMFASCKRIFKEDVSVTDEFKTTLMSWETGKEKERVYKIPSVCSADVKLRLGGERFGHTKSKTMPKVADCDHLGVRLYNKRKGAQEKHRRGGFATSLVDSQKSIERYPEVRGLRFSPETAFTRTGIALLLSQSQGCTAWN

SEQ ID NO: 2092 - protein, 397 aa, Microglena sp.
TPEKQSQVPSSEKPPVKNGWVFDCSICTDGVSLSMQYSKTVQVLVSDLKKTCKKPRKEEGIKIAEKYDGSLKTILPDMGIVVLGVDPGRSNIATVTYLADDKNKTWKLTRGAFYHKSGIKKQTRQKELRFADMIPMWESLRENGAALSTSRTDKISAYLSNYAKFSDEWWRLALRRRESRDNFQRYIGKQKVKDSFWAGIKRCMMKELPDMKVCVAYRSAITKLKPTGPGEVAVPTGAMFASCKRIFKEDVSVTDEFKTTLMSWETGKEKERVYKIPSVCSADVKLRLGGERFGHTKSKTMPKVADCDHLGVRLYNKRKGAQEKHRRGGFATSLVDSQKSIERYPEVRGLRFSPETCIYSDRDRSSALTIARLHCMELMGLGRPLPFAHSSSVVVDE

SEQ ID NO: 2093 - protein, 252 aa, Microglena sp.
TDWCVRQILHGCRPNPSCPSCFQGYRNLRFRRYCKKQKLIVEIADFVAPRKKSAKVLVGFGDWKGLGATPISRRTCGPLQAIRFELRSRENVIMEDIDEFRTSQRCSCCENHLCNMVALTHRKKQDGTGWECTEGRKRIHKILHCKSSQSGAPRQQSGGMLHCGKTWDRDVNASRNILMLTLHQVFGRERPLAFRQDAPRSSSTTPPPPPDTDMGTQTVERFTKEDTRNIFENLFNLLHPPTLPKSNDLQSG

SEQ ID NO: 2094 - protein, 371 aa, Microglena sp.
TRYRSVVHYKYFLRSLRKVCNIYNVSKSHMSTRAHEYVTTDEGGIVSFLDNVVVAAVDPGVTDIVTVTGLNGGTRSYSSAQYYRKGLIFKSQRQTDVWNLETADIVGGIIPDRDSSSSEQIGAYARFYMGAAPILLAHRASRGYRNLRFRRYCKKQKLIVEIADFVAPREKSAKVLVGFGDWKGLGATPISRRTCGPLQAIRFELRSRENVIMEDIDEFRTSQQCSCCENHLCNMVALTHRKKQDGTGWECTEGRKRIHKILHCKSSQSGAPRQQSGGMLHCGKTWDRDVNASRNILMLTLHQVFGRERPLAFRRDAPRSSSTTPPPPPDTDMGTQTVERFTKEATRNIFENLFNLLHPPTLPKSNDLQSG

SEQ ID NO: 2095 - protein, 386 aa, Microglena sp.
KLKLNPTKAQKSMLAEFAGCSRFMYNKAVAARLGVASTHKSVFRIRDRYVTNKVRGEGKMPNPYFKNRQWLLQCPKSVRQSAIKAALANIKACFSNLKAGNIKQFSAPFRRKKTELERGWVIEMDQKNVSKDGDKLFIFKDILGNMRYFGSKQLHKLMPEVNPTHDPKVHKSRFGEYFLVLSVAARDRRAERKPVHPNKVATASIDPGVRKTMVTYSPENEESFMLGRGQASDLVKLLLVQQSRLDTEKTLRTKERMKIKMQMIRIRKRIFYLKKEFRDQTTNFLAARYDVLLVPQLETAKMTISAWELTTKVARQMLTLSHSVLFNRLKEKCEGYGTEFLHVLKHYTSQTCPMCGFLNKCGETYTCKNCQFTCDRDIVGAAGIFL

SEQ ID NO: 2096 - protein, 325 aa, Microglena sp.
NDIARYGYRRPGVDPGRSNIATVTYLADDKNKTWTLTRGAFYHKSGIKKQTRQKELRFADMIPMWESLRENGAALSTSKTDKISAYLSNYAKFSDEWWRLALRRRESRDNLQRYIGKRKVKDSFWGGIKRCMMKELPDMKVCVAYGSAITKLKPTRPGEVAVPTGAMFASCKRIFKEDVSVTDEFKTTLMSWETGKEKEHVYKIPSVCSADVKLRLGGERFGHTKSKTMPKVADCDHLGVRLYNKRKGAQEKHRRGGFATSLVDSQKSIERYPEVRGLRFSPETCIYSDRDRSSALTIARLHCMELMGLGRPLPFAPSSSVVVDE

SEQ ID NO: 2097 - protein, 651 aa, Microglena sp.
YINKVTVTNILLQCQMSGKKKQFTFQLERLLSLQGSTPKQFGKWLTRRKFFATEHLPGKEELICKIFKKCVVIIFMIKRSKLFKKKISSMLEYPLKSNWTIFLDKLNSSEDQNMIAIYLFKIYVQESISREKALQPFWTPAYKTISETLLLPIETDCVDSGLSSSNHWSQKQEEKLQFLTVQTKKLVNKSSQKIYCQSSMSSLVGKWANEAILEEKIKPLKTIQMKLFPTKKQKQILDEFINTSRYVSNKAIEYVDKGHKPHFQTLRDLLVTSNTKKNSNTYKKLSKEIEDLHTLKQDTVDQSDKQKIIEEIKTKNKIMRDEMKEIDYEKNHNLQGFETFTPKEIRANAVKSVCDAYKSAFTNLKNGNIKFFKMKYNTKKNSRQTVELAPSSISLNNGILRILPNTFKDDCVLKISNKNRKKHKNLTIKNNVDIVRHKGQYVIHILDTILNNIDNETNEYTMCGVDPGVRCFATTYSCSIKNNGEVSSYNTRDYTHRIDLLKKLNKKRRDIMERKAVRKKQYNKIEKKKKNIVDCLHWETINHVLKHNDFVFYGDIKSQDITKGNKNNTLNQDFNDLKFYIFKTRLEYKASVLKRKVVIMNECYTTKTCSNCGTLNNDVGSKKVFTCPICNLVAGRDANASKNILMKGLLS

SEQ ID NO: 2098 - protein, 530 aa, Microglena sp.
IYVQESISREKALQPFWTPAYKTISETLLLPIETDCVDSGLSSSNHWSQKQEEKLQFLTVQTKKLVNKSSQKIYCQSSMSSLVGKWANEAILEEKIKPLKTIQMKLFPTKKQKQILDEFINTSRYVSNKAIEYVDKGHKPYFQTLRDLLVTSNTKKNSNTYKKLSKEIEDLHTLKQGTVDQSDKQKIIEEIKTKNKIMRDEMKEIAYEKNHNLQGFETFTPKEIRANAVKSVCDAYKSAFTNLKNGNIKFFKMKYKTKKNSRQTVELAPSSISFNNGILRILPNTFQDDCVLKISNKNRKKHKNLTIKNNVDIVRHKGQYVIHILDTILNNIDNETNEYTMCGVDPGVRCFATTYSCSIKNNGEVSSYNTRDYTHRIDLLKKLNKKRRDIMERKAVRKKQYNKIEKKKKNIVDSLHWETIHHVLKHNDFVFYGDIKSQDITKGNKNSTLNQDFNDLKFYIFKTRLEYKASVLKRKVVIMNECYTTKTCSNCGTLNNDVGSKKVFTCPICNLVAGRDANASKNILMKGLLS

SEQ ID NO: 2099 - protein, 716 aa, Microglena sp.
PRMEHVCDVCIKSSVMYKLCKMATKPPTVAKLKELLKLAEVAYSSKDMKDDIVRLCEDNGLIARPPPEYKMVEKMCVVKCALKKAMSLDDEEFGKFRGHVDQLVNVVSRMLRRSSLVLTFHVTRLMEGDLPIPNMYDMKDTYWKDWLRIGVDGVFPDEESRISYEAVKDVIGKVLGSDDPDYIISYPIYFDQVLNYAGHTLSTVVSNNAWVPLVPRLTRLTKATLNALGAPKTIRVYDVMRVIRQEIQEMESWPESVQEYVREVRVRLKFPDGSRLYDDYGKDMDFPTMVRFNYWMQTRLEAMGARRIRLMPIFNVQRAHVRLDMKTLVNLFRHVFPKDPNIVELSKWENVKDPDRFMLPLKPAVKKKKSCGPGEWESYKLAQQKYDADVKDIKDTDEYRHAKGRYDTLVNAQKTVAGSFFKKPPVKTGWVFDCSICTDGVSLSMQYSKTVQVRVSDLKKTSKRSRDEEGMSVAKQYDHKLKTTLPDMGIVVLGVDPGRSNIATFTYLADDKSKTWKLTRGAFYHKSGIKKQKKQQEKRFSDMIPRWESLRENGAALSTSRKDDITAYLKKYATFSDEWWRMALRRRESRDNFQRYIGKRKAMDSFWAGIKRNMKLDHPDLRVRVAYGYAITKLKATGPGEVAVPTGSMFASCKRLFKEEVHVTYEFKTTLMSWETGAKKECVYKIPSVQITTDGQIRLGYELLGHTPLKETPKVS

SEQ ID NO: 2100 - protein, 640 aa, Microglena sp.
YESVKDVIGKVLGSDDPDYINSYPIYFDQVLNYAGHTLSTVVSNNAWVPLVPRLTRLTKATLNALGAPKTIRVYDMMRVIQQEIQEMESWPESVQEYVREVRVRLKVPDGSRLYDDYGKDMDFPTMVRFNYWMQTRLEAIGARRIRLMPIFNVQRAHVRLDMKTLVNLFRHVFPKYPNIVELSKWKNVKDPDRFMLPLKPAFKKKKSCGPGEWEAYKLSQQKYDTDVNDIKATDEYRHAKGRYDTLVNARKTVAGSFFKKPPVKTGWVFDCSICTDGVSLSMQYSKTVQVRVSDLKKTSKRSRDDEGMSVSEQYDHKLKTTLPDMGIVVLGVDPGRSNIATVTYLADDKSKTWKLTRGAFYHKSGIKKQKKQQEKRFLDMIPRWESLRENGAALSTTRKDDISAYLKKYATFSDEWWRMALRRRESRDNFQRYIGKRKAMDSFWAGIKRNMKLDHPDLRVRVAYGSAITTLKATGPGEVAVPTGSMFASCKRLFKDEVHVTDEFKTTLMSWETGAKKECVYKIPSVQITTEGQIRLGYELLGHTPLKETPKVSYRDQLAVRVYCTRKQIQEKHRRGGLAPSLVDNNSIKRYPEVRGLRFSPETSTYSDRDRSSALTIARLHCMELLGQGRPLPFCRDACC

SEQ ID NO: 2101 - protein, 670 aa, Microglena sp.
CKTKEMTILTSASSRRRLILCAWMYRGIRFSSRIQSMVLLINHAVAEAYLFANFHITRCLDDGDFDVKQLPHLDRNFYYRCLLAVSTSNVRKDTLGQSFNDTMVAFDALRPAGYVKVDVRPWGQVIADVSIQMATMACNSVWANVDRVVIKYLRLKHPSLKKNFKKIVKAVVQYPESKIDTIIPEGLVHAIHIKEVVSHLRALFPLPRGKQFNTRAHLTMRLFHHVLTELGEVGRVDPKDKKTRKSHPRLFSILPRKNGFTISYVPISSMTFMKLLSMGDLPLESVSGDGRYENHTMLWRKYFNVQGLETKRSRFDNRILSDGKGVSVQMKQKGKEEVVEEGENAGYPKDANILECKDAVGALRVGVDPGMTDIVAVASSAGRIESFSSARFSEVAGYNTSKRRTYKWNDETQDLVKSIPSPNTSNMSDLQDHVRAYLKALPILLQHRANKGYRSMRFFRYVGKQKTIEKVCDVIAPRAQTTVVGFGNWSNQGYGISRSCSGPIKEIRRCLSRRKNVLFKNVDERNTSCKCHGCFQRLVNMKADSVVWRGVCKESPIDGSITVEKQKMVVKNVKVHKVLHCRDSVKSASSNVRCGATWNRDVNAAKNLLLLLTTWMDGRERPEAFCVPSPPPKTTVSIEASVSAKPTDPPGLSAACLVILWASLNAEIQR

SEQ ID NO: 2102 - protein, 303 aa, Microglena sp.
KQVTSSSFQLRSEGRRQSLRGVGPLRWIRRTFPRMATNSSSSKTYWATCATSVAKQLHKLMPEENPTHDLKVQKSRFGKYFLVLSVAARDRRADRKPVHPDKVATASIDPGVRKKMVTYSPENEESFMLGQGQASDLVNLLLVHDKLQSRLDTEKTLRSKERMKIKMQMIRIRKRIFYLKKEFRDQTTNFLAARYDVLLVPQLETAKMTISAERELTTKVARQMLTLSHSVLFNRLKEKCEEYGTVFLHVLEHYTSQTCPMCGFLNKCGETYTCKNCQFTCDRDIVGAAGIFLKAVRTENPCW

SEQ ID NO: 2103 - protein, 272 aa, Microglena sp.
VAGYNTSKRRTYKWNDETQDLVKSIPSPNMSNMVDLQDHVRAYLEALPILLQHRANKGCRSMRFFRYVGKQKTIEKVCDVIAPRAQTTVVGFGNWSNQGYGISRSCSGPIKEIRRCLSRRKNVLFKNVDERNTSCKCHGCFQRLVNMKAVSVVWCGVCKESPIDGSITVEKQKMVVKNVKVHKVLHCRDSVKSASSNVRCGATWNRDVNAAKNLLLLLTTWMDGRERPEAFFVPSPPPKTAVSIEASVSAKPTDPPGFVSSLPCYPLGQLKC

SEQ ID NO: 2104 - protein, 479 aa, Microglena sp.
RDRIPPIPPLRYPLLGVKEDLIAIHSLLPERTKMLLKIQHSIIGRDEINRQWLKSVSNSAKMIRYNVFINRYLEATEDEGYAKLVNIAPIPTVKHSFITIDTDGLLGVLKDVGLVESLEKTLTNKEHWESVFDVENIRSTGKGVFTCTIDTDGVMACTHFLRAEKKKISIKDDGTAIKKQTKTLREFSESDPNVVVVANDPGRCNIAFLTWKKNKVEEKDNGGRKRKRHCEFGSKRLTRERYYVESGVFKSRGPTKKWLSNIQDCLDDLKDNSPKRTSLESFDAYVTVMVNHWDSRWGEMSKSRWGAQRLRLYGGKKRVLARFFNEVQADVGERKTIVIAYGSSKFAPGGKGELSVPTTSAFNAFRDRFKGRVAVIDEFRTTKIWHKDNTTVLQSVQSEKKGRTVRGLLWCSSTMENSKLFVNRDLNAAINIHNCFTMYPTRPGILARPKKYCKLEVVVGRTIDYKLTGSLQNAVSSEV

SEQ ID NO: 2105 - protein, 244 aa, Microglena sp.
TDWCLRQILHGCRPILLAHRASRGYRNLRFRRYCKKQKLIVEIADFVAPREKSAKVLVGFGDWKGLGATPISRRTCGPLQAIRFELRSRENVIMEDIDEFRTSQRCSCCENHLCNMVALTHRKKQDGTGWECTEGRKRIHKILHCKSSQSGAPRQQSGGMLHCGKTWDRDVNASRNILMLTLHQVFGRERPLAFRRDAPRSSSTTPPPDTDMGTQTVERFTKEATRNIFENLFNLSHAIACLPT

SEQ ID NO: 2106 - protein, 474 aa, Microglena sp.
GNCLTMRLFHHVLTELGADLKEKTTKKRPRLFSILPRKGGFTISYVPISSMTLMKLLSMGDSPLESVRGDGRHENHSMLWRKYFNVQGLETKGSRFDNRILSDGKGVSVQMKHQVGKDIAGEGGGDNAGYSKDASIEDCQDASLRQGALRVGIDPGMTDIVTIASSDGRVESFSSARFSEAAGYNTSNRRTNKWNADTQDLVKSIPSPTTSSMHDMQDHVRGYLSALPTLQHRANRGYRSMRFFRYVGKQKTIEKVCYLIAPKAQKKTIEEKVCDVIAPKAKKTVVGFGNWSNQGYGISRSCSGPVKEIRKCLSRRQNVLFKNVDERNTSCTCHGCFQKLVNMKADSVVWRRVQNEPSALIDGAPTTTTTFEKQKTVVKNVKVHKVLHCRNSVKSASSNVRCGATWNRDVNAAKNLLLLLTTWMDGKERPAAFCVPSSSPTPKTTVSGEANVGAQPTDPPGSVSSLQLLSSGPA

SEQ ID NO: 2107 - protein, 453 aa, Microglena sp.
PIFNNHYRVHLSTWIKKFVYSKENRILAKEFKDEHGIDETVFHRYLLYDIHSWGVKEDLIAIHSLLPERTKMLLKIQHSIIGRDEINRQWLKSVSNSAKMIRYNVFINRYLEATEDEGYAKLVNIAPIPTVKHSFITIDTDGLLGVLKDVGLVESLEKTLTNKEHWESVFDVENIRSTGKGVFTCTIDTDGVMACTHFLRAEKKKISIKDDGTAIKKQTKNLREFSESDPNVVVVANDPGRCNIAFLTWKKNKVEEKDNGGRKRKRHCEFGSKRLTRERYYVESGVFKSRGPTKKWLSNIQDCLDDLKDNSPKRTSLESFDAYVTVMVNHWDSRWGEMSKSRWGAQRLRLYGGKKRVLARFFNEVQADVGERKTIVIAYGSSKFAPGGKGELSVPTTSAFNAFRDRFKGRVAVIDEFRTTKIWHKDSTTVLQSVQSEKKGARFEACYGAVPPW

SEQ ID NO: 2108 - protein, 270 aa, Microglena sp.
LGRKIRSKKKIMGVGRGRGTASSGARDSRGSGTTLRAGSSNLEVRPRSGCLNIQDCLDDLKDNSPKRTSLESFDAYVTVMVNHWDSRWGEMSKSRWGAQRLRLYGGKKRVLARFFNEVQADVGERKTIVIAYGSSKFAPGGKGELSVPTTSAFNAFRDRFKGRVAVIDEFRTTKIWHKDSTTVLQSLKSEKKGRTVRGLLWCSSTMENSKLFVNRDLNAAINIHNCFTMYPTRPGILARPKKYCKLEVVVGRTIDYKLTGSLQNAVSSEV

SEQ ID NO: 2109 - protein, 686 aa, Microglena sp.
METIVNKEPPDKRTRPDRAAKIKDRKNGEENVVKCTLSRIIADKDNKDVITKVIKERVDSVSKRTYLAGVAVNRILKEVFEGVPDAQLHTVSVPSVDQNFIRQLMVGSRQAHMETRDATVERFFHNNYWFREKIEGREVIVKKKKQYVGAIARYDGDRNLYSHASKKYLTNFNNHYRVHLSTWIKKFVYSKENRILAKEFKDEHGIDETVFHRYLLYDIHSWGVKEDLIAIHSLLPERTKMLLKIQHSIIGQDEINQQWLKSVSNSAKMIRYNVFINRYLEATEDEGYAKLVNIAPIPTVKHSFITIDTDGLLGVLKDVGLVESLEKTLTNKEHWESVFDVENIRSTGKGVFTCTIDTDGVMACTHFLRAEKKNISIKDDGTAIKKQTKTLREFSESDPNVVVVANDPGRCNIAFLTWKKNKVEEKDNGGRKRKRHCEFGSKRLTRERYYVESGVFKSRGPTKKWLSNIQDCLDDLKDNSPKRTSLESFDAYVTVMVNHWDSRWGEMSKLRWGAQRLRLYGGKKRVLARFFNEVQADVGERKTIVIAYGSSRFAPGGKGELSVPTTSAFNAFRDRFKGRVAVIDEFRTTKIWHKDSTTVLQSVQSEKKGRTVRGLLWCSSTMENSKLFVNRDLNAAINIHNCFTMYPTRPGILARPKKYCKLEVVVGRTIDYKLTGSLQNAVSSEV

SEQ ID NO: 2110 - protein, 393 aa, Microglena sp.
TPEKTVAGSFFKKPHVKTGWVFDCSICTDGVSLSMQYSKTVQVRVSDLKKTSKRSRDDEGMSVSEQYDHKLKTTLPDMGIVVLGVDPGRSNIATVTYLADDKSKTWKLTRGAFYHKSGIKKQKKQQEKRFSDMIPRWESLRENGAALSTSRKDDISAYLKNYATFSDEWWRMALRRRESRDNFQRNIVKRKAMDSFWAGIKRNMKLDHPDLRVRVAYGSAITTLKATGPGEVAVPTGSMFASCKRLFKEEVHVTDEFKTTLMSWETGAKKECVYKIPSVQITTEGQIRLGYELLGHTPLKETPKVSYRDQLAVRVYCTRKQIQEKHRRGGLAPSLVDNNSIKRYPEVRGLRFSPETSTYSDRDRSSALTIARLHCMELLGQGRPLPFCRDACC

SEQ ID NO: 2111 - protein, 258 aa, Microglena sp.
WGRKRKRHCEFGSKRLTRERYYVESGVFKSRGPTKKWLSNIQDCLDDLKDNSPKRTSLESFDAYVTVMVNHWDSRWGEMSKSRWGAQRLRLYGGKKRVLARFFNEVQADVGERKTIVIAYGSSKFAPGGKGELSVPTTSAFNAFRDRFKGRVAVIDEFRTTKIWHKDSTTVLQSVQSEKKGRTVRGLLWCSSTMENSKLFVNRDLNAAINIHNCFTMYPTRPGILARPKKYCKLEVVVGRTIDYKLTGSLQNAVSSEV

SEQ ID NO: 2112 - protein, 577 aa, Microglena sp.
YHGCFRRPKTCRIREGGRSSLGTSNRRRLNTNGDDGVQQRLGKRGQGRYQVPALETSLSEETFQEDCQSGGPVPRIENRHNHPRGPRACDPHQRGCQSLEALFPLPRGKQFNTRAHLTMRLFHHVLTELGEVGRVDPKDKKTRKSHPRLFSILPRKNGFTISYVPISSMTFMKLLSMGDSPLESVSGDGRYENHTMLWRKYFNVQGLETKRSRFDNRILSDGKGVSVQMKQKGKEEVVEEGENAGYPKDAGYPKDAGYPKDANIVECKDAVGAPRVGVDPGMTDIVTVASSAGRIESFSSARFSEVAGYNTSKRRTYKWNDETQDLVKSIPSPNTSNMSDLQDHVRAYLKALPILLQHRANKGYRSMRFFRYVGKQKTIEKVCDVIAPRAQTTIVGFGNWSNQGYGISRSCSGPIKEIRRCLSRRKNVLFKNVDERNTSCKCHGCFLRLVNMKADSVVWRGICKESPIDGSITVEKQKMVVKNVKVHKVLHCRDSVKSASSNVRCGATWNRDVNAAKNLLLLLTTWMDGRERPEAFCVPSPPPKTTVSIEASVSAKPTDTPGFVSSLPCYPLGQLKC

SEQ ID NO: 2113 - protein, 299 aa, Microglena sp.
HQAVLAPFRRKKTELERGWVIEMDQKNVSKDGDKLFIFKDILGNMRYFGSKQLHKLMPEVNPTHDPKVHKSRFGEYFLVLSVAARDRRAERKPVHPDKVATASIDPGVRKTMVTYSPENEESFMLGQGQASDLVKLLLVHDKLQSRLDTEKTLRTKERMKIKMQMIRIRKRIFYLKKEFRDQTTNFLAARYDVLLVPQLEMAKMTISAERELTTKVARQMLTLSHSVLFNRLKEKCEEYGTVLLHVLEHYTSQTCPMCGFLNKCGETYTCKNCQFTCDRDIVGAAGIFLKAVRTENPCS

SEQ ID NO: 2114 - protein, 219 aa, Microglena sp.
TNLPFRGYLDTWNFVNTFLLGTGFLRHESRLELICHMNLLFEEALAGSEHRSRRHSYLSWSGSLQSRKNVLFKNVDERNTSCKCHGCFQRLVNMKADSVVWRGVCKESPIDGSITVEKQKMVVKNVKVHKVLHCRDSVKSASSDVRCGATWNRDVNAAKNLLLLLTTWMDGRERPEAFCVPSPPPKTTVSIEASVSAKPTDPPGFVSSLPCYPLGQLKC

SEQ ID NO: 2115 - protein, 236 aa, Microglena sp.
MISPETRYRSVVHYKYFLRSLRKVCNIYNVSKSSLHRWVNADQVGKSKRLKRKRKELSMLLRSTISNNIELRSRGNVIMEDVDEFRTSQRCSCCENRLCNMVALTHRKKQDGTGWECTEGRKRIHKILHCKSSQSGAPRQQNSGRLHCGKTWDRDVNASRNILMLTLHQVFGRERPLAFRRDVPRSSSRTPPPPDTDMGTQTVERFTKEATRNIFENLFNLLHPPTLPKSNDLQSG

SEQ ID NO: 2116 - protein, 364 aa, Microglena sp.
SGTTSFINRYLEATEDEGYAKLVNIAPIPTVKHAFITIDTDGLLGVLKDVGLIESLEKTLKNKEHWESVFDVENIRSTGKGVFTCTIDTDGVMACTHFLRAEKKNISIKDDGTAIKKQTKTLREFSESDPNVVVVANDPGRRNIAFLTWKKHKVEEKDKGGRKRKRKRHCEFGSKRLTRERYYVESGVFKSRGPTKKWLSNIQDCLDDLKDNSPKRTSLVSFDAYVTVMVNHWDSRWGEMSKSRWGAQRLRLYGGKKRVLARFFNEVQEDVGERKTIVVAYGSANFAPGGKGELSVPTTSAFKAFSDRFKGRVAVIDEFRTTKIWHKDSTTVLQSVQSEKRRAHGSRLAMVQFHHGEQQVVCKP

SEQ ID NO: 2117 - protein, 332 aa, Microglena sp.
ASQNSMTINSKRHCPIWVSSFWVWILVGATSLQSRIWQTTKARHGSIHAELFTTSLVSRNRKNSKKNVFSDMIPRWESLRENGAALSTSRKDDISAYLKNYATFSDEWWRMALRRRESGDNFQRYIGKRKAMDSFWAGIKRNMKLDHPDLRVRVAYGSAITKLKATGPGEVAVPTGSMFASCKRLFKEEVHVTDEFKTTLMSWETGAKKECVYKIPSVQITTEGQIRLGYELLGHTPLKETPKVSYRDQLAVREYCTRKKIQEKHRRGGLAPSLVDNKSIKRYPEVRGLRFSPETSTYSDRDRSSALTIARLHCMELLGQGRPLPFCRDACC

SEQ ID NO: 2118 - protein, 676 aa, Microglena sp.
VTYLLWKMETKPQTIAHLKDLLKLADVPYTSKSKKDDLVRLCEDNGLIPTEYKAVEKMCVVKCALKKAMNLDEEEFGGFRGHVDQLVNVVSRMFRRSSLVLAFHVTRLMEGDLPIPDMYEMKDTYWKNWLRIGVDGVFPDEESRISYESVKDVIGKVLDNDDSEYIKSYPLYFDQVLNYAGHTLSTVVSNNAWVPLVPRLIRLTKATLKALEAPNTIRVYDVMRVIRQEVQEMESWPDSVQKYVREVRARLKVPDGDRLYDDYGKCVDFQTMVRFNYWMQTRLETMGERRIRLMPIFSVHRVHVRLDLKTLVKLFKHNFPKDPNIVELSKWEHVKNPGDFMLPQRPAQKKKRSCGPGEWEAYKSALKQYDDDVKDIKATDEYRHAKGLYDTLVNARKTVAGSFFRKPPVKNGWVFDCSICTDGVSLSMQYSKKVQVRVSDLKKTSMRSRDNEGLSVAEQYDRKLETTLTEMGIVVLGVDPGRSNIATVTYLAKGKSKTWKLTRGAFYHKSGIKKQKKQQGKRFSDKIPRWESLRENGAALSTSRKDDISAYLKNYATFSDAWWRMALRRRESRDNFQRYIGKRKAMDSFWAEIKRNMKLDHPDLRVRIAYGSAIKTMKATGPGEVAVPTGSMFASCKRLFKEEVHVTDEFKTTLMSWETGAKKECVYKIPSVQITT

SEQ ID NO: 2119 - protein, 518 aa, Microglena sp.
PIFLTNIPDASKSLKSRTSDQGSTSSAQDFYEYWDSSRQDLYRQLLWLPKTGTQGLVSSSFNGFAHSTPTRSSFSITKTEPLKTSLEKTSCPSFKYIVTDGTVEDATKSNAKPKLRTLKLKLNPTKAQKSMLAEFAGCSRFMYNKAVAARLGVGSTHKSVFQIRDRYVTNKVRGEGKMPNPSFKNRQWLLQCPKSVRQSAIKAALANIKACFSNLKAGNIKQFSAPFRRKKTELERGWAIEMDQKNVSKDGDKLFIFKDILGNMRYFGSKQLHKLMPEENLTHDPKVKKSRFGEYFLVLSVAARDRRAEQKPVHPDEVATASIDPGVRKTMVTYSPENEESFMLGQGQASDLVKLLLVHDKLQSSLDTEKTLRSKERMKIKKHMIRIRKRIFYLKKEFRDQTTNFLAARYDVLLVPQLETAKMTISAERELTTKVARQMLTLSHSVLFNRLKEKCAEYGTVFLHVLEHYTSQTCPMCGFLNKCGEIYTCKNCQFTCNRDIVGAAGIYLKAVRTENPCS

SEQ ID NO: 2120 - protein, 565 aa, Microglena sp.
YHGCFRRPKTCRLREGGRSSLGQVIADVSIQMATMACNSVWANVDRVVIKYLRLKHPSLKKHFKKIVKAVVQYPESKIDTIIPEGLVHAIHIKEVVSHLRALFPLPRGKQFNTRAHLTMRLFHHVLTELGEVGRVDPKDKKTKKSHPCLFSILPRKNGFTISYVPISSMTFMKLLSMGDSPLESVSGDGRYENHTMLWRKYFNVQGLETKRSRFDNRILSDGKGVSVQMKQKGKEEVVEEGENAGYPKDANIVECKDAVGALRVGVDPGMTDIVTVASSAGRIESFSSARFSEVAGYNTSKRCTYKWNDETQDLVKSIPWPNTSNMVDLQDHVRAYLKALPILLQHRANKGYRSMRFFRYVGKQKTIEKVCDVIAPRAQTTVVGFGNWSNQGYGISRSCSGPIKEIRRCLSRRKNVLFKNVDKRNTSCKCHGCFQRLVNMKADSVVWRGVCKESPIDGSITVEKQKMVVKNVKVHKVLHCRDSVKSASSNVRCGATWNRDVNAAKNLLLLLTTWMDGREQPEAFCVPSPPPKTTVSILASVSAKPTDPPGFVSSLHCYPLGQLKR

SEQ ID NO: 2121 - protein, 506 aa, Microglena sp.
RNISRRLSKRWSSTQNRKIDTIIPEGLVHAIHIKEVVSHLTALFPLPRGKQFNTRAHLTMRLFHHVLTELGEVGRVDPKDKKTKKSHPCLFSILPRKNGFTISYVPISSMTFMKLLSMGDSPLESVSGDGRYENHTMLWRKYFNVQGLETKRSRFDNRILSDGKGVSVQMKQKGKEEVVEEGENAGYPKDANIVECKDAVGALRVGVDPGMTDIVTVASSAGRVESFSSARFSEVAGYNTSKRRTYKWNDETQDLVKSIPSPNTSNMVDLQDHVRAYLKALPILLQHRANKGYRSMRLFRYVGKQKTIEKVCDVIAPRAQTTVVGFGNWSNQGYGISRSCSGPIKEIRRCLSRRKNVLFKNVDERNTSCKCHGCFQRLVNMKADSVVWRGVCKESPIDGSITVEKQKMVVKNVKVHKVLHCRDSVKSASSNVRCGATWNRDVNAAKNLLLLLTTWMDGRERPEAFCVPSPPPKTTVSIEASVSAKPTDPPGFVSSLPCYPLGQLKC

SEQ ID NO: 2122 - protein, 231 aa, Microglena sp.
KKHKNLTIKNNVDIVRHKGQYVIHILDTILNNIDNETNEYTMCGVDPGVRCFATTYSCSIKNNGEVSSYNNRDYTHRIDLLKKLNKKRRDIMERKAVRKKQYNKIEKKKKNIVDCLHWETIHHVLKHNDFVFYGDIKSQYITKGNKNNTLNQDFNDLKFYIFKTRLEYKASVLKRKVVIMNECYTTKTCSNCGTLNNDVGSKKVFTCPICNLVAGRDANASKNILMKGLLS

SEQ ID NO: 2123 - protein, 488 aa, Microglena sp.
HGCFRRSQACRLLKGGRSSMGTGNRRRLNTNATMACNSVWANVDRVVIKYLRLKHPSLKKHFNKIVKAVVQYPESDIDKIIPASLVHANLIKDVVRRLRDLLPLPRGKQFNTRAHLTMRLFHHVLTELGADLKRKQQKKRPRLFSILPRKSGFTISYVPISSMTLMKLLSMGDSPLESFRGDGRHENHSMLWRKYFNVQGLETKGSRFDNRILSDGKGVSVQMKHQASEDVAVDNAGYPKDAILEDCQDASLRVGVDPGMTDIVTVASSAGRVESFSSARFSEAAGYNTSNRRTNKWNVDTQDLVKSIPSPTTSSMHDMQDHVRGYLSALPTLLQHRANRGYRSMRFFRYVGKQKTIEKVCDLIAPKAQKKTIEEKVCDVIAPKAKTTVVGFGNWSNQGYGISRSCSGPVKEIRKCLSRCQNVLFKNVDERNTSCTCHGCFQKLVNMKADSVVWRRVQNEPSALIDGLLQQQQTTTTFEKQKDGGEER

SEQ ID NO: 2124 - protein, 626 aa, Microglena sp.
STTQLQRHTYSQTFISQDASMMETLTSKQLPHLDRNFYYRCLLAVLTSNVRKDTLGQSFNDTMVAFDALRPAGYVKVDVRPWGQVIADVSIQMATMACNSVWANVDRVVIKYLRLKHPSLKKHFKKIVKAVVQYPESKIDTIIPEGLVHAIHIKEVVSHLRALFPLPRGKQFNTRAHLTMRLFHHVLTELGEVGRVDPKDKKNKKSHPRLFSILPRKNGFTISYVPISSMTFMKLLSMGDSPLESVSGDGRYENHTMLWRKYFNVQGLETKRSRFDNRILSDGKGVSVQMKQKGKEEVVEEGENAGYPKDANIVECKDAVGALRVGVDPGMTDIVTVASSAGRITSFSSARFSKVAGYNTSKRRTYKWNDETQDLVKSIPSPNTSNMVDLQDHVRAYLKALPILLQHRANKGYRSMRFFRYVGKQKTIEKVCDVIAPRAQTTVVGFGNWSNQGYGISRSCSGPIKEIRRCLSRRKNVLFKNVDERNTSCKCHGCFQRLVNMKADSVVWRGVCKESPIDGSITFEKQKMVVKNVKVHKVLHRRDSVKSASSNVRCGATWNRDVNAAKNLLLLLTTWMDGRERPEAFCVPSPPPKTTVSIEASVSAKPTDPPGFVSSLPCYPLGQLKC

SEQ ID NO: 2125 - protein, 311 aa, Microglena sp.
LGEVGRVDPKNKKTKKSHPRLFSILPRKNGFTILYVPISSMTFMKLLSMGDSPLESVSGDGRYENHTMLWRKYFNVQGLVTKRSRFDNRILSDGKGVSVQMKQKGKEEVVEEGENAGYPKDANIVECKDAVGALRVGVDPGMTDIVTVASSAGRIESFSSARFSEVAGYNTSKRRTYKWNDETQDLVKSIPSPNTSNMVDLQDHVSAYLKALPILLQHRANKGYRSMRFFRYVGKQKTIEKVCDVIAPRAQTTVVGFGNWSNQGYGISRSCPGPIKEIRRCLSRRKNVLFKNVDERNTSCKCHGCFQSLST

SEQ ID NO: 2126 - protein, 304 aa, Microglena sp.
QDSTEGTRSYSSAKYYRKGLIFKSQRQTDVWNLETADIVGGIIPDRDSSSSEQIGAYARFYMGAAPILLAHRASRGYRNLRFRRYCKKQKLIVEIADFVAPRKKSAKVLVGFGDWKGLGATPISRRTCGPLQAIRFELRSRENVIMEDIDEFRTSQRCSCCENHLCNMVALTHRKKQDGTGWECTEGRKRIHKILHCKSSQSGAPRQQSGGMLHCGKTWDRDVNASRNILMLTLHQVFGRERPLAFRRDAPRSSSTTPPPPPDTDMGTQTVERFTKEDTRNIFENLFNLLHPPTLPKSNDLQSG

SEQ ID NO: 2127 - protein, 345 aa, Microglena sp.
GKGKMPNPYFKNRQWLLQCPKSVRQSAIKSALANIKACFSNLKAVTSSSFHLRSDGRRQSLRGVGSLRWIRRTFPRMATNSSSSKKYWATCATSVANNSISLMPEENPTHDPKVQKSRFGEYFLVFSVAARDRRAERKPVNPDKVATASIDPGVRKTMVTYSPENEESFMLGQGQASDLVKLLLVHDKLQSRLDTEKTLRSKERMKIKKLMIRIRKTIFYLKKEFRDQTTNFLAARYDVLLVPQLETAKMTISAERELTTKVARQMLTLSHSVLFNRLKEKCEEYGTVFLHVLEHYTSQTCPMCGFLNKCGETYTCKNCQFTCDRDIVGAAGIFLKAVRTENPCS

SEQ ID NO: 2128 - protein, 335 aa, Microglena sp.
KRKQQKKRPRLFSILPRKSGFTISYVPISSMTLMKLLSMGDSPLESVRGDGRHENHSMLWRKYFNVQGLETKGSRFDNRILSDGKGVSVQMKHQVGKDIAGEGGGDNAGYPKDASIEDCQDASLRQGALRVGIDPGMTDIVTIASSDGRVESFSSARFSEAAGYNTSNRRTNKWNADTQDLVKSIPSPTTSSMHDMQDHVRGYLSALPTLLQHRANRGYRSMRFFRYVGKQKTIEKVCDVIAPKAKKTVVGFGNWSNQGYGISRSCSGPVKEIRKCLSRRQNVLFKKRRRTQHFLYLPRLLPEARQHEGRQRRLAQSSKRALRPHRRGSYNNNNV

SEQ ID NO: 2129 - protein, 400 aa, Microglena sp.
HARERRKTVAGSFFKKPPVKTGWVFDCSICTDGVSLSMQYSKTVQVRVSDLKKTSKRSRDEEGMSVAEQYDHKLKTTLPDMGISFWVWILVGATSLQSRIWQTTKSKTWKLTRGAFYHKSGIKKQKRQQEKRFTDMIPMWASLRENGAALSTSRMDDISVYLSNYATFSDEWWRLALRCRESRDNLQRYIGKRKAMDSFWAGIKRNMMMDHPDLRVRVAYGSAITKLKATGPGEVAVLTGSMFASCKRIFKEEVRVTDEFKTTLMSWETGAKKECVYNIPSVTLNAEGQISIGDEWLLCHTLLKKPPKVAERDQSAVRVYCTRKKIQEKHRRGGLATSLFDVNKSIKRYPEVRGLRFSPETSTYSDRDRSSALTIARLHCMELLGLGRPLPFSRCKAACC

SEQ ID NO: 2130 - protein, 219 aa, Microglena sp.
EVRLPHCDRRLCSQYILMNKPTCLTCSMPGDAFSTRAHEYMTTDEGGILSFRDNVVVAAVDPGVTDIVTVTGLDGSPNLYSSAQYYRKGLIFKSQRQTDVWNLETADIFGDVIPDRDSPMSRQIGAYARFYMGAAPILLAHRASRGYRNLRFRRYCKKQKLIVEIADFVAPREKSTKVLVGFGDWKGLGATPISRRTCGPLQAIRFELRSRENVIMEGR

SEQ ID NO: 2131 - protein, 260 aa, Microglena sp.
TDWCVRQILHGCRPNPSCPSCFQGYRNLRFRRYCKKQKLIVEIADFVAPREKSAKVLVGFGDWKGLGATPISRRTCGPLQAIRFELRSRENVIMEDIDEFRTSQRCSCCENHLCNMVALTHRKKQDGTGWECTEGRKRIHKILHCKSSQSGAPRQQSGGMLHCGKTWDRDVNASRNILMLTLHQVFGRERPLAFRRDAPRSSSTTPPPPLILIWGHRRLNGLPKRLLGISSRISSTCCTPQRCPKATICSLDDYKVSHFI

SEQ ID NO: 2132 - protein, 418 aa, Microglena sp.
HARERPKNSRRFLLQETTCQDGWVFDCSICTDGVSLSMQYSKTVQVRVSDLKKTSKRSRDEEGMSVSEQYDHKLKTTLSDMGIVVLGVDPGRSNIATVTYLAEDKSKTWKLTRGAFYHKSGIKKQKKQQEKRFSDMIPRWESLRENGAALSTSRKDDISAYLKNYATFSDEWWRMALRRRESRDNFQRYIGKRKAMDSFWAGIKRNMKLDHPDLRVHVAYGSAITKLKATGPGEVAVPTGSMFASCKRLFKEEVHVTDEFKTTLMSWETGAKKECVYKIPSVQITTEGRIRLGYELLGYTPLKETPKVSYRDQLAVRVYCTRKKIQEKHRTGGLAPSLVDNNSIKRYPEVRGLRFSPETSTYSDRDRSSALTIARLHCMELLGQGRPLPFCRDACCWATKKHDGVPLQCGLLHHKVTP

SEQ ID NO: 2133 - protein, 274 aa, Microglena sp.
SSSLSVKLTFGTSRRLTSRHITEQIGAYARFYMGAAPILLAHRASRGYRNLCFRRYCKKQKLIVEIADFVAPREKSAKVLVGFGDWKGLGATPISRRTCGPLQAIRFELRSRGNVIMEDVDEFRTSQRCSCCENRLCNMVSLTHRKKQDGTGWECTEGRKRIHKILHCKSSLSGAPRQQSGGRLHCGKTWDRDVNASRNILMLTLHQVFVRERPLAFRRDAPRRSSKTPPPPDTDMGTQTVERFTKEATRNIFENLFNLLHPPTLPKSNDLQSG

SEQ ID NO: 2134 - protein, 234 aa, Microglena sp.
LMPEENPTHDPKVQKSRFGEYFLVLSVAARDRRAERKPVHPDKVATASIDPGVRKTMVTYSPENEESFMLGQGHASALVKLLLVHDKLQSRLDTEKTLRSKERMKIKKQMIRIQKIIFYLKKEFRDQTTNFLAARYDVLLVPQLETAKMTISAERELTTKVARQMLTLSHSVLFNWLKEKCEEYGTVFLHVLEHYSSQTCPMCGFLNKCGGETYTCKNCQFTCDRDIVGAAGSS

SEQ ID NO: 2135 - protein, 755 aa, Microglena sp.
PRMEHVCDVCIKSSVMYKLCKMATKPPTVAKLKELLKLAEVAYSSKDKKDDIVRLCEDNGLIARPPPEYKTVEKMCVVKCALKKAMSLDDEEFGKFREHVDQLVNVVSRMLRRSSLVLTFHVTRLMEGDLPIPNMYDMKDTYWKDWLRIGVDGVFPDEESRISYEAVKDVIGKVIGSDDPDYINSYPIYFDQVLNYAGHTLSTVVSNNAWVPLVPRLTRLTKATLNALKAPKTIRVYDVMRVIQQEIQEMESWPESVQEYVREVRVRLKVPDGSRLYDDYGKDMDFPTMVRFNYWMQTRLESIGARRIRLMPIFNVQRAHVRLDMKTLVNLFRHVFPKDPNIVELSKWKDVKDPDRFMLPLKPAVKKKKSCGPGEWEAYKLAQQKYDADVNDIKDTDEYRHAKGRYDTLVNARKTVAGSFFKKPPVKTGWVFDCSICTDGVSLSMQYSKTVQVRVSDLKKKSKRSRDDEGMSVSEQYDHKLKTTLPDMGIVVLGVDPGRSNIATVTYLADDKSKTWKLTRGAFYHKSGIKKQKKQQEKRFSDMIPRWESLRENGAALSTSRTDDISAYLKNYDTFSDEWWRMALLRRESRDNFQRYIGKRKAMDSFWAGIKRNMKLDHPDLRVRVAYGSAITTLKATGPGEVAVPTGSMFASCKRLFKEEVHVTDEFKTTLMSWETGDKKECVYKIPSVQITTEGQIRLGYELLGHTPLKETPKVSYRDQLAVRVYCTRKQIQEKTQGGWLSPLSCRQQLDQSVP

SEQ ID NO: 2136 - protein, 356 aa, Microglena sp.
ISLRVLTCSMPADAFSTRAHEYVTTDEGGIVSFLDNVVVAAVDPGVTDIVTVTGLNGGTRSYSSAKYYRKGLIFKSQRQTDVWNLETADIVGGIIPDRDSSSSEQIGAYARFYMGAAPILLAHRASRGYRNLRFRRYCKKQKLIVEIADFVAPRKKSAKVLVGFGDWKGLGATPISRRTCGPLQAIRFELRSRENVIMEDIDEFRTSQRCSCCENHLCNMVALTHRKKQDGTGWECTEGRKRIHKILHCKSSQSGAPRQQSGGMLHCGKTWDRDVNASRNILMLTLHQVFGRERPLAFRRDAPRSSSTTPPPPPDTDMGTQTVERFTKEATRNIFENLFNLLHPPTLPKSNDLQSG

SEQ ID NO: 2137 - protein, 340 aa, Microglena sp.
RRRYQDRRKYDGSLKTILPDMGIVVLGVDPGRSNIATVTYLADDKNKTWTLTRGAFYHKSGIKKQTRQKELRFADMISMWESLRENGAALSTSRTDKISAYLSNYAKFSDEWWRLALRRRESRDNLQRYIGKRKVKDSFWAGIKRCMMKELPDMKVCVAYGSAITKLKPTGPGEVAVPTGAMFASCKRIFKEDVSVTDEFKTTLMSWETGKEKERVYKIPSVCSADVKLRLGGERFGHTKSKTMPKVADCDHLGVRLYNKRKGAQEKHRRGGFATSLVDSQKSIERYPEVRGLQFSPETCIYSDRDRSSALTIARLHCMELMGLGRPLPFAHSSSVVVDE

SEQ ID NO: 2138 - protein, 568 aa, Microglena sp.
SIKSLRTSVRDRTGRPKLRTGKRRQENVVKCTLSRIIADKDNKDVITKVIKDRVDSVSKRTYLAGVAVNRILKEVFEGVPDAQLHTVSVPSVDQNFIRQLMVGSRQAHMETRDATVERFFHNNYWFREKIEGREVIVKKKKQYVGAIARYDGDRNLYSHASKKYLTNFNNHYRVHLSTWIKKFVYSKENRILAKEFKDEHGIDDIVFHRYLLYDIHSWGVKEDLIAIHSLLPERTKMLLKIQHSIIGRDEINRQWLKSVSNSAKMIRYNVFINRYLEATEDEGYAKLVNIAPIPTVKHSFITIDTDGLLGVLKDVGLVESLEKTLTNKEHWESVFDVENIRSTGKGVFTCTIDTDGVMACTHFLRAEKKKISIKDDGTAIKKQTKTLREFSESDPNVVVVANDPGRCNIAFLTWKKNKVEEKDKGGRKRKRHCEFGSKRLTRERYYVESGVFKSRGPTKKWLSNIQDCLDDLKDNSPKRTSLESFDAYVTVMVNHWDSRWGEMSKSRWGAQRLRLYGGKKRVLARFFNEVQADVGEWKTIVIAYGSSKFAPGGKGELSVPTTSAFQCV

SEQ ID NO: 2139 - protein, 265 aa, Microglena sp.
ACSTARQYRFRVSDLKKTSKRSRDDEGMSVSEQYDHKLKTTLPDMGIVVLGVDPGRSNIATVTYLADDKSKTWKLTRGAFYHKSGIKKQKKQQEKRFSDMIPRWESLRENGAALSTSRTDDISAYLKNYDTFSDEWWRMALLRRESRDNFQRYIGKRKAMDSFWAGIKRNMKLDHPDLRVRVAYGSAITTLKATGPGEVAVPTGSMFASCKRLFKEEVHVTDEFKTTLMSWETGAKKECVYKIPSVQITTEGQIRLGYELLGHTH

SEQ ID NO: 2140 - protein, 389 aa, Begonia darthvaderiana
AVDIRQLIHYNACINFAKIICMKTLKLRIRDKHTDQLNRLSGSVNFVWNYVNDLSYRHLQKTGKFFSAYDLNEYTKGSGELLGLHSQTIQAINETHAKARKQFKKAKLSWRTNNPNSKRKSLGWLPFKQSAIKHIATHQTSKKGLKSTLQLSLAKGQKLVIDLWDSYNLSLYQINTLEIVQDSRNRWYACITVKDYPKQSCGTGSIGVDLGLKDSATASNGDKLQIKQTLKYAKQLAIAQRSNNKKRIKAIHAKIKNTRQDLIHKFTTQLVKANALIVVGDVRTSQFNSKKGKLAKSVYDAGWFELKRQLTYKCENAGCRFEIVNEKYTTQTCSCCGQIDRNSPKGRAGLRIREWTCAMCGTWHDRDINASRNILAVGLDRLGAGIPER

SEQ ID NO: 2141 - protein, 357 aa, Begonia darthvaderiana
NTTMKTLKIRIKDSNQTKLLCQLASEVNLVWNYCNELGFKYLQRTGKFLSAYDIDKYTAGASKECGLHSQTIQAISNEYVTRRKQFKKSKLSWRVSNPKSAKRSLGWIPFKKSAIKYGKGFIQYGKNIFKLWDSYNLSQFDIHTGSFVQDSRGRWYVCVTVDTPKQLPNQATKAIGIDLGLKDLATCSDGTKISNPKYHSHYQAKLGKSQRANKKRLVRTLHAKIKNSRKDYLQKQSTQLVKDNGLIVVGSLSANKLTKTKMAKSVNDTGFSAFKTMLKYKCENAGVWFVEVSENYTTQICSCCGQIDSNSPKGRTNLGIREWTCAKCGTWHDRDINASKNILRLGHQTLAGGIPSL

SEQ ID NO: 2142 - protein, 413 aa, Triops longicaudatus
KINKSTMANTAYKYRLIPTTDQEKQLSQLAGATRWLWNYMLDLNTKQYAIDKKFIFKYELNRLIPELKKTHEWLKLPPSQSLQAVGFDLDRALQSVWKSKFGFPKFKSKHKSKDSFRIPQTNGHIGITERHIKIPKIGLVKWHYHRPVEGIVKSITVSKDIDQWYVSVLVETPDVIKTPIDPTNCNAIGIDLGISSFLIDNNGNKVDSPHFLKKKATRLKRYQRQVSRKCKGSANRNRARIKLAKWHRDIRNARADWLHKLSNKIVNEHDLICVEDLKTKSLMKHRKQKSLNRAISDQGWGMFLTMLKYKSQQRGKTLTQINQYAPSSKACSCCGHVMDKMALDIREWECPACGAHHDRDTNAANNILFWGIMATKNTLGTGEINACGDTSADVSNQCRVSTKQEAVGPLGPQ

SEQ ID NO: 2143 - protein, 243 aa, Chloropicon primus
AEPQQSPTEIERPRHFSEAHKCRSPQGGDWDSAHLPLQRHRFFGQRRWRRKGLETFGRKQRTMEFIASKLFPTASHIVFYGAANFPSGIRGRPPGPCIGLKRFLVTKTTPGRFFFVDEYNTSKMCAACSQKNISTELRRVHKSDRSRGDGPPSKKRRPQYGVLSCPKCSMEVPRDDNGSDNILAIASAFLQGLSHARFGRQRCDALCSGKGYGSRLKPSRTLDKIFLEIEEDVGEASGEEGFN

SEQ ID NO: 2144 - protein, 260 aa, Idotea baltica
ISINAENFRGGREFEGKIKRITVRQLASGVYMAIALIEDGAELPAQPEKNLQPIGIDVGCKTEGTQHQFAALSNGDIVYSPALIKQQRKKLARLQRQFAKKQKGSNNRAKLKQKIAKLHWKMGNARNDFLHKLTHTLTRENQSIAVETLNIKGMMAKPKPKQDTNGNYIANGAARKAGLNKSLSDVALGEFYRQLEYKCAWRGVALIKIDRWAPSSKTCSACGEVNQELTLSMRKWQCQCGALHHRDINAAINIANMAVA

SEQ ID NO: 2145 - protein, 252 aa, Amoeboaphelidium protococcarum
QVSDLYGIDLGVVIFAVAVHTRPTEENTALQAMCTTKPRDSTSVFYSTGNFCIRIEFIVLQVTYAIYIEDVWSEPRRACTLNQCLRKAASSATMTNQRMDWYLTLEYQRVKFRYHVERSRLLKDICCQLLQLDRYSDARKNQIVVYIGKGAGGSRFSPYVLRNNIQPPTLLLQNYISQVSRMIRTQEKGSSNHCLFCEQAITRNRRGRNDALFCRGCAQWFNGDWLGGANICKIGLTMSSNQGHFPLALTRR

SEQ ID NO: 2146 - protein, 252 aa, Amoeboaphelidium occidentale
VVWEKPDHFYVCFPYNKTNQEKTTQNHPTAAALDPGVRTFQTVYESSGNFFEAGKGDIRRVERLCLNLDRLISKATGVKTGRKNRYKRRRMNAAIQRARQRIKNLISDFHGKLAHDLTSRYNVILIPTFDVSKMVIKNNRKINLKTARNMLNWSHYKFKQKLLQKAEDTPNCAVHVVTEEYTSKACGVCGRLNHKLGGNKKFNCTHCGFKFDRDMNAARNIMIKNLESSGYKLVSLRACRLLPVARPQNRYS

SEQ ID NO: 2147 - protein, 311 aa, Amoeboaphelidium occidentale
EYLFVVPRDKVVFRLNAMEWWRRAFNVDKLTTATKRFGFSISTNGFEYHQHNMKQFERSEINDWGYNYEGEFIPLEINGQTRVAALDPGRNSLYVAVSGDTAADVLECSNSRWQEISGTRYFTKKANTWITADRDRRMAITLTPTPCCYNTDDYITHLLHVLEYRDEFLGFYRAMRWRRLRWKTRIKRQKAYDNLYKELAAGAEDVVIAYGGGGFSHNSRGHPPTPNKHLFLELKRRTRCRLVPEFRTSKLCSLCDNELVQSEVWSIKSCNNNNCWTRWNRDVNGARNIRRVFLHMNANGGEKPEAFRRGN

SEQ ID NO: 2148 - protein, 246 aa, Ustilago bromivora
YFFLCYSVLKSVVPQEQSLKQAIVVKSVNPGVRTPSAVYSSDGCLLNVGSQDNSIHLEQLCRCNNKIQSSRHQRHQPHHQQPLPPLQTTSDPQSSQQAQSQLQEACQHCPALPFALSSVQHHKLQKCSKKVHKKLQQLIDDLHCWMANYLATSSDIVVMPRMEVCKMIQRKNGNLHQNTHQRLLGWGHCNFINHLLVKCHDIAHNPHYLHKHVWPMVLLIQPEAYTSKTCSQCGNLNQRLGASKQF

SEQ ID NO: 2149 - protein, 213 aa, Ustilago bromivora
QDPKQSSSETSTKSSTAAATATNDFQSSIISASPSSAAASLPMLSSLPFAFSSVQCHKLQKRSKKVCKKLQQLIDDLHCWMANYLATSSNIVVMPRMEVCKMIQRKNGNLHQNTCWRLLGWGHCNFINHLLVKCHDIAHDPCYLHKCWQPTVLLIQPEAYTSKTCSQCGNLNQRLGASKQFQCPTCLYLADHDHNSAFNMLIKAICRTPLSLM

SEQ ID NO: 2150 - protein, 245 aa, Ustilago bromivora
FLLHYNVLTYVVPQEQSLKQAIVVKSVNPGVRTPFAVYSSDGCMLDVGSQDNGICLEQLCQCNNKIQSSCCWRRQLHHQQLLPPPQTTSNLQSSQQVQAQPQEACQHCPALRFALSSVQHHKLQKRPKKVCKKLQQLINDLHCWMANYLATSSDIVVMPRMEVHKMIQRKNGNLHQNTHQRLLGWGHCNFINHLLVACHDIAHDPCYPHKHWWPTVLLVQPEAYTSKTCSQYGNLNQRLGASKCF

SEQ ID NO: 2151 - protein, 365 aa, Synstelium polycarpum
KQSIGRTSNDFRSLKLQKIIAIGIDPNSASNTIVSSRRAIKMIIRVRKRTKLKPGVYPYSGPTPATAPAATCTASNAPTTSTTTTTPATAPVTAPNAPTTSTTTTTSATGTAPKATRPPKSDFKTYDLDARSKYDFNLADYRARGGFQESIDVYAARIEANNLSNFEKGLPTLKPSTAATNADRLEIATKRLTYLLANRADYLKYIELRNGEEMRHDKVAQWFRKTRARDSLLDPAIMFIRQTYLSTPMGKDSLRKDGNYTQEQINDIDKKMKSVVVICKWLYVDKMISITSLTNYLFLYTVSTIVFGGASFKHNMKGSPTNFAGKTYRKAFIDAGFSVIKVNEFCTSRVGSSLSFCHYSKNHND

SEQ ID NO: 2152 - protein, 241 aa, Tetradesmus obliquus
LGKGKEFCSSSDTCPTEKPKTDLLTRRQYYHEIKHRTRMLWEAQRSNVPAVRNAISTLSNENKVVNTLGYIQAVDEQSRVLQSEYLELKERAIWKMRLFRLKKKSMDKAVQKVFDRGKKRTYCLGIGDAKFASTGKGEKAMPTTQIVKAFLKAKHRRSAATKIMVINEFRMTMCCCACGNTTEAKMKQSGQRSSRLRLCTQCNETTDKLRDRDVQAARNILWLCQYEYYGLERPGYLCRNQ

SEQ ID NO: 2153 - protein, 260 aa, Rhizomucor pusillus
DQGVDKSLAFKGTINTNGYGVSSCKQNFASGFGRKPKKVKDKKGDFKYIQDLDANTSRVYIRTPFLSIRDEGIYFTACIKTATQKSQTHTDMQGIKRCKTRKPRSSANLQNTSNQTMSKICKSALSKHCSKTVDLEKFKAYLKARSDVAPTLSSHYQMLIFRKLRFRRYLHRQRADDRLAKYLRSKFGQDLVLVIGDWSMMAKFHVIGLLRLLKKKGFEVYLLDEFKTSSICRNCNHALEKFKEVRNPRTYRREKMSRVA

SEQ ID NO: 2154 - protein, 219 aa, Rhizomucor pusillus
SFRRHQTLFFRESSSFPAKLMTRRKKCSQTVLLRADKSNKSIISREKQLQTFIQLKKTVADYDKFKQNEEKETKNKLMKSKRVPRGTWEIADVAAQVETASGVDRFRERRDTLQYFYNSPPERAYVKEACGTGKTSIPVMFIGDQGLGTNARIKGHVKRVATKIRKEHHLHTVVVKTSEYRTSQTCGWCLGPVVRPRATILKDGKKKKTVRSWCLFMHE

SEQ ID NO: 2155 - protein, 266 aa, Rhizomucor pusillus
PKADDNGLRVWNYYDNRSVRRRTWHNSVSQRSCVDEACYLIINQANSTFAMSQQIHLERIIQRIDRPFIYGFDLDGMSRESRKGALAPMDHKLANTLYRKIEQRSRGRDSTEADIAKRVDEYLYSRMCYYYTKQGREQRVDFLQRTPVVSLPDTTRLDDGLEKVFQVVRCPSCNHLFHRDSNAADDLASSIIRYELRFQQRPHWFIQPSRRQRPSREMEPFQSPERTSSGRTRGTQERPESSRAPALRRSERLRSKKQKGIYESSG

SEQ ID NO: 2156 - protein, 201 aa, Rhizomucor pusillus
RTEASSGRAEKRKAPASVAEEGSRMRTTYWLLLAKIVFHQHRKGAVSLMDTRLASALIKHCKAEGHTITAVDEYNTSKVCPRCITDRRTSYLQYLRRPPVSSRHIGRASLGKDGNEEIKHVTVCDVCNMHFHRDDVAAHSQAFISASMLEHGQRPKSFIRPSRQLKLNTHPRKMGRAQRPCASEMVSMSILNLSLIFESRL

SEQ ID NO: 2157 - protein, 375 aa, Ectocarpus sp.
TLLFFRRERLAQKHSSPSSATRHERVRRVRRATSEHGYLSSLLGSGPDKCPWMIGQSFLTDGVQIKLLLVTLEHGRKAFSGSSELNEEGYNKLPRANAQLESLLKEGRGVYNISSLLESTSIREDVVVMSADPGQAKVINVSSATASTWAKQDPDVILKTSTCVFGDNYRRDTLASRSDKYETFRRKDQPYGVAIDRLSNEKKRTSCLATFIQYCKSWCANGPALFLETLQTGRKFMRFDRFRATQKTLAKIADRYMGHVEDTCRIMLFGKASFRAQKGRASAPRKALIREMASRGVVLMVNEYNTSKKCPGCGEDTVEDKERRIRSCKNFKIGSPEESCRLHRLTPEFEMDRDNVGSTNIGMRGFGQLLGQVWF

SEQ ID NO: 2158 - protein, 665 aa, Ectocarpus sp.
CSQTNMSQHQMRPESSGSIQILYANGIEPTQSSVSESTAEIGCSISPNSNEINPAMQNSKTKKKRREITQSTAGSLLPSKQKTSEDKSNILRHPTLGFKYFLTRDQGSTSSGKGSKGFFVKSCADISQRLWYPTETDCAELLSTFSNGYVTSTKLNSWFTTKIRKDPTRRNSWRTSWPLSTFSVPGSMEKDQISRGNAIQKSAKNMLVMKLLVVQLRILSIRREQNEHLVNMVIQSVNDRIETIKEYRQSLGRLSKTQEKQLETLTTSLDQFTRDAFHGDDAIDELLEVQDSLINQLAERLLTIDPHVKRAKQVRIVNIDPSHKSQLRRYMKSSRKIFNTAVDLHNKGFRGEELRRQCVRSKFINKDLRKTPEHIRQKAFDKFSSSRASCDSLNGHLAFISRKKDDQWVGLQKADCVFSGTKLVVFGKLEIELAESALEGRPRCDVEITESHGIFHATIMDIRNYNTPISPDISSVRICALDMGERTFGTMYDPDGTIAFLGTDANKRVKQRLRVIWKLRNGLKTKLSASKKRRVKKAVRRASAKLKNLIKDMHHRLANWLVQNYDVVLIGRLGIGVMKAKRKGKRVLQALSHYSFRSTLLQKASVNRTSVRVVSEAYTTKQCNQCGYMNWTIGSSEVFSCKNCKVVCHRDVHSGRGIFIRSMSE

SEQ ID NO: 2159 - protein, 370 aa, Tetradesmus acuminatus
AALPCKAEGEAAVVGLLVNRWRRSQLCVRRHKASLKKGHQNYSSSSSSSSHQQQQKQRDHRRYHPSTASSPRLGCCGHRPWQVHDHARRDPGAEHPHAGVDAAPQALPPKVRAGTGEAKERRWDTAMIGGAWKQMNQQSGALRSSSLQQLTQHIAAYNSVAEECWTSAMQRAKLRCRTYGGRKRCLDRFFSGLERDVSAAEPNKRLAIAYGAATFSPSGTGKPATPTTAAYRAALRLWSSGAIVEKQNECRTSKQCCHCHGDVEACWQSVRLQLGPAPDTDASGAGPCPSQLSARIQVETCHGPTVPKAGAYLRGLLFCPQCSKFLNRDRSAALNIRFLFTQTQLLGCSMPTQFVARRKQKKQKKRNQAS

SEQ ID NO: 2160 - protein, 299 aa, Tetradesmus acuminatus
NFGNIWNLLETSRNFRFLQPYTRTLEWTLPRKRYRLESGLAQAQAKERRWDTAMIGGAWKQMNQQGRALRSSSLQQLTQHIAAYNSVAEEWWTSAMQRKRAKLRFRTYGGRKRCLDRFFSGLERDVSAAEPNKRLAIAYGAATLSPSGTSKPATPTTAAYRAALRLRSSGAIVEKQNECRTSKQCCHCHGDVEACWQSARLQLGPAPDTDAAGAGPCPSQLSARIQVETCHGPTVPKAGAYLKGLLFCPECSKFLNRDRSAALNIRFLFTQTQLLGCSMPTQFVARRKQKKQKKRNQAS

SEQ ID NO: 2161 - protein, 245 aa, Tetradesmus acuminatus
AEGEAAVVGLLVNRWRRSQLCVRRHKASLKEGHQNCNSSSSHQQQQKQRDHGRYHPSTASSPRLGCCGHRPWQVHDRACRDPGAGHPHAGVDAAPQALPPKVQAGTGEAKERRWDTAMIGGAWKQMNQQGGALRSSSLQQLTQHIAAYDSVAEEWWTSAMQRKRAKLRFRTYGGRKRCLDRFFSGLERDVSAAEPNKRLAIAYGAATFSPSGTGKPATPTTAAYRAALRLRSSGAIVEKQNECRT

SEQ ID NO: 2162 - protein, 363 aa, Tetradesmus acuminatus
AEGEAAVVGLLVNRWRRSQLCVRRHKASLKEGHQNCNSSSSHQQQQKQRDHGRYHPSTASSPRLGCCGHRPWQVHDRARRDPGAGHPHAGVDAAPQALPPKVRAGTGEAKERRWDTAMIGGAWKQMKQQGGALCSSSLQQLTQHIAAYNSVAEEWWTSAMQRKRAKLRFRTYGGRKRCLDRFFSGLERDVSAAEPNKRLAIAYGAATFSPSGTSKPATPTTAAYRAALRLRSSGAIVEKQNECRTSKQCCRCHGDVEACWQSVRLQLGPAPDMDTAGAGPCPSQLSARIQVETCHGPTGPKAGAYLRGLLFCPQCSKLLNRDRSAALNIRFLFTQTQLLGCSMPTQFVARRKQKKQKKRNQAS

SEQ ID NO: 2163 - protein, 363 aa, Tetradesmus acuminatus
AEGEAAVVGLLVNRWRRSQLCVRRHKASLKEGHQNCNSSSSHQQQQKQRDHGRYHPSTASSPRLGCCGHRPWQVHDRARRDPGAGHPHAGVDAAPQALPPKVRAGTGEAKERRWDTAMIGGSWKQMNQQGGALRSSSLQQLTQHIAAYNSVAEEWWTSAMQRKRAKLRFRTYGGRKRCLDRFFSGLERDVSAAEPNKRLAIAYGAATFSPSVTGKPATPTTAAYRAALRLRSSGAIVEKQNECRTSKQCCHCHGDVEACWQSVRLQLGPAPDTDAAGAGPCPSQLSARIQVETCHGPTVPKAGAYLRGLLFCPQCSKFLDRDRSAALNIRFLFTQTQLLGCSMPTQFVARRKQKKQKKRNQAS

SEQ ID NO: 2164 - protein, 386 aa, Tetradesmus acuminatus
PTDTLQAHRAEISGRVVTSGQTVSVIHKNSDRGDSSRAATRHTRQGNTHSQGRSIGINDRHFDLPVPLEPQKHDKMHIHACTSCRIGTAGANRTKPLNGYVSAGHPHAGVDAAPQALPPGVRVYTGPAQAQAKERRWDTVMIGGAWKQMNQQGGALRSSSLQQLTQHIAAYNSVAEEWWTSAMQRKRAKLRFRTYGGRKRCLDRFFSGLERDVSAAEPNKRLAIAYGAATFSPSGTGKPATPTTAAYRAALRLRSSGAIVEKQNECRTSKQCCHCHGDVEACWQSVRLQLGPAPDTDAAGAGPCPSQLSARIQVETCHGPTVPKAGAYLRGLLFCPECSKFLNHDRSAALNIRFLFTQTQLLGCSMPTQFVARHKQKKQKKRNQAS

SEQ ID NO: 2165 - protein, 410 aa, Tetradesmus acuminatus
AEGEAAVVGLLVNRWRRSQLCVRRHKASLKEGHQNCNSSSSHQQQQKQRDHGRYHPSTASSPRLGCCGHQPWQVHDRARRDPGAGHPHAGVDAAPQALPPKVRAGTGEAKERRWDTAMIGGAWKQMNQQGGALRSSSLQQLTQHIAAYDSVAEEWWTSAMQRKRAKLRFRTYGGRKRCLGRFFSGLERDVSAAEPNKRLAIAYGAATFSPSGTGKPATPTTAAYRAALRLRSSGAIVEKQNECRTSKQCCHCHGDVEACWQSVRLQLGPAPDTDVAGAGPCPSQLSARIQVETCHGPTVPKAGACLRGLLFCPECSKFLNRERSAALNIRFLFTQTQLLGCSMPTQFVARRKQKKQKKRNQASRNKLVYRGPCPLLIRPCCRCVCNNNNHSDKPYLSASAPRLTLWGGGN

SEQ ID NO: 2166 - protein, 363 aa, Tetradesmus acuminatus
AEGEAAVVGLLVNRWRRSQLCVRRHKASLKEGHQNCNSSSSHQQQQKQRDHGRYHPSTASSPRLGCCGHRPWQVHDRARRDPGAGHPHAGVDAAPQALPPKVRAGTGEAKERRWDTAMIGGAWKQMNQQGGALRSSSLQQLTQHIAAYNSVAEEWWASAMQRKRAKLRFRTYGGRKRCLDRFFSGLERDVSAAEPNKRLAIAYGAATFSPSGTGKPATPTTAAYRAALRLRSSGAIVEKQNECRTSKQCCHCHGDVEACWQSVRLQLGPAPDTDAAGAGPCPSQLSARIQVETSHGPTVPKAGAYLRGLLFCPQCSKFLNRDRSAALNIRFLFTQTQLLGCSMPTQFVARRKQKKQKKRNQAS

SEQ ID NO: 2167 - protein, 539 aa, Tilletia controversa
KTNHVTSRVQTRDQHRSFFHSFLFFSFLFIFFFFHFSFFLGHHRKIKRLTSTAPIFSLICYIQITMADPPPAPWIGSVAPESVLWPGVEGTQQAAEWHNAPINTWFLPKYAFLPHPVVPDEDIGGMLTQLSATLRQRLDAVPPPPPSRKTRPGERQDNSRLKTYRTRLRPNTQQKEALRKTAGIFRWTYNRAVAYLKAHPNASLKDVREHSVTEDGLPLMNLSWVTPVPYSIREQACFDAHTALQNGLADVRDGKIPHFELKFRKKRALFSSFRIRKRDWVGGCLKIPNFGLGPGQRQTKIQTGIDVPSLEHDGACIKQENGSWFLLWQKDMGEEKMRVPAARGPEMCAIDPGVRTFATIYDPLRGMAAKFGDGDHKRLFRLGTHLDELISRSTQATAKKRYRMRRAANRLRARIRHLVDELHWKLRGYLKQNYDTVLLPTFNAHQMSRRGQRRIGRKTVRAMMSWAHGRFRSRLNEAMEVVEVVEDWTSKVCSTCGTVNHRLGGSEIHRCPGCLTVSDRDVNGAKNIFLHWKYDFLNQ

SEQ ID NO: 2168 - protein, 494 aa, Tilletia controversa
IKRLTSTAPIFSLICYIQITMADPPPPPWIGSVAPESVLWPGVEGTQQAAEWHNAPINTWFLPKYAFLPHPVVPDEDIGGMLTELSATLRQRLDAVPPPPPPRRTRPGERQNNSRLKTYRTRLRPNTQQKEALRKTAGIFRWTYNRAVAYLKAHPNASLTDVREHSVTEDGLPLMNLSWVTPVPYSIREQACLEAHTALQNGLADVRDGKIPHFELKFRKKRALFSSFRIRTRDWVGGCLKISNFGLGPGQHQTKIQTGIDVPSLEHDGACLKQENGSWFLLWQKGMGEEKMRVPAARGPEMCAIDPGVRTFATLYDPLRGMAAKFGDGDHKRLFRLGTHLDQLISRSTQASAKKRYRMRRAANRLRARIRHLVDELHWKLRGYLKQNFDTVLLPTFNAHQMSRRGQRRIGSKTVRAMMTWAHGHFRSRLNEAMEVVEVVEDWTSKVCSTCGTVNYRLGGSEIHRCPGCLTVSDRDVNGAKNIFLHWKYDFLNQ

SEQ ID NO: 2169 - protein, 537 aa, Tilletia controversa
QTESKHVTSTDRFFILFFSFLFFSFLFIFFLFSFFFFLGHHRKIKRLTSTAPIFSLICFIQITMADPPPAPWIGSVAPESVLWPGVEGTQQAAEWHNAPINTWFLPKYAFLPHPVVPDEDIGGMLTELSATLRQRLDAVPPPPPPRRTRPGEHQNNSRLKTYRTRLRPNTQQKEALRKTAGIFRWTYNRAVAYLKAHPNASLTNVREHSVTEDGLPLMNLSWVTPVPYSIREQACLEAHTALQNGLEAVRDGDIPNFELKFRKKRALFSSFRIRKRDWDGGCLKISNFGLGPGQHQTRIQTGIDVPSLEHDGACIKQENGSWFLLWQKDMGEQKMRVPAARGPEMCAIDPGVRTFATLYDPLRGMTAKFGDGDHKRLFRLGTHLDQLISRSTQASAKKRYRMRRAANRLRARIRHLVDELHWKLRGYLKQNFDTVLLPTFNAHQMSRRGQRRIGRKTVRAMMSWAHGRFRSRLNEAMEVVEVVEDWTSKVCSTCGTVNYRLGGSEIHRCPGCLTASDRDVNGAKNIFLHWKYDFLNQ

SEQ ID NO: 2170 - protein, 448 aa, Tilletia controversa
LSISLRSLEGTSITMADPPPAPWIGLVAPESVLWPGVRGTQQAAEWHNAPIDSWFLPKYAHLPHPVVPDENVGGMLTQLSATLRQRLDAVPPPPPPRRTRPGERQDNSRLKTYRTRLRPNTQQKEALRKTAGIVGWIYNRAVEYLKAHPNASFHDVREHSVTEDGLPLMDLSWVTPVPYSIREQACFDAHTALRNGLADVRAGKIPNFELQFRKKRALFSSFRIWTRDWDGGCLQILNFGLGPGQHQTKIQTGIDVPSLEHDGACIKQENGSWFLLWQKDMGEEKMRVPAARGPEMCVIDSGVRKFATIYDPLRGTAAKFGDGDHKRLFRLGTHLDELISRSTQASAKKRYRMRRAANRLRARIRHLVDELHWKLRSYLKRSFDTVLLPKYNAHQMSWRGQRRIGRKTVRAMMTWAHGRFRSRLNEAMDKARQATRVTTFLRNSTVKL

SEQ ID NO: 2171 - protein, 493 aa, Tilletia controversa
IKRLTSTAPIFSLIYYIQITMADPPPAPWIGSVAPESVLWPGVEGTQQAAEWHNAPINTWFLPKYAFLPHPVVPDEDIGGMLTELSATLRQRLDAVPPPPPSRRTRPGERQNNWRLKTYRTRLRPNTQQKEALRKTAGIFRWTYNRAVAYLKAHPNASLNNVREHSVTEDGLPLMNLSWVTPVPYSIREQACLEAHTALQNGLADVRDGKIPNFELKFRKKRALFSSFRIRKRDWDGGCLKIPNFGLGPGQHQTKIQTGIDVPSLEHDGACIKQENGSWFLLWQKDMGEEKMRVPAARGPQMCAIDPGVRTFATIYDPLRGMAATFGDGDHKRLFRLGTHLDQLISRSTQATAKKRYRMRRAANRLRARIRHLVDELHWKLRGYLKRNFDTVLLPTFNAHQMSRRGQRRIGRKTVRAMMTWAHGRFRSRLNEAMEVVEVVEDWTSKVCSTCGTVNHRLGGSEIHRCPGCLTVSDRDVNGAKNIFLHWKYDFLN

SEQ ID NO: 2172 - protein, 326 aa, Tilletia controversa
VYLLLSHDAWTGPYTEEGKRQGLDKGWNSRNKAVFEPTKRAGNCIALDPGARDLLTGYDAQRQQFYTYLTGFNEHIERAHASIASAQSKLEKLKNETGPTVDTDTGRRRRRARRRVNKQRGGKKKKGRSSSAEQRAARKAAKKSHPHFVRPNERSILRAHERLRVHITQAQNCTVNALVSNYDLVVLPEFMTARMIKRRRRRQGMPYSNVPQREAAVQGDEANEEPAAKFVLAKRSRATLARFGHRQFRERLVAKAQADPNHQKDVLVTSEEYTTKQHPFQRGLHSKIGGNKTWHYCHLRGKRDNVGAFNILLRALTKDEVRLSSQ

SEQ ID NO: 2173 - protein, 376 aa, Tilletia controversa
AMASTLTLATRSSRPIASVSSSSSLRLTMSRPMSSSASWSCAMSCSCGLAISTSTAGAGPITWCQRPTPSLESEFEFRIRIDAHTALRNGLADVRAGKIPNFELKFRKKRALFSSFRIRTRDWDGGCLKIPNFGLGPGQHQTKIQTGIDVPSLEQDGACIKQENGSWFLLWQKDMGKEKMRVLAARGPEMCAIDPGVRTFATIYDPLRGTAAKFGDGDHKRLFRLSTHLDELISRSTQASAKKRYRMRRAANRLRARIRHLVDELHWKLRSYLKRSFDTVLLPKFNAHQMSRRGQRRIGRKTVRAMMTWAHGRFRSRLNEAMEVVEVVEDWTSKVCSTCGTVNYRLRQRNPPLPRMSHSLGSRRQCGEKHFPPLEI

SEQ ID NO: 2174 - protein, 502 aa, Tilletia controversa
KFPLFFLCKTCLAEKWTTFFSFFFLDLIYYIQITMADPPPAPWIGSVAPESVLWPGVRATQQAAEWHNAPIDSWFLPKYAHLPHPVVPDENIGGMLTQLSATLRQRLDAVPPPPPPRRTRPGERQDNSRLKTFRTRLRPNTQQKEALRKTAGIVRWTYNRAVEYLKTHPNASFHDVREHSVTEDGLPLMNLSWVTPVPYSIREQACFDAHTALRNGLADVRAGKIPNFELKFRKKRALFSSFRIRTRDWDGGCLKIPNFGLGPGQHQTKIQTGIDVPSLEQDGACIKQENGSWFLLWQKDMGKEKMRVLAARGPEMCAIDPGVRTFATIYDPLRGTAAKFGDGDHKRLFRLSTHLDELISRSTQASAKKRYRMRRAANRLRARIRHLVDELHWKLRSYLKRSFDTVLLPKFNAHQMSRRGQRRIGRKTVRAMMTWAHGRFRSRLNEAMEVVEVVEDWTSKVCSTCGTVNYRLRQRNPPLPRMSHSLGSRRQCGEKHFPPLEI

SEQ ID NO: 2175 - protein, 404 aa, Tilletia controversa
PLRGGDERSGTGPYAKELRDRFVNTERFETESTWALDTPYHIRNDAMRKARNAFKTNFAKRRKNPSLTFTIKYKKKRAGLGTIPIGKEAWVKGILYPRAFKFSRIRAEEPIDDTLAADTHIMVENGEWYIYVPKKGSSRKPRDESSAGKICSIDPGARCFAAVYDPFRAEVVKWGEGYKCRLFRLGIFFDDLLSRMTKIRAKKRYRMWRAANRMRKKIKNLVDDLHKKFAAWLAQRYESILCPEFNAHQMARRGKRRITQKTVQAMMTWPHGRFRDRLQFATEYVPCTEEYTSKACLACGRFNHNLGGAKFRSCQGCRAFADRDCGGARNIILYSRQGFNRDVRRSLIGLIVLRGNDLVSYFRQPLRIRDDHQHKHLPPPCSCSSDISPGPYIRVFRTMSKSFL

SEQ ID NO: 2176 - protein, 360 aa, Tilletia controversa
PLRGGDERSGTGPYAKELRDRFVNTERFETESTWALDTPYHIRNDAMRKARNAFKTNFAKRRTNPSLTFTIKYKKKRAGLGTIPIGKEAWVKGILYPRAFKFSRIRAEEPIDDTLAADTHIMVENGEWYIYVPKKGSSRKPRDESSAGKICSIDPGARCFAAVYDPFRAEVVKWGEGYKCRLFRLGIFFDDLLSRMTKIRAKKRYRMWRAANRMRKKMKNLVDDLHKKFAAWLAQRYESILCPEFNAHQMARRGKRRITQKTVQAMMTWPHGRFRARLQFATEYVPCTEEYTSKACLACGRFKHNLGGAKFRSCQGCRAFADRDCGGARNIILYSRQGFNRDVRRSLIGLIVLRGNDLVS

SEQ ID NO: 2177 - protein, 524 aa, Tilletia controversa
PAPIFFSFFSFLFFSFFFFFHFSFFLGHHRKIKRLTSTAPIFSLICYIQITMADPPPAPWIGSVAPESVLWPGVEGTQQAAEWHNAPINTWFLPKYAFLPHPVVSDEDIGGMLTELSATLRQRLDAVPPPPPPRRTRPGERQNNSRLKTYRTRLRPNTQQKEALRKTAGIFRWTYNRAVAYLKAHPNASLTDVREHSVTEDGLPLMNLSWVTPVPYSIREQACLEAHTALQNGLADVRDGKIPNFELKFRKKRALFSSFRIRTRDWVGGCLKIPNFGLGPGQHQTKIQTGIDVPSLEHDGACIKQENGSWFLLWQKDMGEEKMRVPAARGPEMCAIDPGVRTFATIYDPLRGMAAKFGDGDHKRLFRLGTHLDQLISRSTQPSAKKRYRMRRAANRLLARIRHLVDELHWKLRGYLKQNFDAVLLPTFNAHQMSRRGQRRIGSKTVRAMMSWAHGRFRSRLNEAMEVVEVVEDWTSKVCSTCGTVNHRLGGSEIHRCPGCLTVSDRDVNGAKNIFLHWKYDFLN

SEQ ID NO: 2178 - protein, 493 aa, Tilletia controversa
IKRLTSTAPIFSLICYIQITMADPPPPPWIGSVAPESVLWPGVEGTQQAAEWHNAPIDTWFLPKYAFLPHPVVPDEDIGGMLTELSATLRQRLDAVPPPPPSRRTRPGERQNNSRLKTYRTRLRPNTQQKEALRKTAGIFRWTYNRAVAYLKAHPNASLNDVREHSVTEDGLPLMNLSWVTPVPYSIREQACLEARTALQNGLADVRDGKIPNFELKFRKKRALFSSFRIRTRDWVGGCLKISNFGLGPGQHQTKIQTGIDVPSLEHDGACIKQENRSWFLLWQKDMGEEKMRVPAARGPQMCVIDPGVRTFATIYDPLRGMAAKFGDGDHKRLFRLGTHLDQLISRSTQATAKKRYRMRRAANRLRARIRHLVDELHWKLRGYLKQNFDTVLLPTFNAHQMSRRGQRRIGSKTVRAMMTWAHGRFRSRLNEAMEVVEVVEDWTSKVCSTCGTVNYRLGGSEIHRCPGCLTVSDRDVNGAKNIFLHWKYDFLN

SEQ ID NO: 2179 - protein, 494 aa, Tilletia controversa
IKRLTSTAPVFSLIYYIQITMANPPPEPWIGSVAPESVLWPGVEGTQQAAEWHNAPIDTWFLPKYAHLPHPVVPDEDIGGMLTQLSATLRQRLDAVPPPPPSRRTRPGERPDNSRLKTYRTRLRPNTQQKEALRKTAGIFRWTYNRAVAYLKAHPNASLTDVREHSVTEDGLPLMNLSWVTPVPYSIREQACLEAHTALRNGLADVRDGKIPNFELKFRKKRALFSSFRIRKRDWDGGCLKIPNFGLGPGQRQTKIQTGIDVPSLEHDGACIKQENGSWFLLGQKDMGEEKMRVPAARGPEMCAIDPGVRTFATIYDPLRGMAAKFGDGEHKRLFRLGTHLDDLISRSTQATAKKRYRMRRAANRLRARIRHLVDELHWKLRGYLKQNFDTVLLPTFNAHQMSRRGQRRIGRKTVRAMMTWAHGRFRSRLNEAMEVVEVVEDWTSKVCSTCGTVNHRLGGSEIHRCPGCLTVSDRDVNGAKNIFLHWKYDFLNQ

SEQ ID NO: 2180 - protein, 840 aa, Tilletia controversa
DARHPNPAPPPRPPWLDPDLPPRLGPADYEHYQSNPAPPSPPPPTPQDLAPPPLPWLDPTLAERDRPPPPPGFELQPSQPPQPPQPPTSSWESIARLPAKDKQDALIQALRSSQKDDWKAKVNNLLDFATSSLVAEVRVAILLAAAPIFAPWFTDESSRLSRRLWGITGESWTQESARLSDAFSAGKDWEWATTVHQPRANREQGIISASSLRFSRQQLISRNDMGQNVSDAREGASFWECRTWATQRLWDAFVARGLYTSSLTKPKGSKRDTGKRKMEDGEGSRDSKKVRKLSYDADSKAAFERRAAKDKKRAPPKRNEPECLRALRLRLYPSAELGAKLREWESLAASLRQMVRARLQKAKDVGEKTDAFVLADQTCLSQTKWNKMTAEERASVDQNRQRLIELPHNFQREQVLKVAANARAAQTNLERGWTKSYRLDSADEDDKSVLFFTSDAIDKRGALFPRILNHIDSNLYVRDRMLAGPGERRRKRSDWVKLLTGASRSFSIHRTGRKWYLLLSHDAWTGPYTEEGKRQGLDKGWNSRNKAVFEPTKRAGNCIALDPGARDLLTGYDAQRQQFYTYLTGFNEHIERAHASIASAQSKLEKLKNETGPTVDTDTGRRRRRARRRVNKQRGGKKKKGRSSSAEQPAARKAAKKSHPHFVRPNERSILRAHKRLRVHITQAQNCTVNALVSNYDLVVLPEFMTARMIKRRRRRQGMPYSNVPQREAAVQGDEANEEPAAKFVLAKRSRATLARFGHRQFRERLVAKAQADPNHQKDVLVTSEEYTTKQHPFQRGLHSKIGGNKTWHYCHLRGKRDNVGAFSILLRALTKDEVRLSSQ

SEQ ID NO: 2181 - protein, 575 aa, Hypena proboscidalis
NETVTIMPCSSCGKDDHLRSSSSKCLKRKKRVRETDLTEDQEISIYCVKKGINSFICSLYENRLELLKLIRDDVKQLSRLSIELSYLINYFFKSYHAHEDFHKLWPKFDPLQFTYVLKGKKHKLPDPFNIIERYKNLNNNVTFNGTLKSFNIISIANQYKTILETNVNLHAFKRLKRYMYHKFSENLTKAIIHKSTFEAFYKNTYIDNEIGNWFKIHKISEKELKLNFWKFIPLFLDIQHELYENDKKSFNIFPIYTHGLKYITYDSRCLHELLRRIDAKNLPSTWVQFAEHDPKVYWRRYFNVPKNFGWSFSTDGVCVSLSMNRLIPKKDKFKAKRLKKEEASSENDNQLYKKYKKIIAVDPGAKTPIVTCSRRKEDDTFEYKVLKNTKVIYETKEHTREKKRLKFIKDVDLKIRKDRESLEIDISRKSANVEDYTKFQLKWFDEKQKFYEQRRLQRLKFDKYINDQKTNHKIVDEYFGRETDTLVVYGAGFDFMNKGTFKGHRKFRHNNILKIIKQRKNLSLYIINEAFTTKNCSKCYENEERQNILHVSKSPHRYVYCSVCRKGIHRDKNGA

SEQ ID NO: 2182 - protein, 199 aa, Hypena proboscidalis
NPPPPPFPDLRSPVNYYFYSILTPKSCNVKAYTRFQLKWFEEKQRVYEQRRLQRLKFDKYINEQKTLNKFVDEYFGEAPDTLVVYGAGFNFMNKGTFKGHRKFRHNEVLKIAKQRKNLTVFVINEAFTTKNCSYCYESGAKNTLLVSKSPHRYVYCSVCRKGIHRDKNGAKNILLKYEYTKSPVGLSSSGTDMNRMDGH

SEQ ID NO: 2183 - protein, 225 aa, Apotomis turbidana
GFKRVTKKWVRSHTLEWKRERVRNKLLYDSETAERLDRERVERELEICVTNKRSLYVNWYAYYRLKWFELRQKPFETHSKLTRLKFDKHINIARTNERIVREIFLADARSDGVLVLYGASSKFMNRATFSGRKFRHDDLLKRLRARRNITVETVDEHYTSKACLACNARDGSYHRLKIDPKLRRGVCPDCNDASLDRDYNAARNILINHTRSTVCRPCSVPNAGA

SEQ ID NO: 2184 - protein, 204 aa, Xestia xanthographa
KRERIRNKLCRVSEEAEEKAREKLAFPVSSKNTSHVVEYTVFRMTWFNVRQEPYEKHAKLTRLRLNKYIRTAKCEEKIVKEVFDGGGGGVESTLVLYGAGSKFMNTASFSGRKFKHDSLIKRLRSKRHIDVEFVDEQYASQASASCNAKTGEFRKIVMNHKLRWGVCQNCNSEFDRDVNAAKNILINYTRSALCRPGCSASEAS

SEQ ID NO: 2185 - protein, 199 aa, Mamestra brassicae
QFRRITKKYVRSHTLEWKRERIRNKLCRVSEEAEQKAREKLTFPVSSKNTIHVVKYTVFRMTWFDVRQEPYEKHAKLTRLGLDKYLRTAKCEEKIIKEVFDGGGVESTLVLYGAGSKFMNTASFSGRKFKHDSLIKRLRSKRNIDVEVVDEKYTSQACSSCNAKTGEFQKIVMNHRLRWEFAETATASLIETLTLQKTY

SEQ ID NO: 2186 - protein, 216 aa, Craniophora ligustri
YTNQKCHRVRKRLRFIKDIEERIRVDRESFEKETGIELTRKSKNVEIYTRFQLKWFDGKQKLYEQRRFQRLKFGKYINDKKMLHKIVDEYFGKEPDTLVVYGAGFDFMNKGTFKGHRKFRHNDILKIIKQRKKLSLYIINEAFTTKNCSKCYEKKIQQKLHVSKSPHRYVYCSVCRKGIHRDKNGAKNILLKFEYKLSSIPSFADTDMNSMGGGSS

SEQ ID NO: 2187 - protein, 271 aa, Lysandra bellargus
TCKERGDFERKRKSNVHPGAKTPIVTCSRRSGDDGGDGFEYKTLKKQRVVYETREHHRERKRSKFIKDVDSKIRNDWESTEKELGFGISCKNSKVQEYTEFQLKWFDEKQKVYEQRRLQRLRFDKYINDQKTNHKIVDDYFGKEPDTLVVYGAGFDFMNKGTFKGHRKFRHNDILKIIKRRPNLSLYIINEAFTTKNCSKCYESGVQQKLQVSKSPHRYVYCSVCRKGIHRDKNGAKNVLLKFEFKKNTIKSPVILSFAGTDMNVAGGGSS

SEQ ID NO: 2188 - protein, 254 aa, Atethmia centrago
TLNDYSFGASLKSRYVRSHTLEWKRQRIRNKLCRVSEEAEQKAREKLTFPVSSKNTSHVVEYTVFHMMWFDVRQEPYEKHAKLTRLGLDKYLRTAKCEEKIIKEVFDGGGVESTLVLYGAGSKFMNTASFSGRKFKHDSLIKRLRSKRNIDVEVVDEKYTSQACSSCNAKTGEFHKIVMNHRLLVLPKCKNKTRLSQSWSWSCANTPGLGLGLGLALPVLVLVLVLQQESCKSCNYLLVYYYLLKFTLNLRKTY

SEQ ID NO: 2189 - protein, 257 aa, Atethmia centrago
NKKYSNPKKRPKKTYDRIIAVDPGSRIPVAALDSKRLQFRRITKKYVRSHTLEWKRQRIRNKLCRVSEEAEQKAREKLTFPVSSKNTSHVVEYTVFRMMWFDVRQEPYEKHAKLTRLGLDKYLRTAKCEEKIIKEVFDGGGVESTLVLYGAGSKFMNTASFSGRKFKHDSLIKRLRSKRNIDVEVVDEKYTSQACSSCNAKTGEFHKIVMNSHRLRWGVCRNCNSEFHRDANAAKNILINYTRSTICRPGCSTSGAS

SEQ ID NO: 2190 - protein, 246 aa, Autographa pulchrina
TPIVTCTRFNDGGFEYKVLKKERIVYDSKEHHREKKRSRFIEDIEDRFRTDREDTERETGVVITPKSTNVCEYTRFQLKFDEKQRVYEQRRLQRLKFDKYINDQKMLRKLVDEFFGKEPDTLVVYGAGFDFMNTATFKGHRKFRHNDVLKIIRQRKNLSVFIINEAFTTKNCSKCYESGLKNHLHVSKSPHRYVYCSVCHKGIHRDKNGAKNILLKYEYTKSPNSLSSVGTDMGRAEGGSSQGSLS

SEQ ID NO: 2191 - protein, 250 aa, Hemaris fuciformis
SFLRQDDSRRSGQQSAYSRVRRSVRIQAHHQEVDTFAHSRMEARSSSEEIVGVYRNGRTTGQRTHRKGARRSVDTERRHERGTLRSFRLKWFESRQKPFETHSKLTRLKFDKYVNAARTNEKIVREVFLSDAPSDRVLVLYGAGYKFMNRATFSGRKFRHDDLLKRLRARRNITVETVDEAYTSKACSACNARDGSFHRLKIDHRLRRGVCPDCNGAPLDRDYNAARNILVNHTRSTVCRPSCTVANGAA

SEQ ID NO: 2192 - protein, 308 aa, Tenebrio molitor
MEKVPIMRQSVKHITYTTMGLLELLSSIGEKVPSAKEFRENARIYWERYFNVSSNKMFGCCFSTDGLAVSKSMNRLEKNDIRLLPQKKEKLTYDRVVAVDPGAKTPIVTCDEAFNYQMLSNKRVKFELKEYVRRDKLRMWTGSVENEIQKELMDNTEQLSFKNENYLEMAKFKLKYFDVKQKCYERRNVIRLRFDAYIQKQKVIHKIIKEFFVMKSSGASKRTLILYGNGVQFMNTATFYGHGKFFHNEIIKTIKINYKQLQLEMVDESYTTKTCSNCQRMNGLKISTGGHRYVYCSICHKGTHRDKN

SEQ ID NO: 2193 - protein, 584 aa, Tenebrio molitor
NLVYRVDEAVWMPCAACHGTDHSRSSSTKCKNYKPKIRKRNLDNTKSYQVYTVKSGLNRFFCSLLNGTIKAKLKQRICDDVKIVSRLMIETSYFIAAFYKYYHDHMPEKIFDKLNVLHFTYALKGSYNCKIDDPLNFISKYINSVRNGGYYDCKLRTYVIQEACKQYTTNFNNNIISHMFNRIKKFIKLLKIEENSTKIHDVCYNFYYNNDTSTNNEITKMLDIYKLRVKLVERNPVHYLPFMYELQTLQHTKGTRTCRVVPIMRQSVKHITYTTMGLLELLSSIGEKVPSAKEFRENARIYWERYFNVSSNKMFGCCFSTDGLAVSKSMNRPEKNDIRLLPQKKEKLTYDRVVAVDPGAKTPIVTCDEAFNYQMLSNKRVKFELKEYVRRDKLRMWTGAVENEIQKELMDNTEQLSFKNENYLEMAKFKLKYFDVKQKCYERRNVIRLRFDAYIQKQKVIHKIIKEFFVMKSSGASKRTLILYGNGVQFMNTATFYGHGKFFHNEIIKTIKINYKQLQLEMVDESYTTKTCSNCQRMNGLKISTGGHRYVYCSICHKGTHRDKNAAKNILLKNWFGFPSLAKQ

SEQ ID NO: 2194 - protein, 252 aa, Tenebrio molitor
IECFTLYLRIKRILQLTYDRVVAVDPGAKTPIVTCDEAFNYQMLSNKRVKFELKEYVRRDKLRMWTGAVENEIQKELMDNTEQLSFKNENYLEMAKFKLKYFDVKQKCYERRNVIRLRFDAYIQKQKVIHKIIKEFFVMKSSGASKRTLILYGNGVQFMNTATFYGHVKFFHNEIIKTIKINYKQLQLEMVDESYTTKTCSNCQRMNGLKISTGRHRYVYCSICHKGTHRDKNAAKNILLKNWFGFPSLAKQ

SEQ ID NO: 2195 - protein, 261 aa, Cydia splendana
VFRCAKPQMTEKKKKRCVEYDRVIAVDPGSRVPLATVESKRYSFKRVTRKYVRSHTLEWKRDRVRNKLIAPILAEMQKGRESPNFSVSSKNTDHVIEYTVFRMKWFAAMQVPYETHSKLTRLGLDKYIRIAKCEERIVREVFDGGGVSDVLVLYGAGSKFMNTASFSGRKFRHDSLLKRLRSKSNIRVEIVDESYTSQACSACNQRTGAFQKIGMTHRLRWGVCPTCHSEFDRDKNAAKNILINHIRSTICRPRCLPERAS

SEQ ID NO: 2196 - protein, 224 aa, Peribatodes rhomboidaria
SQKIHHFLGLHFQKMTLKQYWRRYFSISKNFGWNFYTDGVCISLSMNRLITKKDKYKAKRVRKRKLQTKMRTKWIKSTKKIIAADSGAKTPIVTCVRISDDTLEYKTLKKGKVVYETKEHREKKRLKFIKDVDSKFRNYRESLEKELGFVISCKNLNVEECTKFQLKWFYEKQKVYEQRKSQRLKFDKYINVQKTNHKIVDEYFGKEPALVVYGAGYDFMNKGT

SEQ ID NO: 2197 - protein, 217 aa, Pammene fasciana
VKFPFDCDGARLSLRGEKGVLVSNARPVFEYTVFRIKWFEAMQVPYESHSKLTRLGLDKYISIAKCEERIVRQVFDGGGASDVLVLYGAGCKFMNTASFSGRKFRHDSLLRRLRNKSNIQVEIVDESYTSQACSACNQRTGEFQKIGMNHRLRWGVCPTCHSDFDRDANAAKNILINHTRSTICRPRCLTVHLHGSFFGNFCVFSRLRNFIAPKKMH

SEQ ID NO: 2198 - protein, 271 aa, Dunaliella primolecta
HTHTHTHTHTHTHTHTHTHTHTHTHTQGSDPKRPVVVGVGASKMPPAAHGVQKFSAPTQLKKALLRAMLRGVGHSKLHPRMLMSLNEYKTTVSCSRCGARTVEPMVRDFVTHLQRKSRRLRECPVCKEEYFKQQQQQVEGMAEGGGEQQQVEGMAEGGGERQPVEGVSETDEEEEQEEGMSRQGSTDWAGMDLDEEEEEVGGVGEGGMGANEAEGEVHAAVPGRRRERVKKPQRSYQMHRDVNAAWNLWEVCVAQYFGHPRPRYLRADTAA

SEQ ID NO: 2199 - protein, 282 aa, Dunaliella primolecta
SICKHTNVAAHTTTADVTHTHRQGSDPKRPVVVGGGASKMLPAAHGVQKFSAPTQLKKALLRAMLRGVSHSKLHPRMLTWLNEYKTTVSCSRCGARTVEPMVRDFVSHLQRKSRRLRECPVCKEEYLKQQQQQQQIEGVAEGGGEQQQIEGMAEGGGEQEQVEGMAEGGGEQQPVEGVSETDEEEEQEEGMSRQGSTDWAGMDLDEEEEEVGGVEEGGMGANEAEGGVHAAVPGRRRERVKKPQLSYQMHRDVNAAWNLWEVCVAHYFGHPRPRYLRADTAA

SEQ ID NO: 2200 - protein, 274 aa, Dunaliella primolecta
SMCKHKNVAVHTQSCEAHTTTADVTHTQGSDPKRPVVVGGGASKMPPAAHGMQKFTAPTQLKKALLRAMLRRVGHAKLHPRMLTWLNEYKTTVSCSRCGARTVEPMVRDFVSQLPRKSRRLRECPVCKEEYLKQQQQQQQVEGVAEGGGGQQQVEGTAEGGGEQQPVEGVSETVEEEEQEEAMSRQGSTNWAGMDLDDEEEEVGGVEEGGMGGGEAEGGVHAAVPGRRRELVKKPQLSYQMHRDVNAAWNLWEVCVAQYFGHPRPRYLRADTGA

SEQ ID NO: 2201 - protein, 316 aa, Dunaliella primolecta
CILPFGHSFIAWRSWLLLMPQAASAFGVILACARLPDFHARIISEPFRSVQTLQLTSKCAWQECKGRKRGFPATFLSFSQEGTGNKRAHRAASARYLAVGASKMPPAHKGVHKFSAPTMVHSTLTRNVLRGAGGSRGHPFIIAPANEYKTTKSCSRCGGVTVEPYVRDRRNGESRKSRRLRECPDCKARHEAQHQQQGWAGGDRPNMERGQGRDAPTGMGVGDQHQQAGPGEASTSRSGGQGGGGGSVGVRSDHAVKSRARRASVEFTPQLAYQLHRDVNAAWNLWEVGVAMYAGVARPAYLMPHAHAAQPQGTQR

SEQ ID NO: 2202 - protein, 305 aa, Dunaliella primolecta
NTHTWLEYVQAPKCSCTHTELRSTHHNCRCNTHTHTWLKYVQAHKCSCTHTELRSTHHNCRCNTHTHTHTHTHTQGSDPKRPVVVGVGASKMPPAAHGVQKFSAPTQLKKALLCAMLRAVGHSKLHLRMLMALNEYKTTVSCSRCGARTVEPMVRDFVSHLQRKSRQLRECPVCKEEYFKQQQQIEGMAEGGGEQQPVEGVSETDEEVEKEEGMSRHGSTDWAGMDLDEEEEEVGGVEEGGMGANEAEGEVHAAVPGRRRERVKKPQRSYQMHRDVNAAWNLWEVCVAQYFGHPRPGFLRADTAA

SEQ ID NO: 2203 - protein, 253 aa, Dunaliella primolecta
SMCKHTNVAVHTQSCEAHTTTADVTHTHTHTHTQGSDPKRPVVVGVGASKMPPAAHGVQKFSAPTQLKKALLRAMLRGVGHSKLHPRMLMSLNEYKTTVSCSRCGARTVEPMVRDFVSHLQRKSRRLRECPVCKEEYLKQQQRQQVEGMAEGGGEQQQVEGMAEGGGEQQPVEGVSETDEEVEKEEGMSRHGSTDWAGMDLDEEEEEVGGVEEGGMGGNEAEGEVHAAVPGRRRERVKKPQRSYQMHRDVNAA

SEQ ID NO: 2204 - protein, 303 aa, Dunaliella primolecta
SMCKHTNVAVHTQSCEAHTTTADVTHTHTHTQGSDPKRPVVVGVGASKMPPAAHGVQKFSAPTQLKKALLRAMLRGVGHSKLHPRMLMSLNEYKTTVSCSRCGARTVEPMVRDFVSHLQRKSRRLHECPVCKEEYVKQQQRQQIEGMAEGGGEQQQIEGMAEGGGEQQQVEGMAEGGGEQQQVEGMAEGGGEQQPVEGVSETDEEVEKEEGMSRHGSTDWAGMDLDEEEEEVGGVEEGGMGANEAEGEVHAAVPGRRCERVKKPQRSYQMHRDVNAAWNLWEVCVAQYFGHPRPGYLRADTAA

SEQ ID NO: 2205 - protein, 250 aa, Dunaliella primolecta
HTHTHTQGSDPKRPVVVGVGASKMPPAAHGVQKFSAPTQLKKALLRAMLRGVGHSKLHPRMLMSLNEYKTTVSCSRCGARTVEPMVRDFVTHLQRKSRRLCECPVCKEEYFKQQQQIEGMAEGGGEQQQVEGMAEGGGEQQPVEGVSETDEEEEQEEGMSRQGSTGWAGMDLDEEEEEVGGVGEGGMGANEAEGEVHAAVPGRRRERVKKPQRSYQMHRDVNAAWNLWEVCVAQYFGHPRPRYLRADTAA

SEQ ID NO: 2206 - protein, 301 aa, Dunaliella primolecta
CRFAHAHTGFLLSSKGFKPINSLGPGSGFSLTCTNMNFRILCALPNTKPKSDVGLHTHTHTHTHTHTHTHTQGTDTRRVKYLAVGASKMPPAHKGVHKFSAPTMVHSTLTRNVLRGAGGSRGHPFIIAPANEYKTTKSCSRCGGVTVEPYVRDRRNGELRKSRRLRECPDCKARHEAQHQQQGWAGGDRPNMERGQGRDAPTGMGVGDQHQQAGPGEASTSRSGGQGGGGGSVGVRSDHAVKSRARRASVEFTPQLAYQLHRDVNAAWNLWEVGVAMYAGVTRPAYLMPHAHAAQPPGTQR

SEQ ID NO: 2207 - protein, 251 aa, Dunaliella primolecta
VCTHTHTHTHTHTHTHTHTHTQGKDTRRVKYLAVGASKMPPAHKGVHKFSAPTMVHSTLTRNVLRGAGGSRGHPFIIAPANEYKTTKSCSRCGGVTVEPYVRDRRNGELRKSRRLRECPDCKARHEAQHQQQGWAGGDRPNMERGQGRDAPTGRGVGDQHQQAGPGEASTSRSGGQGGGGGSVGVRSDHAVKSRARRASVEFTPQLAYQLHRDVNAAWNLWEVGVAMYAGVARPAYLMPHAHAAQPPGTQR

SEQ ID NO: 2208 - protein, 214 aa, Bellardia pandia
HFGINNAEIYKTLYSLCIKLKNSQYQTMNGHHSRKMQLAKFTSWFSEKSQDSPHQLNYELYSKHRLSIFLLKQSAFAQRKATRLKMQKYICVEKTVNQIAKFLVPDKKRKTLICIGSTEIAGNSPMKGYIRTPNRKIITALRNRAAEILFVNEIRTTKLCENCHCENITSKSPHRYQYCPNCRTCWNRDVNAGINILYLGECHINEIKKHVNFI

SEQ ID NO: 2209 - protein, 347 aa, Bellardia pandia
DGEKLNALKLKTKYWSSIKLFYNLQRYNEIHNLKNFSLIPIFKHGMHHIRYDSFALEYLLSSVGLRKLNRTTFDRDEEWRKYFTFPETSTKKFHYSLQTDGLSVSFSMAKPKAHFIGPMKKRKKHQRDETDCVGNLKKIRNTKYDDKIGLYPGLRLIYGGVKNGQPIKIKNSQYQTMNGHHSRKMQLAKFTSWFSEKSQESPHQLNYELYTKHRLSIFLLKQSVFAQRKVTRLKMQKYICVEKTTNQIAKFLVPDKKRKTLICIGSTEIAGNTPMMGYIRTPNRKIITALRNRAAEILFVNEFRTTKLCGNCHCENITSRSPHRYQYCPNCRTCWNRDVYAGINILT

SEQ ID NO: 2210 - protein, 215 aa, Bellardia pandia
KHHRDKTDCAGNLEKIRNTKYDDKIGLDPGVRLIYSGVKNGQPIKLKTSQYQTMNRHHSRKMQLAKFTSWFSEKSQESPHQSNYESYTKHRLSIFLLKQSAFAQRKVTRLKMQEYICVEKTVNQIAKSLVPDKKRKTLIFIGLTEIAGNSPMKGYIRTPNRKLITVLRNRAAEILFVNEFRKTKLCGNCHVKILHQNHHIGTSTTQTAVLVGIEM

SEQ ID NO: 2211 - protein, 321 aa, Bellardia pandia
SKKLFIDSYIQKWYAYLLSSVGLRKLNRTTFDRDEEWRKYFTFPETSTKKFHYSLQTDGLSVSFSMAKPKAHFIGPMKKRKKHQRDETDCVGNLKKIRNTKYDDKIGLDPGLRLIYGGVKNGQPIKIKNSQYQTMNGHHSRKMQLAKFTSWFSEKSQESPHQLNYELYAKHRLSIFLLKQLAFEQRKVTRLKMQKYICVEKTAYQIAKFLVPDKKRKTLICIGSTEIAGNSPMKEYIRTPNRKIITALRNRAAEILFVNEFRTIKLCGNCHCENITSRSPHRYQYCPNCRTCWNRDVNAGINILYLGECHINEIKKHVNFI

SEQ ID NO: 2212 - protein, 542 aa, Bellardia pandia
ITKRKSESPELEQTEIIVVKRCLRSTCHNDIIFEKIQKDAREISSLIVEASVYIHYSLMKRWKDGNFEQEKFLYYYYPLMKAKRSKYILDPVYSILRESMPLYDSSFRSNMFVHSANQYTTIFHNNIWMHAYNRTRRFFKNFGINNSEIYKTLSYLFEKESNKSPNELLLEKLRTELQWDGEKLNALKLKTKYWSSIKLFYNLQKYNEIHNLKNFSLIPIFKHGVHHIRYDSFAFEYLLSSVGLRKLNRTTFDRDEKWRKYFTFPETSTKKFHYSLQTDGLSVSFSMAKPKAHFIGPMKKRKKHQRDETDCVGNLKKIRNTKYDDKIGLDPGLRLIYGGVKNGQPIKIKYSQYQTMNGHHSRKMQLAKFTSWFSEKSQESPHQLNYELYTKHRLSIFLLKQSAFAQRKVTRLKMQKYICVEKTANQIAKFLVSDKKRKTLICIGSTEIAGNSPMKGYIRTPNRKVITALRNRAAEILFVNEFRTTKLCGNCHCENITSRSPHRYQYCPNCRTCWNRDVNAGINILYLGECHINEIKKHVNFI

SEQ ID NO: 2213 - protein, 382 aa, Bellardia pandia
STKSPNELLLEKLRTELQWDGEKLNALKLKTKYWSSIKLFYNLQRYNEIHNLKNFSLIPIFKHGMHHIRYDSFALEYLLSSVGLRKLNRTTFDRDEEWRKYFTFLETSTKKFHYSLQTDGLSVSFSMAKPKAHFIGPMKKRKKHQRDETDCVGNFKKIRNTKYDDKIGLDPGLRLIYGGVKNGQPIKIKNSQYQTMNGHHSRKMQLAKFTSWFSEKSQESPHQLNYELYTKHRLSIFLLKQSAFAQRKVTHLKMQKYICVEKTANQIAKFLVPDKKRKTLICIGSTEIAGNSPMKGYIRTPNRKIITALRNRAAEILFVNEFRTTKLCGNCHCENITSRSPHRYQYCPNCRTCWNRDVNAGINILYLRECHINEIKKHVNFI

SEQ ID NO: 2214 - protein, 750 aa, Platycheirus albimanus
VYTMTSNNTVKFCKTCNGTDHCRSSSKLCKNRTLPQKERFLQSSTEETIETYTVKMGFNAFCRDGVLKKRIVEDVLEISDLCIEASLYVHFHYMKILHEDGDNFPKMFTYNHLLDFYYHLQNKNQKKERVEKDEEYFKLRENRRIYDGSHRSFLIQAIAKQHETAMKNCISVHLIKRIARYLYEKTEKKTKKLYQWIDIVEAQLFEKDYTEKPCMEVEAFLEEFKFDPKKKFINLDNDWWSLIPFLFKLGQWFTGRNLKSFNIFPIFKPGRKHVRYGGEALRELLRATGLLKNTNAAEFSASTPKYWWKYFDVDHAVYGDLDASTLKIEPKNGKSFGMTFTTNGIDCSVGMNRYVRISVDNTGPNKTEKRKATAQTSEPIPKKKKTATKKKTTSTAATTSTAATSTAATTSTAATSTASTTSKAATSTSTAATTSTARTTAARGTTATPGTTAATSKEDFSNYKYLLGIDPGVVNYVGACFLDRETNSETNFVLKSATYKQQMGKERARRRKKIKISGKLEKELLEYRKLNPNISSKCSINLNSNLDFIKYRLNFFISSQKLYSQKNYCRLKWDSYMCSRRAVDILVNKLLDLNKSKEKTLVCFGDGSLEQGKSYGRNLIPAFNNLKKAFIRRKDKCRVIDVDEYLTTQSCSKCFSKLIDPPRHARVDRLVQQRRRHDHRFKTCKQCKTVWDRDVNAARNMINVALGIYDFRRKSSGGSIDLTRPSDWRAYKMKFSFPNSLKVAPVVTLR

SEQ ID NO: 2215 - protein, 747 aa, Platycheirus albimanus
SLEYFNQSTMTSKNVVKLCKKCNGTDHSRSSSKLCKNRTLPQKERFLQSTKEERIETYTVKMGFNAFCRDDVLKKRIVEDVLEISDLCIEASLYVHFHYMKILHEDGDNFPKMFTYNHLLDFYYHLQNKKQPKERVEKDEEYFTLRENRRIYNGSHRSYLIQAIAKQHETAMKNCISVHLIKRIARYLYEKTEKKTKKLYQWIDIVEAQLFEKDYTEKPCMEVEAFLEEFKFDPKKKFINLDNDWWSLIPFLFKLGQWFTGRNLKSFNIFPIFKPGRKHVRYGGEALRELLSATGLLKKVSAADFSASTPKYWWKYFDVDHAVYGDLDASTLKIEPKNGKSFGMTFTTNGIDCSVGMNRYVRISVDNTGPNKTEKRKATSQTSEPIPKKKKTATKKKTTSTAATAATTSTGATSTSTAATTSTSTSTAATTSTARTTAARGTTATPGTTAATSREDFSNYKYLLGIDPGVVNYVGACFLDRETNSETNFVLKSATYKQQMGKERARRRKKIKISGKLEKELLEYRKLNPNISSKCSINLNSNLDFIKYRLNFFISSQKLYSKKNYCRLNWDSYICSRRAIDILVNKLLDLNKSKEKTLVCFGDGSLEQGKSYGRNLIPAFNNLKKAFIRRKDKCRVIDVDEYLTTQSCSKCFSKLVDPPRHARVDRLVQQRRRHDHRFKTCKRCKTVWDRDVNAARNMINVALGIYDFRRKSSGGCIDLVRPSDWRAYKMKFSFPNSLKVAPVVTLR

SEQ ID NO: 2216 - protein, 424 aa, Platycheirus albimanus
KLNCLKRIIRKSCMEVEAFLEEFKFDPKKKFINLDNDWWSLIPFLFKLGQWFTGRNLKSFNIFPIFKPGRKHVRYGGEALRELLRATGLLKNANAADFSASTPKYWWKYFDVDHAVYGDLDASTLKIEPKNGKSFGMTFTTNGIDCSVGMNRYVRISVDNTGPNKTEKRKATAQTSEPIPKKKKTATKKKTTSTAATTSTGATSTSTAATSTSTAATTSTARGTTATPGTTAGTSREDFSNYKYLLGIDPGVVNYVGACFLDRETNSETNFVLKSATYKQKMGKERARRRKKIKISGKLEKELLEYRKLNPNISSKCSINLNSNLDFIKYRLNFFISSQKLYSKKNYCRLNWDSYICSRRAIDILVNKLLDLNKSKEKTLVCFGDGSLEQGKSYGRNLIPAFNNLKKATNVLRIFFQLQSNKCI

SEQ ID NO: 2217 - protein, 734 aa, Platycheirus albimanus
VYTMTSNNTVKFCKTCNGTDHSRSSSKLCKNRTLPQKERFLQSTKEERIETYTVKMGFNAFCRDDVLKKRIVEDVLEISDLCIEASLYVHFHYMKILHEDGDNFPKMFTYNHLLDFYYHLQNKNQKKERVEKDEEYFKLRENRRIYDGSHRSFLIQAIAKQHETAMKNCILVHLIKRIARYLYEKSETKTIYQWMVIVEDQLFEKDYTEKPCMEVEAFLEEFKFDPKKKFINLDNDWWSLIPFLFKLGQWFTGRNLKSFNIFPIFKPGRKHVRYGGEALRELLSATGLLKKVSVADFSASTPKYWWKYFDVDHAVYGDLDASTLKIEPKNGKSFGMTFTTNGIDCSVGMNRYVRISVDNTGPNKTEKRKATAQTSEPIPKKKKTATKKKTTSTAATTSTAATTSTGATSTSTAATSTSTAATTSTARGTTATPGTTAGTSREDFSNYKYLLGIDPGVVNYVGACFLDRETNSETNFVLKSATYKQQMGKERARRRKKIKISGKLEKELLEYRKLNPNISSKCSINLNSNLDFIKYRLNFFISSQKLYSKKNYCRLNWDSYICSRRAIDILVNKLLNLNKSKEKTLVCFGDGSLEQGKSYGRNLIPAFNNLKKAFIRRKDKCRVIDVDEYLTTQSCSKCFSKLVDPPRHARVDRLVQQRRRHDHRFKTCKRCKTVWDRDVNAARNMINVALGIYDFRTKSSGGSIDLARPSDWRAYKMKFSFPNSLKVAPVVTLR

SEQ ID NO: 2218 - protein, 248 aa, Platycheirus albimanus
LSLTDLVFQEALFICLDNKGQEIYIVGNNSIIKNNSLLTLSLNFCIEDIFKFFFTFFRKLYSKKNYCRLNWDSYICSRRAIDILVNKLLDLNKSKEKTLVCFGDGSLEQGKSYGRNLIPAFNNLKKAFIRRKDKCRVIDVDEYLTTQSCSKCFSKLVDPPRHARVDRLVQQRRRHDHRFKTCKQCKTVWDRDVNAARNMINVALGIYNFRTKSSGGSIDLARPSDWRAYKMKFSFPNSLKVAPVVTLR

SEQ ID NO: 2219 - protein, 251 aa, Platycheirus albimanus
KQQMGKERARRRKKIQISGKLEKELLEYRKLNPNISSKCSININSNSDYIKYRLKFFIASQKLHSKKNYCRLNWDSYISSRRAIDILVNKLLDLNKSKEKTLVCFGDGSLEEGKSYGRNLIPSFKNLKKAFLRRKDKCRVIDVDEYLTTQSCSKCFSKLVDPPRHARVDRLVQQRRRHDHRFKTCKQCKTVWDGDVNAARNMINVALGIYNFRTKTSGGSIDLARPSNWRANKMKFSFPNSLKVAPVVTLR

SEQ ID NO: 2220 - protein, 744 aa, Platycheirus albimanus
ILFRVDIYIYTMTSNKIVMLCKKCNGTDHSRSSSKLCKNRTLPQKERFLQSTKEERIETYTVKMGFNAFCRDDVLKKRIVEDVLEISDLCIEASLYVHFHYMKILHEDGDNFPKMFTYNHLLDFYYHLQNKKQPKERVEKDEEYFKLRENRRIYDGSHRSFLIQAIAKQHETAMKNCISVHLIKRIARYLYEKTEKKTKKLYQWIDIVEAQLFEKDYTEKPCMEVEAFLEEFKFDPKKKFINLDNDWWSLIPFLFKLGQWFAGRNLKSFNIFPIFKPGRKHVRYGGEALRELLSATGLLKKVSVADFSASTPKYWWKYFDVDHAVYGDLDASTLKIEPKNGKSFGMTFTTNGIDCSVGMNRYVRISVDNTGPNKTEKRKATAQTSEPIPKKKKTATKKKTTSTAATTSTAATTSTGATSTSTAATSTSTAATTSTARGTTATPGTTAGTSREDFSNYKYLLGIDPGVVNYVGACFLDRETNSETNFVLKSATYKQQMGKERARRRKKIKISGKLEKELLEYRKLNPNISSKCSINLNSNLDFIKYRLNFFISSQKLYSKKNYCRLNWDSYICSRRAIDILVNKLLDLNKSKEKTLVCFGDGSLEQGKSYGRNLIPAFNNLKKAFIRRKDKCRVIDVDEYLTTQSCSKCFSKLVDPPRHARVDRLVQQRRRHDHRFKTCKRCKTVWDRDVNAARNMINVALGIYDFRRKSSGGSIDLARPSDWRAYKMKFSFPNSLKVAPVVTLR

SEQ ID NO: 2221 - protein, 751 aa, Platycheirus albimanus
SLEYFNQSTMTSKNVVKLCKKCNGTDHSRSSSKLCKNRTLPQKERFLQSSTEETIETYTVKMGFNAFCRDGVLKKRIVEDVLEISDLCIEASLYVHFHYTKILHEDGDNFPKMFTYNHLLDFYYHLQNKNQKKERVAKDEEYFTLRENRRIYDGSHRSYLIQAIAKQHETAMKNCILVHLIKRIARYLYEKSETKTIYQWMVIVEDQLFQKDNTEKPCKEIEAFLEEFKFDPKKKFINLDNDWWSLIPFLFKLGQWFAGRNLKSFNIFPIFKPGRKHVRYGGEALRELLSATGLLKNKNQADFSASTPKYWWKYFDLEHAVYGDLDASTLKIEPKNGKSFGMTFTTNGIDCSVGMNRYVRISVDNTGPNKTEKRKATAQTSEPIPKKKKTATKKKTTSTAATTSTAATTSTGATSTSTAATTSTGATSTSTGATSTSTAATTSTARGTTETPGTTAATSREDFSNYKYLLGIDPGVVNYVGACFLDRETNSETNFVLKSATYKQQMGKERARRRKKIKISGKLEKEFLEYRKLNPNISPKCLITYSSDYIKYRLKFFNCSQKLYSQKNYCRLKWDSFICSRRAVDILVNKLLDLNKSKEKTLVCFGDGSLEQGKSYGRNLIPAFNNLKKAFIRRKDKCRVIDVDEYLTTQSCSKCFSKLVDPPRHARVDRLVQQRRRHDHRFKTCKRCKTVWDRDVNAARNMINVALGIYDFRRKSSGGSIDLARPSDWRAYKMKFSFPNSLKVAPVVTLR

SEQ ID NO: 2222 - protein, 744 aa, Platycheirus albimanus
ILFRVDIYIYTMTSNKIVMLCKKCNGTDHSRSSSKLCKNRTLPQKERFLQSTKEERIETYTVKMGFNAFCRDDVLKKRIVEDVLEISDLCIEASLYVHFHYMKILHEDGDNFPKMFTYNHLLDFYYHLQNKKQPKERVEKDEEYFKLRENRRIYDGSHRSFLIQAIAKQHETAMKNCISVHLIKRIARYLYEKTEKKTKKLYQWIDIVEAQLFEKDYTEKPCMEVEAFLEEFKFDPKKKFINLDNDWWSLIPFLFKLGQWFTGRNLKSFNIFPIFKPGRKHVRYGGEALRELLSATGLLKKVSVADFSASTPKYWWKYFDVDHAVYGDLDASTLKIEPKNGKSFGMTFTTNGIDCSVGMNRYVRISVDNTGPNKTEKRKATAQTSEPIPKKKKTATKKKTTSTAATTSTAATTSTGATSTSTAATSTSTAATTSTARGTTATPGTTAGTSREDFSNYKYLLGIDPGVVNYVGACFLDRETNSETNFVLKSATYKQQMGKERARRRKKIKISGKLEKELLEYRKLNPNISSKCSINLNSNLDFIKYRLNFFISSQKLYSKKNYCRLNWDSYICSRRAIDILVNKLLDLNKSKEKTLVCFGDGSLEQGKSYGRNLIPAFNNLKKAFIRRKDKCRVIDVDEYLTTQSCSKCFSKLVDPPRHARVDRLVQQRRRHDHRFKTCKRCKTVWDRDVNAARNMINVALGIYDFRRKSSGGSIDLARPSDWRAYKMKFSFPNSLKVAPVVTLR

SEQ ID NO: 2223 - protein, 735 aa, Platycheirus albimanus
VYTMTSNKIVMLCKKCNGTDHSRSSSKLCKNRTLPQKDRFLQSTKEERIETYTVKMGFNAFCRDDVLKKRIVEDVLEISDLCIEASLYVHFHYMKILHEDGDNFPKMFTYNHLLDFYYHLQNKKQPKERVEKDEEYFKLRENRRIYNGSHRSYLIQAIAKQHETAMKNCISVHLIKRIARYLYEKTEKKTKKLYQWIDIVEAQLFEKDYTEKPCMEVEAFLEEFKFDPKKKFINLDNDWWSLIPFLFKLGQWFAGRNLKSFNIFPIFKPGRKHVRYGGEALRELLRVTGLLKNTSAADFSASTPKYWWKYFDVDHAVYGDLDASTLKIEPKNGKSFGMTFTTNGIDCSVGMNRYVRISVDNTGPNKTEKRKATAQTSEPIPKKEKTATKKKTTSTAATTSTAATTSTGATSTTSTGATSTSTAATTSTARGTTETPGTTAATSREDFSNYKYLLGIDPGVVNYVGACFLDRETNSETNFVLKSATYKQQMGKERARRRKKIKISGKLEKEFLEYRKLNPNISPKCLITYSSDYIKYRLKFFNCSQKLYSQKNYCRLKWDSFICSRRAVDILVNKLLDLNKSKEKTLVCFGDGSLEQGKSYGRNLIPAFNNLKKAFIRRKDKCRVIDVDEYLTTQSCSKCFSKLVDPPRHARVDRLVQQRRRHDHRFKTCKQCKTVWDRDVNAARNMINVALGIYNFRTKSSGGSIDLARPSDWRAYKMKFSFPNSLKVAPVVTLR

SEQ ID NO: 2224 - protein, 445 aa, Platycheirus albimanus
NICIFEIYTPEFNDLDASTLKIEPKNGKSFGMTFTTNGIDCSVGMNRYVRISVDNAGPRKAIKRKATAQTSEPIPKKKKTATKKNTTSTAATTSTSETSTSTAATTSTGATSTSTAATSTSTAATTSTARTTAARGTTATPGTTAATSREDSEDFSNYKYLLGIDPGVVNYVGACFLDRETNSETNFVLKSATYKQQMGKEIARRRKKIRISGKLEKELLEYRKLNPNISSKCSINLNSNLDFIKYRLIFFISSQKLYSKKNYCRLNWDSHISSRRAIDILVNKLLDLNKSKEKTLVCFGDGSLAEGKSYGRNLIPSFNNLKKAFLRRKDKCRVIDVDEYLTTQSCSKCFSKLVDPPRHARVDRLVQQRRRHDHRFKTCKQCKTVWDRDVNAARNMINVALGIYNFRTKSSGGSIDLARPSDWRAYKMKFSFPNSLKVAPVVTLR

SEQ ID NO: 2225 - protein, 327 aa, Platycheirus albimanus
TGATSTSTAATSTSTAATTSTARTTAARGTTAPPEDFSNYKYLLGIDPGVVNYVGACFLDRETNSETNFVLKSATYKQQMGKERARRRKKIQISGKLEKELLEYRKLNPNISSKCSINLNSNSDYIKYRLKFFIASQKLYSKKNYCRLNWDSYICSRRAIDILVNKLLDLNKSKEKTLVCFGDGSLAEGKSYGRNLIPSFNNLKKAFLRRKDKCRVIDVDEYLTTQSCSKCFSKLVDPRRHARVDRLVQQRRRHDHRFKTCKQCKTVWDRDVNAARNMINVALGIYNFRTKSSGGSIDLARPSDWRAYKMKFSFPNSLKVAPVVTLR

SEQ ID NO: 2226 - protein, 240 aa, Platycheirus albimanus
KESNSANIGTNTEEEKNSNKEEYNINSSNNINLLGIDPGVVNYVGACFLDRETNSETNFVLKSATYKQQMGKERARRRKKIQISGKLEKELLEYRKLNSNISSKCSINTNSNSDNIKYRLKFFIASQKLYSKKNYCRLNWDSYISSRRAIDILVNKLLDLNKSKEKTLVCFGDGLLGEGKRYGRNLIPSFNNLKKAFLRRKDKCRVIDVDEYLMTQSCSKCFSKLVDPPRHARVDRLVHI

SEQ ID NO: 2227 - protein, 240 aa, Platycheirus albimanus
KESNSANIGTNTEEEKNSNKEEYNINSSNNINLLGIDPGVVNYVGACFLDRETNSETNFVLKSATYKQQMGKERARRRKKIQISGKLEKELLEYRKLNSNISSKCSINTNSNSDNIKYRLKFFIASQKLYSKKNYCRLNWDSYISSRRAIDILVNILLDLNKSKEKTLVCFGDGSLGEGKRYGRNLIPSFNNLKKAFLRRKDKCRVIDVDEYLTTQSCSKCFSKLVDPPRHARVDRLVHI

SEQ ID NO: 2228 - protein, 200 aa, Platycheirus albimanus
TDMSGLAWTTQDQGKQLKFVRKSATYKQQMGKERARRRKKIQISGKLEKELLEYRKLNSNISSKCSINTNSNSDYIKYRLKFFIASQKLYSKKNYCRLNWDSYISSRRAIDILVNKLLDLNKSKEKTLVCFGDGSLGEGKRYGRNLIPSFNNLKKAFLRRKDKCRVIDVDEYLTTQSCSKCFSKLVDPPRHARVDRLVHI

SEQ ID NO: 2229 - protein, 776 aa, Platycheirus albimanus
LIYFNHSTMTSKNVVMLCKKCNGTDHCRSSSKLCKNRILPQKERFLQSSTEETIETYTVKMGFNAFCRDEVLKKRIVEDVLEISDLCIEASLYVHFHYTKILHEDGDNFPKMFTYNHLLDFYYHLQNKKQKKERVARDEEYFTLRENRRIYDGSHRSFLIQAIAKQHETAMKNCISVHLIKRIARYLYEKTEKKTIYQWMVIVEDQLFQKDNTEKPCTEIEAFLEEFKFDPKKKFLNLDNDWWSLIPFLFKLGQWFAGRNLKSFNIFPIFKPGRKHVRYGGEALRELLSATGLLKKVSVADFSASTPKYWWKYFDVDHAVYGDLDASTLKIEPKNGKSFGMTFTTNGIDCSVGMNRYVRISVDNTGPNKTEKRKATAQTSEPIPKKKKTATKKKTTSTAATTSTAGTTSTAATSTAATTSTAATTSTAATTSTAATTSTAATTSTAATTSKAATSTSTSTAATTSTARTTAARGTTATPGTTTSREDFSNYKYLLGIDPGVVNYVGACFLDRETNSETNFVLKSATYKQQMGKERARRRKRIKISGKLEKELLEYRKLNPNISPKCLVTYSSDYIKYRLKFFNCSQKLYSQKNYCRLKWDSIICSRRAVDILVNKLLDLNKSKQKTLVCFGDGSLEQGKSYGRNLIPAFNNLKKAFIRRKDKCRVIDVDEYLTTQSCSKCFSKLVDPPRHARVDRLVQQRRRHDHRFKTCKQCKTVWDRDVNAARNMINVALGIYDFRRKSSGGCIDLARPSDWRAYKMKFSFPNCLKVAPVVTLK

SEQ ID NO: 2230 - protein, 743 aa, Platycheirus albimanus
LIYFNHSTMTSKNVVMLCKKCNGTDHCRSSSKLCKNRILPQKERFLQSSTEETIETYTVKMGFNAFCRDGVLKKRIVEDVLEISDLCIEASLYVHFHYTKILHEDGDNFPKMFTYNHLLDFYYHLQNKKQKKERVARDEEYFKLRENNRVYDGSYRSFLIQAIAKQHETAMKNCISVHLIKRIARYLYEKTEKKTIYQWMVIVEDQLFQKDNTEKPCTEIEAFLEEFKFDPKKKFINLDNDWWSLIPFLFKLGQWFAGRNLKSFNIFPIFKPGRKHVRYGGEALRELLSATGLLKKVSVSDFSASTPKYWWKYFDVDHAVYGDLDASTLKIEPKNGKSFGMTFTTNGIDCSVGMNRYVRISVDNTGPNKTEKRKATAQTSEPIPKKKKTATKKKTTSTAATTSTAATTSTAATTSKAATSTSTAATTSTARTTAARGTTATPGTTTATSREDFSNYKYLLGIDPGVVNYVGACFLDRETNSETNFVLKSATYKQQMGKERARRRKKIKISGKLEKELLEYRKLNPNISPKCLINYSSDYIKYRLKFFNCSQKLYSKKNYCRLKWDSIICSRRAVDILVNKLLDLNKSKEKTLVCFGDGSLEQGKSYGRNLIPAFNNLKKAFIRRKDKCRVIDVDEYLTTQSCSKCFSKLVDPPRHARVDRLVQQRRRRRHDHRFKTCKQCKTVWDRDVNAARNMINVALGIYDFRRKSSGGCIDLARPSDWRAYKMKFSFPNCLKVAPVVTLK

SEQ ID NO: 2231 - protein, 411 aa, Platycheirus albimanus
FFGIDSEILVEIFRFGACSVWRPRRVNTENRAQKWKIFWYDIHNEWHEFRCSVGMNRYVRISVDNTGPKKTEKRKATAQTSEPIPKKKKTATKKKTTSTAATTSTAATTSTAATTSTAATSTAATTSTAATSTAATTSKAATSTSTAATTSTARTTAARGTTATPGTTAATSREDFSNYKYLLGIDPGVVNYVGACFLDRETNSETNFVLKSATYKQQMGKERARRRKKIKISGKLEKELLEYRKLNPNISPKCLITYSSDYIKYRLKFFNCSQKLYNKKNYCRLKWDSYICSRRAVDILVNKLLDLNKSKEKTLVCFGDGSLEQGKSYGRNLIPAFNNLKKAFIRRKDKCRVIDVDEYLTTPTQSCSKCFSKLVDPPRHARVDRLVTTIDSKRANSVKLFGIVMSMLLEI

SEQ ID NO: 2232 - protein, 257 aa, Platycheirus albimanus
LFVRRCELCGRLFPGQGNKFRNKFCSEVGHIQATNGKKRARRRKKIRISGKLEKKSLEYRKLNPNISSKCSINSNSNPDFIKYRLKFFISSQKLYSQKNYCRLNWDSYISSRRAIDILVTNKLLDLNKSKEKTLVCFGDGSLEEGKSYGLNLIPAFNNLKKAFLRRKDKCRVIDVGEYLTTQSCSKCFSKLVDPPKHARVDRLVQQRRRHDHRFKTCKQCKTVWDRDVNAARNMINVALGIYNFRKKSSGGSIGLIK

SEQ ID NO: 2233 - protein, 1488 aa, Steromphala cineraria
CQLTIAVVRGWRKDPFGILLQASQDGELDTVDQICTKHKINVNRRGPNGKTALMAASLNGHRAVFDFLRSNGADVYMLDDNKNTILHFACFNDNDEFVKYLLSLNITDINIRGRCGRTPIMVAAQFGCRKVFDLLRTEGADINVVEDSENTILHVACSNDNVEFVKYLLSLNIADINIRGQWGGTPIMVAAQEGCRKVFDLLRAEGADINVVDEDKDSILHYACLNDNVEFVKYLLSLNIADINIRGQWGGTPIMVAAQLGCRKVFDLLRTEGADINVVDNYKNTILHVACSNDNVEFVKYLLSLNIADINIRGQWGNTPIMVAAERGCRKVFDLLSAEGADINVVDNNKDSILHYACLNDNVEFVKYLLSLNIADINIRGQWGGTPIIVAAQFECRKVFDLLRTEGADINVVDDYKNTILHYACFNDNVEFVKYLLSLNIADINIRGPWGRTPIMIAAHYGCRKVFDLLRAEGADINVVDEDKNSILHYACFNDNVEFVKYLLSLNIADINIRGQWGRTLIMIAAHYGCRKVFDLLRAEGADINVVDEDKSSILHVACSNDNVEFMKYLLSFNIADINIRGQGGRTPIMFPAQKGCRKVFDLLRAEGADINVVDDYKNSILHYACFNDNVEFVKYLLSLNITDINSRGQLGGTPIMIAAQKGCRKVFDLLRAEGADINVVDDNKNTILHVACLNDNVEFVKYLLSLNIADINIRGQWGRTPIMIAAHYGCRKVFDLLRAEGADINELDDNKNTILHVACLNDNVEFVKYLLSLNIADINIRGQWGRTPIMIAAHYGCRKVFDLLRAEGADINVVDEDKNSILHVACFNDNVEFVKYLLSLNIADINIREQGGGTPIMVAAQEGCRKVFDLLRAEGADINELDDNKNTILHVACLNDNVEFVKYLLSLNIADINIRGQWGRTPIMIAAHYGCRKVFDLLRAEGADINVVDEDKNSILHVACSNDNVEFVKYLLSLNIADINIRGQGGRTPIMFPAQKGCRKVFDLLRAEGADINVVDDNKNTILHVACLNDNVEFVKYLLSLNIADINIREQGGGTPIMVAAQEGCRKVFDLLRAEGADINELDDNKNTILHVACLNDNVEFVKYLLSLNIADINIREQGGGTPIMVAAQEGCRKVFDLLRAEGADINVVDEDKNTILHYACFNDNVEFVKYLLSLNIADINISGQWDRTPIMVAAEKGCRKVFDLLRAEGADINVVDEDKNTILHYACFNDNVEFVKYLLSLNIADINIREQGGGTPIMAAAQEGCRKVFDLLRAEGADINVVDDNKNTILHVACLNDNVEFVKYLLSLNIADINIREQGGGTPIMVAAQEGCRKVFDLLRAEGADINELDDNKNTILHVACLNDNVEFVKYLLSLNIADINIREQGGGTPIMVAAQEGCRKVFDLLRAEGADINVVDEDKNTILHYACFNDNVEFVKYLLSLNIADINIRGQWDRTPIMVAAEKGCRKVFDLLRAEGAEVREEQHQ

SEQ ID NO: 2234 - protein, 207 aa, Dryobotodes eremita
IAILGAAYKPGISVSLSMNRIKQEQFPNKKPKRADYDCIILVDPGSRLPLATVEPRRYAFRPITKKYVLSYMLEWKRDNKLISQIGAAEQWDRESFTFPILSKNINHVAEYTLFRLKRFDIRQSPYELHAKLTRLKLDKYSRTVKCEERIVRQVFKSSGVEKKLVLYGAGSTFMNKATFPGRKFKHDSLLRRLRSKRNIDVEVVVES

SEQ ID NO: 2235 - protein, 222 aa, Philereme vetulata
KVQSHRARKRLRFLKDIEERIKADRESTEQEIRIELTQKSQNAEPYTRFQLKWFDEKQRIYEQRRVQRLMFDKYINDQKMLHKIVDEYFGKEPDTLVVYGAGFDFMNKGTFKGHRKFRHHDVIKIIKQRRNLSVYVINEAYTTKNCSYCHDRDRIQQKLSVSKSLHRYVHCSVCRKGIHRDKNGAKNILLKYENMKKLPISLSSIGTDMSLVDGGSPQGSLS

SEQ ID NO: 2236 - protein, 269 aa, Pollenia angustigena
NGANILIFQKLVVKSKNFSLQTDGVAVSFSMKKPKRIESTPKKKKKKYRKKIGLDPGLRLIYGGVRNGKPIKLSSTSYHHMSGFHSRNVKLKNYTKNFKEESQLSPYSENYIEYTRYQLEIFHLKQTLYSQRKVTKLKLQKFICVEKTVNTVAENLVPDMKQKTLICIGSTEIAANSPMRGYVRTPNRKLIAALRRRKADILLVNEFRTTKLCANCFSENTTSKTPHRYQYCPNCRTCWNRDVNAGINILYLGECIIHQIKKIQILLEI

SEQ ID NO: 2237 - protein, 231 aa, Pollenia angustigena
KFNENFKEDSELSPYAENFKEYTKYQLEIFKQKQCLYSQRKVTKLKLQKFINVEKTVNAVAANLVPDMKEKTLICIGSTEIAANSPMRGYIRTPNKKLIAALRKRRADVLFVNEFRTTKLCANCFRENTTSKSPHRYQYCPNCSICWNRDVNAGKNISTLASASSINVKNTRILLEFKYHYFLYGEKYVYMSVFLQNGLTPTDPANTTVLGGSEGITINRLLTCVLIKLLR

SEQ ID NO: 2238 - protein, 259 aa, Pollenia angustigena
KVKNELEVKLLLYEKKNRLEQKNPDCSGNLLKIRSTTYDNKLGLDPGLRLIYGGVKNGKPIKLRSTTYHHMSGFYSRKRKLKKFTENFKEDSKHSPYAENFKEYTKYQLEIFKQKQCLYSQRKVTKLKLQKFINVEKTVNAVAANLVPDMKEKTLICIGSTEIAANSPMRGYIRTPNKKLIAALRKRRADVLFVNEFRTTKLCANCFRENTTSKSPHRYQYCPNCSICWNRDVNAGKNILYLGECIVNQREKHKNFVRI

SEQ ID NO: 2239 - protein, 225 aa, Pollenia angustigena
RLIEYFKLPETANKKFNYSLQTDGVAVSFSMKKPKRVESTPKKKLQQNEADCSGNLLKIRSTNYDNKLGLDPRLWLIYGGVKNGKPIKLSSKTHHHMSGFHSRNLKLKKYTEHFTENSQVSPYAAYLEEYTKYQLKIFKQKQHLYSQRKVTKLKLQKFINVEKTVNVAAANLVPDLKEKTLICIGSTEIAANSPMRGYVRTPNNKLIAALRRRADILLVNEFRTT

SEQ ID NO: 2240 - protein, 544 aa, Pollenia angustigena
MSKPPSPAAEETETVVVKRALRSTCKNEAIFQKIQLDVREMSSLFVDVSRYLHFSLMKQWSTGNFEPIKFQSYYYPLMKKKKSIYVLDSEYEELRNNLPLYDSSFRSNLFTAAANQYEVIFHNNLWMHAYSRLRRFFRYEKDKKKVYRTLSYIFQSTSTEVPDEELLQQMRDKLWWDGEKLDKIQNRKLFWSYIPLFYNLQRYNEKMNLKNFSLIPILKHGLHHIQYDSFAFYQLLCGLKLYKGSRLNFDREIEWRKYFNFPETSSKKLNFSLQTDGVAVSFSMKKPKRIESTPKKKKKIQKNEADCSGNLLKIRSTTNDNKLGLDPGLRLIYGGVRNGKPIKLSSTSYHHMSGFHSRNVKLKNYTKNFKEESQLSPYSENYIEYARYQLEIFHLKQTLYSQRKVTKLKLQKFICVEKTVNTVAENLVPDMKQKTLICIGSTEIAANSPMRGYVRTPNRKLIAALRRRKADIFLVNEFRTTKLCANCFSENTTSKTPHRYQYCPNCRTCWNRDVNAGINIVYLGECIINQIEKNTNFVRNLSFI

SEQ ID NO: 2241 - protein, 349 aa, Pollenia angustigena
SYIPLFYNLQRYNEKMNLKNFSLIPILKHGLHHIQYESFAFYQLLCGLKLYKGSRLNFDREIEWRKYFNFPETSSKKFNFSLQTDGVAVSFSMKKPKRIESTPKKKKKIQKNEADCSGNLLKIRSTTYDNKLGLDPGLRLIYGGVRNGKPIKLSTTSYHHMSGFHSRNVKLKNYTKNFKEESQLSPYSENYIEYARYQLEIFHLKQTLYSQRKVTKLKLQKFICVEKTVNTVAENLVPDMKQKTLICIGSTEIAANSPMRGYVRTPNRKLIAALRRRKADILLVNEFRTTKLCANCFSENTTSKTPHRYQYCPNCRTCWNRDVNAGINILYLGECIIHQIEKIQILLEI

SEQ ID NO: 2242 - protein, 223 aa, Pollenia angustigena
RNLNELKVRRKRRKKIQKNKADCSGNLLKIRSTTYDNKLGLDPGLRLIYGGVRNGKPIKLSSTSCHHMSGFHSRNVKLKNYTKHFKEESQLSPYSENYIEYARYQLEIFHLKQTLYSQRKVTKLKLQKFICVEKTVNTVAENLVPDMKQQTLICIGSTEISANSPMRGYVRTPNRKLIAALRRRKADILLVNEFRTTKLCANCFSENTTSKTPHRYQRIAFCN

SEQ ID NO: 2243 - protein, 338 aa, Pollenia angustigena
MNLKNFSLIPILKHGLHHIQYDSFAFYQLLCGLKLYKGSRLNFDREIEWRKYFNFPETSSKKFNFSLQTDGVAVSFSMKKPKRIESTPKKKKKIQKNEADCSGNLLKIRSTTYDNKLGLDPGLRLIYGGVRNGKPIKLSSTSYHHMSGFHSRNVKLKNYTKNVKEESQLSPYSENYIEYARYQLEIFHLKQTLYSQRKVTKLKLQKFICVEKTVNTVAENLVPDMKQKTLICIGSTEIAANSPMRGYVRTPNIKLIAALRRRKAEILLVNEFRTTKLCANCFSENTTSKTPHRYQYCPNCRTCWNRDVNAGINILYLGECIIHQIEKNTNFVRNLSFI

SEQ ID NO: 2244 - protein, 218 aa, Pollenia angustigena
GYILDIYGGVRNGKPIKLSSSSYHHMSGFHSRNVKLKNYTKNFQEESQLSPYSENYIEYARYQLEIFHLKQTLYSQRKVTKLKLQKFICVEKTVNTVAENLVPDMKQKTLICIGSTEIAANSPMRGYVRTPNRKLIAALRRRKADILLVNEFRTTKLCAKCFSENTTSKTPHRYQYCPNCRTCWNRDVNAGINILYLGECIIHQIEKNTNFVRNLSFI

SEQ ID NO: 2245 - protein, 252 aa, Pollenia angustigena
RIKSTPKNKTKVQQIESDCSGNLLKIRSQTYDNKLGLDPGLRLIYGGVGNGKPIKLKSTTYHTMSGFHSRNCKLQKYTMKFKEDSQLSPYAENSEAYTKYQLTIFDQKQKLYSQRKVTKLKLKKFINVEKTVYTVAASLVPNMKEKNLICIGSTKIAANSPMRGYVRTPYRKLITAQRKRRADILHVNEFRTTKLCANCFSENITSKSPHRYQYCPNCSTCWNRGVNAGINILYLGECVINQKEKHENFFRN

SEQ ID NO: 2246 - protein, 545 aa, Pollenia angustigena
RDRNRCCKNALRNTCKNEAVFNQIQNDVREMSALFVEVSRYIHFCLMKRWRENNFEPVHFESFYYCLMKKKRPKYKIDTEYEAMRGELPLYDSSYRSNIFIASANQYHVIFHNNIWRHAYTRLRRFFKNEPDKKKVYRTLSHLFEPNSKEIPDTNLLEKMRSELMWNGEKLYNIKNKKLFWTSVRLFYNLQRFNEKNGLKNFALIPILKHGSHHIQYDSMAFYHMLCGLKLYKGKWSTFDRETEWRKYFKFPETSTKKFNFSMQTDGVAISFSMKKPNRREISKTKKKKVQKDECDCSGNLVKIRSTNYDNKIGLDPGLRLIFGGICNGKPIKLKNATYQQMSGFHCRKLKLSTYSQHFKEDSQLSPYAENFNLYIKYQLSIFERKQSLYSQRKVTRLKLKKFICVQQTANTIAKNLVANVNEKTLICIGSTEIGANSPMKGYRRTPNKKIIEALKARKADILMVNEFRTTKLCAKCYNENITSRSPHRYQYCPNCRTCWNRDVNAGANILYLGECIVNETEKNHSFNRTIKSIVISNIAKNTNT

SEQ ID NO: 2247 - protein, 311 aa, Pollenia angustigena
SCTKVNGVLLSERQNGEYFLKFPETSTKKFNFSMQKPNRREISKTKKKKVQKDECDCSGNLDKIRSTNYDSKIGLDPGLRLIFGGIRNGKPIKLKNATYQQMTGFHCGKLKLNTYTKHFKEDSQLSPYSENFNQYIKYQLSIFERKQSLYSQRKVTRLKLKKFICVQHTANTIAKNFVANVNEKTLICIGSTEIAANSPMKGYIRTPNKKIIEALKTRKADILMVNEFRTTKLCAKCYNENITSRSPHRYQYCPNCRTCWNRDVNAGANILYLGECIVNETEKNRNFNKQQSIVISNIAKIRILDYFFKIV

SEQ ID NO: 2248 - protein, 304 aa, Pollenia angustigena
SCTKVNGVLLSERQNGEYFLKFPETSTKKFNFSMQKPNRREISKTKKKKVQKDECDCSGNLDKIRSTNYDSKIGLDPGLRLIFGGIRNGKPIKLKNATYQQMTGFHCGKLKLNTYTKHFKEDSQLSPYSENFNQYIKYQLSIFERKQSLYSQRKVTRLKLKKFICVQHTANTIAKNFVANVNEKTLICIGSTEIAANSPMKGYIRTPNKKIIEALKTRKADILMVNEFRTTKLCAKCYNENITSRSPHRYQYCPNCRTCWNRDVNAGANILYLGECIVNETEKNRNFNKQQSIVISNIAKNTNT

SEQ ID NO: 2249 - protein, 431 aa, Pollenia angustigena
ILNTKRYDSSYRSNIFIASANQYHVIFHNIWMHAYTRLRRFFKNEPDKKKVMWNGENLHNIKNKKLFWTSVRLFYNLQRFNEKNGLKNFALIPILKHGSHHIQYDSLAFHQMLCGLKLYKGKWSTFERETEWRKYLKFPETSTKKFNFSMQTDGVAISFSMKKPNRREISKTKKKKVQKDECDCSGNLDKIRSTNYDSKIGLDPGLRLIFGGICNGKPIKLKNATYQQMSGFYCRKVKLNTYTKHFKEDSQLSPYPENFNQYIKYQLSIFERKQSLYSQRKVTRLKLKKFICVQQTANTIAKNLVANVKEKTLICIGSTEIAANSPMKGYIRTPNKKIIEALKARKADILMVNEFRTTKLCAKCYNENITSRSPHRYQYCPNCRTCWNRDVNAGANILYLGECIVNETEKNRNFNKQQSIVISNIAKNTNT

SEQ ID NO: 2250 - protein, 248 aa, Pollenia angustigena
TRDFKVQKDECDCSGNLVKIRSTNYDSKIDLDPGLRLIFGGICNCKPIKLKNATYQQMTGFHCRKLKMNTYTKHFKEDSQLSPYSENFNQYIKYQLSIFERKQSLYSQRKVTRLKLKKFICVQQTANTIAKNLVANVKEKTLICIGSTEIAANSPMKGYIRTPNKKIIEALKARKADILMVNEFRTTKLCAKCYNENITSRSPHRYQYCPNCRTCWNRDVNAGANILYLGECIVNETEKIATLINNKV

SEQ ID NO: 2251 - protein, 246 aa, Pollenia angustigena
TRDFKVQKDECDCSGNLVKIRSTNYDSKIDLDPGLRLIFGGICNCKPIKLKNATYQQMTGFHCRKLKLNTYTKHFKEDSQLSPYSENFNQYIKYQLSIFERKQSLYSQRKVTRLKLKKFICVQQTANTIAKNLVANVKEKTLICIGSTEIAANSPMKGYIRTPNKKIIEALKARKADILMVNEFRTTKLCAKCYNENITSRSPHRYQYCPNCRTCWNRDVNAGRDETIRVNTSTYSILLYKYQLFL

SEQ ID NO: 2252 - protein, 203 aa, Pollenia angustigena
LHWTAGLDPGVRLLFGGVRNGKPIKLKNATSQMTGFHCRKMKLNTYTKHFKEDSQLSPYSENFHQYIKYQLSIFERKQSLYSQRKVTRLKLKKFMCSTEKTRIYIRSTEIAANSPMKGYIRTPNKKNIEALKTRKADIFMVNEFRTTKLCAKCYNENITSRSPHRYRYFPNCRTCWHRDVNAGANILYLGECIVNETEKKSQL

SEQ ID NO: 2253 - protein, 439 aa, Pollenia angustigena
KRKNLYMFLILNTKNYAIIYPCTTALSARIYLLQLLTNMKLYFTTIYGCTLTADCVDFLEMRRIKKRCTELYRLDKLDKIQNRKLFWSYIPLFYNLQRYNEKMNLKNFSLIPILKHGLHHIQYDSFAFYQLLCGLKLYKGSWLNFDRKIEWRKYFNFPETSSKKFNFSLQTDCVAVSFSMKKPKRFESTTKKKKKIQKNEADCSGNLLKTRSTTYDNKLGLDPGLRLIYGGVKNGKPIKLSSTSYHHMSGFHSRNVKLKNYTKNFKESQLSPYSENYIEYARYQLEIFHLKQTLHSQRKVTKLKLQKCICVEKTVNTVAENLVPDMKQKTLICIGSTEIADNSPMRGYVRTPNRKLIAALRRRKADILLVNEFRTTKLCANCFGENTTSKSPHRYQYCPNCRTCWNRDVNAGINILYLGECIIHQIEKNTNFVRNLSFI

SEQ ID NO: 2254 - protein, 206 aa, Catocala fraxini
NYSKIRSVDPGAKTPTVTCMRNSGSSGSFVYNILKKERVVYEFKYHHRSRKRLRFIKDVEDRVRLLDQEAAGLETVASLTPKSSNVQLYTRFQLKWFYEKQRIYEQRRLQRLKFDKFMNDQKMLNKFVDEYFGKEPDTLVVYGAGFDFINKRSCKGHCKFRHNEVLKIAKQRKNLSVYVINEALYIHIHTCTARPLFCSDPNTVGL

SEQ ID NO: 2255 - protein, 231 aa, Apotomis betuletana
TRGRVPIATVESKKFAFKRLTKKYVRSHTLECKRERARDKILKPVLDAVHRERASFTFPVSSKNTDHVIEYTIFRMKWFEAMQVPYEKHSKLTRFGLDKYMRTARCEERIVREVFDGGGIEKVLVLYGAGSKFMNAASFSGRKFKHDSLLKKLRSKSNVAVEIVDEVYTSQACSACNERTGKFIKIGMAWTVDCGGEHAPCATAYSTGTLTPPKIFSSTISGLPSVGHDVL

SEQ ID NO: 2256 - protein, 212 aa, Apotomis betuletana
NVTIRLLRITILIRILNSVCFRTYNKKICTFTQEWKRERIRNKILNPFGRHAEGSASFTFPVSKNTDHVLEYTVFRMQWFDAMQAPYEKHSEFTRFGLDKYMRTAKCQERIVKVFDGGGVENVLVLYGAGSKFMNVASFSGRKFMNVASFSGRKFMNVASFSGRKFKHNALLKKLHSKANMIVDEAYTSQACLACNERTGAFINKFLSKMSF

SEQ ID NO: 2257 - protein, 895 aa, Bombylius major
ATTTTGNSSSSSSSSSRNNVENCQPRDNSVVDKQTYCTVKSGLRNFTADLVTFERMPAAEQIATIDAKNVEKNMNLPSPLELYNKINEDASILSMMTIEVSYSLYVEINLNPDVLKHLEKEPNFLHLFYNLKSECRVPLIGFEFNTYNRLRAEAGIHYRYDMRNRSAIMKESAKQLTICFKTNVTTHMRNRIYRYFRTRYDKLSNSEIGDIMDVLQRKSDTIDIEVMEIISDFRRKFNLEDDLWFQPSEIKQNWWKYVGFLHRMQKYMYDIGGKSFMVSPIYDYGRKHIHYYNTGFNELLKRLGKYIDRSDVRKYWYECFNIKKFEAKAKKFKGISTNGVDVSILLQKPKKQFPENHEERKLEEVKENYRTGKYSKIIGVDPGLVNPIARVSIKPDQLDRRNYKNKKILNKNLRKGLGDLKRKRKFKRLTSRRHDFIRQFDERSQNQSPKSGNYLEFIKLRLEYFERIQGARSHPQVTRLKFDRYICRRKFVDNFANGICKPIIEGKKTLVAFGDGTISSFIRGYRRAPAKEIVLALERNPNIDVVMVDEYSTTQFCSKCYNRLKIQKDRSAKCEYCNMFWDRDINAANNMINIIKCMLENRPRPVELQRPPNNEVQNIPRPAEMRRPPNNEVQNIPRPVEMQRPPNNEVQNIPRPAEMQRPPENEVQNIPRPAEMQRPPENEVQNIPRPDNFQILNREFEYLDIDFQRNDGVNVHDAMVQYHSEKEDSDQGYYQYESDISIIEYDSEDFDDSHAVENYRHVDDFDNGVHEPGDEIVRDEDHHGVHDAMVEEYLEEEPFFENIMENGVQNDFQPNDGHVDDFDHGVHEPGNEIVRDEAPQPDCSTSEAQLRAPLPPPVPYRRYLEEMVGNVDEHEPLVQEAELGGYSMLEFLLRG

SEQ ID NO: 2258 - protein, 417 aa, Bombylius major
LGRGNKLRSFVLSRLDYFDFFEESNYVSPKSDNYYSYVKTQLKHFPNVQRLQSNKKVTRIIFDKYIRTRRSLNKIVNYFCEPNIPGTRTLVGYGNVEIGEHIRGHQRMPNKRFFKTVERHEDADVFVVDERKTTITCSICFSILKVSKSPHRFAKCLTCGTIWNRDINAANNMIRLVLDEVEGKPRNPAFCPDFNLRAEHHVENTHEAKKVKPKDKVASPHIDNTSENEALEIESDDSDYRNLEVSDEEYFDLEASEDEVENPDFQKSKLKHFERFMHDVQKYFGLAVDSGNEDEVENPHYDLDSEKVEEHSDQEYYELQSNLETSESSSEDEVENPHYDLEHFESFMHEKYYEIQSDLETSERSLEDEVNNLSVVTQEVVIPKSPTPRFVGKRKVDDHDLSYARKKKKLILELEGQ

SEQ ID NO: 2259 - protein, 373 aa, Bombylius major
TRKGSCNTIEKSWKTLKNKKYSKFVGIDLGVICLFSLVSTDTNESDINYKNSLLKNEVVRKMTGQESRGNKLRRFVISTLDYFDFFEESNNVWSRSDNYHSYVKTLKTQLKHFSKVQRLYFNEKVTRLKFDKYIRTRRSLDKIANYICERNKPGTITLIGYGSQEIGKHIRGHPRIPNKGFLKSLKRNEKADVIVVNEYNTTNTCSNCRSKLKVSKSPHRFATCLICGKMWNRDINAANNMKNIVLDEVKGKPRHPAFCPDFNLRAEHHVGNTHDAKKVKPKDKVASPHIDNTSDNEALEIESDDSDYRNLEVSDEEYLGIAVSDSGNEDEVESPHYNLHHVQNIHDAEMAESEKERLLTTTTPMLERKKNLS

SEQ ID NO: 2260 - protein, 1386 aa, Bombylius major
KVNFISLFIKLEGFLKLKFHFFNIQAYYITLLINISFFLFVLCFRSSSLGKNFGAEKASKNCAEKANKNCAEKASKNCAEKANKNCAEKASKNCAEKASKNCAEKANKNCAEKASKNCAEKASKNCAEKASKNCAEKASKNCAEKANKNCAEKASKNVTEICKNTTICINEAQAGAETDTLESATDRRNYRYWLQQHDIADIARIEYGYGTAEANTSFEVVGSLQQLKIQFERFKATVARDEERQLTLIVNLNNNHWVTLVISHQNAQYHAYYVDSMNRGVPLMILEFQEQTQAEINVCDVSFPQQEDGHNCGLWALENARDIIAILRERSSDIPTAIRTYLQTQFKLRNKDYFIRLRKDVSVKLNADLQRSQLFAAMQQQFAGTAKSANHVKVSTENTEKRTNATICTIEKRTYEAQTKSANSAKVSTAKSANHVKVSTTKSANHVKVSTTKSANHVKVSTENTEKRTNATICTIEKRTYEAQTKSANSAKVSTKKRTSRAKPSTKTFTNTKPGTEKSTNKDNSMEISTIKCGLPKFVKDYQDLKKLPVSEAEKIRIKRDKEQLPDPIATYNLIIDIAQFVSNVMFEVSLCIGTVLNDQPSLFTDDEKEPNLLLFFYVVKNICRNAKNRKQIDCSSYTTIRDYFDFLKYDCKYRNAVIQESVKGLKTNLITNITTHMYSRVKKYFVAILNPKIAKEGTAKQKRRRITMVAYDNVSTIMKRLFKDNSNVLNEVCMKAIDNFRAEFGLVPTFSFKANDVRMKWWTYIEFLLKLQKFMYNRGEKSFAVIPKHGFGTKHVLFTNTGFRELLVSLGCPARNMSKDQLQDYWKKCFNIDKFARGDMTFRCFSTNGIDVSIIFERPKRQNLEPAKVHEILLKKARKTLKNDKYSNYVGIDPGVICLFGLVSKNTKEFDINRNSKKAIPKKQRHYKNSLLKNEVYRKMTGEESRGNKLRRFVLSTLDYFNFFEESNYVSPKSDNYYSYVETQLQHFPNVQRLQSNKKVTRLKFDKYIRTRRSLIKIVNYFCEPNKPGTRTLVAYGDAEIGEYIRGHQRMPNKRFCKIVKRHEDADVIVVNEYKTTIICSICFSILEVSKSPHRFAKCHTCGTIWNRDINAANNMIRLALDEVEGKPRNPAFCPDFNTYDAKKVKPKDKVASPHINKNTHGPKKVKPKDKVASPHIDNTPENEALEIESDDSDYRNMDVSDDENPHYDLEHFESFMHDVQEYFGLAVDSGNEDEVENLVHKRKVDHDHSYARKEEPNYSCSRVQKPVGKYEILKSPTPQVVEYEILKSPTPRFVGKRKVDDHDLSYARKKKKIDPRAGRTVMKEPNYSCSRVQKPVGKYEILKSPTPQVVEYEILKSPTPQPSCSRHIPPLPGRRIGMEDRKSK

SEQ ID NO: 2261 - protein, 373 aa, Bombylius major
ESKSKVKKYFVAILNPKIAKEGTAKQKRRRITMVAYDNVSTIMKRLFEDNSNVLNEVCMQAIEKFRAQFGLVPTFSFKANDVRMKWWTYIEFLLKLQKFMYNRGEKSFAVIPKHGFGTKHVLFTNTGFRELLLSLGCPARNMSKDQLQDYWKKCFNIDKFARGDMTFRCFSTNGIDVSIIFERPKRQNLEPAKVHEILLKKARKTLKNEKYSNYVGIDPGVICLFGLVSTNTKEFDINRNSKKAIPKKQRHYKNSLLKNEVYRKMTGQESRGNKLRRFVLSTLDYFDFFEESNYVSPKSDNYYSYVETQLKHFPKVQRLQSNKKVTRLKFDKYIRTRRSLNKIVNYFCEPNIPGTRTLVGYGNVEIGEHIRGH

SEQ ID NO: 2262 - protein, 905 aa, Bombylius major
NIYRSTKKRQGGATSSNAAKRRKSGAATTTTGNSSSSSSSSSSRNNVENCQPRDNSVVDKQTYCTVKSGLRNFTADLVTFERMPAAEQIATIDAKNVEKNMNLPSPLELYNKINEDASILSMMTIEVSYSLYVEINLNPDILKHLEKEPNFLHLFYNLKSECRVPLIGFEFNTYNRLRAEAGIHYRYDMRNRSAIMKESAKQLTTCFKTNVTTHMRNRIYRYFRTRYDELSNSEIGDIMDVLQRKSDTIDIEVMEIISDFRRKFNLEDDLWFQPSEIKQNWWKYVGFLHRMQKYMYDIGGKSFMVSPIYDYGRKHIHYYNTGFNELLKRLGKYIDRSDVRKYWYECFNIKKFEAKAKKFKGISTNGVDVSILLQKPKKQFPENHEERKLEKVKENYKTGKYSKIIGVDPGLVNPIARVSIKPDQLDRRNYKNKKILNKNLRKGLGDLKRKRKFKRLTSRRHDFIRQFDERSQNQSPKSGNYLEFIKLRLEYFERIQGARSHPQVTRLKFDRYICRRKFVDNFANGICKPIIEGKKTLVAFGDGTISSFIRGYRRAPAKEIVLALERNPNIDVVMVDEYSTTQFCSKCYNRLKIQKDRSAKCEYCNMFWDRDINAANNMINIIKCMLENRPRPVELQRPPNNEVQNIPRPAEMQRPPNNEVQNIPRPAEMQRPPNNEVQNIPRPAEMQRPPENEVQNIPRPDNFQILNREFEHLDIDFQRNDGVNVHDAMVQYHSEKEDSDQGYYQYESDISIIEYDSEDSDDSHAVENYRHVDDFDNGVHEPDDEIVRDEDHHGVHDAMVEEYLEEEPFFENIMENGVQNDFQPNDGHVDDFDHGVHEPGNEIVRDEAPQPDCSTSEARLRAPLPPPVPYRRYLEEMVGNVDEHEPLVQEAELGGYSMLEFLLRG

SEQ ID NO: 2263 - protein, 1003 aa, Bombylius major
FKFSNKIFIYRSTKKRQGGPTSSNAAKRRKSGAATTTTGNSSSSSSSSSSRNNVENCQPRDNSVVDKQTYCTVKSGLRNFTVDLVTFERMPAAEQIATIDAKNVEKNMNLPSPLELYNKINEDASILSMMTIEVSYSLYVEINLNPDVLKHLEKEPNFLHLFYNLKSECRVPLTVFEFNTYNRLRAEAGIHYRYDMRNRSAIMKESAKQLTICFKTNVTTHMRNRIYRYFRTRYDKLSNSEIGDIMDVLQRKSDTIDIEVMEIISDFRRKFNLEDDLWFQPSEIKQNWWKYVGFLHRMQKYMYDIGGKSFMVSPIYDYGRKHIHYYNTGFNELLKRLGKYIDRSDVRKYWYECFNIKKFEAKAKKFKGISTNGVDVSILLQKPKKQFPENHEERKLEEVKENYRTGKYSKIIGVDPGLVNPIARVSIKPDQLDRRNYKNKKILNKNLRKGLGDLKRKRKFKRLTSRRHDFIRQFDERSQNQSPKSGNYLEFIKLRLEYFERIQGARSHPQVTRLKFDRYICRRKFVDNFANGICKPIIEGKKTLVAFGDGTISSFIRGYRRAPAKEIVLALERNPNIDVVMVDEYSTTQFCSKCYNRLKIQKDRSAKCEYCNMFWDRDINAANNMINIIKCMLENRPRPVELQRPPNNEVQNIPRPVEMQRPPNNEVQNIPRPAEMQRPPNNEVQNIPRPVEMQRPPNNEVQNIPRPAEMQRPPENEVQNIPRPVEMQRPPENEVQNIPRPDNFQILNREFEHLDIDFQRNDGVNVHDAMVQYHSEKEDSDQGYYQYESDISSIEYDSEDSDDSHAVENYRHVDDFDNGVHEPGSEIVRDEDHHGVNDAMVEEYLEEEPFFENIMENGVQNDFQPNDGHVDDFDHGVHEPGDEIVRDEDHHGVNDAMVEEYLEEEPFFENIMENGVQNDFQPNDGHVDDFDHGVHEPGNEIVRDEAPQPDCSTSEARLRAPLPPPVPYRRYLEEMVGNVDEHEPLVQEAELGGYSMLEFLLRG

SEQ ID NO: 2264 - protein, 314 aa, Bombylius major
TPPSHTIFFISHRDLPPISVWHTNCETPCIKVHLKYFAEIQRLESNAKLTRLQFDKYIRTRRALDKIAYYICKPNKPGTRTLVGYGNRKIEKHIRGYVRISNKGFYKALKRNKNADVFKVDEYGTTKTCSKCFHRLKVSESPHRFAECLNCKTMWNRDINAGNNMIHIGLAEVQGKPRHPAFCPNFSLQALRNYNLHHVGNTHEAEMAEPEDEVASPHINENIHDAKKVKPKNKVASPHIDNQNLENEELEIESDDSDYRNLKFSDQEYFGLVVSDSSSEDEVNNLSVATEGYVIPKSPTSHFVRKRKVVDHDH

SEQ ID NO: 2265 - protein, 229 aa, Bombylius major
KTLEDKKYSKTVGIDPGLKCLFGMVSIDNSKPVINRNSKKALPRGQRHYKNSLLKNEVYRKMIGEVSRENKRKKFVENKPVYKEYLRDTDKLSPKSQEYFDYIKVHLKYFAEMQRLESNAKVTRLQFDKYIRTRRALDKISYYICKPNKPSTRTLVGYDTQKIEKHIRGFVCIRTRTHPSTSWTSTNSYSTNISKKISSTSNTNTSSTNISNENENSSELLVTDSTHVK

SEQ ID NO: 2266 - protein, 455 aa, Bombylius major
IFAEIAEIHVFYRKKVFYCHSYIYISMGDNMFCSQIRVEMQRLESNAKVTRLQFDKYIRTRRAVDKIANYICKSNKPGTRILVGYGNQKIEKHIRGYVRIANKALYEALKRNKNDDVFMVDEYGTTKTCSKCFHTLEVSASPHRFAECWNCKTMWNRDINAGNNMIHIILAEVQGKPRHPDNQNLENEALEIESDDSDYYGLMVSDSSSEDEVENPHYDLHRVEKCMHDVEMAEPEKYSYQEYYDLVEASESSSKDEVNNLSVATQYVIPKSPASRYVRKRKVADYDVSYAAAAVGKIKKLVLELEALEYKKRSRRMRSQNLLLNLLVRGHILPLPGRRIGAQWKSTSTNSTTSKKISSTNISNENGTSSGDRIQPISKVSEACFPTNNYYYYIVCAFSNTILFFSFQPQKPVGFIPVCHQLFFLEVILHLKRVQNNPCLVHVGSSLNVKMLHLA

SEQ ID NO: 2267 - protein, 1123 aa, Bombylius major
YFKFHFFNIQAYYITLLINISCFLYVLCFRSSSLGKNVGAEKANKNCAEKANKNCAEKANKNVTEICANKNCAEKANKNCAEKANKNCAEKANKNCAEKANKNVTEICTNTTICINEAQVGAETDTLESATDRRNYRYWLQQHDIADIARIEYGYGTAEANTSFEVVGSLQQLKIQFERFKATVARDEERQLTLIVNLNNNHWVTLVISHQNAQYHAYYVDSMNRGVPLMILEFQEQTQAEINVCDVSFPQQEDGHNCGLWALENARDIIAVLRERSSIDIPTAIRIYLRTQFELRDKDYFIRLRKDMSVKLNVDLQRSQLFAAMQQQFAGTAKRANSAKVSTTNSANHVKVSTENTEKRTNEAQTKSANSAKVSTTNSANHVKVSTENTEKRTNEAQTKSANSAKVSTTNSANHVEVSTTNSANHVKVSTTNSANHVKVSTENTEKRTNEAQTKSANSAKVSTTNSANHVKVSTTNSANHVKVSTENTEKRTNEAQTKSANSAKVSTKKRTSRAKPSTKTFTNTKPGTEKSTNKDNSVEMFTIKCGLRKFVKDYEDLKKLPVSEAEKIRIKRDKEQLPDPIATYNLIIDIAQFVSNVMFEVSLCIGTVLNDQPSLFTDDEKEPNLLLFFYVVKNICRNAKNRKQIDCSSYTTIRDYFDFLKYDCKYRNAVIQESVKGLKTNLITNITTHMYSRVKKYFVAILNPKIAKEGTAKQKRRRITMVAYDNVSTIMKRLFEDNSNVLNEVCMKAIDNFRAEFGLVPTFSFKANDVRMKWWTYIEFLLKLQKFMYNHGEKSFAVIPKHGFGTKHVLFTNTGFRELLVSLGCPARNMSKDQLQDYWKKCFNIDKFARRDMTFRCFSTNGIDVSIIFERPKRQNLEPAKAHEILLKKAGKTLKNKKYSNYIGIDPGVICLFGLVSKNTKEFDINRNSKKAIPKEQRNYKNYLLKNEVYRKMTGEESRGNKLRRFVLSTLDYFNFFEESNYVSFKSDNYYSYVETQLQHFPNVQRLQSNKKVTRLKFDKYIRTRRSLIKIVNYFCEPNEPGTRTLIGYGNVEIGKHIRGHQRMPNKRFLKTIERHEDTDVVVVDERNTTITCSICFSILKFLNLHIVLLNVILVVRFGTET

SEQ ID NO: 2268 - protein, 1328 aa, Bombylius major
KVNFISLFIKLEGFLKLKFHFFNIQAYYITLLINISFFLFVLCFRSSSLGKNFGAEKASKNCAEKANKNCAEKANKNCAEKASKNCAEKANKNCAEKASKNCAEKANKNCAEKANKNCAEKANKNCAEKASKNCAEKANKNCAEKASKNCAEKASKNCAEKASKNVTEICKNTTICINEAQAGAETDTLESATDRRNYRYWLQQHDIADIARIEYGYGTAEANTSFEVVGSLQQLKIQFERFKATVARDEERQLTLIVNLNNNHWVTLVISHQNAQYHAYYVDSMNRGVPLMILEFQEQTQAEINVCDVSFPQQEDGHNCGLWALENARDIIAILRERSSDIPTAIRTYLQTQFKLRNKDYFIRLRKDVSVKLNADLQRSQLFAAMQQQFAGTAKSANHVKVSTENTEKRTNATICTIEKRTYEAQTKSANSAKVSTKKRTSRAKPSTKTFTNTKPGTEKSTNKDNSMEISTIKCGLPKFVKDYQDLKKLPVSEAEKIRIKRDKEQLPDPIATYNLIIDIAQFVSNVMFEVSLCIGTVLNDQPSLFTDDEKEPNLLLFFYVVKNICRNAKNRKQIDCSSYTTIRDYFDFLKYDCKYRNAVIQESVKGLKTNLITNITTHMYSRVKKYFVAILNPKIAKEGTAKQKRRRITMVAYDNVSTIMKRLFKDNSNVLNEVCMKAIDNFRAEFGLVPTFSFKANDVRMKWWTYIEFLLKLQKFMYNRGEKSFAVIPKHGFGTKHVLFTNTGFRELLVSLGCPARNMSKDQLQDYWKKCFNIDKFARGDMTFRCFSTNGIDVSIIFERPKRQNLEPAKVHEILLKKARKTLKNDKYSNYVGIDPGVICLFGLVSKNTKEFDINRNSKKAIPKKQRHYKNSLLKNEVYRKMTGEESRGNKLRRFVLSTLDYFNFFEESNYVSPKSDNYYSYVETQLQHFPNVQRLQSNKKVTRLKFDKYIRTRRSLIKIVNYFCEPNKPGTRTLVAYGDAEIGEYIRGHQRMPNKRFCKIVKRHEDADVIVVNEYKTTIICSICFSILEVSKSPHRFAKCHTCGTIWNRDINAANNMIRLALDEVEGKPRNPAFCPDFNTYDAKKVKPKDKVASPHINKNTHGPKKVKPKDKVASPHIDNTPENEALEIESDDSDYRNMDVSDDENPHYDLEHFESFMHDVQEYFGLEVDSGNEDEVENLVHKRKVDHDHSYARKEEPNYSCSRVQKPVGKYEILKSPTPQVVEYEILKSPTPRFVGKRKVDDHDLSYARKKKKIDPRAGRTVMKEPNYSCSRVQKPVGKYEILKSPTPQVVEYEILKSPTPQPSCSRHIPPLPGRRIGMEDRKSK

SEQ ID NO: 2269 - protein, 219 aa, Bombylius major
KNSLLKNEVYRKMIGEVSRENKRKKFVENEPVYKDYLRDTDKLSPKSQEYFDYIKVHLKYFAEIQRLESNAKVTRLQFDKYIRTRRALDKIAYYICKPNKPGTRTLVAYGNQKIEKHIRGYVRISNKGFLKALKRNKNADVFIVDEYGTTKTCSKCFHTLKVSASPHRFAECLNCKTMWNRDINAGNNIIHIVLAEVQNYNFHHVGNTHDVVYKIDQIY

SEQ ID NO: 2270 - protein, 454 aa, Bombylius major
TRQMELYVSFDVIRELYELEKSKITKMCCKLTECHIAPNTFQKMRVCYAAQIFSKSSAIMKESAKQLTTCFKTNVTTHMRNRIYRYFRTRYDELSNSEISDIMDVLQRKSDTIDIEVMEIISDFRRKFNLEDDLWFEPSEIKQNWWKYVGFLHRMQKYMYDIGGKSFMVSPIYDYGRKHIHYYNTGFDELLKRLGKYIDKSDVRKYWCECFNIKKFEAKAKKFKGISKNGVDVSILLQKPKKQFPENHEERKLEEVKENYKTGKYSKIIGVDPGLVNPIARVSIKPDQLDRRNYKNKNILNKNLRKGLGDLKRKRKFKRLTSRRHDFIRQFDERSQNQSPKSGNYLGFIKLRLEYFERIQGARSHPQVTRLKFDRYICRRKFVDSFANGICKPLIEGKKTLVAFGDGTISSFIRGYPKHQQKKLCWLLNEAQISMLSWSMSITPLNFAQSVIIG

SEQ ID NO: 2271 - protein, 262 aa, Bombylius major
VLLYERCRRFDNIRTSKEASFESVEINEILLKKAGKTLEDKKYSKTVGIDPGLKCLFDMISIDNSKPVINRNSKKALPRGQRHYKNSLLKNEVYRKMIGEDSRKNKRERFVENEPVYQEYLRDTEELSPKSQEYFKYINVHLKYFAEIQRLESNAKVNRLQFDKYIRTRRALDKIAYYICKPNKPGTRTLVGYGNQKIEKHIRGYRRISNKGFLKALKKNKNADVFMVDEYGTTKTCSKCFHTLKVSESPHRFAECLNFKTM

SEQ ID NO: 2272 - protein, 213 aa, Bombylius major
FKIFGFFSIGEAKANYETGKYSKIIGVDPGLVNPIARVSFKLDAPRNYKNKKMVNLNLQKGLGDRKRKTKWERLTSRKHDFIGQFNEMSQNQSPKSRNYLGYIQLRLEYFERIQGARLHTQVTRLKFDRYICICRRKFADNFANGICKPITEAKKKHLLHLAMEQLVVLFVGTPEHQQKKLCWLLNETQISILSCSMSMEPPKHAQSVIIGWK

SEQ ID NO: 2273 - protein, 388 aa, Nephrotoma flavescens
PTLRKYWELYFNIKRFETAIKKFDNSIYTDGVGVPIQLAVSSTEEKCNKSLKRLKSVLDMKKQKLTTTTSPPPPSANILLKYMKSIEKTKLNKIKSITNTPQPSNKIKSSTSTPNYTKIVGIDPGERLMLGGIEYFTDEKTNEITHHASIKIKSAKYRYDTGEMSRRARLKKYTRDPDIQREAAEPSTPIVSNNKNGRRRRKKRPPDPMNKAQLLMIEINKKYNIVLSHGPKNYKIYTAWRLQYINYLQDLYTQRRVAHLKMEKYIRVERTLHEYRRRLAPPTHHTFIAWGSSNLAADSIIKGYVRTPKRKLLNLLEESTNCTVLLENEFRTSKLCSCCHQNLAISKSPNRFAVCQNCKIVWNRDVNAAKNILQLALNGNTIPDPFKK

SEQ ID NO: 2274 - protein, 277 aa, Nephrotoma flavescens
KEKSSKRQKKQNHEDDVFGNIAKIKENINSYDTKIGLDPGLKLIVGKNGKPIKIKSSKFLQMTGVTRVLHKKFKLKKWTTNLKDVKSPISKNYEEYTKFQLSKFKATQNDFVQRKVAHLKLQKYICVEKTAYKLAKQTIGYHKNLKSLVVIGSSKITANSPMKGYIRTPQPKLLRALKTYSDVLEIGEFCTTKLCANCHNQHITSLPPHRYQFCPKCGITWNRDVNAGKNILYLGLRKINGLEKHEIFNKTTRTSTTSRTGTTPPTKKTSNVKVNIK

SEQ ID NO: 2275 - protein, 202 aa, Nephrotoma flavescens
TLLNTMKQKMTNHDILQMAETSLKNHIIPIGKPYTSKAFKTKNGPKNYKIYTAWRLQYINYLQDLYTQRRVAHLKMEKYIRVERTLHEYRRRLAPPTYHTFIAWGSSNLAANSIIQGYVRTPKRKLLSLLQQSKYCTVYLQNEFRTSKLCSCCHQSLAISKSPNRFAVCQNCKIVWNRDVNAAKNILQLALNGNTTPHSFKR

SEQ ID NO: 2276 - protein, 284 aa, Nephrotoma flavescens
ETKNKKFENSIMTDDVAISFLMGKNEKKKEIKSKKPNKQNHEDDVFGNIAKIKENINSYDTKIGLDPGLKLIVGGVKNNQPIKIKSSRFRHMTGVNTRKLKLKKWTTNSPNTMSPMSKNFEEYTKFELSIFNSTQNEFMQRKVARLKLQKYICVEKASYKLAKEIIGDDKNTKALVVIGSTKIASNSPILKALKTYSDVLEVGEFRTKLCSICYNELITSLSPHRYQFCQKCGITWNRDVNAGKNLLYLGLCQIHGVEIHENFKRTTILSTTKKKTANVKVNIQ

SEQ ID NO: 2277 - protein, 687 aa, Nephrotoma flavescens
LFVVLDVVKMPPKRKINNDGDNGDGSMISKKITNQKCFLNRLCKSESLRDTIDEQIIKMSMFYVEASVYCHYLLNKLLIEHHQNSRKKEFVLPGGKSFIADCFNSLKLKSRQSKKMDYGFIRDGWKLTKYSVLMHNSFNCMYQQYETMLKNNIWMHAYNRVRRFVIVATEKERDKYSMTRIYNGMRGLFNIKPDITDNSKQVKNSNEGAFIIKLILDKLEHPIDDEKYFYGIKHNPYKYLLFFHRLQRYNEENALRNFILFPQMHAGRKYMHVDTSDLRDLLLHAKIISSEEAKWTNFKLNTQKYWKMYFHIERFETAAKKFDNSIYTDGVGVSVQLAVSSTEEKCNKSLKRLKSVLDVKKQKLTTTTSPPPPPANILLKYMKSIEKTKLNKIKSITNTPQPSNKIKSSTSTPNYTKIVGIDPGERLMLGGIEYFIDEKTNEITHHASIKIKSATYHYDTGEMSRRARLKKYTRDPDIQREAAEPSTPIVSNNKNGRRRRKKRPPHPMNKAQLLMIEINKKYNIVLSHGPKNYKIYTAWRLQYINYLQHLYTQRRVAHLKMEKYIRVERTLHEYRRRLAPPTHHTFIAWGSSNLAANSIIQGYVRTPKRKLLNLLEESKNCTVYLQNEFRTSKLCSCCHQSLAISKSPNRFSVCQNCKIVWNRDVNAANNILQLALNGNTIPDPIKK

SEQ ID NO: 2278 - protein, 695 aa, Nephrotoma flavescens
FFVVLDVVKMPPKRKINNDGDNGDGSKISKKITNQKCFLNRLCKSESLRDIIDEQVIKMSMFYVEASVYCHYLLNKLLIEHHENSRKKEFVLPGGKSFIADCFNSLKLKLRQSKKMVERHTLDKDYGFIRDGWKLTKYSVLLHNSFNCMYQQYETMLKNNIWMHAYNRVRRFVIVATEKERDKYSMTRIYNGMRALFNIKPDITDNSKQVKNSNEGAFIIKLILDKLEHPIDDEKYFYGIKHNPYKYLLFFHRLQRYNEENELKNFILFPQMKAGRKYIHIDTKDLHDLLLHANIINSEKAKWENFKQQTRKYWEMYFNIERFETATKKFDNSIYTDGVGVSVQLAVSSTEEKCDKSLKRLKSVLDVKKQKLTTTISPPPPPANILLKYMKSIEKTKLNKIKSTINTPQPSNKIKSSTSTPNYTKIVGIDPGERLMIGGIEYFIDEKTNEITHHASIKIKSATYHYDTGEMSRRARLKKYTRDPDIQREAAEPSTPIVSNNKNGRRRRKKRPPDPMNKAQLLMIEINKKYNIVLSHGPKNYKIYTAWRLQYINYLQHLYTQRRVAHLKMEKYIRIQKTLHEYRRRIAPPTHHTFIAWGSSNLAANSIIKGYVRTPKRKLLNLLEESKNCTVYLQNEFRTTKLCSCCHQSLAISKSPNRFSVCQNCKIVWNRDVNAAKNILQLALNRNTIPHSFKK

SEQ ID NO: 2279 - protein, 288 aa, Nephrotoma flavescens
LRRNHEEDVFGNLSKIREIFQNYNVKIGLNPGVKLIVGGVKNDKPIKIKSNKFRNCKLRKWTKNLADTNSPMSKNYLEYTKFQLSKFISTQNDFFKRKVARLILQKYICMEKAAYKLTKEIIGNDKNAKALVVIGSSKIAANSPMKGYIQTTRPKSLKALKQYSDVLEIGEFRTTKLCAVCYNEHITSLSPRRYQFCPKCGITWNRDVNAGKNILYLGLCQINETDKHENFKRTTKTITTTSRPGNPTTQSTKIGGTTNLTTTTTSTTSRTQTTPPNMKTSNVKVNIQ

SEQ ID NO: 2280 - protein, 567 aa, Nephrotoma flavescens
KMPKRKIGEEEEFETKFSNIKCGLKSKCNNELVFNKIQKDVEEISSLSVECSRYIHYSLMKKWENGIFEDIKFNDYYYHLFENKLSKYELEPNYRDIRNKFHLKLYDKCYKSNLIIDAANRYSTLFHNNFWMHGYRRIRNFLNRFDKNTYDTMHFLFNAISDRIPNPKLIEALREHLHWNGEKFYNLINKKTYFEHIKFFYKLQRYNEENNLKNFNLIPILKFGRHHVRYDSFALWQLLRSINLCTGPWKNFDQNLEWRKHFKILETKNKHFENSMMTDGVAISFLMGKNEKKEIKSKKTKKQNNEEYVFGNIGKIKENINLYDTKIGLDPGLKLIVAGVKNDKPIKIKSSRFRQMTGVNTRNFKLKKWTTNLPNTTISPMSKNFEQYTKYQLSIFNCTQNEFMQRKVARLKFQKYICVEKAAFKLAKEIIGDVKKQKTLVVIGSTKIAGNSPMRGYIRTPQPKILKALNTYSDVLEIGEFRTTKLCANCHNEHITSLSPHRYQFCQKCGITWNRDVNAGKNLLYLGLCKIHDIEKHENFKKNTILNTTKKKTANVKVNIQWTKYTI

SEQ ID NO: 2281 - protein, 224 aa, Nephrotoma flavescens
TTFIKVYNDTTVPFDDSEPLNNPRRTGRRKRRPPAPKNQAQVLMIAINQKYNIVLSHGPKNFTIYTAWRLQFLQYLQEIYVQRKVARLRMEKYMRVDKTLHMYKRRIAPPDAGNILIAWGSGKIAANSCMRGYVRTPKNKLLEILRTSKNCKIIMQDEFRTTKLCSSCYEPLTLSRSPHRFALCRKCHIVWNRDVNAGKNILQLALHKTGTIPHANFNKAQKIL

SEQ ID NO: 2282 - protein, 622 aa, Nephrotoma flavescens
RAITISGIKKKDIKNQKCFFKHFCKCEVLSELIERQVKSMSQFYIEASVYCHYKLNKLLHVVRAAATKENELIGFKMPEKFIANSFNELKIKLHASTKTKYKIDVDYAIMRQEFNLKEYPVICYNSVNYMYQQYETSLKNNIWIHGYNRIRRFVYASTKSERSEFTKEKIKRGLRALFPNVDDNITQVNNDGDFILELIKAKLNYNSIAEQNYFNKIKQQPYKYLPFFHRLQLYNEENNLKNFVLIPQMRPGRKYMHIDSQSLCKLLANLKLLKPGESTWANYKLVASQYWDKYFNIKRFETANKKFDNSIYTDGIGVSVQLVIERTDDITPKRLKSVKDSDQHKYSKWIGVDPGERLMLGGIEYHFDATNGNITHHTLVKMKSGTFRHDTGEISRRRRLLKYTRDDTTVPFDDSEPLNNPRRTGRRKRRPPAPKNQAQVLMIAINQKYNIVLSHGPKNFTIYTAWRLQFLQYLQEIYVQRKVARLRMEKYMRVEKTLHMYKRRIAPPDAGNILIAWGSGKIAANSCMRGYVRTPKNKLLELLRTSKNCKIIMQDEFRTTKLCSCCYEPLTLSKSPHRFALCRKCHIVWNRDVNAGKNILQLALHKPGTIPHANFNKAQKIL

SEQ ID NO: 2283 - protein, 547 aa, Nephrotoma flavescens
SVVREMSKRKVDGEIAEINKKIVTVKCGLKTKCLNDEIFKKIQNDVNEMSSLFVEASRYIHFSLNKQWENGDFKEIKFLDYYYHLLDGSKAKYELDDEYRNLRNRFGLKLYDKSYKSNLFVTEANKYDTIFHNNLWMHAYSRIRRFFKPFKKKSYDTLDYLFGNGTSPDPELIADLEEKLEWDGTKFYEIRFKSKYTKYLKIFYRLQCYNDTNGLKNFSLVPILKFGLHHVRYDSLALFQLLCSQKLFKGAWKTFNRDVEWRKYFTFPETSTKKFDYSIMTNGVSISFSMAKNEIMRIKNKRRKLYDDEDKVQGDLLKIRQNIDNYDTMIGLDPGRRLMFGGIRNDEPLKIKSSLFRHMTGFHQRLRLLKKWTPSTTTEQFSPMSSNFREYTIHQLSIFEARQKETGQRKVARLKLKKYICIERASHELAKKIIDSSKKALVVIGSTKTSANSPIKGYVRTPQPKVLAALKKRADVLEVGEFRTTKLCAGCHEEHYTSKSPHRYQFCKKCGITWNRDVNAGKNILYLGLCLIDNRKKHANFYKQIPK

SEQ ID NO: 2284 - protein, 547 aa, Nephrotoma flavescens
SVVREMSKRKVDGEIAEINKNIVNVKCGLRTRCLNDEIFQKIQNDVNEMSSLFVEASRYIHFSLNRQWENGDFKEIKFLDYYYHLLDGSKAKYELDDEYRNLRNRFGLKLYDKSYKSNLFVTEANKYDTIFHNNLWMHAYSRIRRFFKPFKKKSYDTLDYLFGNGTSPDPELIAALEEKLEWDGTKFHEIRFKSKYNKYLKIFYRLQRYNDANGLKNFSLVPILKFGLHHVRYDSLALCQLLWSQKLFKGAWKTFNRDVEWRKYFTFPETSTKKFDYSIMTNGVSISFSMVKNEIMHKKNKRRKLYDDEDKVQGDLLKIRQNIDNYDTMIGLDPGQRLMFGGIRNDEPLKIKSSLFRHMTGFHQRLRLLKKWTPSTTNEQFSPMSSNFREYTIHQLSIFKARQKETGQRKVARLKLKKYICIERASHELVKKIIGSSKKALVVIGSTKTASNSPIKGYVRTPQPKVLAALKKRADVLEVGEFRTTKLCAGCHEEHYTSKSPHRYQFCKKCGITWNRDVNAGKNILYLGLCLIDNRKKHANFYKQIPK

SEQ ID NO: 2285 - protein, 547 aa, Nephrotoma flavescens
SVVREMSKRKVDIEIAEINKKIVNVKCGLRKRCLNDEIFQKIQNDVNEMSSLFVEASRYIHFSLNKQWENGDFKEIKFLDYYYHLLDGSKAKYELDDEYRNLRNRFGLKLYDKSYKTNLFVAEANKYETIFHNNLWMHAYNRIRRFFKPFKKKSYDTLDYLFGSGKKPDPELIAALEEKLEWDGTKFHEIRFKSKYTKYLKIFYRLQRYNDANGLKNFSLVPILKFGLHHVRYDSFALFQLLCSQKLFKGAWKTFNRDVEWRKYFTFPETSTKKFDYSIMTDGVSISFSMAKNEIMHKKNKRRKLYDDEDKVEGDLLKIRQNIDNYDTMIGLDPGQRLMFGGIRNDEPLKIKSSLFRHMTGFHQRLKLLKKWTPSTTTEQFSPMSSNFREYTIHQLSIFKARQKETGQRKVARLKLKKYICIERASHELANKIIDSSKKALVVIGSTKTPANSPIKGYVRTPQPKVLAALKKRADVLEVGEFRTTKLCAGCHGEHYTSKSPHRYQFCKKCGITWNRDVNAGKNILYLGLCLIDNRKKHVNFCKQIPK

SEQ ID NO: 2286 - protein, 547 aa, Nephrotoma flavescens
SVVREMSKRKVDGEIAEINKKIVNVKCGLKTRCLNDEIFKKIQNDVNEMSSLFVEASRYIHFSLNRQWENGDFQEIKFLDYYYHLLDGSRAKYELDDEYRNLRNRFGLKLYDKSYKSNLFVAEANKYETIFHNNLWMHAYSRIRRFFKPFKKKSYDTLDYLFGNGKKPDPELIAALEEKLEWDGTKFHEIRFKSKYTKYLKIFYRLQLYNDANRLKNFSLVPILKFGLHHVRYDSFALFQLLSSKKLFKGTWKTFNRDVEWRKYFTFPETSTKKFDYSIMTDGVSISFSMAKNEIMHKKNKRRKLYDDEDKVQGDLLKIRQNIDNYDTMIGLDPGQRLMFGGIRNDEPLKIKSSLFRHMTGFHQRLKLLKKWTPSTTTEQFSPMSSNFREYTVHQLSIFKARQKETGQRKVARLKLKKYICIERASHELAKKIIGSSKKTLVVIGSTKTPANSPIKGYVRTPQPKVLAALKKRVDVLEVGEFRTTKLCAGCHEEHYTSKSPHRYQFCKKCGITWNRDVNAGKNILYLGLCLIDNRKKNVNFYKQIPK

SEQ ID NO: 2287 - protein, 376 aa, Aplysia californica
SIKVKTFKFKLYNHKRCKKLHQSINAASSIWNHCIALHKRYYRLYGQHLSCSNLQKHIAKKRKTSAYWQLVGSQSMQDICQRIERAYQLFFKYHSRGTKPPGFKKRIKYKSFTLKQSSYKLLGKGRIKIGQQIYRYWNSREIQGNVKTITVKRNPLGEIFIFVVTDHVDEHQQPMTGKSAGFDFGLKTFLTISGGSEIKSPLFLKQGINQIALAHRHLSKKQKGSKGRERARKHLARAYEAIKNRRTDWFWKLAHQLTDQYDHLFFETLNLKGMQRLWGRKVSDLAFREFLQILAFVACKKGKTVGYVDQWYPSSKTCNHCKHVLESLPLDVRRWRCPSCQTVNDRDGNAANNIKEAGSLSLGVGDVRPSLTAIAA

SEQ ID NO: 2288 - protein, 373 aa, Aplysia californica
HCEMQKAFRYRFYPTLEQENLLRRTLGCVRLVYNKMLHERTTAFYDRQEKISYNQSSSLLTEWKQQDELSFLSEVSSVPLQQGLRHLQQAFKGFWNQRTAYPTFKKKRNGGSAEFTRSAFKWDGQSLTLAKCTDPLPIRWSRQIPQDCEPSSVTVRLDPAGRWFVSILVDDPTIKPLSPTDGQTGIDLGITSLVTLSTGEKVANPKHFDKLYQRLRKAQKALSRKVKGSNNRYKARLRVARLQARIKDARQDYLHKLTTRLIRDNQVIAIEDLNVCGMVRNHKLARAISDCGWSEMVRQLAYKAQWYGRQLIKVDRWFPSSKRCGTCGHVISKLPLSRREWDCPECGTHHDRDINAANNILAQGLGLMSVERV

SEQ ID NO: 2289 - protein, 454 aa, Chlamydomonas reinhardtii
LHAFKHVNKCSWWYLMMWTPRLPRLEAASGMWAPGTSATLFDSSPSRGRGGSRARGRGGRRAHSSPSRGRGGSRARGHGGRRAHSSGGSGNEDGDQRGPRGGPGRAPGDNPVPGVVAAGDPLADFELETLGPMRIVGVDPSVGNYLVACVGSMPGFSPHSYSGRPRAAHVWRGPDGQAPGPAQSPLQRRRKRRRRRQQRRQQRRQQRQQRRRRRGQKRRWRRQGGGRWKGKRRGWRGTRQHTHQRAATERRRQQRACFTRLSGAGYRHCTGQTGRRLWQQARQEEQPALKCCQAGIPSARVASAADHELRIRYLYSGGGVDAAAAAGSAPAPAQQYGLWHLLRFYRQWGQRRWRLTVHVRTQKVGVEQMHPHQLHCADAAPMPRVQVLEHSAQQLAGGRPKEEVIVGWGNATTGHGGCISRLGRGPNRALLRLLVDKYAHLVVHVDEFYTSQAR

SEQ ID NO: 2290 - protein, 495 aa, Chlamydomonas reinhardtii
LAGGRAKEEVIVGWGNANTGYGGCVSRSGRGPNRALLRLLVDKYAHLVVYMDEYACPHQGSAGAFIGDKHSAAYEVCECVRKVCAKCGQRLLGNGQRCLQVVIPDGVSARDAQVCQHCRTVWVSLAQVESGAAGRVRYQTGSGALRFHVALQGRDANSATNMRHALMETLRGGGGGGGGGGGGGGGGGGGGGGGGGGGGGGGGGGGGGGGGGGGGGGGGGGGGGCGGGGGGGGGGGGGGCGGGGGCGGGGGGCGGGGGGCGGGGGGGGGGGGGGGGGGGGGGGGGGGGGGGGGGGGGGGGGGGGGGGGGGGGGGGGGGCGGGGGGGGGGGGGGGGGGGGGGGGGGGGGGGGGGGGGGGGGGGGGGGGGGGGGGGGGGGGGGGGGGGGGGGGGGGGGGGGGGGGGGGGGGGGGCCGPAPRWRRRRRRWWWWRAWPAGPTSSSSSSSSGAGPGGGAGHGPCSCGMHVRRRRARPRGGGARGAAQEAALARRLRPAGI

SEQ ID NO: 2291 - protein, 221 aa, Cyanidioschyzon merolae
NRGVKEHLEALSEVTSRGADFEAFLEFMKVCTAHWEALWQQYTKTRWARLHMRLHRGKQRAFDKFFNELRALKEDKRKMLVLAYGSGRWASTKGCIPAPSTRAYKDCAHLFVSILINAFGTSSIHHELGCTLQRVEMEKCQRSPGDIQKYGAVTEGQEMESRAQVRGLPALVSTSGDEKRLECVNRDFSASINIKSYAVLEKRLLELTRDNFVGQPLKVET

SEQ ID NO: 2292 - protein, 199 aa, Cyanidioschyzon merolae
ALWEAYTKPRWARLRMNVYCGKQRAFANFFNELSAFTDDESHRLVVAYGAGRWASRTGTTPVPSTRTYKECARHFAAMPVHVFRTSYTHHDLECTLLKVEVEKCQRSPEDIKLYGPLKEEQMESRAKLRELLALVCTTNDGKKRIKFLYRDFKAAINMRTCAVLENRAPEWTGGNLWGNISKWNYMRNNWNHSYVTGRG

SEQ ID NO: 2293 - protein, 295 aa, Cyanidioschyzon merolae
TDGVALCIHYRRLKKDRPVPPAAAPVTRDEEKEAARPATQEVEENDLVVGVTKDEDEKEADLATQEVEETDLVVGVTKDEDEKEADLATQKVQDNGFVVGADPGNTNIITIAAPKRARDGADGNLLQKDMRFLRFSRARYYREPGMMNARKKIGTWNVRMKDHLEALSEVTSRGADFGAFRKFMEIRVAQWDALWEEYTKPRCARLRLSLYCRKQRAFANFFNQLSALKEDDGQRLVIAYAAGRWASKRGTTPAPTTRVYKECARRFDTIRIDEFRTSYTHHELDCALQRVEMEK

SEQ ID NO: 2294 - protein, 200 aa, Cyanidioschyzon merolae
KASRAERSQSNRTLRCKAWCAGKGCRWRGPGNSNIVTVAVPKRVADGTNGTLHQTDMCLLRFSRARYDRESGMINARKKIETWNAGMKDHLQALSEVRSRGADFTDFREFMEVRVAHWDALWEDYTKPRWARLRMNLYCGKQRAFANFFNQVGALKEIESQRLVVAYGATRWKTQKRDYASSNDKNVQGVCTAFRCDTCR

SEQ ID NO: 2295 - protein, 342 aa, Cyanidioschyzon merolae
SFSEMHGCSCCSLGGAVGRVYKAPVGSFAYESVLWSAAGVREFFNELSALRELESQRLVVAYGVGRWKTHKGTPPAPTTRTYKENARRFVTIRIDEFRTSDTHHELECTLQRVEMEKRQGSPEDIAKYGPLPEVQMERRTKVRGLLAFVSTTNDGKKRMRFVNRDFNAAVNIRRCAAIEKRPPQQTRENFVGQPLKVQLYEKKLKPVVGGLPSKAGMRLPVSWRLLVRGAFAATTVHHWRQRFSFQRRLLLAVSMASALAAGVNPVDLARREMSFYADLFQKMTDSCFRKCVTRYHDGELQTGEGVCVDRCVFKYMGAVQRIGELLQEGQPMPAAGGAPSVQ

SEQ ID NO: 2296 - protein, 226 aa, Cyanidioschyzon merolae
RSRCCRESGITNARKKIETWNVGMKDHLEGISEATSRGAYFKSFRKFMEVRVAYLDALCKEYTKPRWARLRMNLYWGKWRAFANFFNELCALKEDVRQGLVVAHGAWRWKTRKGCASASTTRTYKACARHFVTIPMDEFRTSYTHHELECTPQRVEMEKCLRSLDDTKKYRPLTEEQTERRAKVRGLLALVCTTNDGEKHMAFVNRDYNAAINTTRYAVMETSPPE

SEQ ID NO: 2297 - protein, 208 aa, Cyanidioschyzon merolae
ERRCRWRGPQKHEYYSHRSTQARGRGIEGNLSQKDMRLLKLSRARYYRESGMMNARKKIEMWNEGMKDHLEAMSEVTSRGADFQTFLKFMEVRAAHWEALWKEYTNRRWAPLRVNLYCGKRRALANFFNQLSALKEHKSQRLVVAYGARRWASKKRCAPSPTTRAYKECAYRFVTIPIDEFRTTNTHHQLGCKRQRLEMKSASRPLRI

SEQ ID NO: 2298 - protein, 227 aa, Cyanidioschyzon merolae
MNLYCGKRRAFANFFNELSALKEDQSQGVVVAYGEGRWAPKKGTMPAPTTRVYKECARRFVTIPVDEFPTSYTHHELGCTLQRVEMEKCQRSPEEFAKYGPVTEEQMERRAKVRGLLALVSTTNDGKKRMEFVNCNFNAAISISGCAVLEERPRKSTRVNFVGQSLKVELYETRLEAVVGGRSNKTGRRLHVSRRLFVQGGLLATTVHRRRQRFSFERRLLLPVTAA

SEQ ID NO: 2299 - protein, 229 aa, Cyanidioschyzon merolae
RAAEPTLKLFGSPWKVRVAHWDTLWEEYTKRRWARLRKNLYCGKQRAFANFFNALSALKENESQRLVVAYGAERWASKKGTTPAPSTRTYKECARRFATIPVDEFRTSYTHHELGCTHHRVEMETCQRSPEDIKKYGALMEGQMERRAKFSGLLALVSTLNDGKKRMEFVNRDFHAVINVRCAVMEKRPRYWTRENFVGQPLKVELYKKKLEAVMGGRSKKTGRRQHIS

SEQ ID NO: 2300 - protein, 228 aa, Cyanidioschyzon merolae
EEYTKPRWARLRVNLYCGKQRAFANFLNELSALKKDESQRLVVSYGAGRWASKKGTTRAPTTRPYRECARRFVTIPIDELRTSYTHHELGRTPQKVEMEKCQQSPEDIKKYGPLTEEQMERKTKVRGLLALVSTTNNGKERMGFVNRDFNAAINIRRCPVMEKKRPPESTRERILLDNHPKWNYMRKSWNKSYVAGPKKLGGVCTSVPNVLTRARLPPLLYTAGDVRL

SEQ ID NO: 2301 - protein, 265 aa, Cyanidioschyzon merolae
YAKDGINANLRQMDMRMLRFSTARFNRESGMIGALRQTEAWNSRLKEHLEAVSKVTSCGADFRTYLEFMETHAAHDGDLWKEYIKPRWVRLPMDLYGGEQRAFANFFNEFCALKEGKSQRLVIAYGAGSSLPENGSTPAPSTQAFIECAKRFVTVVIVEFRTTCVHHELGCTLQKVRMGTQPPSSSGKENHGERTERPMPQRALVRGRLLLDTTVSAMKRREFVNRDFNAAMNIRRCALLKTRPPELTRANFEGSFPGSTCAGGN

SEQ ID NO: 2302 - protein, 251 aa, Cyanidioschyzon merolae
LIPLERQVPLALCHRRKGIRQQLETSHGIWYQRPPCLAFGSERRIGLDLSHHSSRFQCSVRRLLARSEPKRIGISRVLLMPRIGFRYLCHRGQHRVSPNCHRMEQRVLARTADSIRTEGISQKKSMIVGQGAGRGNIGLHIGEPCIPIKTVYREVKQALTRHMLALGGVMDISEHPTTPMYHRCEACTQAVYQQDAKSERGVDLFFRLCLEILENDRKLRNRDLNAAINLLRLLVTELDGHERAVPLKPRA

SEQ ID NO: 2303 - protein, 258 aa, Cyanidioschyzon merolae
QLYGWRGRWEYEYHNHRSIEAWVRWHRRQLKPERQASFEVLEIEIQSRIETWNGGMKDHLEALSEVSSQRADFEAFRKFMEVRVAHWDALWEEYTKPRWSRLRMNLYGGRQRAFADIFNQLSAFKKDENQSLVVAYGAGLWKTQKGTTRAPTTRTYNECARRFITIPVYEFRTSYTLHELGSILQRVEMEKCQRSPEEIAKYGPQTEKQMQRMAKVRGLLALVSTTSNDKKRMEFVNRDFNAAINIRRCAVLGNRPPE

SEQ ID NO: 2304 - protein, 200 aa, Cyanidioschyzon merolae
SLQIGCVFQQRHRQACVWNQFWGRECAHQAGRVHPPHLDPCRGMRMNLDCGRQRAFVNFFNQLSALKEDQSQRLVVAYGAGRWKTQKGTRPAPTTRMYEACTRRFVTIPIDEFRISYTHHELGCTLQRVEMETCQRSPEDIKKHGPLTEEQMERRAKVRALLALVSTTNDSKKRMEFVNRDFNPAINIRKCVVLETRPPE

SEQ ID NO: 2305 - protein, 202 aa, Cyanidioschyzon merolae
KEYTKPRWAGLRMSLYCGKRRAFANFFNELSALKEDESQRLVVAHGAGRWKTQKGTTPAPTTRTFKECARRFVTIPIDEFRTSYTNHELGCTLQRVEMEKRRRSPDDIRKYGALTEEQMERRAKVRGLGALVSTTTNGKKRMEFVNRDFDAAIYIRRYAVMERRPPELRRENFVGQPLNVELYEKKLKPVVGGQSKKMLGDV

SEQ ID NO: 2306 - protein, 315 aa, Cyanidioschyzon merolae
KVHDNDFVVGADPGNTNIITIAAPKCAEDGTDGSLRRKDMRLLRFSIARYNRESGIMNAREKIESRNSGMKDDLEALSEVASRGADFEAFRKFMKVHVAHWDAPWEEYTKPRWARFRMNLYCGKQRAFANFFNQLSALKEDESQRLVAAYGAGRWKTQKLCTPAPTTRTYKECAHRFVTLPVGEFRTSYTYHELGCILQRVEMETCQRSPEDMKKYGPLTEEQMERRVKVRGLGALGSTTTNGKKRMEFVNRDLNAAINTRKCAVLEKRPPEWTRENFLGQPLKVGQYEKKLEAVVGFRFKQTGRRLHARWRRLV

SEQ ID NO: 2307 - protein, 321 aa, Cyanidioschyzon merolae
CTHMATPSGSIIPVKNFCLITLRGLKSNIFFQYVFRFLPVNLRQKDVHLLRFSRAIYYRESDIVNARKKIETWNAGMKDRLETLSEVTSRGADFKALREFIEFRVAHWDALWDEYTKSRWARLRMNLYCGKRRAFANSFNQLSALKEDDRQGLVVAYGAGHWKTQKGCTPAPTTRAYKECARRFVTIPIDEFRTSYTHHELGCTLQRVAMEKCQRSPEEIAKYGQLAEEQMERRAKVRGLLPLVSTINGTKRMEFVNRDLNAAINVRRCAVLEKRPPESTTMNFIGQPLKVDLYEKKLEAVVGGRSKKTGRRLHVSWRLFV

SEQ ID NO: 2308 - protein, 209 aa, Cyanidioschyzon merolae
VAVDAIIPTTACCDGHDIRVPRARANDKVVLMHFLRRRTRLLLIFMLRHVQYRRRKWIMKEDERQRLVVAYGAGRWKTQKECVPAPSTRTYRECAQRFVTIPIDGFRTSYTHHELGCVLKRVGMEKCQRSPEDIEKYGPLTEEQMETRAKVRGLLALVSTTSDGKKRMEFVNRDFNAAINIRRCAVLESRPPALTRENFVGATSQSGTI

SEQ ID NO: 2309 - protein, 242 aa, Cyanidioschyzon merolae
RTRYYREFGVMNAKKKSGTWSAGVKKHLEAISQVTSREADFKAFRKFMEVRVAHWDALWEGHTKPRWARLRMNLYCGKQRAFANFFNQLSAVKEDERQRLVVAYGAGRWKTQKECVPAPSTRTYRECAQRFVTIPIDGFRTSYTHHELGCVLKRVGMEKCQRSPEDIEKYGPLTEEQMETRAKVRGLLALVSTTSDGKKRMEFVNRDFNAAINIRRCAVLESRPPALTRENFVGATSQSGTI

SEQ ID NO: 2310 - protein, 465 aa, Cyanidioschyzon merolae
KKDKERCYRLILLYFVFLDRELERKAEMRLKRENLEWEKRKAVLKGKRFNVVPLCNIKSHFVSIDPSVLYGIMEEISPEFKVSTEDFTGENRVTYWRSIFDFKPVKVSEQKVFTGLIKTDGVALCVHYRRLKKDRPVPHSAAPVTKDAENKEADAATQKLQDNDFMVDAAKDDDEKEAVPETEEMEDEDFVVRAVKDEEKKKAGPAMQEVQDNDLVIGAVKDEEKKEAGPAMQEVQDNDLVIGAVKDEEKKEAGPAMQEVQDHDLVIGAVKDEEKKEAGLEMQKVQDNDLVVGVDPGNTNIITIAAPKRAEDGTDGNLRQKDMRLLRFSRAKYYLESGTMNARKKIETWNAGRKDHLEALSEVTSRGADFQAFRKFMDDRVAHWDALREEYTKPRWARLRMNRYGGKQRAFSNLFNHLSALKEDKTRRLVVAYGAGRWKIQKGTTPAPTTRTYKECVHSVLLQYL

SEQ ID NO: 2311 - protein, 250 aa, Cyanidioschyzon merolae
SFSEIHGSSCCPLGCAVGGVYQAPVGSFPNEFVLWEPAGVREFFNELSVLKEDESQRLVVAYGAGRWMTQKGTTPAPTTRVYKACARRFVTIPVDEFRTSYTHQELGCTLQRVEIEKCQRSPEEIAKHGPMTGEQMERRANVRGLLALVRTINGNKKRMEYVNRDFNAAIHIRKCAVLEERPPDWTRENFIGQPLKVELYEKKLEAVVDARSEKTGRRLHVSWTRSVQGVRFATAVHGRRRSSHVLGSFR

SEQ ID NO: 2312 - protein, 206 aa, Cyanidioschyzon merolae
NAGMNNHLEALSEVTSRGAYYEAFRKFMEVRVAHWDALWEEYTKPRWALLRMNLYGERQRAFANLFNQLSALKEDQSQRLVVAYGARRWKTKKGYTPAPTTRTYKDSARRFVTIPLDEFRTLHTHHELGCTFQRVEIEKCQRSPEDIKKYGPLTEEQMERISKVRGLLALVSKTSDGKKRMEYVNRDFNAAINIRECAVLENRPPK

SEQ ID NO: 2313 - protein, 209 aa, Cyanidioschyzon merolae
EEYTKPRWARLRMNLYSGRQRAFANFSNELSALKDDEGQRLVVAYGAGHWKTQKGTTAAPTTRTYKECAQRLVTVSIVEFRTSYTHHELGCILQKVEMEKCQRSPEDMKKYGPLTEEQMERRAKFRGLLALVSTTTNGTKRTDFVNRDFNAAVNKRRCAVLESRPSELTRENFVGQSRKYELYEKKLEAVVGGRSKKTGRRLHLGKRLV

SEQ ID NO: 2314 - protein, 321 aa, Cyanidioschyzon merolae
KGWHPFILRYFVSLSRELERKAEMKLIEGKNEEWERRKAFLMGKRFNVVPMCNIKSHFVTIESRILYGIISEISPEFGVSKEGFSGENREKYWKNIFDFKRLKVSKQKVFAGMIETDGVALSVHNRRLKTDRPAPPATKNEDEKQAGPATQKVQDNDLVVGADPGNTNIVTIAALKCGEDGIDGNLRQKDLRLLRFSRARYYRESGIMNVRKKIVTWNSGMKDHLEALSEVTSRGAGLQAFRKFMNVRVPHWDALWEEYTNPSWALLRMNLYCGKRRAFANFFNQLSALKEDQSRRLVVAYRAGRWKIQKGTTPAPKTRTY

SEQ ID NO: 2315 - protein, 200 aa, Cyanidioschyzon merolae
SLQIGCVFQQRHRQACVWNQFWGRECAHQAGRVHPPHLDPCRGMRKNLDCGRQRAFVNFFNQLSALKEDQSQRLVVAYGAGRWKTHKGTRPAPTTRMYEACTRRFVTIPIDEFRISYTHHELGCTLQRVEMETCQRSPEDIKKHGPLTEEQMERRAKVRGQLALVSTTYDSKKRMEFVNRDFNPAINIRKCAVLETRPPE

SEQ ID NO: 2316 - protein, 236 aa, Cyanidioschyzon merolae
QQLASERHASFEVLESDILSRIGYNECKEENWDVECRNEGSPGSFERGDEPRSGLYSFSEIRGRSCCPLRCAVGGVYQARWARLRLNLYSGRQRAFANFFNQLSALKEDENQRLVVAYGAGRWKTQKGTTPAPTTRTYKECARRFVTIPVDEFRTSYTHQELGCTLQRVEMEKCQRSPEEIAKYAPLTEERMERRAKVRGLLALVSTTPNGMKRMEFVNRDLNAAISIRKCAVLEN

SEQ ID NO: 2317 - protein, 326 aa, Cyanidioschyzon merolae
PSAKHEEKKEADLARQKVQKNDFVVDADPGNTNIITIAVPKRAEDDIHGSLRRKNMRLLRFSTARYYRESGMMNARKKIETWNAGVKDHLEAMRKVTSCGADFRAFREFMETRAAHNEKLSNEYARPRWARLRMNLLCGKQRAFAKFLNQLSPLKENKIQRLVKAYRARREASGEGSTPAPSTRTYKECAHRFVTIPIDEFRASYVHHDLGCTIQRVEMERCQRIREDIKNFGALTEQQMERRAQVRGFLAVVSSISGKKRMEFVHQNINAAFNIRRCAVMEKRSPHLARANFMGQPLRVKVYEEKLKPVTGGRSKKPGRRLHVSV

SEQ ID NO: 2318 - protein, 239 aa, Cyanidioschyzon merolae
RTDPATQKVQDHDLVVGAAEHEDEKEAGLEKQKVQDDDFVVGADPRNTNIITIAVPKRAEDGIDGNLCQKDIRLLRFSRARYYRESGTMNARKKIDTWNGGMKGHLGALSEVTSRGADFRAFRKFMEVRVAHWEVLWKEYTKPRSARLRMNLYSGKQRAFANFFNQLSALKEDESQRLVVAYGTAHWAPKKGTKPAPTTRTYEECARRFVTIPIDEFRTLYTHHELGCILQRVEMEKSQ

SEQ ID NO: 2319 - protein, 228 aa, Cyanidioschyzon merolae
CRRCRITPLWLAGRRMKKRRRRVLRPKKCMITTLSLARTRGIRISSPLQHRSVPKMGLTATYVKKDMRLLRISRARYYRESGIMNAWKKISAWDAGMKDHLEATSEVTSREADFKAFRKFMEVRVAHWDALWEEYTMPRWARLRMNLYCGKQRAFANFFNELSALKEDENQRLVVAYRAGRWKTQKGCTPAPTTRVYKECARRFVTNPVDEFRTSYTHHELRCTLQRV

SEQ ID NO: 2320 - protein, 220 aa, Cyanidioschyzon merolae
NSGVKDHLEAMSEVTSRGADFKAFREFMKIRVSHWGTLWKEYSKPWWARLRMSLYCGKHRAFANFFNQLSALKEDESQKLVVAYGAGRWASKKRTTPAPTTRTYEECTRGFVTIPVDEFRMSYTHHELGCTLQSVDMEKCQRSPEDIQKYAALTEEQMEREAKVRGLLALVSTATNGKKRMVFVNRNFNAVISIRRCAVMETRPPKLREFYGATSQGGTI

SEQ ID NO: 2321 - protein, 295 aa, Volvox carteri
AAGRQPSQGPWTRTERPPASTSSAPGTICPGVQRVAKPTLLPCCQPCCLAAALLPRQTQWTRRCSDGGWCSCWRRTQVRRWWVWTRAAPTSSTPSRGWLSNPSRRGWVSSPPSYKLTRKQYYVESVESGVVKANTQSTAWQSYPAMRQALAVLAATSSKCVDVEGFRHHVAVVLDNSEMLWREHLKPRWVQPLLHLYGGEKRVFAQFFKRLQDGDPNKKVIVAYSAAKFAPVGAGELAVPTLRVFKECCQRFVTFPVDELWMTAVWNGDKATVLQAGPTLSGLGVAKNHCSWPPR

SEQ ID NO: 2322 - protein, 276 aa, Phytophthora sojae
YARGTGFESCLYFACAHFLRFCLPCEERIVYTHGYWYAQMPHVVAPLPVEDKGRCTAGDPGLKGFLTRMDLQGNIAHLGRANWERLLKLKVRQQAAQRRMSRFVANKKYRKRHHLGRHTGREWKQFVAARREFYTVTAKLDNYVKDLHYKAASHLCHNTDVILLPKFSTSSMLRPSAPWTHAFNDQMNTLAHYQFRRRLLAKCEVAGKAMVLCSETSSRICGRCCRLYLTLRNEDVFRCPHCGFLAGRDENAAYNILRFVCAGSLSVYAVNGVVQL

SEQ ID NO: 2323 - protein, 304 aa, Phytophthora sojae
GSHAPEAVEEDALEAAMKKLPPGYAPDVMIGIDPGVRTLCTAACEGSLPTRQSRRRRNRQGKRKHKNRRAKHKRMNRHGQRIVAINTREYYHMSKIGKHRFWNNGLREKEASYAKILDGMPTFKTARYQVYLDRLRYFLKHAEYLVLFSAQHSFRKWRFLLYRMKMKAIDTLAKRLVPTPSPHVCVAFGDWSCQDGLRGNPRAPVKAFRKALERRATVLPMDEFRTSKLCSCCHQSLRRARLQTKVKDKENKIVLKGNRNVLYCKNSRCRAHFWNRDVNAAINIFFRDNAAMGAQSNHFRIRVS

SEQ ID NO: 2324 - protein, 246 aa, Phytophthora sojae
PSNSAVATPTESTREAKAQEPTLAADRRHQHPRVLNMYKVGKHRFWNNGLREKEASYAKILDGMPTFKTARYQVYLDRLRYFLKHAEYLVLFSARHSFRKWRFLLYRMKMEAIDALTKQLVPIPSPQVCVAFRDRSYQDGLRGIPRAPVKAFRKALEQRATVLLMDEFRTSKLCSCCHQSLRRARQLINVKDKDTKEDKIVLKGKRNVLCCKKSLCRNRDVNAAINILEHLKCRLLDLGRLATFQP

SEQ ID NO: 2325 - protein, 206 aa, Phytophthora sojae
VPRALVPKSLKRRMGYGEFIDNMPSLKTTSSSRLLEGYKYMWRHMDDILLFSASVGFRKWRFTLSRFKRQAVCKLAKRIVPTIDRDVCVCLGNWNQHKGVSGYMNAPIKRLTAELSRRATLISVDEFRTSRLCLDCFTPMVGMPFADPESDEAKPSRNVRVCKNILCGARCWERDVNAAKNMWQLGLQQVSGRRRPWQFLRGRRLN

SEQ ID NO: 2326 - protein, 512 aa, Phytophthora sojae
YRVKEVPHLDVDGVDTGNVVYVWDEPRSTAERELHDWLGFVPWEWRIRQNPTHFFVKLYDMLQWMEAFVEKHPKTKGARLYSLPPYSSSFIPAHVTLNITSLHQVFCRLFTDPERQAEVKTYVKDELGVECGSTEQVRRQFSENKDAVFRKMFRLNGLETSTREFAYQITTDGYAASVLLRRQTLCREDDDNADQPRKRQKNNKGEVVKAPEAVEEDALEAAMKKLPPGYAPDVMIGIDPGVRTVCTAACEGSLPTRQSRRRRNRQGKRKHKIRRAKHKRKNRHRQRTVAINTREYYHMSKAGKHRFWNNGLREKEASYAKILDGMPTFKTARYQVYLDELRYFVKHAKYLVLFSARHFFRKWRFLLYCMKMKAIDTLAKRLVPTPSPQVCVAFGGWSCQDGLRGNPRDPVKAFRKALERRATVLPMDEFRNSKLCSCCHQSLRRARLLTKVKDKDTKEDKIVLKGNRNVLHCKNSRCRAHFWNRDVNAAINILELLKCRLLDLARLAAFQR

SEQ ID NO: 2327 - protein, 341 aa, Phytophthora sojae
GRHYTRAGSQYSERSQRLGSLPRPRASPPGNPRSRVCGCRSRQEGPLHGCDHRQASRQKEKAPPPPPPPPKPPRRHRNKRCPVEDRVSSTGPARTPVRRRRVPKLPKVQHEQRILQIKAGEYQHMSGSKKFNKWHEKLRLRFPEYQTAISSLPCLKTADSRVFLIRMEQVWLNLDYLLDFGIAHNFRKWRFFSHVEHRVAVDDVAKRLIPEAGSHVCVGFGNWSQSDNIKGGPKPPLRPLEKAMRKRATVVKVHEFRTSKLCSACYQPMKMAVFLDPDDPGPDELDADERPLYYDRSVLRCANKNCKKNFLNRDVNAAVNMQTLLMARLQGLPPPAEFVRQ

SEQ ID NO: 2328 - protein, 491 aa, Phytophthora sojae
SSSAAAQDRRVQHACAAQAARKGSSSPDKNCERAFEGITRDAFTGERPRAGEVPAQERDEAARVRGRVAHQARPPVSTEADARAGPAAQETMDACRYTHNKCVEYRHKLFVARPRQRQVPLEYPEDKGPVPEWVLETPSSVRKHAVSNFVSATSAAFTNLARGHITHINMHFKSRRESNYLTIYADAEKTHLNSARHRRGTRHFGPAPLPRDRKLKKVDQYLTIPSVPNILIRADEGTEIEGEVRIVYVHGYWYAQMPHVVAPLPVDDKGRCTAGDPGLKGFLTTMDLQGNIAHLGRANWERLLKLKVRQRAAQRRMSNRKRHHLGRHTGREWKQFVAARREFYTVTAKLDNYVKDLHCKAASHLCHNTDVILLPKFSTSSMLRSSAPWTHAFNDQMNTLAHHQFRQKLQAKCEVAGRAMVMCSEMYSSRTCGRCCRLHLTRRNEDVFRCPHYGFLAGRDENAAYNILRFVCAGSLSVYAVNGVAQLWLVV

SEQ ID NO: 2329 - protein, 272 aa, Phytophthora sojae
EGGSVPNDPLRTQHPHQSGRGHGDRGRGAHRGYWYAQMPHVVAPLPVEDKGRCTAGDPGLKGFLTTMDLQGNIAHLGRANWERLLKLKVRQRAAQRRMSNRKRHHLGRHTGREWKQFVAARREFYTVTAKLDNYVKDLHCKAASHLCHNTDVILLPKFSTSSMLRSSAPWTHAFNDQMNTLAHHQFRQKLQAKCEVAGRAMVMCSEMYSSRTCGRCCRLHLTRRNEDVFRCPHYGFLAGRDENAAYNILRFVCAGSLSVYAVNGVAQLWLVV

SEQ ID NO: 2330 - protein, 278 aa, Phytophthora sojae
EGGSVPNDPPVPNILIRADEGTEIEGEVRIVYAHGYWYAQMPHVVAPLPVEDTGRCTAGDPGLKGFLTTMDLQGNIAHLGRANWDRLLKLKTRQRAAQRRMSRFVANKKYRKRHHLGRHTGREWKQFVAARREFYTVTVKLDNYVKDLHYKAVSHLCHNTDVILLPKFSTSSMLRPSAPWTHAFNDQMNTLVHYQFRQRLLAKCEVAGKAMVLCSEMYSSRTCGRCCRLHLTLRNEDVFRCPHCGFLAGRDENAAYNILRFVCAGSLSVYAVNGVVQL

SEQ ID NO: 2331 - protein, 252 aa, Phytophthora sojae
VRSIRGVRGSRGPDLRRPADPADRAVCWVHVPLGRELQHRHLLSRPCPSPRSSWRRRPPYCSLPCLKTADARVFLIRMEQVWLNLDYLLDFGIAHNSRKWRFFSHVEHRVAVDDVAQWLIPEAGSHVCVGFGNWSQSDNIKGGPKPPLRPLEKAMRKRAIVVKVHEFRTSKLCSACYQPMKMAVFLDPDDPGSGELDADERPLYYDRSVLRCANKNCKKNFLNRDVNAAVNMQALLMARRQGLPRPAEFVRQ

SEQ ID NO: 2332 - protein, 219 aa, Phytophthora sojae
STKEYRHLAGFNQRQYWFENLKKREPVYAALLANMPSFRCASTQDYWVWISYFWKHVNFLIDFSSTHAFRRWRFRNYVYKFTALGYVAARVVPVPDDSTLVGVGEFSNPRGLRSNAVPPLKGIAKELSRRATVRLIDEYFTSKKCIACHSDLAETEFGRRRRAEPEEEPPAQAEEPRPQSLKHVAGQHILARQGPRTSCTIPTAPAGCTGTATRMRPAI

SEQ ID NO: 2333 - protein, 223 aa, Phytophthora sojae
YWFENLKQWEPVYAALLANMPSFRCASTQDYWVWLSYFWKHVNFLIDFSSTHAFRRWRFRNYVYKFKALGYVAARVVPVPDDSTLVGVGEFNNPRGLRGNAVPPLKGFEKELSRRATVRLIDEYFTSKKCFACHSDLAETEFGRRRRAEPEEEPPPPAPQARGVPAHPRATRSRNVLHCTNSTCRMYWDRDENAARNLMLVTEELAHGRPRPDYLRRPRRRDD

SEQ ID NO: 2334 - protein, 434 aa, Phytophthora sojae
SRRPMDACRYTHNKCVEYRRKGGDGGKDKLQKLFVARPRLRQVPLEYPEDMGPAPEWVLETPSSVRKHAVRNFVSATSAAFRNLARGHITHFSMHFKSRRESNYFTIYADAEKTHLNSARHHRSTRHFGPAPLPRDRKPKKVDQYLTIPSVPNILIRADEGTEIEGEVRIVYAHGYWYAQMAYVVAPLPVEDKGRCTAGDPGLKGFLTTMDLQGNIAHLGRANWGRLLKLKTRQRAAQRRMSRFVANKKYRKRHHLGRHTGREWKQFVAARREFYTVTPKLDNYVKDLHYKAASHLCHNTDVILLPKFSTSSMLRSSAPWTHAFNDQMNTLAHYQFRRRLLAKCEVAGEAMVLCSEMYSSRTCGRCCRLHLTLRNEDVFRCPHCGFLAGRDENAAYNILRFVCAGSLSVYAVNGVSAVVVGSVVLGLQRAWPRR

SEQ ID NO: 2335 - protein, 591 aa, Phytophthora sojae
EGGSVPNDPLRTQHPHQSGRGHGGRGRGARRVRTRILVRPDAARGRSTARGGQRALHAGDPGLKGFLTTMDLQGNIAHLGRANWERLLKLKDRQRAAQRRMSRFVANKKYRKRHHLGRHTGREWKQFVAARREFYTVTAKLGNYVKDLHYKAASHLCHNTDVILLPKFSTSSMLRPSAPWTHAFNDQMNTLAHYQFRQKLLAKCEVVGKAMVLCSEMYSSRTCGRCCRLHLTLRNEDVFRCPRCGFLAGRDENAACNILRLSLGLRSEWCSAVVVGSVVLGLQRACIRSARLGGVSHLRVKTCNTVAHGVDTHHASIFFRVESMLNGRSAGALFAVCYTGRRRCRALDALTPCLRSPRTDGARPQASADPCERRLVSTRHVEAGAAPLSNAIILEPSARQTRTLRIAAEVAHATTPSTPRPVRHEPRLRPPAGPRAARQVAHGPVGARRGHGASRPRLDVPAVAQQARAPDVADGGGRRGRREPARQAPQRQDASLPAQVQRAGGGRRHLQPRALRRGPVLVPAPERRRPPVPARAELRGGQAGGYASSPLGLHGRGLHQEDTKHAHRPERPGGRRGAGCGRGCLEDRLRR

SEQ ID NO: 2336 - protein, 588 aa, Spizellomyces punctatus
TYITIIHQLADHASHALKFYILSTSTSTSSFPVVHKDTIEALLYLLNKGEAWQPKIDAKRALRKSLLPYVQRYCQIVGFVPPNLQKEQQSVNYLTASMMTNLRVNVQEHFMQMLLRYINLRLDVKRQKQLPLKSNARKAFFTRLRYLKSVFLFDIVPESLDLTPLESEVLEEIWSLDLPFLPNDPLAYAIVADPMSFFPAYCKLSRLYERHGFRRFSAIPLRRSLIQSHIRIDTVILYAHILCITRQEAEAVEKVDLWLRVCNLRTKAFRSRRSMQFEGSITTDGTSVSVYLKHPEADKYGKRGARKSAKSLEDEVKAQYMEKNLPACRTAENVVVIDPNKRDILYCQDGNGTTFRYTANQRAMETGSRRQRKERQQMKKEAGMDLIESRIPSHKTMNLMDFTRYLLVRRVDWNRRKDFYSHPAHTRWKWHAFINRQKSESDLISNMRNKYGENLTVVMGDWSDAGRTARFQTSSKTKGWRTLFKRNRINCFLLDEYKTSSVCPRCSSSEFVEKKFKERPHSRPYRRREGKIEKVHGLLGCTNPNCLQQAWTMRYWNRDTLSTCNMLMIVQSMLDGHGRPEVFSRSVA

SEQ ID NO: 2337 - protein, 277 aa, Spizellomyces punctatus
RMKLKRNTWRKTYLLVEQQRMSLLSTQTSVIYSTAKTAMVRQCFTTPPTSKPWRLEAVDSKVQRQQMKKEAGVDLIESRIPSHKTMNLMDFTRYLLVRRADWDRHKEFYSHPAHTRWKWHAFINHQKSESDLISAMHNKYGENFTVVMGDWSDAGRTARFQTSSKTKGWRTLFKHNRITCFLLDEYKTSSVCPHCSSGVEKGFKTRPHSRPWCRREGKIEKVHGLLGCTNPNCQQAWTMRYWNRDTLSTCNMLMIVRSMLDGHCRPEVFSRSVPAIA

SEQ ID NO: 2338 - protein, 551 aa, Spizellomyces punctatus
IELFRLKVDIFSAAHYGARARLWRRRRVKESDDGDDNSTMDQGEYGRKNAVSNWQNCKESAHTYTNINVYTYIIGMSIYIRHSIRQQNVSLPSLGKFAKEHYVQKASVRKMLTVSTEAFEEAKRDFLLGISLKEKDIYEHWGQYFDLLYRIRKRFEQERDSWRELLKGKSMDEQKDLAKTDYRGGRLVDDFPLLPEFGDAWQPITLDSLGLGGLVGTRGKGQEHWRKVWSSVFDVGKVVPDPERAYTDRSFHYMILTDGVCAGVLVNTMNRTRRKAYEQWESVNQVSGIRPSTLSELSKVRPENLLNKVIISVDTNKDPIIAAGYYQIGSHLVDGQVQYQPYYLNRSQHHRFRKQRRWVQRKSKPRGRKRRIKRNARWRGRRKQERGQFWPQASCQKPKRSSYGHFALFSRRYRREITGERKRELWRKKWQADPRYGIKSIYKDAQNYSRRCSAAEYAQLVAFTYRTLAKRLKFTGLRKVRRLRLDRHICIKRAEGEFLRRFFPAGVPMNDLVVIWGDGDFHHNMPGSATSPKGVSKNSSEGASATTSIDG

SEQ ID NO: 2339 - protein, 595 aa, Spizellomyces punctatus
DRIQNYIQIVHELAAHATHALKFYILSSPHFPIINETVMEATLYLLNKGAAWQPGNMAKKDCRDILVPHIDRYCNVVGFTRPNLKYDQQSINYLTTSVITNIKVNVQEHFVKMLVRFINYRLDVKNQQKRLLGAERMSFFARLRYLKQLFLLDDIPQTDDLDLSNLESALLEDIWNILLDRVIGKEGKLAYLVACDPLSFFPSHCALSRLFERCGLPLFNAIPLRRSFIQSHVRIDTMILYQHVLKVSWREYDSVDKMDLWLRVCNLGSKAFTTRSGMAFDGSITTDGTSMSVCLKHPDAAKYGRHKHRNSEQAIEADIKSQYIENNLTACRSASNVVTIDPNKRDILYCRDLQKRRTFCYTSMQRTKEIGSRRFKKSREAMKRENGIDVIESAAPSHKTMNLDSYIHYLSWRHDNDAPLKDFYSHPAHTRWRWHTYMNTQRTEAKLISNMRKCFGSSFAVVMGDWSDGGHTQKYQISSKTTGWRNCFKCNRIDCFLLDEYRTSSICPRCLSGDHLQKGFKIRPHSRPWQRQKGRSEKVHGLLGCTNPNCIEQGCTYRYWNRDKLSTSNMVTIMKSYLDDGVRPAIFSRHVPLVA

SEQ ID NO: 2340 - protein, 351 aa, Spizellomyces punctatus
CGLPLFNAIPLQRSFIQSHVRIDTMILYQHVLKVSQREYDAVDKMDLWLRVCNLGSKVFMTRSGMAFDGSITMDGTSMSVCLKHPDAAKYGRHKHHNSEQAIEADIKSQYIENNLTACRSASNVVTIDPNKHDMLYCQDLQNGCMFHYTSMQRTKEIGSRRFNKSHEAMKHENGIDVIESAVPSHKTMNLDSYIHYLSWRHDNDAPLKDFYSHPTHTRWRWHTYMNTQRTEAKLISNMRKCFGSSFAVVMGDWSDGGHTQKYQISSKTTGWQNCFKCNRIDCFLLDEYRTSSICPRCLSGDHWQKGFKIRPHSRPWQHQKGCSEKVHGLLGCTNPNCIEQGCTYRYWNRDK

SEQ ID NO: 2341 - protein, 259 aa, Spizellomyces punctatus
AAENVIIIDPNKCDILYCQDSNGTTFCYTTNQRAVETGSHRFAKELQQMKKAGIDLIESCIPSHKTMNLMDFTHYLLIRRTDSDHRKDFYSHPAHTRWKWHAFINHQKSESNLISDLRNKYGENFTIVMGDWSDAGQTARFQTSSKTKGWHALFTCNRINCFLLDKYKTSSVCPHCSSGVEKGFKTRPHSRPWQRGKIEKVHGLLGCTNPNCLQQAWTMRYWNRDTLSTCNMVTIVQSMLAGHGRPDVFSRQCSSRSVA

SEQ ID NO: 2342 - protein, 413 aa, Spizellomyces punctatus
SRQAACLPHCHRRDVLLACILQTLPLYEHHGFRWFSAIPLRRSLIQSHIRIDTVILYSHVLCIPRRRREAEAIEKDDLWLRVCNLRTKAFQSRRSMQFEGSITTDGTSVSVYLKHPEADKYGKRGARKSAKTLEAEVKAVYVENNLPACRAAENVVIIDPNKRDLLYCQDSNGATMFHYTANQRCKETGSRRFAKERQQMKKEAGMDLIESRIPSHKTMNLMDFLRYLLVRCVDWNRRKDFYSHPAHTRWKWHSFINRQKSESDLISNMRNKYSENLTVVMGDWSDAGRTARFQTSSKTKGWRTLFKRNRIDCFLLDEYKTSSVCPRCSSSEFVEKKFKERPHSRPYRQREGKIEKVHGLLGCTNPNCLQQAWTMRYWNRDTLSTCNMLTIVQSMLDGHGRPEVFSRSVPAVA

SEQ ID NO: 2343 - protein, 219 aa, Spizellomyces punctatus
DTETVEKDDLWLRVCNLWNKAFRSRHGMQFEGSITTDGTSVSVYLKHPEADKYGKRRARKSANMVAAEVKVQYMEKNLPACRAAENVVVIDPNKHDILYCQDNSGMTFRYTANQRAVETGSRRFATERQQMKKEAGMDLIESRIPSHKTMNLMDFMRYLLVRRADWDRQKDFYSHPAHTWWKWHAFINRQKSESNLISNLRNKYGENFTIVMGDWSDAG

SEQ ID NO: 2344 - protein, 200 aa, Ostreococcus tauri
RSTSRSRATFSSASFGRARRKYVGTDVIFRRNSKQYKASTRRMKQLLARLHLKFTRWIEHEHKTVAKFLVNRYDGIICPPLDGAMFVRQANDTRAQKKMKRRCRRLKSATSMRKLVHALKYAAIRDGKYVMTERAIELGTPMTCGFCGWRHEHLGFERTFECHVCDLSIDRDVNGAQNNGLQALADGGFGRPPEYWNTHA

SEQ ID NO: 2345 - protein, 496 aa, Phytophthora parasitica
KRCPIDCTRSLYIERSSLILEFFSMGERPDWWKASVGRRAGETCLPLAQADRSRARMKGIKQKSWFQLNIVIEKESRPSSPSSSEASNPGETPNSVIKIRLYPTKPQKILLNKMFGTHRAVYNKLVESSREDCYKLKLSELSQQYRPISQKHSMMNYLPEYHLEVPEEVMYSTYRDFAKALKLSRALFKALKKKDKKTSFLDLRFNSKKDNSSSIEFRARGFKSMDGIVKFTPRYFGFSKNEGYLIKEKMPELQFSVRLQRTRDEKFYLCIPRSKIFEKTTSTRTCAIDPGVRSFITMYDPDGLTLGVDDANEYIFRRCLTIDRLISRHTKETNKRKCYRMQKRLTKCFNRVKAMIADMHHKVSGWLSTNFKQVLLPSFQTSDMTSKQKRISRKTSRAMLTWSHYKFKMMLAYKMERSGGRMVECEEHYTTKTCWCCGRINYSITSQKVFECNHCELVIDRDVNAARNIFLKNEELLTWVPTQVPGDAYSEVVRYA

SEQ ID NO: 2346 - protein, 260 aa, Phytophthora parasitica
YYLIAPRKKASSRSKTERVCAIDRGYRNFVTVYDPDGRTFSVKDVHNVFKRKFEAVDAMKSMLAVKGNVCKDRHRDKFRTQMKKGRKNPKSEEHRLRYHLRRRMRFTSRKATRCVNDLHQKLSCWLSENYHTVLLPSFQIQEMVRKHLNEVASDATPATGSEEDNATIKKRKMRSPTARALMAQAHFKFKQLLKYKMKHTGGRVVDCEEEYTSKTCSSCCVAKYNLGGDRVFRCTSCHAVLDRDVSAAKNILHKNISLLA

SEQ ID NO: 2347 - protein, 644 aa, Guillardia theta
SNMGKRKRGKQRKSCSDSQTTVKMCLKKHLKHHTMIGVIDDWVKHISKISHRGSIIFNHLLLWCFEKDSMQGDDTYITRLFDQIYNRTRKVTDKEKEEGMQEETVKTNGGEKVFFRTCFLMGEKRRGNAIQFDILDEFWQEKGNKYLPIQRRKEGDIRVLYYSADQYATNFQNYIFYTMGQKQTRYIKEWGKLNGISSEKEIQDIRNTVNGWSFPPKTRVLERQDVIDFIREQKEIIGWDNHYNLSWARDKIKKNPEQQKWMQLHMPNLVKYHFSVLRFLEIHDISDRYTIAPIFQIRKQFIRVDIWGLFYIMDQSGLLQYSKGGKSKCMKKFIQQKHKRFLSVLKLQSNLRKKGTVDSIQTDGVALCVTFKKRIHNETDNTTTKKSKTRDCDVSSRRVIAIDPGRNVLICGVEQIPGQEKPKQYRYTRRQYYHESHITRNNAKLEKWRQGITEESNDIARVSAKTSRLDHFERYIDTVVRLSEILFEHNCQNKFARLKMDNYIHKHKAIDTFFKKMKFNGTDQNPIIAYGDASFGCTGRGEKSVPVKWIKRRCQNFFEVTAVDEYRTTKCCNQCHQELYDLRRKQINKNGILADEVSVVRGLKWCRSTNCVQNRIKSRDVNAAMNILLCYMSLPARPDFLKRP

SEQ ID NO: 2348 - protein, 646 aa, Guillardia theta
SNMGKRKRGKQRKSCSDSQTTVKMCLKKHLKQHTMIGVIDDWVKHISKISHRGSIIFNHLLLWCFEKDSMQGDDTYITRLFDQIYNRTRKVTDKEKEEGMQEETVKTNGGEKVFFRTCFLMGEKRRGNAIQFDILDEFWQEKGNEYLPIQRRKEGDIRVLYYSADQYATNFQNYIFYTMGQKQTRYIKEWGKLNGISSEKEIQDIRNAVNGWSFPPKTRVLERQDVIDFIREQKEIIGWDNHYNLSWARDKIKKNPEQQKWMQLHMPNLVKYHFSVLRFLEIHDISDRYTIAPIFQIRKQFIRVDIWGLFYIMDQSGLLQYSKGGKSKCMKKFTQQKHKRFLSVLKLQSNLRKKGTVDSIQTDGVALCVTFKKRIHNETDRDDTTTKKSKTRDCDVSSRRVIAIDPGRNVLICGVEQIPGQEKPKQYRYTRRQYYHESHITRNNAKLEKWRQGITEESNDIARVSAKTSRLDHFERYIDTVVRLSEILFEHNCQNKFARLKMDNYIHKHKAIDTFFKKMKGNGTDQNPIIAYGDASFGCTGRGEKSVPVKWIKRRCQNFFEVTVVDEYRTTKCCNQCHQELYDLRRKQINKNGILADEVSVVRGLKWCRSTNCVQNRIKSRDVNAAMNILLCYMSLPARPDFLKRP

SEQ ID NO: 2349 - protein, 644 aa, Guillardia theta
SNMGKRKRGKQRKSCSDSQTTVKMCLKKHLKQHTMIDVIDDWVKHISKISHRGSIIFNHLLLWCFEKDSMQGDDTYITRLFDQIYNRTRKVTDKEKEEGMQEETVKTNGGEKVFFRTCFLMGEKRRGNAIQFDILDEFWQEKGNKYLPIQRRKEGDIRVLYYSADQYATNFQNYIFYTMGQKQTRYIKEWGKLNGISSEKEIQDIRNAVNGWSFPPKTRVLERQDVIDFIREQKEIIGWDNHYNLSWARDKIKKNPEQQKWMQLHIPNLVKYHFSVLRFLEIHDISDRYTIAPIFQIRKQFIRVDIWGLFYIMDQSGLLQYSKGGKSKCMKKFTQQKHKRFLSVLKLQSNLRKKGTVDSIQTDGVALCVTFKKRIHNETDNTTTKKSKTRDCDVSSRRVIAIDPGRNVLICGVEQIPGQEKPKQYRYTRRQYYHESHITRNNAKLEKWRQGITEESNDIARVSAKTSRLDHFERYIDTVVRLSEILFEHNCQNKFARLKMDNYIHKHKAIDTFFKKMKGNGTDQNPIIAYGDASFGCTGRGEKSVPVKWIKRRCQNFFEVTAVDEYRTTKCCNQCHQELYDLRRKQINKNGILADEVSVVRGLKWCRSTNCVQNRIKSRDVNAAMNILLCYMSLPARPDFLKRP

SEQ ID NO: 2350 - protein, 642 aa, Guillardia theta
HGFARLTYYNMPRKRKRITDDSDNGQEISYSKPFTRVVKCGLYSRLKVENRSILDVIDRWVLHISQITSRGSMIFNCFLIWGRDTGNLRYVVDEIKRAKSTFFWNVFTLGMEQHSRTDNKYPTLQRFWSEKRHLFVDLCRIRGDSQAIVFAANQYGTNFYQDLKANFTNRLEKFIAEFCKGELHINHQQEIEDVKNVLFQRKDYELKTEVFNRNNSQQIGTFIDHMKQLIGLSGDEDLFSFKYDKFDHRLQKNLFEIIETHMFMLKFFEDRGLSKKTFKAAPMSKFGRKHLTIDNDVMYYILKEANSLKPGEDKKSFMRIDQTLENSRNFRRIFDCSNLFRDQREEITSITTDGVSVCFRFTLIVKTIDGLEQEPSLRTTKWLADRKRAERKSAKKISISYKVLHENSEYQREIEECKNCPRVIAIDPGRSVIISAVEQFRDDQQIIRKRFQFSRKQYYHESHLNRNKKKRKTWDQDIQSTLHYLKGFSSKSGGSLSRFEDYLLAVTRHWEELTSHYSKRKYARMKFDIYISKRKSVDRFIRTMKGKGEIEPVIAYGNARFPSTGRRGERPVPVRWIRRRFEDHYRVVDVDEYRTTKCCNDCGSELDVLRRIENTGKEPDETCRLKTRKSEVRGLKFCRSSR

SEQ ID NO: 2351 - protein, 644 aa, Guillardia theta
SNMGKRKRGKQRKSCSDSQTTVKMCLKKHLKHHTMIGVIDDWVKHISKISHRGSIIFNHLLLWCFEKDSMQGDDTYITRLFDQIYNRTRKVTDKEKEEGMQEETVKTNGGEKVFFRTCFLMGEKRRGNAIQFDILDEFWQEKGNKYLPIQRRKEGDIRVLYYSADQYATNFQNYIFYTMGQKQTRYIKEWGKLNGISSEKEIQDIRNTVNGWSFPPKTRVLERQDVIDFIREQKEIIGWDNHYNLSWARDKIKKNPEQQKWMQLHMPNLVKYHFSVLRFLEIHDISDRYTIAPIFQIRKQFIRVDIWGLFYIMDQSGLLQYSKGGKSKCMKKFIQQKHKRFLSVLKLQSNLRKKGTVDSIQTDGVALCVTFKKRIHNETDNTTTKKSKTRDCDVSSRRVIAIDPGRNVLICGVEQIPGQEKPKQYRYTRRQYYHESHITRNNAKLEKWRQGITEESNDIARVSAKTSRLDHFERYIDTVVRLSEILFEHNCQNKFARLKMDNYIHKHKAIDTFFKKMKGNGTDQNPIIAYGDASFGCTGRGEKSVPVKWIKRRCQNFFEVTAVDEYRTTKCCNQCHQELYDLRRKQINKNGILADEVSVVRGLKWCRSTNCVQNRIKSRDVNAAMNILLCYMSLPARPDFLKRP

SEQ ID NO: 2352 - protein, 644 aa, Guillardia theta
SNMGKRKRGKQRKSCSDSQTTVKMCLKKHLKQHTMIGVIDDWVKHISKISHRGSIIFNHLLLWCFEKDSMQGDDTYITRLFDQIYNRTRKVTDKEKEEGMQEETVKTNGGDKVFFRTCFLMGEKRRGNAIQFDILDEFWQEKGNKYPPIQRRKEGDIRVLYYSADQYATNFQNYIFYTMGQKQTRYIKEWGKLNGISSENEIQDIRNTVNGWSFPPKTRVLERQDVIDFIREQKEIIGWDNHYNLSWTRDKIKKNPDQQKWMQLHMPNLVKYHFSVLRFLEIHDISDRYTIAPIFQIRKQFIRVDIWGLFYIMDQSGLLQYSKGGKSKCMKKFTQQKHKRFLSVLKLQSNLRKKGTVDSIQTDGVALCVTFKKRIHNETDNTTTKKSKTRDCDVSSRRVIAIDPGRNVLICGVEQIPGQEKPKQYRYTRRQYYHESHITRNNAKLEKWRQGITEESNDIARVSAKTSRLDHFERYIDTVVRLSEILFEHNCQNKFARLKMDNYIHKHKAIDTFFKKMKGNGTDQNPIIAYGDASFGCTGRGEKSVPVKWIKRRCQNFFEVTAVDEYRTTKCCNQCHQELYDLRRKQINKNGILADEVSVVRGLKWCRSTNCVQNRIKSRDVNAAMNILLCYMSLPARPDFLKRP

SEQ ID NO: 2353 - protein, 642 aa, Guillardia theta
HGFARLTYYNMPRKRKRITDDSDNGQEISYSKPFTRVVKCGLYSRLKVENRSILDVIDRWVLHISHVTSRGSMIFNCFLIWGRDTGNLRYVVDEIKRAKSTFFWNVFTLGMEQHSRTDNKYPTLQRFWSEKRHLFVDLCRIRGDSQAIVFAANQYGTNFYQDLKANFTNRLEKFIAEFCKGELHINHQQEIEDVKNVLFQRKDYELKTEVFNRNNSQQIGTFIDHMKQLIGLSGDEDLFSFKYDKFDHRLQKNLFEIIETHMFMLKFFEDRGLSKKTFKAAPMSKFGRKHLTIDNDVMYYILKEANSLKPGEDKKSFMRIDQTLENSRNFRRIFDCSNLFRDQREEITSITTDGVSVCFRFTLIVKTIDGLEQEPSLRTTKWLADRKRAERKSAKKISISYKVLHENSEYQREIEECKNCPRVIAIDPGRSVIISAVEQFRDDQQIIRKRFQFSRKQYYHESHLNRNKKKRKTWDQDIQSTLHYLKGFSSKSGGSLSRFEDYLLAVTSHWEELTSHYSKRKYARMKFDIYISKRKSVDRFIRTMKGKGEIEPVIAYGNARFPSIGRRGERPVPVRWIRRRFENHYRVVDVDEYRTTKCCNDCGSELDVLRRIENTGKEPDETCRLKTRKSEVRGLKFCRSSR

SEQ ID NO: 2354 - protein, 591 aa, Guillardia theta
HGFARLTYYNMPRKRKRITDDSDNGQEISYSKPFTRVVKCGLYSRLKVENRSILDVIDRWVLHISQITSRGSMIFNCFLIWGRDTGNLRYVVDEIKRAKSTFFWNVFTLGMEQHSRTDNKYPTLQRFWSEKRHLFVDLCRIRGDSQAIVFAANQYGTNFYQDLKANFTNRLEKFIAEFCKGELHINHQQEIEDVKNVLFQRKDYELKTEVFNRNNSQQIGTFIDHMKQLIGLSGDEDLFSFKYDKFDHRLQKNLFEIIETHMFMLKFFEDRGLSKKTFKAAPMSKFGRKHLTIDNDVMYYILKEANSLKPGEDKKSFMRIDQTLENSRNFRRIFDCSNLFRDQREEITSITTDGVSVCFRFTLIIKTIDGLEQEPSLRTTKWLADRKRAERKSAKKISISYKVLHENSEYQREIEECKNCPRVIAIDPGRSVIISAVEQFRDDQQIIRKRFQFSRKQYYHESHLNRNKKKRKTWDQDIQSTLHYLKGFSSKSGGSLSRFEDYLLAVTSHWEELTSHYSKRKYARMKFDIYISKRKSVDRFIRTMKGKGEIEPVIAYGNARFPSTGRRGERPVPPGQVDKKKIRESLQSRRC

SEQ ID NO: 2355 - protein, 644 aa, Guillardia theta
SNMGKRKRGKQRKSCSDSQTTVKMCLKKHLKQHTMIGVIDDWVKHISKISHRGSIIFNHLLLWCFEKDSMQGDDTYITRLFDQIYNRTRKVTDKEKEEGMQEETVKTNGGEKVFFRTCFLMGEKRRGNAIQFDILDEFWQEKGNKYLPIQRRKEGDIRVLYYSADQYATNFQNYIFYTMGQKQTRYIKEWGKLNGISSEKEIQDIRNAVNGWSFPPKTRVLERQDVIDFIREQKEIIGWDNHYNLSWARDKIKKNPEQQKWMQLHMPNLVKYHFSVLRFLEIHDISDRYTIAPIFQIRKQFIRVDIWGLFYIMDQSGLLQYSKGGKSKCMKKFTQQKHKRFLSVLKLQSNLRKKGTVDSIQTDGVALCVTFKKRIHNETDNTTTKKSKTRDCDVSSRRVIAIDPGRNVLICGVEQIPGQEKPKQYRYTRRQYYHESHITRNNAKLEKWRQGITEESNDIARVSAKTSRLDHFERYIDTVVRLSEILFEHNCQNKFARLKMDNYIHKHKAIDTFFKKMKGNGTDQNPIIAYGDASFGCTGRGEKSVPVKWIKRRCQNFFEVTAVDEYRTTKCCNQCHQELYDLRRKQINKNGILADEVSVVRGLKWCRSTNCVQNRIKSRDVNAAMNILLCYMSLPARPDFLKRP

SEQ ID NO: 2356 - protein, 279 aa, Guillardia theta
LSKQSMDSNRNLHCALPNGLPIEKGLNGNRRRRYQYHTKYYMKIQNTKERSKNVKNCPRVIAIDPGRSVIISAVEQFRDDQQIIRKRFQFSRKQYYHESHLNRNKKKRKTWDQDIQSTLHYLKGFSSKSGGSLSRFEDYLLAVTSHWEELTSHYSKRKYARMKFDIYISKRKSVDRFIRTMKGKGEIEPVIAYGNARFPSTGRRGERPVPVRWIRRRFENHYRVVDVDEYRTTKCCNDCGSELDVLRRIENTGKEPDETCRLKTRKSEVRGLKFCRSSR

SEQ ID NO: 2357 - protein, 631 aa, Guillardia theta
HGFARLTYYNMPRKRKRITDDSDNGQEISYSKPFTRVVKCGLYSRLKVENRSILDVIDRWVLHISQITSRGSMIFNCFLIWGRDTGNLRYVVDEIKRAKSTFFWNVFTLGMEQHSRTDNKYPTLQRFWSEKRHLFVDLCRIRGDSQAIVFAANQYGTNFYQDLKANFTNRLEKFIAEFCKGELHINHQQEIEDVKNVLFQRKDYELKTEVFNRNNSQQIGTFIDHMKQLIGLSGDEDLFSFKYDKFDHRLQKNLFEIIETHMFMLKFFEDRGLSKKTFKAAPMSKFGRKHLTIDNDVMYYILKEANSLKPGEDKKSFMRIDQTLENSKNFRRIFDCSNLFRDQREEITSITTDGVSVCFRFTLIVKTIDGLEQEPSLRTTKWLADRKRAERKSAKKISISYKVLHENSEYQREIEECKNCPRVIAIDPGRSVIISAVEQFRDDQQIIRKRFQFSRKQYYHESHLNRNKKKRKTWDQDIQSTLHYLKGFSSKSGGSLSRFEDYLLAVTSHWEELTSHYSKRKYARMKFDIYISKRKSVDRFIRTMKGKGEIEPVIAYGNARFPSTGRRGERPVPVRWIRRRFENHYRVVDVDEYRTTKCCNDCGSELDVLRRIENTGKEPDETCRLKTAKEK

SEQ ID NO: 2358 - protein, 272 aa, Guillardia theta
LEQEPSLRTTKWLADRKRAERKSAKKISISYKVLHENSEYQREIEECKNCPRVIAIDPGRSVIISAVEQFRDDQQIIRKRFQFSRKQYYHESHLNRNKKKRKTWDQDIQSTLHYLKGFSSKSGGSLSRFEDYLLAVTSHWEELTSHYSKRKYARMKFDIYISKRKSVDRFIRTMKGKGEIEPVIAYGNARFPSTGRRGERPVPVRWIRRRFENHYRVVDVDEYRTTKCCNDCGSELDVLRRIENTGKEPDETCRLKTRKSEVRGLKFCRSSR

SEQ ID NO: 2359 - protein, 668 aa, Guillardia theta
STKGLPKESWTSMTGVIDRFQSPIQWGCMRVLKKKKKSSRLPGVRRKVCGCSFHLYSKPFTRVVKCGLYSRLKAENRSILDVIDRWVLHISQITSRGSMIFNCFLIWGRDTGNLRYVVDEIKRAKSTFFWNVFTLGMEQHSRTDNKYPTLQRFWSEKRHLFVDLCRIRGDSQAIVFAANQYGTNFYQDLKANFTNRLEKFIAEFCKGELHINHQQEIEDVKNVLFQRKDYELKTEVFNRNNSQQIGTFIDHMKQLIGLSGYEDLFSFKYDKFDHRLQKNLFEIIETHMFMLKFFEDRGLSKKTFKAAPMSKFGRKHLTIDNDVMYYILKEANSLKPGEDKKSFMRIDQTLENSKNFRRIFDCSNLFRDQREEITSITTDGVSVCFRFTLIVKTIDGLEQEPSLRTTKWLADRKRAERKSAKKISISYKVLHENSEYQREIEECKNCPRVIAIDPGRSVIISAVEQFRDDQQIIRKRFQFSRKQYYHESHLNRNKKKRKTWDQDIQSTLHYLKGFSSKSGGSLSRFEDYLLAVTSHWEELTSHYSKRKYARMKFDIYISKRKSVDRFIRTMKGKGEIEPVIAYGNARFPSTGRRGERPVPVRWIRRRFENHYRVVDVDEYRTTKCCNDCGSELDVLRRIENTGKEPDETCRLKTRKSEVRGLKFCRSSR

SEQ ID NO: 2360 - protein, 503 aa, Guillardia theta
YFRRYLPIQRRKEGDIRVLYYSADQYATNFQNYIFYTMGQKQTRYIKEWGKLNGISSEKEIQDIRNTVNGWSFPPKTRVLERQDVIDFIREQKEIIGWDNHYNLSWARDKIKKNPEQQKWMQLHMPNLVKYHFSVLRFLEIHDISGRYTIAPIFQIRKQFIRVDIWRLFYIMDQSGLLQYSKGGKSKCMKKFIQQKHKRFLSVLKLQSNLRKKGTVDSIQTDGVALCVTFKKRIHNETDNTTTKKSKTRDCDVSSRRVIAIDPGRNVLICGVEQIPGQEKPKQYRYTRRQYYHESHITQNNAKLEKWRQCITEESNDIARVSAKTSRLDHFERYIDTVVRLSEILFEHNCQNKFARLKMDNYIHKHKAIDTFFKKMKGNGSDQNPIIAYGDASFGCTGRGEKSVPVKWIKRRCQNFFEVTAVDEYRTTKCCNQCHQELYDLRRKQINKNGILADEVSVVRGLKWCRSTNCVQNRIKSRDVNAAMNILLCYMSLPARPDFLKRP

SEQ ID NO: 2361 - protein, 479 aa, Guillardia theta
SICNKFPKLHILYDGTKQTRYIKEWGKLNGISSEKEIQDIRNTVNGWSFPPKTRVLERQDVIDFIREQKEIIGWDNHYNLSWARDKIKKNPEQQKWMQLHMPNLVKYHFSVLRFLEIHDISDRYTIAPIFQIRKQFIRVDIWGLFYIMDQSGLLQYSKGGKSKCMKKFIQQKHKRFLSVLKLQSNLRKKGTVDSIQTDGVALCVTFKKRIHNETDNTTTKKSKTRDCDVSSRRVIAIDPGRNVLICGVEQIPGQEKPKQYRYTRRQYYHESHITRNNAKLEKWRQGITEESNDIARVSAKTSRLDHFERYIDTVVRLSEILFEHNCQNKFARLKMDNYIHKHKAIDTFFKKMKGNGTDQNPIIAYGDASFGCTGRGEKSVPVKWIKRRCQNFFEVTAVDEYRTTKCCNQCHQELYDLRRKQINKNGILADEVSVVRGLKWCRSTNCVQNRIKSRDVNAAMNILLCYMSLPARPDFLKRP

SEQ ID NO: 2362 - protein, 640 aa, Guillardia theta
FMPRKRKEPLNDSTSERVEKYNTFKCCLVKHLKEKRLFPVIEEWVRHISQIMHRGSLIFNHFLIWCLERGYTPELKDQSFFYRCFLLGTNERKDIKLREPKDGKKDKRQQQQGYRDLLRSFWEEKHSTYDEYQINRIKGDWQAIMYAIHQYMTNLKMYLAYTINSRQLRYINEWTESQRSKFDMPNSEWKDFQRTIRCAINGWEFPPLSCLGQEDVSLFIQEQRLILGLQMNQFVSFNQAHLKSYPRWYETHQNELLRYQYMMLSFFEEQGTKTYSLAPVCSIKSHFINIDKTILPYMLKKLDLTVIEMDEIQMKDAFKCERYEKNGKKLKRVQTDGVALCFHFVKEEIREKQDQPKKKKAKYGKQCCQSDEKKAEHDEEQVVRKQNLRGGRVIAIDPGRTVLICGIEDGADKKFRFSRNQYYQESHIKRNERRSRKWGIEIQEINNRLSNASLKTCKMDVFEHNIRVVLDVRTKCFEHHCKRREALLRMDNFIHKNRVVDRFLNTMQTKDQEEPTLAYGDGSFNSTGRGEKMAPVKWIKEKCKKRFKRFVEIDEHFTTAKCNRCGERLYDFRRHSMRRKGIHNTRKTCVRGLKWCSSTRCFKSPFVSRDVNATMNILLCFKSLPQRPGFLQRPLYHRPQ

SEQ ID NO: 2363 - protein, 644 aa, Guillardia theta
SNMGKRKRGKQRKSCSDSQTTVKMCLKKHLKQHTMIGVIDDWVKHISKISHRGSIIFNHLLLWCFEKDSMQCDDTYITRLFDQIYNRTRKVTDKEKEEGMQEDTVKTNGGDKVFFRTCFLMGEKRRGNAIQFDILDEFWQEKGNKYPPIQRRKEGDIRVLYYSADQYATNFQNYIFYTMGQKQTRYIKEWGKLNGISSEKEIQDIRNAVNGWSFPPKTRVLERQDVIDFIREQKEIIGWDNHYNLSWARDKIKKNPDQQKWMQLHMPNLVKYHFSVLRFLEIHDISDRYTIAPIFQIRKQFIRVDIWGLFYIMDQSGLLQYSKGGKSKCMKKFTQQKHKRFLSVLKLQSNLRKKGTVDSIQTDGVALCVTFKKRIHNETDNTTTKKSKTRDCDVSSRRVIAIDPGRNVLICGVEQIPGQEKPKQYRYTRRQYYHESHITRNNAKLEKWRQGITEESNDIARVSAKTSRLDHFERYIDTVVRLSEILFEHNCQNKFARLKMDNYIHKHKAIDTFFKKMKGNGTDQNPIIAYGDASFGCTGRGEKSVPVKWIKRRCQNFFEVTAVDEYRTTKCCNQCHQELYDLRRKQINKNGILADEVSVVRGLKWCRSTNCVQNRIKSRDVNAAMNILLCYMSLPARPDFLKRP

SEQ ID NO: 2364 - protein, 256 aa, Guillardia theta
SVRHDEDLSDQESRGGRSVLICGVEQIPGQEKPKQYRYTRRQYYHEFHITRNNAKFEKWRQGITEESSDIARVSAKTSRLDHYERYIDTVVRLSEILFEHNCQNKFARLKMDNYIHKHKAIDTFFKKMKDGNGSDQNPIIAYGDASFGCTGRGEKSVPVKWIKRRCQNFFEVTAVDEYRTTECCNQCHQELYDLKRKKINKNGILADEVSVVRGLKWCRSTNCVQNRIKSRDINAAMNILLCYMSLPARPDFLKRP

SEQ ID NO: 2365 - protein, 642 aa, Guillardia theta
HGFARLTYYNMPRKRKRITDDSDNGQEISYSKPFTRVVKCGLYSRLKVENRSILDVIDRWVLHISQITSRGSMIFNCFLIWGRDTGNLRYVVDEIKRAKSTFFWNVFTLGMEQHSRTDNKYPTLQRFWSEKRHLFVDLCRIRGDSQAIVFAANQYGTNFYQDLKANFTNRLEKFIAEFCKGELHINHQQEIEDVKNVLFQRKDYELTTEVFNRNNSQQIGTFIDHMKQLIGLSGDEDLFSFKYDKFDHRLQKNLFEIIETHMFMLKFFEDRGLSKKTFKAAPMSKFGRKHLTIDNDVMYYILKEANSLKPGEDKKSFMRIDQTLENSKNFRRIFDCSNLFRDQREEITSITTDGVSVCFRFTLTVKTIDGLEQEPSLRTTKWLADRKRAERKSAKKISISYKVLHENSEYQREIEECKNCPRVIAIDPGRSVIISAVEQFRDDQQIIRKRFQFSRKQYYHESHLNRNKKKRKTWDQDIQSTLHYLKGFSSKSGGSLSRFEDYLLAVTSHWEELTSHYSKRKYARMKFDIYISKRKSVDRFIRTMKGKGEIEPVIAYGNARFPSTGRRGERPVPVRWIRRRFENHYRVVDVDEYRTTKCCNDCGSELDVLRRIENTGKEPDETCRLKTRKSEVRGLKFCRSSR

SEQ ID NO: 2366 - protein, 326 aa, Guillardia theta
DNRDTHVHVEVLRRSWIFDCSNLFRDQREEITSITTDGVSVCFRFTLIIKTIDGLEQEPSLRTTKWLADRKRAERKSAKKISISYKVLHENSEYQREIEECKNCPRVIAIDPGRSVIISAVEQFRDDQQIIRKRFQFSRKQYYHESHLNRNKKKRKTWDQDIQSTLHYLKGFSSKSGGSLSRFEDYLLAVTSHWEELTSHYSKRKYARMKFDIYISKRKSVDRFIRTMKGKGEIEPVIAYGNARFPSTGRRGERPVPVRWIRRRFENHYRVVDVDEYRTTKCCNDCGSELDVLRRIENTGKEPDETCRLKTRKSEVRGLKFCRSSR

SEQ ID NO: 2367 - protein, 642 aa, Guillardia theta
HGFARLTYYNMPRKRKRITDDSDNGQEISYSKPFTRVVKCGLYSRLKVENRSILDVIDRWVLHISQITSRGSMIFNCFLIWGRDTGNLRYVVDEIKRAKSTFFWNVFTLGMEQHSRTDNKYPTLQRFWSEKRHLFVDLCRIRGDSQAIVFAANQYGTNFYQDLKANFTNRLEKFIAEFCKGELHINHQQEIEDVKNVLFQRKDYELKTEVFNRNNSQQIGTFIDHMKQLIGLSGDEDLFSFKYDKFDHRLQKNLFEIIETHMFMLKFFEDRGLSKKTFKAAPMSKFGRKHLTIDNDVMYYILKEANSLKPGEDKKSFMRIDQTLENSKNFRRIFDCSNLFRDQREEITSITTDGVSVCFRFTLIVKTIDGLEQEPSLRTTKWLADRKRAERKSAKKISISYKVLHENSEYQREIEECKNCPRVIAIDPGRSVIISAVEQFRDDQQIIRKRFQFSRKQYYHESHLNRNKKKRKTWDQDIQSTLQYLKGFSSKSGGSLSRFEDYLLAVTSHWEELTSHYSKRKYARMKFDIYISKRKSVDRFIRTMKGKGEIEPVIAYGNARFPSTGRRGERPVPVRWIRRRFENHYRVVDVDEYRTTKCCNDCGSELDVLRRIENTGKEPDETCRLKTRKSEVRGLKFCRSSR

SEQ ID NO: 2368 - protein, 594 aa, Guillardia theta
LQIHQRLFPVIDEWVKHISQIMHRGSLIFNHFLLWCLERKYTPELNDQSFFYKCFLLGTETRKEYKLREPKKGKEDKIQQQQNYRDMLRSFWEEKHSTYDEYQINRIKGDGQAILYAIQQYITNLKTYLAYTINSRQIRYIEEWTETQIKELKIPKMKVTELKEFQHNLRCVINGWAFPPLRYLMQEDVSRFVQDQRNVLGLQRGQFVLLNQKHLKAHTWWYENHQLELLRYQHMILSFLEQNETKTYSLAPICTIKSHFITIDAKILSAMSKGLRLTVVEMDEDFFQMKDVFRYDRYAKNGKTLKRVQTDGVSLCFHFEKEVIQKKQEQREKKKARHVENTSNRVIAIDPGRTVLICGIEDGTGKQFRFSRNQYYQESHMKRNERRSRKWNTEIKEINNRLSNASLKTCNSKVFEQNIKVVLDVRKQCFQHHCKRREALLRMDNFIHKNRVVDRFLNTLQTKDQEEPMLAYGDGSFNSTGRGEKMAPVKWIKEKCKKRFKKFVEIDEYFTTAKCNCCGERLHDFTRRHSMRKKGKHNTRKKIVRGLKWCSSTRCFKSPFVSRDVNAAMNILLCFRTLPGRPEFLQRPLYHRPQ

SEQ ID NO: 2369 - protein, 387 aa, Guillardia theta
DNRDTHVHVEVLVEDRGLSKKTFKAAPMSKFGRKHLTIDNDVMYYILKEANSLKPGEDKKSFMRIDQTLENSKNFRRIFDCSNLFRDQREEITSITTDGVSVCFRFTLIVKTIDGLEQEPSLRTTKWLADRKRAERKSAKKISISYKVLHENSEYQREIEECKNCPRVIAIDPGRSVIISAVEQFRDDQQIIRKRFQFSRKQYYHESHLNRNKKKRKTWDQDIQSTLHYLKGFSSKSGGSLSRFEDYLLAVTSHWEELTSHYSKRKYARMKFDIYISKRKSVDRFIRTMKGKGEIEPVIAYGNARFPSTGRRGERPVPVRWIRRRFENHYRVVDVDEYRTTKCCNDCGSELDVLRRIENTGKEPDETCRLKTRKSEVRGLKFCRSSR

SEQ ID NO: 2370 - protein, 559 aa, Copidosoma floridanum
RMAMVCQLQPRLRRRAIGKTRAQRKRILRCKRALVMDIVKKRKKHHKQAAKENKQSQKMATGNHNKKTLSPLVSKKQVKGNEKQPKGKKTLGKDKAQRVLAYASLKSFVTPKSLRKTGSGKDSRSPGSANAAKPVLLSKKQRKDQVLGQIARLFAIQGTENARKGKEIPELACVLREDENLDFSQMKSQFWKFIPIFFRIQQKLIERGEKSFTLIPINKIHERFIHYGQIAVSKTCSRLAKMNIVKISAQTDKHLKLVENFSKMFDLTTVFKQKPKYTFAWKISCNSVESSVHLFSRRKDQDDGRKSAHKNRFCAKNKNKQIKDVKEDALKQTGQKEVKINVPTKNYQKPFNRLVGIDPGVKIPLAVYTVDLEKRKLANQSSQSVDPKGSDQFDMIRYQWFKFASGISTRKWRASHYNSIIKEKMIKLQEKFPSINLLKKTENSGTTKYRIDYYFALGPVYWRKFWSRQKFDAKIRSRSLVDTLINEIVYDNYQGKDRKNVCTFLALGKTKISGKISGHGRVPMALIVKRLNDFSKEYPKTLTVSIFNHDFVFSFTSFK

SEQ ID NO: 2371 - protein, 513 aa, Copidosoma floridanum
RIGSLSDKINCISFFPRNSDVFSPYLSLSLPLSGRQHKAYDQLEIERRFYTFFLGSLSLSRVSSTECYRFYGRSYQPTAYHFAANAAKPVLLTKKQRKDQVLGQIARLFAIQGTENARKGKEIPELACVLREDENLDFSQMKSQFWKFIPIFFRIQQKLIERGEKSFTLIPINKIHERFIHYGPIAVSKTCSRLAKMNIVKISAQTDKHLKLVENFSKMFDLTTVFKQKPKHAFAWKISCNSVESSVHLFSRRKDQDDGRKLAHKNRFCAKNKNKQIKDVKEDALKQTGQRGKINVPTKNYQKPFNRLVGIDPGVKIPLAVYTVDLEKRKLANQSSQSVDPKGSDQFDMIRYQWFKFASGISTRKWRASHYHSIIKEKMIKLQEKFPSINLLKKTENSGTTKYRIDYYFALGPVYWRKFWSRQKFDAKIRSRSLVDTLINEIVYDNYQGKDRKNVCTFLALGKTKISGKISGHGRVPMALIVKRLNDFSKEYPKTLTVSIFNHDFVFSFTSFK

SEQ ID NO: 2372 - protein, 312 aa, Copidosoma floridanum
CRAYTEICIRQKFYFGPKSFKLAKLFNKILRHKSNVARARKRFDYYIKKSRKTSTLAKSVVYGPNLPKRLIKRNKHGKQPRNRNKKKFVRDSKRKESSEKNKVDNDGTKEDRSDIRKKMRAQVALFKSEPALIAIGDASISKFVKGHRMHALGKIFDEVSREVATNDVMILRKVNEFRTTVICSHCGSFALVAPSPGRFIYCHKCKITMHHDLNGARNILLKALVDEHLLKPSQVGNYGNFAQTFAKPRNECEALRQVFKTVLFTLLSCLVVEYQRKLVICSFNESCASVGRRREIVVVLGNGDKQLEALHR

SEQ ID NO: 2373 - protein, 206 aa, Copidosoma floridanum
SKEEKNNLESILGSRALAKCFVKRLRLFVRRQPIAERRSIVSLKYDRFVQTRIAVLKIVNKILFRDAPKGQRSDVAPSFISIDGAKISGAAKGYARTPQQLLYQRLCEVARQSRKSAIVITNEFRTSRLCNVCNGLCHMQKRNRDVKNIVHNHRNVFSQKSEGRTHCGTSGNRDVRSGHNLLMLGAIRCGLRSTNFIPKYRNFHRD

SEQ ID NO: 2374 - protein, 208 aa, Auxenochlorella protothecoides
NSPSSCRCPTHKTASTEVLLSRVVRIVPNLRQGLAWHRDEKPFRKVRHQAYVGRERAITRLAEQFRAPPGMTTIVGVGNWSAQDRGGIMRGTPPGPWICFLRRLRRVCRVVVVDEHRTSKLCCACHTSLHAHQYMRVRRGEEKLVDVWDTKRCTNKGCNVNVVNRDVNGAANILMLAKCFFKNALRPTAFGGPPVSSSPAHPPPLVRH

SEQ ID NO: 2375 - protein, 220 aa, Auxenochlorella protothecoides
TASTEVLLSRVAWIVPTLRQGLAWHRDEKPFRKLRHQAYVGRERAINWQAEQFRAPPCMTTIVGVGNWSAQDRGGIMRGAPPGPWIRFLRRLRRVCRVVVVDEHRSSKLCCACHATLHAHQYVRVCRGEEKLVDVWDTKRCVNKGCRVHVVNRDVNGAANILMLTKCFFAGALRPTAFGGPPASPSRPPPPPPLVRRSRQPTAPVRSRLREAAVQPAQAR

SEQ ID NO: 2376 - protein, 313 aa, Auxenochlorella protothecoides
LPGTLASGAGVLAALFLGVTVDVVYTSSEVHPSFPPTHSPANHPHLPRSYNTTHPIPPTYTHLCRQDPPPDDARIDKYVGIDPGRTKMFTAVDEHADVTSLSSRSFTPCWGPSGGRRLLGSGTRRPHPMSRSCTSEWCLVCGVYAGTGPTGAGTVSRHPALLQLYQSPCSNPSSHRCPTHKTASTEVLLLRVAWIIPYQRRGLAWRIYKKPFRKQRHHAYVGRERAINWQAEQFHAPPRMTTIVGVGNWSAQDGGGIMRGTPPRPWIRSLGRLRRVCRVVVVDQHRTFNCAAAVTPPCMPTSTNRSATAWRSG

SEQ ID NO: 2377 - protein, 212 aa, Auxenochlorella protothecoides
SEGSSPPCDRAWPGTGTRSRFGRCATRPTSAGSGPSTGWRSSSAPPPGMTTVVGVGNWSAHDRGGIMRGTPPGPWIKSLRRLRRVCRVVVVDEHRTSKLCCACHATLHAHQYVRVRNGEEKLVDVWDTKRCGNKACRVHVVNRDVNGAANMLMLTKCFFANALRPTAFGGPPASPSSTLPPPPPPLVRRSRQTTAPVRSRLREAAVQPAQAR

SEQ ID NO: 2378 - protein, 238 aa, Auxenochlorella protothecoides
PEHTYQALDSSSRLQHPSFRQVLLSRVVKIVPDLREGLAWHRDKQPFRKLRHQAYVGRERAITRLAEQFRAPPGMTTVVGVGNWSAQDRGGIMRGPPPGPWIRFLRRLRRVCRVVVVDEHRSSKLCCACHATLHSHQYVRVRNGKEKLVDVWDTKRCVNKGCRVHVVNRDVNGAANMLMLTKCFFENALRPTAFGGPPVSSSPALPPPPPPLVRRSRQPTAPVRSRVREAAVQPAQAR

SEQ ID NO: 2379 - protein, 238 aa, Auxenochlorella protothecoides
IPTGLAPVAQLLPADGISLAQLVASIGEPEGVGGWEGGRRRSRGSTKCCGTKCILKKTLELHQDVDRPVDVAVDNVDLAGPVGAPLRVAQFRPRHTASLLLYQTPSSNSPSSRRCPTHKTASTEVLLSRVVRIVPNLRRGLAWHMHENPFRKVRHQAYVGRERAITQLAEQFRAPPGMTTIVGVGNWSAQDRGGTMRGTPPGPWIRFLRRLRRVCRVVVVDEHRTSKLCCACHTTLVQ

SEQ ID NO: 2380 - protein, 290 aa, Auxenochlorella protothecoides
WRTGGVGGGGKEGKAGGPPKAVGRGALSKKHLVSIRMFTAPFTSRLTTLTLQAGLTHRLVSHSSVHVSMPSLQVCTKPPPQTPPSSHRCPTYKTASTEVLLSRVAWIVPTLRRGLAWHMHEKPFRRVRHQAYVSRERAITQLAEQFRAPPGMTTVVGVGNWSAQDRGGIMRGTPPGPWIRFLRRLRRVCRVVVVDEHRTSKLCCACHATLHAHQYVRGCRGEEKLVDVWDTKRCVNPACKVNVINRDVNGAVNILMLTKSFLANAPRPTASGGPPASPSFPPTPHPPVRH

SEQ ID NO: 2381 - protein, 383 aa, Auxenochlorella protothecoides
APASNATAPSTTPGSGRRGRGRSRQCKTPPHPERSPMPLGPGRGSSCHQHAIQPLPTMPLPIHCLHSGLLQFSVNESPVQSTWQAGVRSVLLRHTDPYWACAGCTAASRKRDLTGAVGCLDRRTRGGGWGGRCGRRRSRGSTKSCGTKCILKKTLEQHQDVDRPVDVAVDNVDLAGPVGAPLRVAQFRPQHTASLPLYQTPSSNSPSSRRCTTHKTASTEVLLSRVVRIVPNLRRGLGWHMHEKPFRKVRHQAYVGRERAITRLAEQFRAPPGMTTIVGVGNWSAQDRGGIMRGTPPGPWIGFLRRLRRVCRMVVVNEHRSSKLCCACHATLQAHQYVRVRKGEEKLVDVWDTKRCTNKGCKVHVVNRDVNGAANMLMLTKIF

SEQ ID NO: 2382 - protein, 264 aa, Auxenochlorella protothecoides
NSEHSGAPIPGRLDRPQTARGPGLAHAPEAISQAPAPGLRRQAAGHHPAGGAVPRSPRHDYNCRRGQLVGPGQRGHHAGDSSWAWAIGWPRTRGGIMRGTLRGPWIRFLRRLRRVCRVVVVDEHRSSKLCCACHATLHAHQYVRVPNGVEKLVDVWDTKRCTNRGCKVNVVNRDVNGVVNMLMLLKCFFAGALRPTAFGGPPAPPSPAPPPLRFAIRGNQLRQPDPACGKQLCNRRKPGSGISSTRAPHSRIGVVRECRSQSKN

SEQ ID NO: 2383 - protein, 366 aa, Auxenochlorella protothecoides
AIRSLPGLRRLHSCFPQAGSDWRSWLPRSANQRGWGWWEGGRRGSRGSTKSCGTKCIRKKSLEQHQDVDRPVDVAIDNVDLAGPVGAPLRVAQFRPRHTASLPLYQPPSSNSPSSRRCPTHKTASTEVLLSRAVWIVPNLRQGLAWHRDEKPFRKRRHQAYVGRERFITQLTEQFRAPPGMTTFVGVGNWSAQDRGGIMRGPPPGPWIRFLRRLRRVCRVVVVDEHRSSKLCCACHATLHAHQYVRVCRGEEKLVDVWDTKRCTNRACKVNVVSRDVNGAANMLMLTKCFFENALRPTAFGGPPASPSFPPTPPTPSGSPIEATNCASRIPLAGSSCATGASPVGIYLPKQIPSAHPFSPISLGYF

SEQ ID NO: 2384 - protein, 262 aa, Auxenochlorella protothecoides
CRGMPRRGRHCVTTPCIAPTVPTLVLKPPSPPCHYHRCPTYKTASTEVLLSRVAWIVPTLRQGLAWHRDEKPFRKLRHQAYFGRERAISLLAEQFRAPLRMTTVVGVGNWSAQDRGGIMRGTPPRPWIRSLGRLRRVCRVVVVDEHRSSKLCCACHATLHAHQYVRVRNGEEELVDVWDTKRCVNKGCRVHVVNRDVNGAANMLMLTKCFFENAPRPTAFGGPAASPSFPPTPPPLVRRSRQPTAPAISRPREAAVQPAQAR

SEQ ID NO: 2385 - protein, 257 aa, Auxenochlorella protothecoides
LVCGVYAGVCLAGAGTLSRHHASLQPVSTLLRNPPPPPLATTTGARPLRQRAQRCSCRGSRGSSPTCDRAWPGTGTGSRSASCGTRPTSAGSGPSTGWRSSSGPPPGMTTVVGVGNWSAQDRGAIMRGPPPGPWIRFLRRLGRVCRVVVVNEHRSSKLCCACHATLHAHQYVRVRNGEEKLVDVWDTKRCVNPACKVNVVNRDVNGAVNMLMLVKRFFAREARPTVFGGPPCSPPPNPRPPSTHTLVRRQRQPTAPA

SEQ ID NO: 2386 - protein, 201 aa, Sphaeroforma arctica
ERVDKEKSAKNVSMARLFERALRARVRRLHEVWLAATLALSSEFAYSFSTTAAWMKSELSNRTHCRAGILSLCTFHNKLIRATSSPKSSCTLVDLGDEKYTTCVLSCCGTRLHNVGCSKVLYCHRCRIFIPRDFNGAVNCYRLYIARKKLVPNDLINEISRPTTKPRRHGHLNANVPKSKFYLQICLLGRTVRSNRNRRAL

SEQ ID NO: 2387 - protein, 992 aa, Sphaeroforma arctica
SWIRALPQNILCVGNVPTLKLVVPPNQTRDEMIQRMSPTANDARSMPIVFKLDSAGCYRGRISFPGYISKPTVLPEIRNPSTKPPLMFELLEQADPVFETALIHSAKVYVGERETEPRHLSPRVQVVPSDMKTFEAAICSITGEETVASIRVFGQVLHDSIDAVTRYFRDRFDFSEFCALLDVCRGDEQWVTIVDSLCDKSPGRKYDDALLRRMVQFVTRNDPNGFCKFINSASGDYIDRRVHVWATLLGLESDNPTKTDLIRAVKTRGPPVENDDSGETKIKIKRGKRRAGPRSVASLPVATDLTYNDEAFTLQFRGKLIKWTVQQFQRCTGATQMQMNLYQVPKSAMEAQKLMIGSLVKVSVEKHERTLSVSIHRNFDESAVEERHEALDRNVLVKMYDSAPGITCVWIPQPSRSVSRIQASVLNAKFPPLPPKTTKDTIKPYYERVDDEINYVSNGVTTTVAKSAHIGSMMGNLVRVSGKHACIFKVLEGAIKSRSVSRLRWAFETTVTQLDYVGVEWKSIGNFTVARKMANARIRQQLETGERKANYRLEVCNTASYEYFNAKNTVLDRPPENVLPESKYLAVPCLAYHDIDPKTLNAAGKNSNIRLLDHNVVRHNVYNVDAKFQRAKMNFLGGPNVTRLQLKPLKVPAPQDEGSHFQLRTAHILIPRDPHGCERGLKLKTTWKKVATDALVNKDLFEKQMGCEVRACKHTTNARRGTPGQDVVSETGGVIGRRRLPVAADFPNGRLPFKLSESHKLTSYTISVIDLVDRDSDSAVVKGLGVSDVGISTAHSIYDPDNKRFWEFGRGATGFLCDTLAKRVDKEKSAKNVSMARLFKRALRARVRRLHEVWLAATLALFSEFAYSFSTTAAWMKSELSKRTHRRAGILSLCRFHDKLTRATSSPKSSCTLVDLGDEKYTTCVLRCCGTRLHNVGCSKVLYCHRCRIFIPRDFNGAVNCYRLYIARKKLVPNDLINEGGLGELNAMTLLR

SEQ ID NO: 2388 - protein, 470 aa, Branchiostoma belcheri
NMACYRPKQSILWDTADVHFETDNGKHDAKRGAITFYRHYARESTTRQLNPRCQMSRSITARELWVRRQNKEPYDPSPTTTTSTTTTFVVGVTLTAKQKESHKIAAKMAAYVYNCCVNKTSRGKGSKLKETLLRELCDSSTPPDWVDRQVHHIIPAPPKETWAKFKLERKATVTRFLNDRERYGNRPACRRVGDVDIPLENIRHDTENKVRVIGLGIVSLHKPLDKIPPFEREGICLSRKPSGRYCLNVPCDPSYTRKPLGALSRHAVSIDPGYRAFLTAYSPTQKQCWRVGTPQQQRDLLKSKIDKYWAAKRQRVRALKLEHFQEADDRLRQMNRLEWELKLKLRHEHNNITSQLVREYGLIVLGKIDTRDVAKQNLLEEQKFNVKILDHEAFKRRLQDRARQTGCIVVVQSERYTSVTCGYCNVKQDLEASTVFHCEKCGYRVDRDINGARNIMRAFLGEIEQGKQST

SEQ ID NO: 2389 - protein, 227 aa, Phycomyces blakesleeanus
RRYTGSDRRGCHLEKPNIRARITKIETNFLSVKTVDFEKWKNYIVYASNHASSLFGLYNERSASFRFHNYQGRQRSYKEMTNILLNGGENYNKSKRLKTKKKIERKTKTKHQIQNNDKSITSLGKKPVRCKKFKFKSFRCVPLVVFSDRMKNRGIVRIKDHVSGTTAMLEIELKIRSRTFQAAVVGIDEFRTSRVCNFCKEMSLKATKLPSDKCTQSILDCKNCRIL

SEQ ID NO: 2390 - protein, 233 aa, Rhagoletis zephyria
AKVCDFVRIRLLIKIRATKYENKIGLDPGCRLILAGIQNNVPVKIKNSYYQHLSGFYSRKIKLNKYTKDFTTNSELSANSSNFKEYCKFELEILEQKQKIASQRKVARLKLKKYICRQKACNQIAQQLVPNKEEKTLICTGSTEIASNSPMRGYRRVPNRLLIAALSQRTADILMVNEFRTTKLCAKCYNVNLTSKSPHRYQFCPNCRTCWNHDVNAGKNILYLGECIINQEQ

SEQ ID NO: 2391 - protein, 298 aa, Rhagoletis zephyria
IRFVRITSKFRSHFIINQVYCQYYIKIPSSLYHKLGFSGLHQNSVVIILLYYCEGNLIKIRATKYDNKIGLDPGCRLIFAGIQKNVPVKSKNSYYQHLSGFYCREIKLHKYTKDFTIQSELSANSSNFREYCKFQLEILEQKQKNFSQREVARLKLKKYICRQKAFNQIAQQLIPNKEEKTLICIGSTEIASNSPMRGYRRTPNRLLITALKQRHADILMVNEFRTTKLCAKCYNVNLTSKSPHRYQFCQKCRTCWNRDVNVGKNILYLGECIINQEQKHENFHKDVIIPFMTKNLYI

SEQ ID NO: 2392 - protein, 218 aa, Rhagoletis zephyria
NGRGLRRFLRGALKLTCSRSVGQSITPFIKLKNLYYQHLSGFHSHKINLHKYTKDFTMQSELSANSSNFREYCKFELEILEQKQKIFSQRMVARLKLKKYICRQKACNQIAQQLVPNKEEKTLICIGSTEIAANSPIRGYRRTPNRLLIAALKQRQADILMVNEFWTTKLCAKCYNVNLTSKSPHRYQFCQKCCTCWNRDFNAGKNILYLGECIINQE

SEQ ID NO: 2393 - protein, 211 aa, Rhagoletis zephyria
NLGVGSFWLVSGTMFLSKLKVHTTKIFLVFFYRKNKLQKYTKDFTTKTELSANSSKFKEYCKFELEILQQKQPIFSQRKEARLKLKKYICRQKACNQIAQQLVPNTKESTLICIGSTEIASNSPVRRYRRTPNRLLLTALKQRHADILMVNEFRTTKLCATCFSVNLTAKSPHRYQFCPKCGSCWNRDVNAGKNILYLGECIFDQHENLKK

SEQ ID NO: 2394 - protein, 203 aa, Rhizopus microsporus
PLFREFFCACCVSLFVSKSIFLLLEMLNIMEDEEKRRRGIRKIRKLPQMLQTTCQQSKQLFFFGWLNKWKLLSYIENNRKVSLIVFENRMFEKDLVKIKGARCGVIGKLWKDVKKREKEDGLITITVDELNTSKACNNCEKIILEPAKRTRGNSILVCKTCNTLWQRDMNAAKNMMTISLSTWRGDGRPIVFQRSNENSNRAT

SEQ ID NO: 2395 - protein, 238 aa, Rhizopus microsporus
RHQISQSLQKPAKKDSVCMMILQVTIMKMPGKCKVWFFTCLFKQAKFCRSSKLKFQCYIRKQKGVHEICKGLMYGSVKYNKKSSTGVKTSSAENESKYCPPAPLDHPDKPRKTIIAFGDGMFNNSLRGNRGAPVRLIKKALQKYCGNQFEIRMVDEYLTSQICNRCKNRNMDNVVTEKPKRRVHMILKCKQNTCNIVWNRGIMAAYNILDMFLFAIRNNSQRLDVFMRQGTFNDQSSV

SEQ ID NO: 2396 - protein, 218 aa, Rhizopus microsporus
RIPTENKNKLLSIADKILERCHSSQGPSDEELEDKLDKFKKDTKSLLQTLQLLPLRKMRFSSKLLPQQNDDKLIKSLKKKSGHDAVLVLGDWFAANVKFHEPIRNKGLIQMLKKSGFDLYLINEYKTSSLCPDCERKLEKFKIVDSSGPYRRKDVSKVKCNGLLRCKDHSPNKLWNRDLAAVCNFRKILMSLRETGERASCFRQSQPFTKPSHKRKQG

SEQ ID NO: 2397 - protein, 199 aa, Rhizopus microsporus
LRNFYNSKKRVKLKRTCEIQNDHFRRRLYAKERTFLIGKKGKEHSNIRLMNTNYYINYLVKGRSRPCPIMFIRDRGMGVGSTIKGYRRYDGKWKQCMHGMNINVCITNENMTSQTCMYCFSKLDHSIHRKVIKGKEIKTKAKGAFLRRNLDCVLVTKKLPNLEITCLPLPLVFLAFAHCSFRKHFLNYLLKSATVALNL

SEQ ID NO: 2398 - protein, 309 aa, Contarinia nasturtii
VNLETNAKRFHWNTGHKTRNAKAKRWTNRFVVVERNDRNDRRLYPTMPSPLGIHWVHYTHHRLKMMKKGMDVYATTKYTRLRFEKYIRTVRASDEKAGELVNYKPSIIFFGAADTPPNSPIRIKRHMRCPGSRKLCASFKKRGNCVIVFVDEKFTSQTCARCIGRFDPRTKSHRFKVCQNCRPRFEAMLPSMVVAKKGRRQLRLDRLQIFLLQLEAIENATEPDQQKADSLLSKVLIHTYEWLINPVNGEMENVVAEQSNELYQESGWYQQPSVRKTVWDRNIVAAKCILIKGTYEFKLYHETTYFFAY

SEQ ID NO: 2399 - protein, 248 aa, Contarinia nasturtii
FQVNMKTSSKNNHWLTKYKMRDKKAKRWTKQFTLNEQNDRNNRQLYRRMPSLWTDYLHHRIKMLTKGMYVYTTPKYARLKFDKYVESNRTIDKLCDTLVNHQAALTHLGNANMSPNSSIRIKKHVRCPGTRKLLKGFRKRGNCVVHKVDEYFTSQTCAKCGGRFDPSTRSNRFKVCKNCAPVPNSIMANFLSSKIVAQLSKRRLKNNKVYIGESLTLFLARGGMTEHDFDIIADRLLSKVAVYPKNGK

SEQ ID NO: 2400 - protein, 203 aa, Contarinia nasturtii
VNLETNAKRFHWNTGHTTRNAKAKRWTNRFVVVERNDRNDRRLYPTMPSSLGIHWVYYTHHRLKMMKKGMDVYATTKYTRLRFEKYIRTVRASDEKAGELVNYKPSIIFFGAADTPPNSPIRIKRHMRCPGSRKLCASFKKRGNCVIVFVDKNFTSQTCARCIGRFDQRTKSHRFKVCQNCRPRFEAMLPSKYCSALLPSTAY

SEQ ID NO: 2401 - protein, 309 aa, Contarinia nasturtii
VNLETNAKRFHWNTGHKTRNAKAKRWTNRFVVVERNDRNDRRLYPTMPSPLGIHWVHYTHHRLKMMKKGMDVYATTKYTRLRFEKYIRTVRASDEKAGELVNYKPSIIFFGAADTPPNSPIRIKRHMRCPGSRKLCASFKKHGNCVIVFVDEKFTSQTCARCIGRFDPRTKSHRFKVCQNCRPRFEAMLPSMVVAKKGRRQLRLDRLQNFLLQLEAIENATEPDQQKADSLLSKVLIHTYEWLINPVNGEMENVVAEQSNELYQESGWYQQPRVRKTVWDRDIVAAKCILIKGTYEFKLYHETTYFFAY

SEQ ID NO: 2402 - protein, 236 aa, Contarinia nasturtii
ICTTRVNDQIAVCVTNNKPSLVQFGAWAMKPDRPFGIKKRKRCPGSRKFRVSIKKLGHSEVEMQDEWGTSQTCANCQERFPRHTKDDRFKVCYDCRAKKIDGLPDSVAGLPDIIMSTVNRRVLRRKRAIIKRQIIDGNREAVNEKLRTGRLMSKVKVTYKNWPLNVDDDDVVPQTVTWHRDIVAAKCIMLKGMNQLETEYSLFNVFTLNYIGLCRIFDVPLPVSLLRPPDQNNNVN

SEQ ID NO: 2403 - protein, 204 aa, Contarinia nasturtii
RGLPANSPIGKKKTKRCPGTRRLENSVKKLHHSDVVRVDEAYTSQHCASCMVKFPKETKKFRFKACKNCPRNAPIPAEIAKYMSLSPLIVSKKGSRRKTLDRCVKKLIDRGLVNQANLPKESKPERLASPKMYYWKNWPLNSVNALQMGDDAANTNDHHQQHQQQQPEQEHKYRELRFTIVWHRDIVAARCIMYKGTTFCSYLF

SEQ ID NO: 2404 - protein, 227 aa, Contarinia nasturtii
SLHEVTSLKSNQVDDNIALTVTNNMPSIIIFGASEMPPNRPFGLKRRKRCPGSRKLLVSVKKLGHSVVKMEDEWGTSQTCANCQERFPANTKPLRFKVCYGCKAKPIAGLPDSVASLPNIIVATVSKRALDKGRKEIKLRIRNGNHQDVARILRNGRLMSKVNVTYKNWPLNVQGDVAASQTVVWHRDIVAAKCIMLKGMNQLKIESIHYLMFLLLITQDFVGCLAY

SEQ ID NO: 2405 - protein, 239 aa, Contarinia nasturtii
RYARLSLDKYIDSQHETDWLAKSLTKNKPSLFTIGDADLPANSPIGKKKTKRCPGTRRLENSVKKLHHSDVVRVDEAYTSQHCASCMVKFPKETKKFRFKACKNCPRNAPIPLEIAKYMSLPPLIVSKKGSRRKTLDRCVKKLIDRGLVNQANLPKESKPERLASPKMYYWKNWPLNSVNALQMGHDAANTNDHHQQQQQKPEQEHKYRELRFTIVWHRDIVAARCIMYKGTIFCINLF

SEQ ID NO: 2406 - protein, 264 aa, Contarinia nasturtii
YFSNINCSVRFSGHLYVESNRTVDKLTGNLVNHKAAIIHMGNAEISPNSCIRIKKHVRAPGTRKLLKGFRKRRNCRVRKTDEWGTSQHCAKCGRRFNPATRSHRFKVCENCGAEPDSIFAEYLPSKIVAQRSKRQLRYNKDDVELNLMRFWAEGLMTEQEFDIAAERLLSKVAVYPKNWQVNTVSGKLEYAQVNADAPYATVQQPYAVDDENELEIEDKQLLMAVHKTSWDRDIVAAKCILIKGMCIRNLHLHIFYILNEMHTI

SEQ ID NO: 2407 - protein, 223 aa, Contarinia nasturtii
RIIGWNEKMWLAITHRNILKTPENNTKHAILLGNLAETKRKEAKNLAGRFDIEEKNHLKSYPFSPPRNSTWQWYIEYRIKMLRKGMSAYATRKYSRIDFDHYIKSNNVNDKIAVTVTSNMPSMIIFAPNRPFGLKRWKRCPGLRKFLVSVKKLGHSVVKMEDEWGTSQTCANCQESFPVNTKSHRFKVCYGCKAKPIAGLPDSVASLRDMIVATVSKRALLNR

SEQ ID NO: 2408 - protein, 312 aa, Contarinia nasturtii
FYQFIFWKIYKNRYIRNHERERKAALRRGERTELREYRNFTVVPTSSFERHYIRIDRRVFYRMLRQIECPHRLFRNKNGGPKQEKDIKSKEWDVLWRLYFDIDSIEREPRNKNDGHATIKFDNSIQTDGVGMSFLMERTKFIIEKDDEERMKETQEMLLKSQQVYGLDPGLRLVIGGVRINNFNDRNNRTETIIRLTSGQYQDMINSSRRNKWRKKLTIEIDKKMRLHRESFDEQPGPRAEDHKSYADHILRHFEEKFTAYKQYEYALQAFLQYIDTNRALDAYATKLIDGKQTFIFEWVRIKVSSNFHIKK

SEQ ID NO: 2409 - protein, 311 aa, Contarinia nasturtii
GFVSTIGSMETDSRRIRMTATFTKMEQSDREENYLVIPSPRGNGWIYYLDHRLKMMQDGLTAYARRGYARLSLDKYIDSQHETDWLAKSLTKNKPSLFTIGDADLPANSPIGKKKTKRCPGTRRLENSVQKLHHSDVVRVDEAYTSQHCASCMVKFPKETKKFRFKACKNCPRNASIPPEIAKYMSLPPLIVSKKGSRRKTLDRCVKKLIDRGLVNQANLPKESKPERLASPKMYYWKNWPLNSVNALQMGDDAANTNDHQQQQQQQPEQEHKYRELRFTIVWHRDSGYKHLPINSRKIIHAPKIREDSVF

SEQ ID NO: 2410 - protein, 265 aa, Contarinia nasturtii
QENNKISNPRFHWRTEQKKRDRKADRLSCWYVEEEQLDLRSYPFIIYARLELDHHIKATKTSDKVAMRITNNKPSWIWIGAGEMAPNRPWGIKKRKRCPGTRKLAISFKKQEHTKVSFQDEWGTSITCANCHERFARETKNHRFKICRNCIPKPIVGLPPIIVTNLSRQELKKERIVERAINPDRENIERLVPKIKVIFKTWSLTREYHELGDAAPEDMIEHVVIWHRDIVAAKNISFKGMCIIVYCINIKLRIESRALGVQCSY

SEQ ID NO: 2411 - protein, 229 aa, Contarinia nasturtii
VVFYLFYIKLYHICSIGNFFYNETINIFFFLLIPTYKENIKVSSQRYHWEAKYPKRNKKMKLFRREFTEFEQNDLKAHPVMPSPRGSQWLPYIRHRLRMLKRGMETYDSRKYARFRFDKYVEKNRAMDNFVNRLTKNKACLFYMGAVEISPNLPIKIKKHVRCPGTRKFVKSVKKKRNCVVRYVGEDYTSQTCPRCGNRYPQHTRSDRFKTCHNCVPEPAFQLPIIIVT

SEQ ID NO: 2412 - protein, 263 aa, Contarinia nasturtii
PWKSYIEYRIKMLRKGMAAYATREYARLDLDHHIRSTRVNDQIAVRVTNNKPSLIQFGAWAMKPDRPFGIKKRKRCPGSRKFCVSIKKLGHSEVEMQDEWGTSQTCANCQERFPRHTKDDRFKVCYDCRAKKIDGLPDSVAGLPDIIVSTVNRRVLRRKRTIIKRQIIDGNREAVNEKLRTGRLMSKVKVTYKNCPLNVDDDDVVPQTVTWHRDIVAATCIMLKGMNQLQTEYSLFNVFALNYIGLCRIFDVPLPVSLLRPPE

SEQ ID NO: 2413 - protein, 234 aa, Contarinia nasturtii
IFKENITIPNTRFYWETRQKRREKETKKLAGWFDIEEKDHLKTYPFGPPSPRNSTWQWYIEYRIKMLRKGMSAYATRKYSRLDFDHYMKSNQVNDNIVVTVTNNLPSMIIFGASETPPNRPFGLKRRKRCPASRKFLVSVKKLGHSVVKMEDEWGTSQTYANCQERFPANTKPHRFKVCYGCKAKPIAGLPDSVASLPDIIVATVSKRALQKGRKETKRRVCNGNYQNMGEINY

SEQ ID NO: 2414 - protein, 323 aa, Contarinia nasturtii
FFVSFCILKENIIIPNQRFHWETQQKKRDKEAKKLAGWFDIEEKEHLKTYPYRPPSPRNSTWKSYIEYRIKMLRKGMAAYATREYARLDLDHQIRSTRVNDQIAVRVTNNKPSLVQFGAWAMKPDRPFGIKKRKRCPGSRKFCVSIKKLGHSEVEMQDEWGTSQTCANCQERFPRHTKYDRFKVCYDCRAKKIDGLPDSVAGLPDIIVSTVNRRVLRRKRAIIKRQIIDGNREAVNEKLRTGRLMSKVKVTYKNWPLNVDDDDVVPQTVTWHRDIVAAKCLMPKGMNQLETEYSLFNVFALNYIGLCRIFDVPLPVSLLRPPD

SEQ ID NO: 2415 - protein, 270 aa, Contarinia nasturtii
KDWLAKKITKNEPSLINIGAVDMAPNSPIGIKKGKRCPGTRHLQCSVKKLGHSDVHKVNEDFTSQHCANCQKKFPIQTQKYRFKVCHCTRDAPLPQEIEPYISLPRLIVTKKSQRRKKKDSCVKKLIAKGIMDPANQPAEFQPGRLESKKMYFLKNWLLNPVNAIQMGGDADKYPEQQQQQQHQKRFCTVWHRDIVADRCIMYKGKHCNLFGIFSNNLNCLLLITGLCYIFNLKCTTRMSEHQHLQDHHHCVEDNQHAEEPMQTLFHIND

SEQ ID NO: 2416 - protein, 273 aa, Contarinia nasturtii
SSLPLDRASDKIAASLTKKKSALVFIGAAQIAPNSPIGIKKRLRCPGLRRLLNSFKKLGNCIVRLVDEYNTSQTCAKCFRPFDRRTKSDRYKVCQHCIPSEDESSQWNLPNVIITMKSNRVYQQLRKYAVDFVNRLNAANPDHIPMDSDGLVSKLQVCFKNWQLNTGIWKDDRAPFQLKTVWHRDIVAAKNIMYKGEKISLKLKMFKNVLANNLLFTILFLGLCTVLGLEIHPQLLRPQNQNAAVQNQAADDEDSSDDEDYVYVLDVSDDDQF

SEQ ID NO: 2417 - protein, 287 aa, Contarinia nasturtii
KANKCMVSILDYGGVRINNFNDRNNRTETIIRLTSGQYQDMMNSSRRNKWRKKLTIEIDEKMRLHRESFDEQPGPRAEDHKSYADHILHHFEEKFTAYTQYEYALQAFLQYIDTNRALDAYATKLIDGKQTFIFVGDLFIAADSPARGYIRSKVRDLFEKLKRRRKCTVVEVDEFRTTKLCSLCFRELEKPTKRGKVKEKYRYLTCHGCEPLCGENVLGKAQGPIESRKSNRKLTQQRKHRPRTDGPRMASKFRKYEEKTRIGRTITWNRDANAGRNILYKGLCLLN

SEQ ID NO: 2418 - protein, 240 aa, Contarinia nasturtii
ICHLIMNESDCEYNVVFVVLILLGEFAYIQQAISLDKHIESVRAIEKTACKMLLNQPSIFYMGASGSTPANSPIKIKKHVRCPGTRKLLAAIIKRGNCIIRMVDEYMTSPHCLLCFKRFPQATRRDRYRTCVGCVPNPVVGLPTLIVTNVSKRLLQMRRTIERMWREIRDMGDVIAATLRDGSNAGRLVSKKQRFFKARHRDIAAAKLILYNGMESIEIDTNCESIVIHVKCFCYISFGR

SEQ ID NO: 2419 - protein, 214 aa, Rhagoletis pomonella
NRFNKTKYKNKIGLDPGCRLILAGVRNNVPVKIKNSYYQHLSGFYSRKIKLHKYTKDLTIQSELSANSSNFREYCKFQLDIVQQKQQIFSQRKVARLKLKKYICRQKACNLICIGPTEIAAIWPTRGYRRTPNRLEIAALKQRHAGILMVNDFRTTKLCAKCCNINLTTKSLHRCQFCPKCGTCWNRDVNAGKNILYLGECIINQREKHLNFSK

SEQ ID NO: 2420 - protein, 218 aa, Rhagoletis pomonella
ILGVGLFWLVSGTMFLSKLKIHTTKIFLVFFSRKNKLQKYTNDFTTKTELSANSSIFKEYCKFQLEILEQKLQIFSKRKMAQLKLKKYICREKACNHISKQLVPNTKESTFKCIGSTEIASNSSIRGYRRTPNRLLLTALKQRHADILMVNEFRTTKLCATCFSVNLTATGTNLAQNVVAAGFETSMLGKTFSTWENVSSINTKNTKILKNKMSLFLL

SEQ ID NO: 2421 - protein, 199 aa, Rhagoletis pomonella
LASRTMFYSRKIKLHKYTKDLPIQSELSANSSNFREYCKFQLEILEQKHKNFSQRKVARLKLKKYICRQKAFNQIAQQLVPNKEEKTLICIGSTEIASNSPMRGYRRTPNRLLITALKQRHTDILMVNEFRTTKLCAKCYNVNLTSKSPHRYQFCQKCRTCWNRDVNAGKNILYLGECIINQEQKQKRIFTKKMSLFHL

SEQ ID NO: 2422 - protein, 404 aa, Rhagoletis pomonella
YFKFEKDKKKVYDTLSYLFDKNCKNNADEELLQRMRVELHWNGNKLHEIGNVKLFWSSIELFFNLQRYNEKNEIKNCSLIPQLKHGLHHVRYDRFEFHQLLCRLKLFKGPFSSFDKSEFGKYFKIPSTYTKTFSSLQTDGVSISFCMEKQIKVQNETKLVKKRKLKPNETDCTGDLIKIRGTKYDNKIGLDPGCRLILAGVRNNVPVKIKNSYYQHLSGVYSRKIKLEKYTKDFTTKSELSANSSNFKEYCKFELEILEQKQQIFSQRKVARLKLKKYICRQKACNQIAQQLLPNKEEKTLICIGSTEIAANSPIRGYRRTPNRLLIAALKQRQADILMVNEFRTTKLCAKCYNVNLTSKSPHRYQFCPNCRTCWNRDVNAGKNILYLGECIINQEQKHDNFHK

SEQ ID NO: 2423 - protein, 269 aa, Rhagoletis pomonella
IFSNTVWRCSAGKLKIEPVITKSFSSLVTDGVSVSFCMEKKIQNDQTKGKNRKLKPNETDCEGDLIKIRGTKYDNMIGLDAGCRLILAGIQNNVPVKIKNSYYQHLCGFYSRKIKLHKYTKVFTTKIELSANSSKFEEYCKFEHEILEQKQRIFWQRKVARLKLKKYICRQKACNQIAQQLVPNKEEKTLICIGSTEIAANSPIRGHGRTPNRLLIATLKQRHAYILMVNEFRTIKLCAKFYNVNLTAKSPHRYQFCQKCGHRRSKNEI

SEQ ID NO: 2424 - protein, 254 aa, Bradysia coprophila
LIPTSGTENYKTKRLGLCRHLGSLGSLGWLRQREAENKITPQQKKMLHRREGFNKADYRHRMELSKKSWNYLDYIKFELKHLINVQNMMVNPVLAHYKLKRSIFIRKTAVDVAKQLAETGQVVPSRPVLYKQEHKSKSPEQRQANKGKFETAKQTTLIIIGNFKMRPDSPMKCHPRSAVDQSHRELRRRCVLLVQNEHNTTKACYLCRNKLEIAKPPERFAQCRCNGKRNVTDTLFMISSFYSILTQLAFPLPM

SEQ ID NO: 2425 - protein, 234 aa, Bradysia coprophila
FTTLLCLLCRKSSPWGHDPRTCESVSISLHESIRQRFVPELLPGITLTAARRIDHFSFPSYTTNTYESLAFVLSGAEFSPNSPIKGHVRCPSIRTLPRAVARYKNTDCIYVDEFHTSQRCGLCLTKFPKSTKFFRFKKCGHCGDTPELELQRVPTIITRESKRNRQHHRQQTRTQAQRSRRFLYDGSTEIKNTTWHRDICACSCIRYKGIFQLGNLIFQHDPNFHIYRIISFVR

SEQ ID NO: 2426 - protein, 215 aa, Bradysia coprophila
PSWKPLILSMALIMGTNSTSTSPPTVFSVSVSMKRRKRLSTMCDDKFLQNVRNDLHNGEFDHIVALDPGARLSFAGIRRDCTTNQETTIRYSSSSYRYDSGQYNLNAKYRAITNPVLKKVEALRNNQPHKASSMANADTFVQFNLSIFKELNEVMLSKSLAKLGFRRYVCRQKAISKLAQQLAFGTEKCNEIRNLRAERKKARRKKRDIGSDCHP

SEQ ID NO: 2427 - protein, 251 aa, Mercenaria mercenaria
DRQDSERKVRLTYTMRSNLHEEQTVRRTIRFYVWHRSWRKNVLDNNKRTKKKGEKWHRKKKSQRRVGSTIDKIDGLHAKIDYVNSKMQAAIRRKQPQAKEDRQRQLQKVYYQLGNVIRWVHLRCTSNLMQYSYVAIGEIGIPSIIRRQCNGKRRRINKKSVRHLTVWNHCKFRERLVYRAKGTKTNVIVQDESYTSKTCSECGTINDKLGGSETFKCINPSCDYITNRDVNGAKNILRKSLGIGSIKTYRA

SEQ ID NO: 2428 - protein, 232 aa, Aphidius gifuensis
FEITYLHTVTFVASIFCFFFLLPILKKFHFKNKKELIKKNNSLECFVLNKPENYLLAAKYRLQYYKVSKLVFTSRRYARLQFDKYIKTNSAVSKEVNYLVNGNYSEKKTDQLSLKTLICSGQFKMSSGLKGYVLSQSSLLQHKLMNHPKVIFISVDEFRTTILCTNCNKLCSTSKSPHRYQHCSNCNIIYNRDINAASTILKLAIEKNSNGKIQLLKIMSNFSRSTKLVESI

SEQ ID NO: 2429 - protein, 934 aa, Aphidius gifuensis
IIIIIIFELIFSTTSVEWLEKNQDWLEKDETAVKDIIKLDPGYVEQIQREKQELQLQQQQQQQIQQQQQQQQQQQQQQLENNINIPPPPPPPPPSSVSSKKSRSTVKSKTTTKAKSTAYSRCSSVKTSTTTSSKRQESAGDKKFKGIPNLRDQTIQMSLKKLLGISGNNTNKKKTKVYDHIIDSVRKISEWCVACSFFLEFCINHKNGWLLQNIIKNNPRKSITAVFNILREDPKKIKYDEELVKLYKEYLKLRPETINPNTQKIPRKFDTSGISKIVDDVQKTYVTIFETNIKTHGYKRMCKYVFKQIKLQEEEKKENEEEEEEEEEEKTKYYYHNKSRNIMKNLITNNIHPDMPLFKKFKNLNFKEFNNGNKWHFFLPFFLELQKISPDFRVVPIYKFGWKHIRISTSILRQMKQKIDKKTEEEVKKIDDEQLWNDMMNINPTTQLGKKFYLTATTNGVEISLFLKVKKTTATTSVEKVENEIDSDIITDPDKMKKITIISRHTPADIKKIEFTNFVSIDPGERTPITAIFFNDYKDLGNKDKERRYCQKNSTLFYKSGFYKNEKKQKKITSTADKRIQNIVKKKEFENLNLKNPDDYIRNLEFRLLCYYDYQHIYGQLSIVTLNWTKKIQRRRVLDQQANFLAYGYYTKKSLKKPIKTDEMKKTKNQKLHGNKGKKQNAKGGNGGNGGNGGGNGEKTKNETSEENEKKKQKAENEKTKSELKKAAKLKKQQEKAAEHKKKLNDDQKSRRKKNRDREQKKKKEKKKSRKEMIEKKKLDFEKRQKEYQEMKKQKRSLYLERKKKNNNNDNNNNDNKKKNIKWTVIFIGQSKIMPNIKGYRKPPLMKLEKRLLLMENVVVIRVDEYNTTQNCSLCCKKAVVGKYGHRYTYCTHCHVTWHRDINAARNIARIGLAYSGINKNDSPDNYPTFERKG

SEQ ID NO: 2430 - protein, 1012 aa, Aphidius gifuensis
VSQLHKKEQTSCQLIRKILHFIICLSYYFYNNHFYLKKKKNFSAAVGSGGKRQRTGNNTNTTSTTSTTTTTTTARRSLFKVPERPSLNDSSSNMSLNNSTASNSSRSRSQSPSLSTVSASSRTSSQASICCNNYGTDHTNRSSKRCLNHRLPIKERAMKKLNQNKEKPTNYETHTIKMGFKSICPDENIRQEIYNDVELMSECIIDFSIFFEFTIRHDKQWMVQYLENHDKEPNLCLIAMHLKNNYSKKNKGIVELLDEYNTLYPCSNKHQYQFEHHSALIKNQVNLFQVNFKTNIVEHIRSRVNKYYCKVYNRDYSKINKLLDDLFLRNIHPKNDELFNNEQFKNLDFKKLYDTGDKWWKFISFHLKLQLHVDFVLSPINKLGLHSISFTTEAVHQLFRRKKFINNEKTLVNASYSIATNGPDDNYNEYEYENLWKKFIQIPPKYKFAYYITTDGISASIQCFKKINEKKLIFNIEEKNYQDIVNLKISDVERELLIKELNKLYKRFDGLDPGLRELFGGIIIQDFKDFFDKDKQERFKIKSNTYHRISHFYEREEKRKKWTQIYEETYKSLLKENNDLLKKDDPDKIFKLNDIKNYIAITKYRLGLFVQGQIILKARKIARLKWDKYINTQKTNDMIVNKLLFGEFVGDKQKLTIENNKKKKLDNKKLKRQRNQIKFKKKYDEKKLKRKKKLEEKIKLKTPEQQQQQQHNNNNNKLNGKKKRSILRDKNNTNIEFHDAALRQAMKDEEAERIKKKIEKLKARRKKKLDKRPKRIKKNKKKADNTTTDAAAAIADVIAGAIADAAAVDDAVVDNIPDENGGGGDNDNVKIKKKKKKSIKIITDKFNNNKRILIALGDTKISKWMKGYRRVSFKGIIRALYCRARLSKSKIDIVDTDEFNTTKLCSACNSVCLKSKSPDRLVIYLFINFILINLFIYLFCFLRYLLCQKQDCKVTWNRDINGGRNILILALIRRGLIPANIIPHFSNFKKGARTLGPSGVPRSSASSRWSWT

SEQ ID NO: 2431 - protein, 775 aa, Aphidius gifuensis
IFQRNFVSAETFGKIRNLSTVSFRFRFASVEVNFVSFCFEKPKRNENEIISVSGPALDDVDELSKMFIEFSYFFYFCLQHKDNQLIDEISKLNNKQLCLNKYLSVLTVLENRKKKKKEKSCIDDLFEEYMKLRESAGVEIPLYNVSYRSQVMQLNLRQFSTNFVTNITRNARPRVGKYLKMEKKIYNRKKRKRILDDLFYRNIKPKEPNDDTKIMELFDNDLDFTKIKFKWFLFLNFFKQLSNVEGMNFPLSPIMKPGLKHILYDTQSLWQMGRKLFPDQFESVWSQQMSIPYAYQKIWSFFFKIKKKYKKKHFNSTITTNGITVTLHLQRQIVKKKITKKKLKTTNKVGGNTSIDGKSKVNDDDNDEDADDFDDLNLFNYNDFDDDDDDDDDDGHNNKKNNIHNVNDQIYGRKGGLDAGKKLSYAAVFVDKLEDIGVKGKVQHYRLPSKVLLAKCGHYTRKNIRKNLTKDIEIKIRKIYDKYLKIKEDIYAEFIKGKKIQVTEYVEKKKSKKEKNKLKQMTEPMITDDDDKERNYKKWKEQNKLAKSGGDDDEKSKIIIKEPNIAPTVSTKKTMVEKKCPLELFVLNKSENYELTTKYRLEKFGLSQKFYASRRYVRLHDFDKYIRTHRATAREVNFLERGTYCGKKINALKDGKRTFLGAGQFIMSNATRGYTSSPLSLLKKKIDNNSMIDVVYVDEFRTTLLCNQCNNLCITSTSPHRYQYCRFCKITYNRDINASANMLNKAISNTDDSKNYLIKQPNNFKRSTKREDILQ

SEQ ID NO: 2432 - protein, 1440 aa, Aphidius gifuensis
LIINNCCCYFTKMSKSTGIKNSDNTCYFNSVIQGLFSLNTLHEKLKVCNTLNDNKLLCYIKNIFDALSKQDKKYIIIDKKYLKQILPKNFIIGQQHDSGELLTIWLEKISLISKCWLDEIFLVKTIIEKKCEKCQNYICDTLNNECQILYLNINQQEQHKSAATLQNLIDENFKEQQLRNSTLQCLNCNKKTNVKKIEKIVSTPLVLAIVISNSYFDQIGKTSKKNNINIKFDETLKLQKNQNFQVVDESFKLCSVVVHAGKQTNCGHYYTYARNKTTNLWQKYNDDIVTNVTFDELQNLNFPITPTVIFYEKSNINNDNELKSKTRCSIFDTYDSLKENKKSLPLTIPITPPSSPPSSSSSKQSSTVILQNLVEDMHIDEKAYKRFNDTPIAIIEDATVVKKKRSDSTTPSQQQQQQQQQQQQQQQQAQQQAAVAAAQQQQQEQQQQQQQQQQQQQQQQQQQQQQKQQQQQQQQKQVGKKKIKCGACGEIGHMRTNKNCPVNISKKKENLQQQKNKILLDNNCDDSNDSIQSTTNALENMPTRFMSTDESSNDEGNVSTSIESSQGAKKTLFRKPYTPKPLAKKSKIMMMNNDVKKPNRSRPRCRDLSPISRDSSTSRDSSTTSRDSSESIDSSISRDSSTSRDSTISKNSSIKRCPACQLEDHLTPKSKKCPNNIPSFKDRIFSPSIEWELFTRKQGIKSLIKDEKVFNAIIDDVNEMSKYVIDFSMFFEYCIRSSDQFMNEIINSSKEPDFSLFAMYLKDGYSGENQLLLNLHEEYCLLYPCIDNHKYDGHLRSAIIKQTIRSWTTSFHNNIFMHMKDRFRKYFIQHKKYSKQKTHKILSDLFDLDIRTNDDIFDFCDANLSFKNLHEHGTQWWKFLKLNLELQKKIDFVLSPICELGLKHILYTTDGVHQLLRRVYANDKKIKISSNFKEATSGPDLMEFKNLWKHFIKIPDRYKDKFSYSLTTNGIDVSLHLQRPKKDHSYFEKQIKHDIDEYDRIAGLDIGFKQIFGGVIMESHEDYLDKDKQQRFTILSRTYHHLTHYFEREEKRKIMTKKYEEMYENLLNEMSEYKKLRLNDPLDYIRVTIYRLELFELGQPIIGRRKVARLKFDKYINQQSTIHQICQYITTGSYTTLAKQQRIDKKKQLRQENKKKKKKRYNEKFKDKVSKKWLKNKSKKASTPLNQQQQQQQQQQQQQQQQQQQQQQQQQQQRQARLRKRGKKSTKKKKIKKLKFKESKLVKNSEKIAELLVNVMSKKNHNLNQNQLFNIAKKIVDMSIAASLFDEKAANEAKAIKRKLLLKKLKQKKRLERNGKAFEKIMNKQNNQFKIKNKIDNNNSFQNLNILEKKKKTRKKKKTIKITKSDSSNRRTLIVLGDTGISSKTRGYRQVPLRKIESYLIRLSNEPNSKIDVITTDEYKTTVLCCLCNERCTISKSPHR

SEQ ID NO: 2433 - protein, 243 aa, Aphidius gifuensis
EQGKEKEQEQEKEQEQKKEQEKKQEKEKSNDNPNLNNKLKNKIFVRKKNSLELFVINKSDNYILATKYRLEMFKVSIPIYTSRRYVRLNDFDKYIRTNRAVDQQVNFILNRTYSGKKCNTSNDGRKTLFAAGQFIMNGCTKGYTSSPLSLLKKKLDNHPMIVVINTDEFRTTMLCSVCSGILITSKSPHRYQYCPNCKITFNRDINGAKNLLQKTIVKLDPKRKHLIRNIDNFSRSTLREKIK

SEQ ID NO: 2434 - protein, 302 aa, Aphidius gifuensis
SYEAMQPVYGDLKLTKIRWNQKIQNRRALDRLVNFITTGQGPKSRLKKPIEVDKKKEKNKKKNNNNNNKNNTKVDKGNKSKNQLNKEKKLDRQREKAKENRDKLTERQKKRRAKNREKELIKKKSKKIERNKLNDEKKLIFEKKQKKYQNNKAKKRALYERSQNPNNNNNNNDDADDDSDDGGDDDNNDGLMIIFIGQTDMAPLGFGYRKPPLKKIEKKILADENVVLIRVDEYMTTQNCSKCKQQAIVSTHKHRYTHCPKCNITWHRDINSACGIAKIGAAFSGLNENDSIDNYSTYVRKG

SEQ ID NO: 2435 - protein, 284 aa, Aphidius gifuensis
ENITREPEKEKRQIYDKYVKVFEDKYEKFLEKKGIEIEEYMEVRKKKVKIKSTKIIDDNYDKNQAPKVKNYQKWKSEQKEKKEKLQEKEQEQNKEKEQEKEKKKEQEKEQENGNEKSNDNPSSNNKLKNKIFVRKKNSLELFIINKSDNYILATKYRLEMFRVSIPIYTSRRYVRLNDFDKYIRTNRAVDQQVNFILYSTYSGKKCNTSNDGRKTLFAAGQFIMNGSTKGYTASPLSLLKKKIDNHPMIVVINIDEFRTTILCSVCSGILITSKSPHRYQYCPN

SEQ ID NO: 2436 - protein, 1515 aa, Aphidius gifuensis
FYEKSISPIKRINEINIHNNTVEAKKPKIISDIILNKKPTTYKINLINNDEEIGIPNFDNTCYINSIIHPLNNTEEFYNIIMNSNYKEFDTFKKIFHLLTDKSSLKSSFKELIWKLQPYDDEEKKTQQDSFECLLKLFDEYSKNENCKKIINDLFYSNTIELKECVNCKNNSHGGGDSFFINNLYIQTDSSDTTQVQKLKNNDSKRQKITRVQELINNDAENQEYCNNCKQNNSCKIKKTFKNSPPYLIFNLNHFVYDRQYGKLKLIDNVILKIDEEINVPVVGIDQTSITYQNYKIYAIIIHKGNTLNSGHYYTYCKNKNTNKWYCFNDDKVTPKEFKDIEIFHSKSVSNDKEKPYLLFYKKSNIPSTIIPHNPIVNDHIDNLSDKFMKCPATPKAHQSSLKIINSPSVKDIDNLSDKFSKFSPSPKPKNKSKNFIASSPIHQFNPKLINSPSAKDIDRLTNQLSKCSASPKINELKINTNKIYKRKRTKNQCKKCQKFSHASEISKKCAFNKNNLLKKSNKPIADTSTKIVKKINKINNNNNRQENSNKRRCKKCNKTSHTTVYSKKCDFNKDNKNNLREKINNMKNIKIKPTEITDKSNNKLSKPIEITNKLNKKIIPKCRDCKEKGHYTKFSKKCKNNKENLREKSNDEIKKKLKEKRENQKKNKKLKKSNNNNNNNNNLKIKENTKKTRRGKRKSNEPKTMSTYCVKMGLNSIIRDDNDNNIKKHKKNILKLPTENKKPIKVAKRKKNNDSKTNENVDNNNNNNNDNNNYNKNQLIKETILSDVEELSLLFTEFTYLFHYFLHHEKNQLIDELSKQKSETLILNKYIAYLTILENRKKRTKDESYLDDVFKEYQKIRDDANFTRPYYKVDFRSQLLQFNLRQMATNFVTALTRNARPRVGKYLKVVKKIYNKKSRKKILDNLFFRNIKPTEPNDKNKIMDIFDNDLDFRQCKKKWYLFLNFFKKLSNIDGLNFPLSPIMKPGLKHIMYDTQSLWQMGRKLFPDDFEGTYNNQTKVPNFYPKIWNYFFNIKKKFRKKNFNNTISTNGITVSIHLNRENKIKEIQQPKKKIIRKSKKIVDINKEKNNEYYQDKDDYDDFNIFTCNDFSEDENDDDDDDNCQENNNNLSKKTFKKFTSAHPGQKLAYASITVNSIDDIGDKNKEIRYCLPRTKLLANTGYYTRMYIRKNMTKEPEKEKREIYDRYVKDFEDKYEKFLKEKGIEIDEYKEVRKKKVKIKSTKIIDDNNDKNKDDENQPTKVKNYQKWKWEQKQKKEKEKLQEKEQEQEQDKEKEQEKKKSNDNPSSNNKLRNKIFVRKKNSLELFVINKSDNYILATKYRLEMFRVSIPIYTSRRYVRLNDFDKYIRTNRAVDQQVNFILYSTYSGKKCNTSNDGRKTLFAAGQFIMNGSTKGYVSSPLSLLKKKLDNHPMIVVIITDEFRTTMLCSVCSGILITSKSPHRYQYCPNCKITFNRDINGAKNILQKTIVKLDPKRKYLIKNIDNFSRSTLREKIK

SEQ ID NO: 2437 - protein, 1277 aa, Aphidius gifuensis
KYIYKMIKRVGLENLGSNCYLNSIIQVLHAIKDFRDDIINKNEHDSSIIKELGKLFQLLSTSFSFMSKSPENFITSLKQSSLTKDFGYTQQEDCSEFLIQLFALCNQYEDIKKIIEKFFVGKLKIFHKCTNCNETIINIEIFHELQLCFPLKKSNKNLTIQDMFNNCLKSETLENVKCDNCEVERDKTKTTEIIQTPLHLILLLKRSSIKNNIINKIHDYVELNESIKVKNENYEIHSVTVHNGEKIRSGHYYTYNKDISENKWYIYDDDKEVKDVTFNEIKNLKSPHTPYMVIYKKKDDNVNLPEKNKQVKRKNDDDYLINKKKFKPNKDIKRKIDNKKSDISCIVEKKQKNNNNNKLEISKTSIFHRNNITSDDDDDDDNVETNQSNNLTPIITNNTTNSLCNNINNINMNSLNNTSNLLCQNMKNAKILGSTDTLDIDIDDLPDDGKWSNNKLKGKCIDCYRIGHASKKNKLCEFSDYRQKITCTDCKKKGHKSKRSSWCLSYKKNKIDDNNTSKAINVTNSINNSNIIIEQINPSKTTSSIICKDCNETGHATRRSKICKDYKLTPLERKFGKDTKLEMYSVQMGLNNLCDNELIKNEIINTVKELSGLSIEKSIQFEYFLRHKDRWLLNKIITSNTLPRLEHIGKFLHKDYKPQSSNDDAIEIEKLTKEFRKLNCNKNEERRQYDCTGRSPLFDEEYKIFITNFSNNVKMHAESRVRKFILRELNKNEENDVKKERISWYKANRMAINLFCNGKIDEKLANHELFIKHKNLKFQSFYDKWWQFLEFFMDLQKYIKFKLVPIQSPGLKCQTITTTGAYTLLRKLFKDEGAQPDRTGALDGDKPKEMWDKLLPNLKNHERINEAFAYSISTNGIYVSIHCARPINESNVKKDIYKKSINIDDYDGVYSFDPGGVYPLAGIFVKNINDIGDETKEKKILLKATSWRYRTGQYHRKYKLHNLGYDKLEIYLQELMEMKQFKDIDVDDPSNYINITKFRLKWFDRAQIFFQRRKIAWLSWNAKINDRRELARYVNYIRYGQEKYHPNKKDLPKHNKTKYKYLKYGPKTEQQTIRINKKIENAKILKTKMAENRKIKTAARIERRDNILKKLKEKKNKNKAVSISPATNPVNEGKLKKQKKNKKSKKEKVNLPKNNGKVLVFIGRVEMPSGIKGHVQAPLCRITRELAKCPDIDIALVNEYNTTKLCYKCGEKCFVSISPDRYVYCKNCKTVLHRDINSSKSIMNLALADYGIKPTSFVKNYSSYRPNYNKVDNINNP

SEQ ID NO: 2438 - protein, 1276 aa, Aphidius gifuensis
KYIYKMIKRVGLENLGSNCYLNSIIQVLHAIKDFRDDIINKNEHNSSIIRQLSTLFESLSISLEPIAKSPEEFIKSLKNSTFTKNFKYTRQEDCSEFLIQLFALCNQYEDLKKIIEKFFVGKFKIIHKCTNCNNTIINIESFNNLQLCFSSNKNLTIQDMFDNCLKSETLENVKCDNCKVERDKTKTTEIIQTPLHLILLLKRSSIKNNIINKIHDYVELNESIKVKNENYEIHSVTVHNGEKIRSGHYYTYNKDISENKWYIYDDDKEVKDVTFNEIKNLKSPHTPYMVIYKKKDDNLNLPEKNKQVKRKNDDDYLINKKKFKPNKDIKRKIDNKNSDISCIVEKKQKNNNNNNKLEISKTSIFHRNNIISVDDDDDDDNVETNQSNNLTPIITNNTTNSLCNNINNINMNSLNNTSNLLCQNMKNAKILGSTDTLDIDIDDLPDDGKWSNNKLKGKCIDCYRIGHASKKNKLCEFSDYRQKITCTDCKKKGHKSKRSSWCLSYKKNKIDDNNTSKAINVTNSINNSNIIIKQINPSKTTSSIICKDCNETGHATRRSKICKDYKLTPLERKFGKDTKLEMYSVQMGLNNLCNNELIKNEIINTVKELSGLSIEKSIQFEYFLRHKDRWLLNKIITSNTLPRLEHIGKFLHKDYKPNSSNDDSIEIEKLTKEFRKLNCNKNEERRQYDCTGRSPLFDEEYKIFITNFSNNVKMHAESRVRKFILRELNKNEENDVKKERISWYKANTMAINLFCNGKIDEKLANHELFIKHKNLKFKSFYDKWWQFLEFFMDLQKYIKFKLVPIQSPGLKCQTITTTGAFTLLRKLFKDKGAQSSRTGALDDDKPNEMWDKLLPNLKNHERINEAFAYSISTNGIYVTIHCARPIDESNVKKDIYKKSINIDDYDGVYSFDPGAVYPLAGIFVKNINDIGDETKEKKILLKATSWRYRTGQYHYKYKLHNLGYDKLEIYLQELMEMKQFKDIDVDDPSNYINITKFRLKWFDRAQIFFQRRKIAWLSWNAKINDRRELARYVNYIRYGQEKYHPNKKDLPKHNKTKYKYLKYGPKTEQQTLRINKKIENTKILKTKMAENRKIKTAARIERRDNILKKLKEKKNKNKAVSISPATNPVNEGKLKKQKKNKKNKKEKVNLPKNNRKVLVFIGKVEMPSGIKGHVQAPLCRITRELAKCPDIDIAFVNEYNTTKLCYKCGEKCFVSISPDRYVYCKNCKTVLHRDINSSKSIMNLALADYGIKPTSFVKNYSSYRPNYNKVDNINNP

SEQ ID NO: 2439 - protein, 1277 aa, Aphidius gifuensis
KYIYKMIKRVGLENLGSNCYLNSIIQVLHAIKDFRDDIINKNEHNSSIIRQLSTLFESLSISLEPIAKSPEEFIKSLKNSTFTKNFKYTRQEDCSEFLIQLFALCNQYEDLKKIIEKFFVGKFKIIHKCTNCNNTTINIESFNNLQLCFSSNKNLTIQDMFDNCLKSETLENVKCDNCKVERDKTKTTEIIQTPLHLILLLKRSSVKNNIINKIHDYVELNKSIKVKNENYEIHSVTVHNGEKIRSGHYYTYNKDISENKWYIYDDDKEVKDVTFNEIKNLKSPHTPYMVIYKKKDDNVNLPEKNKQVKRKNDDDDYLINKKKFKPNKDIKRKIDNKNSDISCIVEKKQKNNNNNNKLEISKTSIFHRNNIISVDDDDDDDDGTNKSNNLTPIITNNTTNSLCNNINNINMNSLNNTSNLLCQNMKNAKILGSTDTLDIDIDDLPDDGKWSNNKLKGKCIDCYRIGHASKKNKLCEFSDYRQKITCTDCKKKGHKSKRSSWCLSYKKNKIDDDNNTSKAINVTNSINNSNIIIKQINQSKTTSSIICKDCNETGHATRRSKICKDYKLTPLERKFGKDTKLEMYSVQMGLNNLCDNELIKNEIINTVKELSGLSIEKSIQFEYFLRHKDRWLLNKIITSNTLPRLEHIGKFLHKDYKPQSSNDDAIEIEKLTKEFRKLNCNKNEERRQYDCTGRSPLFDEEYKIFITNFSNNVKMHAESRVRKFILRELNKNEENDVKKERISWYKANRMAINLFCNGKIDEKLANHELFIKHKNLKFQSFYDKWWQFLEFFMDLQKYIKFKLVPIQSPGLKCQTITTTGAYTLLRKLFKDDGAQSSRTGALDDDKPNEMWDKLLPNLKNHERINKAFAYSISTNGIYVTIHCARPINEPNVKKDIYKKSINIDEYDGVYAFDPGGVYPLAGIFVKNINDIGDETKEKKILLKATSWRYRTGQYHRKYKLHNLGYDKLEIYLQELMEMKEFKDIDVDDPSNYINITKFRLKWFDRAQIFFQRRKIAWLSWNAKINDRRELARFVNYIRYGQEKYHPNKKDLPKHNKTKYKYLKYGPKTEQQTIRINKKIENTKILKTKMAENRKIKTAARIERRDNILKKLKEKKNKNKAVSISPATNPVNEGKLKKQKKNKKSKKEKVNLPKNNGKVLVFIGRVEMPSGIKGHVQAPLCRITRELAKCPDIDIAFVNEYNTTKLCYKCGEKCFVSISPDRYVYCKNCKTVLHRDINSSKSIMNLALADYGIKPTSFVKNYSSYRPNYNKVDNINNP

SEQ ID NO: 2440 - protein, 870 aa, Aphidius gifuensis
IFYNNKINFFSKTSWVEVYLSQENTTTQANNTTNLTTSDSNVNVIACNTTTTTTDANSIDESFKIPVVPVQPRAPSRSRSKSQCSSSSRHSSSSSTSAASSQCSSTSKKTSSGRSVSAGFKKFEGQNTRTRTIQMGLKTLLQIKNTQSEKYHIYQKIIDIVKRTSEWRIASSIFTEFCINHENGIILNLIATGDPVQVISNCFKILIKNSRIKCHEAILDLVNEYDELRPEPINKKTQKIKVKHDMKNLSRIVDSVVMEYIKNFKTNLLTHGYKHLKHFIQDDMKVTHVEAKKIIDTLFLQNKHPDIQLFDDFENLDFKLFNKKENWNIFVPFFAKLQKLTKNKFVLVPINKFGWAHVHISSSILTSLEYLFFPKVKGQKKPIIHNNLWEEVFGINKDTPFGEKFGESLSTNGAEVSILQYVENKVDISNHLDKIEKQFENKIISEDKIEGIKILSNVNLETIKKTKYTRINCIDPGERVPFATVIVKNINDFGDKNKEYRYCQKNSTFLYKSGFFSSEKKRKKITGEADKNVENITKLKEFNDPNNKVELNLKNADNYKSNLKYRLLCYYELQHVYGQLKYVLNRWHRKIQLRRAFDRQVNFLAYGLGSKKNIKKPIIPDEIKKQKNLKIHDLKQARKQKYKLEHPDADKNKDKTKSKIKKEKKIYRQEKLAEKHQATLSNEEKKRREKNRKQELEKKIKNKNLKKQLNIQKALNFKRKQEEYQLRKKNYQQKLNNNNNNNNHHHPHVNTNNEKVLILIGETKMMPGIRGYRHPPLLKIERKLLKMEDVTVVRVDEYRTTQNCSVCFQQLVVSTDGHRYCFCPHCKITWNRDLNAARNIGGKALAHLGINKKHTIDNYINFKRGGRKKN

SEQ ID NO: 2441 - protein, 957 aa, Aphidius gifuensis
IIIIIIIIIIIIIFELIFSTTSVEWLEKNQDWLEKDETAVKDIIKLDPGYVEQIQREKQELQLQQQQQQLQQQQQIQQQQQQQQLQQQQQQQQQQQQQQQLENNINIPPPPPPPSSVSSKKSRSTVKSKTTTKAKSTAYSRCSSVKTSTTTSSKRQESAGDKKFKGIPNLRDQTIQMSLKKLLGISGNNTDKYKTKVYDHIIDSVRKISEWCVACSFFLEFCINHKDGWLLKNIIENRPRKSINAVFNILREDPKKIKYDEELVKLYKEYLKLRPETINPNTQKIPEKFDTSGISKIVDDVQKTYVTIFETNIKTHGYSRMCKYVFKQIKLQEEEKKENEEEEEEEEEKTKYYYHNKSRNIMKNLITNNIHPDMPLFKKFKNLNFKEFNNGNKWHFFLPFFLELQKISPDFRVVPIYKFGWKHIRISTSILRQMKQKIDKKTEVEVKKIGDEQLWNDMMNINPTTQLGKKFYLTATTNGVEISLFLKVKKTTATTSVEKVENEIDSELITDPEKMKKITIISRHTPADIKKIEFTNFVSIDPGERTPITAIFFNDYKDLGNKDKERRYCQKNSTLFYKSGFYKNEKKRKKITSTADKRIENIVKMKKFENLNLKNPDDYIRNLKFRLLCYYDYQHIYGQLSIVTLNWTKKIQRRRVLDQQANFLAYGYYTKKSLKKSIKTDEMKKTKNQKLNGNKGKKQNAKGGNGGNGGGEKSKNETSEENEEKKQKAENEKTKSELRKAAKLKKQQEKAAEHKEKLNDQQKLRRKKNRDREQLKKKKKKQSRKEMIEKKKLDFEKRQKEYQEMKKQKRSLYLERKKKNNNKNNNNNDNNNDNNNDDNKKKNIKWTVIFIGQSKIMPNIKGYRKPPLMKLEKRLLLMENVVVIRVDEYNTTQNCSLCCKKAVVGKYGHRYTYCTHCHVTWHRDINAARNIARIGLAYSGINKNDSPDNYPTFERKG

SEQ ID NO: 2442 - protein, 1001 aa, Aphidius gifuensis
CVLMIFLIKFLIKIFRSSSLQKTKRSTRSSKQNERRPPNISSIVDPDTDDDDDVNMVVTPTPSTSTYINNNKQQLKNNDGNSSIIQRLSQELARTAVLENNNNMNMDIDDDLIVERQRREMTQIFGSQKSMQDEQVIKSQEWVVKSFSQPSTKNSENNDKKRPNILPIPELINKKIQKMTLPTPPSPPPPTPPPPPSFKTPTVQQTPIKQQKQKKQRNTQTAQSRTPSPSPSSTSTSRSTSSINSGKTSTSTKRRQKSAGAKKFANEPDKKMYTIQMGLRTLLKITKDTKSTDQNYKIYSKIQSDVDRVAKWKIAGSYFLEFCINHPEGWLVNHIFSNGANKIIQQIFNILKVPCSHGVKPVYDVNLIELYNEYCSIITRLNETDNLNIPLRFDVHGLAKICDDQIETYLTCFETNINTHKYKRLFKYIKKELGISGPEAYDILSDLIQHNKRPEKIKLFDQFEKLDFKLFNNNNKWYKFLPFFIELQKLTTNFIVVPINHFGWHHVRYSTSALRRFVGQLSDKELFTECKTLDDNALWKKIFNIDPESSLGKRFYLSLTTDGASVSIQCQKDVVNKNNNLDNNNIQKDVPKITILSQHSLDDLKNLNITHYSSIDQGQRCVVSGIHFENISDLKKKSKQKRFAIKNSTWLYKSGYFRNEKKRKRITSTVDEKVEKIVQSVEFKDILNLKNPINYLLNLKFRLLCFAIKQSVYGTLKMTLLKWNISIRKRTYLDDLAYFIATGQRKKKYLKKKIIDEKKKTKNIKAKELKKLRKQNYLKNHPSDKDKKTKHQLKLARKLESQVELAAKNKSTMTDKQKKQRARNRKREKRLKKATKSLEKQHKLELKLSFEKQQLNYHQEKEKKRKEYNNNKNKKIHNNSNNNNTKVREYSCCFIGDPNPHLRPKGYKRPPLCKLEKKLLEFKFVILVRVDEYKTTQNCSKCHRQLIVSTRGHRYAYCRTCGITWHRDINAGISVGNIGTTYAGMNPDDDIANYSNFERSR

SEQ ID NO: 2443 - protein, 1008 aa, Aphidius gifuensis
CVLMIFLIKFLIKIFRSSSLQKTKRSTRSSKQNERRPPNISSIVDPDTDDDDDVNMVVTPTPSTSTSINNNKQQLKNNDGSSSIIQRLSQELARTAVLDNNNNMDIDDDLIVERQRREMTQIFGSPKSMQDEQVIKSQEWVVKSFSQPSTSENNDKKRPNILPIPDIINKKIQKMTLPPPPPTPPSPSPPLPPPLPPPSFKTPTVQQTPIKQQKQKKQRNTQTAQSRTPSPSPSSTSTSRSSTSSINSGKTSTSTKRRQKSAGAKKFANEPDKKMYTIQMGLRTILKITKDTKSTDQNYKIYSKIQSDVDRVAKWKIGGSYFLEFCINHHRGWLLDHIFSNGAKKIISQIFNILKIPISQGRQPTYDVNLIELYDEYCNIITRLNETDNLNIPLRFDVHGLAKLCDDQIETYLTCFENNINTHKYKRLFKFIKNELNISGPEAYNILSDLIERNIRPENIKLFDQFKDLNFKLFNNNSNWHKFLPFFIELQKLTTNFIVVPINHFGWHHVRYSTSALRFFVGQLSDVKLSEECKTLDDNALWKKIFNIDPESSLGKRFYLSLTTDGASVSIQCQKDVVNKNNNLDNNNIQKDVPKITILSQHSLDDLKNYNITHYSSIDQGQRCVVSGIHFKNISDLKKKSKQKRFAIKNSTWLYKSGFFRNEKKRKKITSNVDKRLEEILQSVEFKDILNLKNPINYLMNLKFRLLCFVIQQPVYGTLKMTLLKWNISIRKRTYLDDLAYFIATGQRKKKYLKKKIIDEKKKTKNIKAKELKKLRKQNYLKNHPSDKDKKTKHQLKLARKLKSQVEHAAKNKLTMTGKQKKQRERNRKREKRLKEGTKILEKQRKLELKLSFEKQQLNYHQEKEKKRKEYNNNKNKKIHNNSNNNNNTKVREYSCCFIGDPNPQLRPKGYKRPPLCKLEKKMLEFKFVILVRVDEYKTTQNCSKCHGQLIVSTHGHRYAYCPTCGITWHRDINAGISVGNIGTTYAGMNPDDDIANYSNFERPTRTR

SEQ ID NO: 2444 - protein, 899 aa, Aphidius gifuensis
NNMMMIIIIFIFLYFSDFATPTPTKLFKSQIKKPTTCSACKKQGHQKNNKICEKYDEYLKNKSTATKTTATKTTTKTKTTPSTSRCATPLLVNNNSLDSDQTSTTKTTYRSNLSAGDEKFKGKNTRNFTIQMGLKKFIGLLPEMEIDHNNPKLLMYQALTNNVKLMSKFAITASYFFEFSINHKNEWLVNYIASQNKYTKINFVFNLLRTDMNQKRVKEVPQELISLKKEFDKIISDNNLNIEPSFYLKGKTTLFENLCVEYDRNLETNITTHMWQRLMIHLRFKLKITNWFKLLEDLFTKNIHPPNIDVFENYNHLNFTKIKSTWWKFLPFLLTMQKTNNNFFLIPTYSCGLKNIRISTSALKDIVHDLENTTYAEVDKIKPAELWQSWFNIKPKSSIDKKFAFSFTTNGVSASLSCRKEIIINDEKTPMKLPPLNKKIGLIGSDPGARCPMAGIKVQSLDDIGDKDKEQRFCEKNSTFRYRSGEFERAKKRVIIAGDVDNKVQNFTKLEFSHINLKNPLNYYENALYRLKCFEIKYPIYELDKLIKLKWSKQIQSMRQTDRQINKLLYNVGAKNRKKKIDDPVYIKHRKDMCKKINDAKKKTAKAVVDKISINIGDDFDAKRAAGAIEKYKKQAVKERLKNKNYSAKASDANVVAASKVVELVSTINAIRNNNNNNIDNIILLNHVVKTKAKLRKARKLAKQLRVADRNKDTKSKSKLKREKIAREKQQAKRKEEREKEKKIIEEKKLAQMSSYEQKKWPRKLRRLNVDGKKIIYCVGRPDYPKWIKAYKRPRLKIFDRKIRSRPGVFTIDVDEYNTTKLCSNCNEALVVGQHGQRYCWCPRCNITWHRDVNAGRNMLILALIRAGLLPENFIKNFNRLNGHLNFRHKVNNFFSIFF

SEQ ID NO: 2445 - protein, 1158 aa, Aphidius gifuensis
LVKLKIIHKCTNCNNTTINIESFNNLQLCFSSNKNLTIQDMFDNCLKSETLENVKCDNCKVERDKTKTTEIIQTPLHLILLLKRSSIKNNIINKIHDYVELNESIKVKNENYELHSVTVHNGEKIRSGHYYTYNKDISENKWYIYDDDKEVKDVTFNEIKNLKSPHTPYMVIYKKKDDNVNLPEKNKQVKRKNDDDDYLINKKKFKPNKDIKRKIDNKNSDISCIVEKKQKNNNNNKLEISKTSIFHRNNIISVDDDDDDDDDGTNKSNNLTPIITNNTTNSLCNNINNINMNSLNNTSNLLCQNMKNAKILGSTDTLDIDIDDLPDDGKWSINKLKGKCIDCYRIGHASKKNKLCELSDYRQKITCKDCKKKGHKSKRSTWCLSYKKNKIDDGNNTSKTINVTNSINNSNIIIKQINQSKTTSSIICKDCNETGHATRRSKICKDYKLTPLERKFGKDTKLEMYSVQMGLNNLCDNELIKNEIINTVKELSGLSIEKSIQFEYFLRHKDRWLLNKIITSNTLPRLEHIGKFLHKDYKPQSSNDDAIEIEKLTKEFRKLNCNKNEERRQYDCTGRSPLFDEEYKIFITNFSNNVKMHAESRVRKFILRELNKNEDNDVKKERISWYKANRMAINLFCNGKIDEKLANHELFIKHKNLKFQSFYDKWWQFLEFFMDLQKYIKFKLVPIQSPGLKCQTITTTGAFTLLRKLFKDKGAQSSRTGALDDDKPNEMWDKLLPNLKNHERINKAFAYSISTNGIYVSIHCARPIDESNVKKDIYKKSINIDDYDGVYSFDPGGVYPSAGIFVKNINDIGDETKEKKILLKATSWRYRTGQYHRKYKLHNLGYDKLEIYLQELMEMEQFKDIDVDDPSNYINITKFRLKWFDRAQIFFQRRKIAWLSWNAKINDRRELARFVNYIRYGQEKYHPNKKDLPKHNKTKYKYLKYGPKTEQQTIRINKNIENAKILKTKMAENRKIKTAARIERRDNILKKLKDKKNKNKEVSISPATNPVNEGKLKKQKKNKKSKKEKVNLPKNNGKVLVFIGRVEMPSGIKGHVQAPLCRITRELAKCPDIDIALVNEYNTTKLCYKCGEKCFVSISPDRYVYCKNCKTVLHRDINSSKSIMNLALADYGIKPTSFVKNYSSYRPNYNKVDNINNP

SEQ ID NO: 2446 - protein, 912 aa, Aphidius gifuensis
LSYSNSTTTNVSSQTTHENDHDDGKDKFIPYKIKPTPWSPSNINFIGYNELTATRSSSFIESKPFNNSQSQRYNIIIIIIKRMFIILFYCFYNDFVFFCVFSSDQQSSIDIQKKNINTCSNQKRLCKACGRKGHGTKFSQRCIKNVDNIPLAKRLEKTKLTQANKIDKIKNSKSKEAKALRQFNYQKKKRVGKLKSGQQKFSTIKSIKMSLNRIIKNQEVKKIIIDDIKVLSKLFKEFSYFVSFCFNHEQNEAINDIEKLTNKKEFHLNKYLNKLTYFRTKKRKKEEDFIDKLFKEYQIIRNEVGMPIEGYCGDLRTNLISMNLINFETNFMNNIIVNCRVRIGKYLKIVGKIYNRRKRKKMLDNLLFKNIKPKDKDNKIMDIFNDFNLNFTEIKYKWWKFMGFFKKLSNIDLMNFPLTPIYKPGLKHFMYSTSSVWQLANRVFGNKNKKLVRDWNQQKKMFNNNYYHMQKFIWKQCFKIKKKLIKKKFNFTISTNGVTVTIHLMKEIINNNCNDNNLSKKKLKTTVGAAAVTSSTTTTTTATTTATTTCSTDDNISSDEEDYDDINVLYNYTDIDENDDDNNNINNNNNIIDDNDDNSNRISDEEYDRGIGLDPGNKNIIGGVIVQSLNDIGNKDKEERYLLTSKALLHKSGHYTRQFVIKKLIKNVEKEKKQVYDQFVEIKKQEFENIVGEIEAEYIKKRKTKKERKQLKQQKIENNTKHDDDGKTRNWKKCKQLLKNKKNNNVVPSESAEPAPSIEPLEPSKLKKNSRQMIRKKTLLENFVINKPDNYVLSAKYNLTCMKLEEPVYSSRRYVRLQFDKFIRTNEAVSKEVNYLEHGTYDGKKTSQLEKKTLICGGQFQISKYMRGYPSAPSSLLKKKLQENKKIKLIIVDEFRTTILCNKCNNPCITSQ

SEQ ID NO: 2447 - protein, 243 aa, Aphidius gifuensis
RQEEKKKTTKTKKNKKKADNTTTDAAIADVIAGAIADAAAVDDAVVDNILDENGGGANDNVKIKKKKKKSIKIITDKFNNNKRILIALGDTKISKWMKGYRRVSFKGIIRALYCRARLSKSKIDIVDTDEFNTTKLCSACNSVCLKSKSPDRLVIFLFIYFLINLFIYLFCFLRYLLCQKQDCKVTWNRDINGGRNILILALIRRGLIPANIIPHFSNFKKGARTLGPSGVPRSSASSRWSWT

SEQ ID NO: 2448 - protein, 200 aa, Aphidius gifuensis
KIVNAKIMRSKIAENRKIKTAARIERRDNILKKLKEKKNKNKAVSISPATNPVNEGKLKKQKKNKKSKKEKVNLPKNNGKVLVFIGRVEMPSGIKGHVQAPLCRITRELAKCPDIDIALVNEYNTTKLCYKCGEKCFVSISPDRYVYCKNCKTVLHRDINSSKSIMNLALADYGIKPTSFVKNYSSYRPNYNKVDNINNP

SEQ ID NO: 2449 - protein, 571 aa, Aphidius gifuensis
LIFPIMLKCMLNQEVVKLILRELNKNEENDVKKERISWYKANRMAINLFCNGKIDEKLANHELFIKHKNLKFQSFYDKWWQFLEFFMDLQKYIKFKLVPIQSPGLKCQTITTTGAYTLLRKLFKDDGAQPNRDGALDDNKPNEMWDKLLPNLKNHERINKAFAYSISTNGIYVSIHCARPIDESNVKKDIYKKSINIDDYDGVYSFDPGAVYPLAGIFVKNINDIGDETKEKKILLKATSWRYRTGQYHYKYKLHNLGYDKLEIYLQELMEMKQFKDIDVDDPSNYINITKFRLKWFDRAQIFFQRRKIAWLSWNAKINDRRELARYVNYIRYGQEKYHPNKKDLPKHNKTKYKYLKYGPKTEQQTIRINKKIENAKILKTKMAENRKIKTAARIERRDKILKKLKEKKNKNKAVSISPATNPVNEGKLKKQKKNKKSKKEKVNLPKNNGKVLVFIGKVEMPSGIKGHVQAPLCRITRELAKCPDIDIAFVNEYNTTKLCYKCGEKCFVSISPDRYVYCKNCKTVLHRDINSSKSIMNLALADYGIKPTSFVKNYSSYRPNYNKVDNINNP

SEQ ID NO: 2450 - protein, 1728 aa, Aphidius gifuensis
VLIKNIYKMVMRVGLENLGLNCYLNSIIQVLHAIEDFRNDLINNKEHNSSIIKELCALFTKLSLSFSFMAKSPENFIKSLKKSDITEHFNYTRQEDCSEFLFKLFELCNGDENLCEIIKKYFVGEIKRLHKCTNCNKTKEIIESFNNLQLCFSSNENTIQDMFNNCFVPEILENVKCDNCKVKCNVTETKELTQTPLHLILLLKRFDFKNGRPKKKHDYVKLNENITVKNESYELHSVIIHKGEDIGSGHYYTYNKDISENKWYKYDDDKKVENVKFNVIENLKSPDTPYMVLYKKKDNNNNNNNLNKKNEQLKISPIKVTNKLDIHNNTVTKKPKIISNVILNKKKIANKIDLNLNNDDKSIGKCKTWVSSSIIPIGLANFDNSCYINSIIHPLMNTDEFYNKIMNTNYEEFDSFKRIFQLLINKESSKSSFKRLILKLKTEAFGEETCAQQDTSEFLITIFKNYSKNKNCKKMIKDLFCGEYNECRKCTNENCKKFCSKEPFFINYLNIQTNTTVKKLMSKNYKNEKQNCINCGQNNSCTIKKVNTILPPYMIFNLNFFVHDKKLNTFKLINNGTFEIDEEIKLPIEIPSKSETKLTDDKVRKSVGSQIYIIYAIIIHDGNTLNSGHYYTYCKDKNTNIWYCFNDNIVTQIKFEDIKTFHLNDNKKPYLLFYKKSNISSTIPSPPPQSAQHNPSVEDIVDNLSDLFSNFSTLSKDTNKSKNSIQSSSIIMKDIDNLSEKLSKCSTSSEEIKNQLKRKNNNHIGLIDKKKFKPYKQNLKRKINNKTLCIVEKKQKINKLESTQTSIFHKNQIISDDDDENDEKNQLNNIKNTNDLPDNTKLSNNKLKGVCNDCHRIGHASKKNKLCEFSDEKQKLKCTDCKKNGHSNKRSTWCRYNSSCKKKVIAKNSINDSKIIKRRNPSKTLKEKERHSTVQIGLKTAIGINTFNLNNMEKKDYDEKLELYNIIIDDVTRLAKLARDASILYEYCINHPNKWLLNYIANSDKEPRVNDIFNRLRADVRVNKDIDENIIRLLADYENDRPKNVKIPMLHNIDGCSRPFEEMMTQFETNLKVNLNEHGPKRVQKYFYSLKIKTKDGKEENKYTKDEIKKLLDDLFIYNIHPKEELFKEFKDLDFSLFYRKIKWWKFLPFFHKLQGILKNFILIPTFQCNLKHIRYSNTGLKKLASRLYNLKGTKVAETYNNNNNNIKELWKKMFPHIPHFENFDCSMTTNAVYACFLYKKKQKINDDDDDDDDDYDYYYDDKKDEYIVKPEKINNIKEKAKNCEQVVTADPGFRNPLAGITTRGKDCIKNFGDKEHGKPYCLKLSTYRRKTGTFKRQKKLKKITDKVDKAVNELLLKDRYKNLNTKDPTNYIQTMQWRTECTDIMSPVYTQLRVAKLSWDKIMMTRSIIDTTVNKMAWGIGKKNKKLIKNQKKQIEKKIKLLETTNTSKKNNDKNKKQDKKNDEKIVNNNNNNNNVDDDKNKKQDKNDKNKNKKTNHEQKKENKKNKLKEESDKRQNKLTDRQKYQRDRQRRKEQAKKVIRKQEKKEKLKQKYKNILSNINDHFEKKKIQFKNEPNKDKKNKIFNGNFRFYHKRKKLNGKTLFLMGSTKMSNRIRGYVFAPLNIFAKTLKKHKNIIFFNVDEYMTTQNCANCNEKCHVSTRGDRYLYCPNCHITWNRDINGGLNIGNVAFIHLLLKNENSMKNYNNFKRSYNNKKNNKNNKTIDKIK

SEQ ID NO: 2451 - protein, 233 aa, Hydra vulgaris
KMKVVCADPEMSDLLYFGSHNYKNELETFRYTQNQRRLETKNKKYNKIIDKVNKETFIDSKTIKELETSLSNLNSKSCNYEKFKLYCIEKNKINNQLYTHYEKSFFRKFKLNAFTNTQKSESKMIKNFENKYGKPNKTILVVGDYDKGDNNMKGKEPTICKKFRRIFRNAGYKTYLVNEFRTSKLCNCCNEEIEKFLEKPSKKPKRKGKIDLCHGILRCKSVKHNCEIYHNRD

SEQ ID NO: 2452 - protein, 555 aa, Rhizopus delemar
MSSPFYCKGLSVAQRKALSHYVYTLKQKQQSIWPSSLERNQCLEETIEKMNALWSRYQTMNCDAEDLYSKPHEFFKWLFYLQQKINEKVNIMEEKPATFASKSYIYRKLKELTFTSILNRRSFKSLQEQVLQSINSKIPLVLGKKLGKLEPHLPALLKFITSIQSRIEDGTFTPAKYTDRRGYRFFSILPVYSFAMKSIQIDAQAFWRLLKQSGIENIPKGVKDKSALSDFHYRLFNFSKMGFRTRKSLSEGKKQFQVRKKKQIDTLLGKQPEDFLEDIENGCEIWGVDPGIATLVTAVDTSGRQRTTSLDEYYHLCGYNDANSIRKKHQEQHKAQFLKVSNLSSLKTSDMAEFLKACKERLSLYDDITSYYNEKSWSSKLKFKCYMRKQKGVHEICKRFIHGSAKYDEKATTGVRTSTKKENRYYPSALIDHEKRSKKTIIAFGDGMFGSSLRGNKSAPVRMIKKALKKYCGKQLDICMVDEYLTSQICNKCKTRNVDNVVTAKSKRRVHTVLKCKQNNCNIIWNRDIMAAHNILDIFLFAAKNKNQRLDAFVR

SEQ ID NO: 2453 - protein, 555 aa, Rhizopus delemar
MSSPFYCKGLSVAQRKALSHYVYTLKQKQQSIWPSSLERNQCLEETIEKMNALWSRYQTMNCDAEDLYSKPHEFFKWLFYLQQKINEKVNIMEEKPATFASKSYIYRKLKELTFTSILNRRSFKSLQEQVLQSINSKIPLVLGKKLGKLEPHLPALLKFITSIQSRIEDGTFTPAKYTDRRGYRFFSILPVYSCAMKSIQIDAQAFWRLLQQSGIENIPKGVKDKSALSDFYYRFFNFSKMGFRTRKSLSEGKKQFQVRKKKQIDTLLGKQPEDFLEDIENGCEIWGVDPGIATLVTAVDTSGRQRTTSLDEYYHLCGYNDANSIRKKHQEQHKAQFLKVSNLSSLKTSDMAEFLKACKERLSLYDDITSYYNEKSWSSKLKFKCYMRKQKGVHEICKRFIHGSAKYDEKATTGVRTSTKKENRYYPSALIDHEKRSKKTIIAFGDGMFGSSLRGNKSAPVRMIKKALKKYCGKQLDICMVDEYLTSQICNKCKTRNVDNVVTAKSKRRVHTVLKCKQNNCNIIWNRDIMAAHNILDIFLFAAKNKNQRLDAFVR

SEQ ID NO: 2454 - protein, 251 aa, Rhizopus delemar
MDELIPNENYKILFGNTIKSDGFSVDFVFYRKERMNNGSDVELTLEDFNYEEVHNQYHPMFLVPGRKSLFTAILCKDTAHHRFQLYQGRQGAPEMMANILTHGTAKYNRSRRKRKKKKKKKDKKEDEGLSLRTDEKKLKWRTLPFQENKEKCPLVVFGAGVFGKDMVKMKGLWCGVIGKLFATLKKRDAAGELIVVTIDEFKTSKTCSSCFFDDLKVAKAPGFKGKGVLSCSKCKKVWQRDVNATTNGNDL

SEQ ID NO: 2455 - protein, 378 aa, Rhizopus delemar
MKPQGERKFMKFRGTIYTDGVGALVLKQNYDTKKKGGSSGEKPKSIKADEFQYIEKLGKEGLLAGVGKCVLIDPGRQDLLYCMHEKSTVENKMICRYTSNQKAIETKSRKFRKLNNNLKRDEVIAAELSLSHFKSSTVNKDRFVEYLQERAKVIPVMKAYYLNEDRPAAEDQGAGGFLPFRKMKLSNFINQQQADKRLAKKLRERFRNDAILILGNWSAGKVKYHEPVRGVGMRRMLAKEGFQVYLLDEFQTSSLCPSCQNGELEAFKKVQNPRPYQREKYPVVDRHGLLRCKNQQCLKAVTSTIEATDKVPLHYLMNRDMAPTLNFRHILFSLRANGERPERFCRSKKPLSTGSKRKDMSSPSASTSQPTKRQNNPL

SEQ ID NO: 2456 - protein, 298 aa, Rhizopus delemar
MYLMKKKDKINSTKSPNNLITEESYKCFENVDDLTVDTYLLEKPNKVAFSGTDNGLVTLSETNVLLIHFSKKIAYDTSTLDKDLLSVPTSFKIKSKDLLYLSGGYTSRNNLLRAKRSSLSGASATKSEALLLSYSIQHSSNLMEAKTAFNVHQQEKNVLRKFYYSSTRMKRKRRYEIQKRKAYDCVCSAERRRCHPCPSQKSSTRFIMFVGERGYGYGSRVKNHVRLGGPWKPLKHTLKTVNGTSVCNNNECILSLSGTSHKARDSVSALAIGISGASRLISGTTLEVFNPSATTTIR

SEQ ID NO: 2457 - protein, 611 aa, Rhizopus delemar
MKVYYLNEDLPAAEDQGADGFLPFRKMKLESFINRQQANKWLAKKFKERFRNGAILILDNWSAGNVKYHEPIRGGEMRRMLVNEGFQVYLLDQLRASSLCPSCQNGELETFKKVQNPRPYQREKYPIADCHGLLRCKSQRCLKAVTRTIEATDKVPLCRLWNRDMAATLNFRHILFSLRANVTAALISDTVTDDNQGQIKGMSTELTIYGYNEEPLPSVEIAHRNKDAVFNSLFDMEKVQHTCESNGLKFGQRMSVLPKLKVVRILGVKKTIVPPVKPQKMFYLKRILRDPNILLEGQKPLEDLKAETAKLEKEVKSLDQEREKALKYQKEQDSIKKIKELRKEWHNKVDKQTLYQRIEEERHLRDKTCLKINDIEDQLMEKKQVLYYQRMAIRHNSRIHTVDTTSTLPTTKKELKKDSRGLVHSEACVPRDFEDFTFCGTDNELVNMTAAVPFSLKRFSFHLKLHNYYSVLNDDNKAAPVVQDIEFQKYLKTPKATTISASEIDFGCGAFKQRVKRQTGKKLTRKGKEVQLIENSLSQKVTSTSNVSVEQFKHNFDAHVEHRKKLRDFYNTGNRMNERRHREIQKYRFTHRICTKERKALSQTSGSNFSG

SEQ ID NO: 2458 - protein, 435 aa, Rhizopus delemar
MFNIQSAFTYRTVPDYAEECVKLSLQNGIEYDNWYRNVASQPGCWVKPLSVKSTFYVCDHADIVQSRLPVEVKRWIEEHVDDALDSSIDNDNSSSVALRCEKYAEDTEKYLSMYNSIISFHLKLHNYYSVLDDDNKAAPVVQDIELQKYLKTPKVTIISASEIDFGCGAFKQRVKRQTGKKLTRKGKEAQLIENSLSQKVRSTSNVSVEQFKHNFDAHVEHRKKLRDFYNTGNRMNERRHREIQKHRFTHRICTKKLKALSQTSGNNPSTKKKLVMFIGDRGTGVGFRIKGFKRYGGRWKEVIHSEAANVCITNENMTSKTCIFCFRRLTHPRISVTKNGEVFSRKVKGSFYCTNPLCVSVLSKCAAKSRDSLSALAIGIVGLSTVLFGAPLPAFKSHKISNIEVEKYTILTSPSRFEEEIGSYAVVLEGRTVPL

SEQ ID NO: 2459 - protein, 422 aa, Rhizopus delemar
MQANKSSTSPKRHFKAFFRLAELSEAEQMKQFACFPLRITFIPCYMTLDSKIIHYHILKSKKNPKIGSKLETWGTVVDLNKKAFKHQGFQKSLRFQGTLETDGVSVSIIKQNTNTSRKSSKPNTEKKVDGNQTEHIEGLDQADLKSTEAKCVLLDPGRRDLMYCLKETSTVEEKRTLIFTKNSRSKCSGHFRYLRKCTQPFVIQKAEATLFRPESNSVNLEKFVRYIKTRASGKHTLYEYYGNESTKSKETCFPESEFDFRVDQKWNLYYENLLIARTRGFFPQLENYSTDNSIKSQLYVTYLQIRLQQKHIPEKLDDSEKSKALGLSKEILKAKFGQDGILFFGDWSVPNVKYQRPTRSKGLIRMSKKNGLAVYLINEYKTSSHCPTCENEVEKFKTVPNLRPYQLSGVRASHALNNKPQE

SEQ ID NO: 2460 - protein, 358 aa, Rhizopus delemar
MASPKNHFKAFFRLAELSEDEQMKQFACFPLRTTFIPCYMTLDSKIIHYHILKSKKNLKQEASLRHGAPSVDLNKKAFEHQGFRKSLRFQGTLETDGIGVSIIKQNTNTSRKSPKPNTEKKVNGNQTEHIEGLGQADLKSTEGKSKISGFFPHPKNYPTDSSVKSQLYATYLQIMLQQKHISERLDDSEKSKVLGLAKEMYRRSQKSNYKKTISTELEKLQLLPFRKLKFSSKLFFDQNDQKLVRSLRAKFGQDDVLVFGDWSASNVKYQESTRSKGLIRMLKKNGFVVYLINEYKTSSHCATFENELEKFKIMPNPRPYQRKKKPDVLLLDIRAPHVLNNKLQEQKEDFGIVIKPSY

SEQ ID NO: 2461 - protein, 517 aa, Rhizopus delemar
MSSPFYCKGLSVAQRKALSHYVYTLKQKQQSIWPSSLERNQCLEETIEKMNALWSRYQTMNCDAEDLYSKPHEFFKWFFYLQQKINEKVYIMEEKPATFASKSYIYRKLKELTFTSILNRRSFKSLQEQVLQSINSKIPLVLGKKLEKLEPHLPALLKFITSIQSRIEDGTFMPAKYTDQRGYRFFSILPVYSFAMKSIQIDAQAFWRLLKQSGIENIPKGVKDKSALSDFYYRLFNFSKMGFRTRKSLSEGKKQFQVRKKKQIDTLLGKQPEDFLEDIENGCEIWGVDPGVATLVTAVDTSGRQRTTSLEEYYHLCGYNDANSIRKKHQEQHKAQFLKISNLSSLKTSNMAEFLKACKERLSLYDDITSYYNEKSWSSKLKFKCYIRKQKGVHEICKRFIHGSAKYDEKATTGVRTSTKKENRYYPSAPIDHEKRSKKTIIAFGDGMFGSSLRGNKSAPVRMIKKALKKYCGKQLDICMVDEYLTSQICNKCKTRNIDNVVTAKSKRRVHTVLQSS

SEQ ID NO: 2462 - protein, 462 aa, Rhizopus delemar
MNMTQWKYNMIGLLRSPNYYSSQDKGIMTILAFIMNGGSQPSTSAGTVSTTGTLASGNRIFSVKSSTDGIGWNGQYRERLEAFANTTHATTTHAYSLSKFIFLCALQDDANFDIGSYINKEFFSEIWLSLNNIYYDAKANPCEYMMAFYHLARLFEALRLPIFNCFPLRRTWVPGYATIDSKTLCQNILERRWTNSINKMNLWAEIDYMNSAALRPQGFGVLWLRGTTQTDELEPYIPSLNAQQHENIAGRYVTIDRGRRGCLYCVHENSTADAPRTYRYTKPCQDKMEKTKKYRRIYDAVKPQEVQNAEATLVNSQSLNLQNFEEYLRNRALVTDLLQRHYTETTTNHLTTHPLHRKLKLSKYVISDTVFVMEYRIHNHIKDEIILKLFVMIYLGVEELREYLWNRDLAASLNMIHIVRNLRLNGETPEKFQRARAERRGPIIRRRRSEENEEKRVLPRTL

SEQ ID NO: 2463 - protein, 577 aa, Rhizopus delemar
MKYAHQIASYEMVKIVTAYLNGVKVQFGNKVRMFLNLLLKKNERIKALKSEMKKNEGTEKEIVATIKTITEQISKVKLAISSRNIEDMPKEFFSSNDLDKIRNLFDSYSTDYRFAKGSIYYDCKANPLKHIKAYYRLSSMCEALQNKSFNCFPLRKGFIPSYMTIDTYILNTQILKNSIISHLDKEVVWGAVLDVRSKAMKPQGERKIMKFRGTIYTDDVGVSVLKQSYDTMKKGGSSGGKPKSIKAEEFQYIEKLGKEELLAGVGKCVLIDPGRQDLLYCMHENSTVENKMIYRYTSNQKAIETKSRKFRKLRNNLKRDEVIAAELSLSHFKSSTVNKDKFIEYLQERAKATHVMKAYYLNEDRPAAEDQGAGGFLPFRKMKLSSFINQQQADKRLAKKLRERFGNDSILILGNWSAGKVKYHEPIRGVGMRRMLAKEGFQVYLLDEFRTSSLCPSCQNGELETFKKVQNPRPYQREKYPVVDRHGLLRCKNQQCLKAVMNTIETTDKAPLRRLWNRDMAATLNFRQILFSLRANGERPERFCRSKKPLSTGSKRKDMSSPSASTSQPTKRQNNPL

SEQ ID NO: 2464 - protein, 808 aa, Rhizopus delemar
MDRNVNDHKIDTIVDSFELYVEDNSDDDFQPVVTARKRKNKENTPQSGSQKRFKGKGKATDSEVTTTSSTGISTTDEPTMLNKITLDDYDLEYNNVDFDAPIIKRPFLGESTKSASRITKSTSAAVEPSTTASKTSINSSKPSKPVPIAFKSAATSVKSSFYPVPVGKASDIKEGPKKISKRVMTIKTTVKNIWKPAYLQPLYDLVHTTNLLVTHTFAFTKYIYLQELATNENFGLNNFVTKGFFVEVFLNLVLSKGGNSTRLKDTTKNYRRLISKYKEAYFEDASYSPPNLPYAQQIAMYECTKIQTAYYNSIKAHFGNRLRSLINKLFKKKEKAKSLRGEMQANKSSSKAIKEAIRKKIYRPCNQVKLAIAKKEMPEVGLLDDQSRTQLNDFLSSYPEDYTFQKNSIYYDVMASPKNHFKAFFRLAELSEAEQTKQLACFPLRTTFIPCYMTLDSKIIHYHILKSKKNPKTGSKFKTWGVIVDLNKKAFKHQGIQKTLQFQGTLETDGVGVSIIKQNTDTSRKSSKPNTEKKVDGNQTEHIEGLSQAELKSTEGKCVLIDPGRRDLMYCMKETSTVEEKQTLIFTKNNRSKCSRHFRYLRKRTQPFVVQKAESILSRSEFNSVKLKKFVQYIKTRASVKNTLYEYYGNETTKSKETYFPESEFDFRVDQKCNLYYVNLFIAKICGFFPQPENYSTDSSLKFSSKLFFDQNDQKLVRSLKAKFDQDAVLVFGDWSAPNVKYQEPTGGKGLIRMLKKNGFVVYLINEYKTSSYCPTCENELEKFKTVPNPRPYQRKKKSDVLCNGLLR

SEQ ID NO: 2465 - protein, 457 aa, Rhizopus delemar
MQANKSSSKAIKEAIRKKIYQPCNQVKLAIAKKEMPEVGLLDDKLRTQLNGFLSSYPEDYTFQENSIYYDVMANPKNHFKAFFRLAELPEAEQMKRAKRIQKTGSKFETWGAVVDLNKKAFKHQGFQKSLRFQGTLETDGIGVSIIKQNTNTSRKSPKPNTEKKVNGNQTEHIEGLGQADLKSTEGKCVLIDPGRRDLMKETSTVEEKQTLIFTKNNRSKCSRHFRYLRKRTQPFVVQKAEAILSRSEPNSVNLRKFVQYIKTRASVKTTLYEYYGNETTKSKETYFPESEFDFRVDQKCNLYYGNLFIAKIRGFFPQPKKYSTDSSESNYKKTISTALEKLQLLSFRKLKFSSKLFFDQNDQKLVRNLRAKFGQDAVLVFGDWSAPNVKYQESTRSKVLIKMLKKNGFVVYLINEYKTSSHCPTCENELEKFKTVPNPRPYQRKKKPVALCNGLLK

SEQ ID NO: 2466 - protein, 254 aa, Rhizopus delemar
MKAILDVTSKAMKPQGERKFMKFRGTICTDGVGVSVLKQSYDTKKKDGSSGGKSRFIKADEFQYVEKLGKEGLLAGVGKCVLTDPDCRDLYEKSTAENKMIYRYRSNQKNRLVDYLQERAKATPVMKAYYLNEDYPAKEDQHAGDFLPFRKMKLLSFINQQQADKRLRRRNEKTLAKEGFQMFLLDEFRISSLCPSCQNDKLETFKKVQNPRLYQREKHSIADRHSLLRCKNQQCLKAVTSTIEATDKVPLRHL

SEQ ID NO: 2467 - protein, 697 aa, Rhizopus delemar
MYEPTVFNKIALDDYDLEYSSDDFDAPVVKRPFLGESIKSASRITKSTSAAVESSTTASKTSIISPKPSKPVPTAFKSAVTSVKSSFCPVPVDKISDIREGPKKLSKRMMTIKTTELTANESFELNNFVTKDFFVEVFLSLVLSKGVNSTRLKDMTKNYRRLISKYKEAYFEDAGYTPLNLPYAQQIALYECTKIQTAYYNNIKTHFGNRLRNLINKLFKKKEKAESLRGEMQANKSSSKVIKEAIRKTIYRPCNRVKLAIAKKEMPEVGLLDDQSRTQFNDFLSSYPEDYTFQKNSIYYDVMASPKNHFKAFLRLAQLSEAEQTKQFACFPLRSTFIPCYMTLDSKIIHYHILKSKKNPKTGSKFETWGAAVDLNKKAFKNQGFQKSLRFQGTLETDGVGVSIIKQNTDTSRKSPKPNTEKKVDGNQTEHIEGLTQAELKSTEGKCVLIDPGRQDLMYCMKETSTVEEKQTLIFTKNNRSKCSRHFRYLRKNTQPFVVQKAKAVLSRSESNSVNLKKFVQYIKTRASVKNTLYEYYANETTKSKETYFPESEFDFRVDQKCNLYYGNLFIARIDGFFPQPENYSTDSLTISTALEKLQLLHFRKLKFSSKLFFDQNDKKLVRSLRAKFGQDAVLFFGDWSAPNVKYQESTRSKGLIRMLKNGFVVYLINEYKTSSHCPTCENGLEKFKTVPNPHPY

SEQ ID NO: 2468 - protein, 263 aa, Rhizopus delemar
MTLDNKTIHYHILKSKKNPKTGSKFETWGTVVDLNKKAFKHQGFQTTLRFQGTLETDGHIEGSGQADLKSTEAKIHRLFPQPMNYSADSSVKSQLYDTYLQIILQQKHISEKLDDSEKNKALGLTKEMYRRLQQSNYKKTTSTALEKLQLLPFRKLKFSSKLFFDQNNQKLVRSLRANFGQDAVLVFGDWSASDVKYQESTRSKGLIRVLKKNGFVVYLINEYKTSSHCPTYENELEKFKTAPNPRPYQRKKKPDVLCNGLLM

SEQ ID NO: 2469 - protein, 414 aa, Rhizopus delemar
MTIDTIILNTQILKNSIISHLDKELVWGAVLDVRSKAMKSQGERKIMKFRGTIYTDGVGVSILKQNYDTKKGGSSGRKPKSIEADEFQYIEKLGKEDLLTDVGKCVLIDPDRRDLLFCMHEKSTVENKMIYRYTSNQKAIETKSRRFRKLRNNLKRDKVIAAELSLTHSKPSTVNKDKFVDYLQERAKVIPVMKAYYLNEDRPVAEDQGAGGFLPFRKMKHSSFINQQQADKRLAKNLREKFGNDAILILGNWSAGKVKYHEPIRGVGMRRMLAKEGFQVYLLDEFRTSSLCPSCQNGELETFKKVQSPRPYQREKYPIADRHGLLRCKNQQCLKAVTSTIEATDKVPLRRLWNRDMAATLNFRHILSSLRANGERPERFCRSKKPLSTGSKRKDMSSPSASTSQPTKRQNNPL

SEQ ID NO: 2470 - protein, 219 aa, Rhizopus delemar
MNLWTEIIDMNSAALKPQELNVLRFRETIQTDDVSVTVFKKRQDRKSRYIGLQSTFVEPEPYITDLNVQQRGDITDRCSYSAPNTRYQEPVRGVGLRRLLKEHGFLMHLIDEFRTSQCCPSCGHRSLTTFKRMPDPQPYQRRNNPEVICHGLLSSGAEELCERLWNRGLVTCLSMIHIVRNLRLNSEIPERFQRAGIERRGPTRRRRSEENEERRALFL

SEQ ID NO: 2471 - protein, 385 aa, Rhizopus delemar
MTIDTYILNAQILKNSIISHLDKEVVWGAVLDVTSKAMKPQRERKVTKFRGTIYTDGVGVSVLKQNYDTKKKGGSSGGKPNSIEADEFQYIEELGKEDLLAGVGKCVLIDPGRRDLLYCMHEKSTVENKMICRYTSNQKAIETKSRKFRKLRNNLKRDEVIAAELSLSHFKSSTVNKDKFVEYLQERAKVIPVMKAYYLNEDRPAAEDQGADGFLPFRKMKFSSFINQQQADKRLAKKLRERFGNDAILILDNWSAGNIKYHESIRGDGMRRMLAKEGFQAYLLDEFRTSSLCPSCQNGELETFKKAVTSTIEVTAKVPLRRLWNCDIAATLNFRHILFSMRANGERPERFCKSKKPLFTGSKRKNMSSSSASTSQPTKRQNNPL

SEQ ID NO: 2472 - protein, 286 aa, Rhizopus delemar
MAYRYTSNQKAMETKSRKFRKLRNNLKRDEVIAAEFSLSHFKSSTVNKDKFVKYPQERAKVIPVMKAYYLNEDRPAAEDQGAGGFLPFRQMKLSSFINQQQAVKRLTKNLRERFENDTILIVGNWSAGNVKYHEPIKGVGMRRMLAKEGFQVYLLDEFRTSSLCPSCQNGELETFKKVQDPRPYQRENYPIADRHGLLRYKNQQCLKAVTSTIEATDKVPLRRLWNRDIAATLNFRRILFSLRANGDRPERFCKSKKPPSTGPKRKYMSSSSASTSQPTKRSNNPL

SEQ ID NO: 2473 - protein, 555 aa, Rhizopus delemar
MSSPFYCKGLSVAQRKALSHYVYTLKQKQQSTWPSSLERNQCLEETIEKMNALWSRYQTMNCDAEDLYSKPHEFFKWLFYLQQKINEKVNIMEEKPATFASKSYIYRKLKELTFTSILNRRSFKSLQEQVLQSINSKIPLVLGKKLGKLEPHLPALLKFITSIQSRIEDGTFTPAKYTDRRGYRFFSILPVYSFAMKSIQIDAQAFWRLLKQSGIENIPKGVKDKSALSDFYYRLFNFSKMGFRTRKSLSEGKKQFQVRKKKQIDTLLGKQPEDFLEDIENGCEIWGVDPGIATLVTAVDTSGRQRTTSLEEYYHLCGYNDANSIRKKHQEQHKAQFLKVSNLSSLKTSDMAEFLKACKERLSLYDDITSYYNEKSWSSKLKFKCYMRKQKGVHEICKRFIHGSAKYDEKATTGVRTSTKKENRYYPSAPIDHEKRSKKTIIAFGDGMFGSSLRGNKSAPVRMIKKALKKYCGKQLDICMVDEYLTSQICNKCKTRNVDNVVTAKSKRRVHTVLKCKQNNCNIIWNRDIMAAHNILDIFLFAAKNKNQRLDAFVR

SEQ ID NO: 2474 - protein, 555 aa, Rhizopus delemar
MSSPFYCKGLSVAQRKALSHYVYTLKQKQQSIWPSSLERNQCLEEIIEKMNALWSRYQTMNCDAEDLYSKPHEFFKWLFYLQQKINEKVYIMEEKPVTFASKSYIYRKLKELTFTSILNRRSFKSLQEQVLQSINSKIPLVLGKKLEKLEPHLPALLKFITSIQSRIEDGTFTPAKYTDRRGYRFFSILPVYSFAMKSIQIDAQAFWRLLQQSGIENIPKGVKDKSALSDFYYRLFNFSKMGFRTRKSLSEGKKQFQVRKKKQIDTLLGKQPEDFLEAIENGCEIWGVDPGIATLVTAVDTSGRQRTTSLEEYYHLCGYNDANSIRKKHQEQHKAQFLKVSNLSSLKTSDMAEFLKACKERLSLYDDITSYYNEKSWSSKLKFKCYMRKQKGVHEICKRFIHGSAKYDEKATTGVRTSTKKENRYYPSAPIDHEKRSKKTIIAFGDGMFGSSLRGNKSAPVRMIKKALKKHCGKQLDICMVDEYLTSQICNKCKTRNVDNVVTAKSKRRVHTVLKCKQNNCNIIWNRDIMAAHNILDIFLFAAKNKNQRLDAFVR

SEQ ID NO: 2475 - protein, 244 aa, Rhizopus delemar
MIYRYTSNQKAIKTKSRKFRKLRNNLKRDEVIVAELFLPHFKPSTVNKDKFVEYLQERAKVIPVMKAYYLNEDRPAAEDQGAGDFLPFRKMKLSSFINQQQADKRLVKKLRERFGNDAILILGNWSAGNVKYHGPIRGVGMKRMLAKEGFQVYLLDEFRTSSLCPSCQNGELEMFKKVQNSRPYQREKHPIADRHGFLSLRANGERPERFCRLKKSLSTNSKRKNISSSSASTSRLTKRPNNPL

SEQ ID NO: 2476 - protein, 378 aa, Rhizopus delemar
MKPQGERKFMKFRGTIYTDGVGVSVLKQNYDTKKKGGSSGGKPKSIEADEFQYIEKLGKEDLLAGVGKCVLIEPGRRDLLCCMHEKSTVENKMIYRYTSNQKAIETKSRKFRKLRNNLKKDEVIETELFLSHFKSSTVNKEKFVEYLQERAKVIPVMKAYYLNEDRPAAEDQGAGGFLPFRKMKLSSFINKQQADKRLTKKLRERFGNDAILILGNWSAGKVKYHEPIRGIGMRRMLAKEGFQVYLLDEFRTFSLCPSCQNGELETFKKVQNPRPYQREKYPVVDRHGLLRCKNQQCLKAVTSTTEAADKVPLRRLWNRDMAATLNFRQILFSLRANGERPERFCRSKKSLSTGSKRKNISSSSASTSPPTKIPNNSL

SEQ ID NO: 2477 - protein, 232 aa, Rhizopus delemar
MPKLSGDCCSNLVLKISQKVLKINRLFRTSTIGFLTFPKWDFELEKAFQRGKNSPPEDFLEDIENGCEIWGVDPGVATLVTAVDTSGRQRTTSLEEYYHLCGYNDANSIRKKHQEQHKAQFLKISNLSSLKTSNMAEFLKACKERLSLYDDITSYYNEKSWSSKLKFKCYIRKQKGVHEICKRFIHGSAKYDEKATTGVRTSTKKENRYYLSAPIDHEKRSKKTIIAFGDET

SEQ ID NO: 2478 - protein, 555 aa, Rhizopus delemar
MSSPFYCKGLSVAQRKALSHYVYTLKQKQQSTWPSSLERNQCLEETIEKMNALWSRYQTMNCDAEDLYSKPHEFFKWLFYLQQKINEKVNIMEEKPATFASKSYIYRKLKELTFTSILNRRSFKSLQEQVLQSINSKIPLVLGKKLGKLEPHLPALLKFITSIQSRIEDGTFTPAKYTDRRGYRFFSILPVYSFAMKSIQIDAQAFWRLLKQSGIENIPKGVKDKSALSNFYYRLFNFSKMGFRTRKSLSEGKKQFQVRKKKQIDTLLGKQPEDFLEDIENGCEIWGVDPGIATLVTAVDTSGRQRTTSLEEYYHLCGYNDANSIRKKHQEQHKAQFLKISNLSSLKTSNMAEFLKACKERLSLYDDITSYYNEKFWSSKLKFKCYIRKQKGVHEICKRFIHGSAKYDEKATTGVRTSTKKENRYYPSAPIDHEKRSKKTIIAFGDGMFGSSLRGNKSAPVRMIKKALKKYCGKQLDICMVDEYLTSQICNKCKTRNIDNVVTAKSKRRVHTVLKCKQNNCNIIWNRDIMAAHNILDIFLFAAKNKNQRLDVFLR

SEQ ID NO: 2479 - protein, 289 aa, Allomyces macrogynus
MLNNQLHTVPEVGANAAAIAASRRDAAQHNQLLETYVKKSQHTQAPPNQTGKWRSMSKGMMQEKRGRVERSQFMDKFRSARPALRRFNANMPMFKTLDLAALHNACQYVTAWLPVVKPMALSNSLASYEFGAANAERAFFDRLAAPLMLSPDPTRPALVYFGNVGHLSPHPHGVSTPVRKFLCMLVHAARVVLLDEWKTRKTCSLCGSEMPNDACRWGAKRCRTCKRIRARDRNAYLNMVRVAVMDVLAVSFPQHWRDRGHPLCKRAPLVISLGGAQQVGAGGEGGGAA

SEQ ID NO: 2480 - protein, 697 aa, Ectocarpus siliculosus
MDHLSCRLERRLWECRDDEHFWTNIPRAAKKIYEAAGQKTPERALPIIRKFVDQKRGSEKELLRPEWGEAMEHLLSEYRGLFEPLRVKRPPPKDPPEHPKTEEELTGREDFLYNVKARLNDVLRIEAGCRKVDFHLRKRRGEIWSEINERQQSIKSSKTKEGFLKQRHLLQEIPVPPWFDEGIKMSKKDASNLVRDVRNTRKDMWKSMREPGTEDPPKAFSLMPHFSLTRAFVRYDSQSIGTLAKSLDFPGVSENQVTLKTTGVKCSGKAERLWWTGIFDFHSERIVNRRPSTEKNQTQRTRKVLRLNNRYRKGIGVCNKDPWFTDEVLYSAKRDDPSCETPWIVNSISTDGLQVKVCLATLAKTNPLPKGVKELVKKGYASIQDKLRVSKSSKGVFKEAFPLYGTEKSRLSSPDNHIEVVGLDPGQVSVYATVRANITSPKTFEASEFKGSQSSISSREYKHQSLTRFSAKAEVGRRLDHVEYGQAVQAFDSVSLKQPGSSVAYSSVIYCTLRVRVVELLSEERRLQKFARLRARQRTVDGMARDIAFGNTYKQEVRKEQRSSAEPLSPERRKELLKKIRDKKRVVFFGNGQFGHGARGACPRKALIRALGVLCPVVLVDEFRTSKCCCSCGVPLKQVDGSRVFRCSSQMDEGQSCSVKFIDRDTNGSANIGVCGVFQLLGLKRPSFLCRKSSEGK

SEQ ID NO: 2481 - protein, 627 aa, Ectocarpus siliculosus
MEGLLSEFRGLFEPLRVKRPPPKDPPDHPKTEEELTGREDFLYNVKARLNDVLQIEAGCRKVDFHLRKRRGEIWSEVNERQQSIKSSKTKEGFLKQRHLLQEIPVPPWFDEGIEMSKKDASNLVRDVRNTRRDMWKSMKEPGTEHPPKAFSLMPHFSLTRAFVRYDSQSIGTLAKSLDFPGVSENQVTLKTTGVKCAGRAERLWWTGIFDFYSERIVNRRPSTEKNQTQRTRKVLRLNNRYRKGIGVCNKDPWFTDEVLYSAKRDDPSCETPWIVNSISTDGLQVKVCLATLAKTNPLPKGVKELVKKGYASIQDKLRVSKSSKGVFKEAFPLYDTEKSRLSSPDNHIEVVGLDPGQVSVYATVRANITSPETFKASDFKGSQSSISSREYKHQSLTRFSARAEVGRRLDNVEYGQAVQAFDSVSLKQPDSSVAYSSVIYCTLRVRVVELLSEERRLQKFARLRARQRTVDGMARDIAFGNTYRQEVRKEQRSSAEPLSPERRKELLKKIRDKRRVVFFGNGQFGHGARGACPRKALIRALGVLCPVVLVDEFRTSKCCCSCGVPLKQVDGSRVFRCSSQMDEGRSCPVRYIDRDANGSANIGVCGVFQLLGFKRPSFLCRKSSEGK

SEQ ID NO: 2482 - protein, 457 aa, unidentified
  source 1..457: note = [Ashbya] aceris (nom. inval.)
MPIFAAKKRQATLKNKLVLQQGDGLKKESLDIPSWARFKMIDHGQAANDQVLIPQKPSAAGDALKDHWTPKTIRIYPTSKQKEILHLWLTATRHMYNLAVAERIRLGKEAKQNGTKVKMKLKHLREVMPLKKCFDYERDPKLTYLKNVPFLIKDNGLRDFDKDYRTNLAKSKNTLRPFKIHFKKIKDRQSMTVEKKVWGLSRGIFHEVFRKGAFRSTEPLPEQLPHDSRLIREHGKWFLVIPYETHGLMTKKEAVNAVAVDPGVRTFLTTYDSSQRVLEIGEDGYLKLQHLDRRLRSLQSDVHKLRTKGIPLSKEDRKRKIRNRRTVISRLYQRKKNLANDVHRKASHLLASKYNYILIPVLNFHNFKKTNRRVKANLANMKHCLFVQRLKNKASHFENTMVIEVDEEFTTKTCSSCGVRSNIGASKVFKCDNCDATFDRDHNAAKNILLKYLGEIE

SEQ ID NO: 2483 - protein, 723 aa, Moesziomyces aphidis
MAPKDRSLPLIPPYRIPSLPLQANMTSVVLSNIARSKREMPRRGPDRGHHVYPFYDGHLAHKYHALVRPAQANQLSHESINTFEPTEMALSRCWTFAMVTDFAATAGQQKRWPFTHTTVLDCSSDYFPTDQGRLPVEDLGNEVVRAILQAADVGPAFPSAGSGAADPLAPVAGQVPSSAANAPALAPLARQAPSSVVTAEPTPMDLDHAPAPPGPTPSAAAAAPPPRPPPPSTQPTPQSSQTLVNKPEITNTRTAVYRIHAPTELKDRIRTFRRRTRLVKNEAVRLVNMATSTSHEHLNERRLYTLLANNGSAFSSKHPELLRCPTYARRQVILEAVAQRKSIITRYENLPGGRRRPLPSIRPPTKQTDKRRGFSVAFNHDTGRIEALYDVTGTEVTGLKLVMPAVTIGGTRYSEVRARICLRGERQRLRLLELCRWSRANAFKLPREWRVCCGADGRWYLHVLYELVDPKRFNADQQAEKKRRGITVLNGAIKVKSIDPGARTPFTVYTSEGETIDIGGQDDRARLCELRLAADRVQSRINEMKRLNRRPSTRVSREMRKRRFVRPARERSELHKRWRRIMADIKNLVKEVHCRTAHFLALSSDVIVMPRMEVLGMVRRRRSRLKISTKRELLTWSHSAFVNRLAIKCHDIAYDARFPHKAGHPTLLLVQPEAYTSKTCGACGRLNDRLGSQPDFLCPYQDCAYTTGRDHNGAFNMIIKAIR

SEQ ID NO: 2484 - protein, 549 aa, Klebsormidium nitens
MGYVSLSSARHHFGVSGKTLYRWEASGKVTVKRSPGNRRLFLVDDPQPQYEPTRESVVYVRVSSSKQQDDMRRQEKYLLDQHPGSRVVRDIGSGLNFKRKGLLSLLERSEEGLLRRVVVASEDRLCRFGFDLLAWQFKRHGVELLVCDKADKSPEAELAEDVLAVIQVFGCRWNGKRSYNRAVSLMHETSVYNKMRLRNMITPAEVNQDNLWLLETPKDIRAGAVFEAAKNIKAAFTNKARGNIENFKMGYRSRKKEDSCGWTINVPKTALKVKGERCLQVYRDSCPWLFQTLGRIGPLSMDCKIQFDGMRYFLIVPYERHVVSPRREGVIALDPGVRTFQTAYSPDGHCYELGRSCCRRLEALCVHLDRLISLASVTPKTLRRTKWAMGLRIKKLRRRLQSLRDEMHYKAADYLTRTAHIILLPTFETKDMTRRTTRRLRSRTVRNLSLLSHYKFKQRLIAKAAVRGVKVLQVSEHYTSKTCGRCGSIHETLGGRRVFKCPRCGVVLDRDCNGARNVLLRAMREEPPSRGAMQDGATVDMPCLAWTNE

SEQ ID NO: 2485 - protein, 1000 aa, Klebsormidium nitens
MAAEAFLKLDQNALRLIFDKAGVSIATVKEVCKDWLLVGRRICRKLTLTGNEVIPRDGTAGVLSCLQDVKTLVIEKGCFRRGSKLRQSTLKSIVAGVSYRHVQITSPPLKTCPGLVATLHKHLNMDRLKCICLSAPCIPKVLLAFLISQGRCLETILMGGTEDGDLSAALQSILINHSVKNFALNGHTISDMHPLSTALPMLSYLSVEVFGEVDWAGLKGLKELQQLYVAIKGSHPSEGGLFETLAEMKGVTVVDTLALAFAGRDMLEVDIMTGSAGVGTVVTDGLLAATSGTIRHLVIDIANLHMAADAGSPHPITGCTGYDLDKARALAVALRSKRVYSISLRAGRECGSLGDCVCPSDLLEVLMDDGTDGFEGTKRKRPDIALRIQQRRGKETSVVQTGWNVLCQDLVIRDRIEEIIPEVTRIRIETCLLLNLHFIRLLEEGRPIPVIDQNLVGRAMQCTYARKAQADSELQETFDHHYLPLCPNRPVNSCLPRITNILLDLRNQLLCNIKNHVSVLFQSRHKAFMKLLLREAAPGVPFFEEADEDLESCTRLLTTATLWRPNETVRELLPEYPRIYGRIPEAAIECLQDLVDSVRPEVGPLPAAPQSRPHLYMPWMRIISEESSDRELRSFSLVPHASFSAPFIAITPTTWPELQPKTGKRKAPRELRDAFPSIGRLESGGKTFTDRITTDGVSASVYFLVEKRTPPPEDRMVHIHPKQRVVGLDPGKHPDFLTGIALTGDWDGIECQEEIIGLGTKDFYHRAGFKKRTFLMHTWMSRDLDVAAFNENAPSGNTVNLEDFGKRVTSVCANLYVLVRFHTARRVRKLRRRVTIKKQIEVDRACKRITAGKKTVVAFGAAQVWPGRTKRQCGPCESVKRRLSSHHKATVVMTDEFRTSQVCSTCHSDVGKFAVLKRQHVTEDGIPTVTEGGRREDEDEDGGGRTSYKTCHNVRACTNPLCRMVWNRDVNAARNIAWICMSIARGEDRPAEFTRAGVWG

SEQ ID NO: 2486 - protein, 635 aa, Klebsormidium nitens
MDEDADHEDRTPPKHPAKRPDVAERIRLRKDKETSVVQMGWRALCRDMRITDRIEQIIPEVTRIRVETCLLLNLHFIRLLEEGKAIPPIDQNLVGRAMQCTYSKRPPADPDLHETFRAHYLPLCVNRPASSCLPRISDILLDQRNQLLSNVKNHVAVRFEARHRAFVRLLIEEAAQEVPFLAAAKEDLDSCTRILTTATLWRPNESIEQLLPEYPRLYGVIPPEAARRLQALADAIRPHVGPLPAAPAAKPHLYLPWLSRIAREFSDRGRRSFALVPQAAFSAPFLAITPTTWPELLPKAGKRKAPEALLDAFPAIGRLTSLGKSFANRITTDGVSASEYFLVEKKRAPKEEREVRIHPNQRVVGLDPGKSPDFLTGATVRGDWNGTDRQSGELHLGTREFYHRAGFKKRTFLMSRWMARDADVAWFNERAPSGDGLGLEEFGGRVTAVTGSMYALIRFHTARRVRKLRRRVTVQKQREVDRVCAEITGGKRAVVAFGAATVGKGGAKGQCGPCEAVRRRLSSHHGATVVMVEEFRTSRRCSTCLSGVGGFMVSRRRRIIEDGVPTVSRGGEGSYETCHNVRACTNPLCRIVWNRDVNAARNIAWICVSMARGESRPAEFTRAGVWGGATRRISP

SEQ ID NO: 2487 - protein, 736 aa, Klebsormidium nitens
MPSKKPPHIALEHECLAYASKLFKEPTRTREDVKLRAQRNKDTECTVVKTSLNSFCKEAARALPLENVLKEVNKAICEAYILANLHVLRMCELGREVPPLDQSFFYGCLSAVSVAGRQKSPIKDLFFRETVDLYLSSRPQGYKPPDGEHLASGWYQNASLQMSTCTKNSVSVNFYRRFKRYLKHKYSLDGSTCSQKMKNILADTYDGDVPLIVRYRAMLSKAIVGRADTSPHLLMPMQYMFLRYIESHHPLTEEALKKGKQLRLFSLLPTKRGFECSNLKMCTNGLYGLLKRGGIRLPAFGAEFRKLADDYWRQLFEIEKFETSSRKFAGEIFTDGKAVCILLRKPKPKQAARRPPAKDDGEELWGLDPGRRDLFVMVNDEGEKLKCSTREFYHDAKYKLSNARVKGWYEQSPEVLEAIRNMPTKKTSESAKLLNYVQFMLPRLEMLLSFHMRKGFRALKFKRYIFAQKKLHALCKSITRRVGTKTVVGFGDWSNKDSGGVNRGSPSGPVKRLERELGKHCRVVSVDEFRTSKLHFDCKMALHNQFSEKRCKDGAVKTVKVHSVLHCRNSGCNGMTVNRDVNAARNILALLKVQLEGGVRPADPVCWVLTSAAWRYSFSVHSNSLKVCHLHPVIAASLALCTSSNLPKKTGRILPRPAKVCSSFIHHSLSKKPADKMIMPYVAVSIAFSISFAASSPGFKERSSKKQCNPTFSSTLKSQTAKSRLQSAPQWLINTS

SEQ ID NO: 2488 - protein, 262 aa, Parasitella parasitica
MKYYNDNHSENPFLTSRPVTQTTDYRFYPLPRAHKLSSKDINHKCLKYKMSSKLEKAKKNTEEGKQVQQAEDKLSNLAKSLDVNSKDYFVYNMQERKLLRSFYFSTAMCRLRRSIELATIRTKDRAAAAERRFVKGGSNNALVMGIGNAGTGVGSTIKGYDRRGGKWLPKLYTRYAKVAMTDEYMTSQLCLYCYFPIVHAKTSSNKTVLGSARCLNPKCEAFKHGRACNNRDVMSATAIGISAMTKFLYSRSFPPFTKGNHQ

SEQ ID NO: 2489 - protein, 716 aa, Parasitella parasitica
MFKLLLEGKKAEVLKKRQEQSTSSPIQDVICKDCKEPGHYNKQYSTCKLHIEPTADDVGTSKKRKQSYQIKQDKKDAKRPRTDGTRTPTCGNCGKEGHKSSRSPDCPRHILSKQETFLIHLGPNYKAYTRKLPFDQCIQRAYRAILKQRIVSACEYVRNVVIRSQLFVNFYIISLANAGSPIPHAIYQQNFWYSIIQLVRNQRATNSTSLQHGLLDYWNSFKRRHPTIVYDEKIASGVSQCITEACQQLQTTYNNHIVELFESRICKYIFYKTQNTFISMDRSDVAKMVPYVYQHVCRGDPVWPRGSVITEGKKQIVDEVYLPLKNKIPTRVTLATMSKSPNSFVPCLFDIISEYEVEHRNHKPMDDLTPNGNNKILFGNMIKSDGFSVDLLFYRRKRKKNESDVVLNLGDFSHEEVVADYQPLSLDPGRKSLFTAVVGLESTKQIRKSSTKEYYHLTGSTVYSKKLESRKQRSGILPIETNMPTSKTALPDSYHEHISYMLTHLKNLLMFYGRDTARCHFQLYQGRQRAPEMIVNMLTHGTAKYNKSKRKKKGRRNVKRGEKKKKKSNMDKKEYAKLDTTAKKLKWKPLPFREEKEKCPLVIFGDGVFGKDMAKLKNLRCGVVGKLYLTLKKREAAGELIVLTIDEFKTSKTCSSCFDNNLGIVKTPYFKGNSVLACPKCKKVWQRDVNAAINMMTISRAVWMGEERPEVFRRSK

SEQ ID NO: 2490 - protein, 496 aa, Parasitella parasitica
MKKVEEYLTSAKFLERLQEYKEEAYRNCSFELHKEGQIYKVIIEGEKINLEISLRKNAQAVTMEEITDSIHPVNFDLIKMENGAKDEPDEPDVNWLKQKFRYFHTRPKATGSTIYMADFTWAATRAQIKSLHLSCVNFSSMSIFGGNKVNADEGIPLSTVGTTHLSELKFENCLFSSQVLARLLKETFEKVDKLIFEGCVFLSDYPRKLEIKFDHTEVGSLQFWRPCIRDGRSRLFLLSKKIHNQPVIYPQSVQKNALSIHAATAIQGIDPGLVTMASGIYTSPITLINSIKRYQGAPQSAEDDKTNTFKLTARFIDKACLKQYNIHSNHKRVQRRRVTRRIRLKKFYQKHCSRHKTKLNGRSVVTFVGDWSGVSTFVKGHTRRSTKPYYKQLSAPENDHLVVVDEFASTITCNSCFSRNQKQFCRLPSGKIRRVPGAVYCINPQCPRRLNSNATTTNRDRNGAMNTTLVGFSSLISEDGHSLPPFQRSYNLNKQV

SEQ ID NO: 2491 - protein, 388 aa, Parasitella parasitica
MENEPSTVASKGFVYRKLQEIQFVQSLNRKRFRSLQEKVLQSINSSETFVPGKKLSSLTLQQISILQQFIDTVKARIEDRTFFPAKCTDPRDAQALWRLVKQSNVPWYRPGAKTETDLTDAYHDLFRFSKLGFRTRESLSTGILLRNSTDLVLKKTEGYVEKKPSDFINDIQLGCQIFAIDPGIRDITTAVDQSGRERKTSLNEYYHLCGFNTASTQREEHKKQHMNEYQQISTLSSFKTTNLDDFVKACKERFDLYDIIKKYYDSDNRSSKLRFKCYIKKQKCVDEICRRLTFGSSKYGQKSKMAAKKQKTTYVPPSPIDDAKPRKTILAFGNGGQRAQFGKCHNSQVKAKSTCCIAVSETHLQYGMESRHNGSKKHFVFFFSKVRQ

SEQ ID NO: 2492 - protein, 220 aa, Parasitella parasitica
MLRLLKSEANATNCCDIYLSRSIGIQHCSTFEELETVFAQYSQAKNFVRKFYHSKSNAKRKKRYELAKGKYYDRLAAKDRRFTHASTHIMFIGDRRHAVGSPIKGHLRFGGHWKELRHSRYTPTLISNEHNSSQTCLWCFSKLSHPYTALDGQVKMTNGSFICLNAACPQKYVVMSRDRLSALAIGLAGAAQFMLGYTFPCFDPKNTTEKQKLRSYENLI

SEQ ID NO: 2493 - protein, 313 aa, Parasitella parasitica
MVLLPLSPFSYGFKQGCSILKFFDLKQYAHSQNAPIQDNEIHPNFNIFDFTKLKEHGLFQNSFMTDGFSTSFTFLKIVSSNSLPSLTLQDLTPEDLNHCKIWGIGTSVKEVFVAVDDSDRASEVSSNAHHQVLRFSSSEYYKDQGIDVLESGVTSPKTTQMDQISRYIADILDRLERPLTFYGVEFQRLKFLNYMGRQKVHNKLINIFLNGGKKPPRTAEASNDPPAGPSTTRRDKWRKQEFQRTPEDIVPVVCLGDGNFGRRTFRGRPHGLARTLRRLLREAENQGHLISIDINERYTSQDVAVVARKIWTT

SEQ ID NO: 2494 - protein, 1685 aa, Parasitella parasitica
MPGSTSVNAPASLTTSAMSTRSKATTESDESYMDALRSQFEHRIVKSINDCQKNKGSFEELYSRLPSGVVSGAEQAIDAPVNSIVVFMNRLTRSTLKKSIELWKEYLDKNFTSLKDSIVTQEAEGNQEMMEDEEETADDEKAEESTAYRSCSASFTSIIRKYLSKHVRLTFVDTINKTVESVSDYIADFSKQIMEILLLFKHNQITIENGKIQFVPREAQSLASLLPANYLDKDVLVPRPLDRQFLSKRIRKSTLNAARFHSAIVDALERVKDNVYSGLSSHVMKMARNVYVTNFANMWANNTIVNRSLNRILETLLTVYLSPARDQKFKRKREELTGRRKGKNREPPNDNCAVQVHSMPLINKTHNGRRRLFAKEIDRRNYYITQRSDWAVKHWRANLCQQRLNSYANVLQREKEEREARREHEHQQEDVLAEDVSTEDVSKLERKMVLYNFEGDIIRAASVTSQKYVIFSSFFDIDRLKTVCDGSGLQLAHRIHIIPGLQCLRILGVRYYQQPKNEQQEQQRPVAQTSPGSDDKGNDMAAALLEQKAVIRRKLKNAQTALNNYLVGAESASQLKKKWKDENINRAWLYQRIEEAKQRKRHLIRGVVSAKQALSTMNNTVYKLKHDADPSTKNKQRKVFIDLKKPCHHKVEECEINQEVDESKLVFSGTDNGVVNVTETVVFGVDKLKYHLRLYNHFQVLQDENDAFMEEKESGSLSWANKWLIMKQIFHDRSASSIAVRLKSWRQYLLSTPKPKILFANSIAPNQMPKRREGTNWQRASTTAKERRFTHASTPIMFIGDREHAVGSPIKGLLRFGGHWKELRHSRYTSTLITNEHNSSQTCLWCFSKLSHPYTALDGQVKMTNRSFICLNAACPQKYVVMSRDRLSALAIGLAGAAQLMLGYTFPCFDPKNTTEKQAMFSHLALVFSNRKQQTSSPSVGGGTDWVNNSLFFNNNGLINGQDSLIEPMNQATSTSDMTNLYLKQDFLTTNINQNITMPANINSTATKTGTTVSANTNTYNHNNNYTSQQHQEQLSKSYPLIAPFQRNIFQGFDMPNPTPSPSAPAPHPPVQTSPSIATNFHKNDHVQFNTNTFITTPTPASEVAIAAAAAQSAINSQTQRSSNHSSTTAAAAAAAAAATPTTDPPLPGPSRLEHMQTIISKPKIKITGDNVTSANIEEGYIQFVLDNDASYISDGIDSLMYTKRKFQSVPKTGDISYTTWDIYQLVLKLHKQEIKNWSQLVGQLGLHDMSGRPQFAQRVKRWMNRYKIDCYFDYLLGNEYEFNAPEGKYSTCLMIGNYKKRKSDNSSNNISAAAGDSEDEELEEDRTDQEHRIPVLLAGSRKRMRDTSQNSMQMIENAQKFLRLHQSESEEDEEEDETDDQEQGGSDIEENDSDIRSNVNNEDEDVDMAENEEEDEEEEEEDKEDRQEEDEREREEEEELADDEEDELASSTSSPISPPRKIISTPVVAPSPSKPVNAPASPVKSKIASPIASKPTISSHTVRSMSPASSSFTRSSTTTASPSFTNKSAIASPSLMHIPLTTASPANSTFSMSSASPGTIKLPSSPPKQPPPPLSLLSIPPLSSCSNCMVNDAKIVSMGTEITGLKAHIAQLELQLEKQNSQVNKLLRLRDRTERWRKQIISDLARGPQIASENDDDDDDDDDDDDDDEDDGDASNDINNNSGS

SEQ ID NO: 2495 - protein, 284 aa, Parasitella parasitica
MTKIVDKLFFNVFKLSKLCFRNIAELTPNGANNALLGDLICTDGFSVNFLFYKRKTNQDELAVKINQIDLKLEDFDLAEINNEYRPVSLDPGRKSVFTAALDLDCSSHLRCTTSEYYHIRGSTKSSKDQNSKKEAAKREGKEKEEQKQEEKGRGEEVLESSKDEEEKPAPFQESKKISLIVFGAGMFGKDLVKLKGLRCGAVGKLFQTLKRREAKGKLIVTTINEFKTSKTCTLCFSDDLSIIKVNNFKGVGVVCCKKCPKVWQRDINAANNMMAIATSICLKN

SEQ ID NO: 2496 - protein, 424 aa, Parasitella parasitica
MAVKSLPHLYRSKSDSLVPEGILINKDKHELKRRVTFSRVVILNNPTTFILVKEERGLQLEEEEKRRQDKITENDDAEERAAKGQKKGKSRQTTKRKQSLDEKKEKEALSEEKEARRKSEDKYSHYKVVHIALCPGYARKHGVFQTSFMTNGFSTSFTFIKIVAFKSLPSLTLQDLAPEDLNHFKIWEVDPGVKEVFVAVDSSDRAIYNASEVSSNAHHQMLWFSSSEYYVNAGFKKKPPNTRICQLKKDQGIDVLESGVTSPKKTQMDQINRYIADILDRLERLLTFYGVEFQRLKFLNYLDRQKVHNELINIFFKWGTQPPRAAEASSDPPAGPSTTRRNKWRKQEFQRTPEDIVSVVCLGDGNIGRRTFRGRPHGSARTLRRLLHEAENQGHLLSIDINERYASQVCSGCGEKKFGQPEAE

SEQ ID NO: 2497 - protein, 1123 aa, Parasitella parasitica
MTEEESHPESSTERRIMTIKSTIQNIWKSNYIEPLHKLVDITNHLVTHTYFFIKYIFLQEMKNTNEAFDMNAYVNKKFFVEVFLSLIERQVRDGAKTGKSRLGNDVLLFRALINAHKDSYFRLAKYTPPKLTNAQQIALYECEKIHTAYINNIRKHFGNRLRMFLNFCCKIKQRSADIRTRMTKARYSEANIRDVIYRTVTQPSNAIKDQASQKLVPSDSSLSSEHLGQVESFLAMYPAEYNFQKSSIYYDLKANPQSHFKAFYKLTELCQLNNLKNFHCFPLRTSFVPAYMTLDAKIANYHILKNKSMKEDKMTIWGLVCDLQNKAMKDQGTLKFHGTIETDGIAASVLKQNFPTSRKRPGGGEGGSGGEDEDQPQYVESLTMAQHQEIQGRCVLIDPNRRDLLFCMKESSTISRKQLYRHTQVCRNKQLRHFKKLQKKLKPESVRLAELALSETKSSSVDSVAFVNYVTIRAEHEDILYEYYGNETADFTQDFDWDIKHEFNIRNQKNLYWGHFFIAQYKGLFPENCIDTLDDRTNLQLQINYLEVMLSQSHVKKRISQDILDRLSLFASETFIWSQRNHTQEDLKEKLNETEELVNSELKLLNLLPFRKMRFSLKVYSKQNDANLVRSLRSKFGADCVLILGNWSAPTTKFHEPIRNKGLIKMLQKNGFTLFLIDEFKTSSVCPDCEGGLQKFKTIPNPRPYQREKMPKVTCNGLLKCKNHSTPKLWNRDVAAVGKNVSIHFLFILEQMTTEQKGQSTSNIRSGHELNQEKLEVYLLKHVEGFKSPLNISQFQFGQSNPTYLLKDGNQQQYVLRKKPPGALLSSTAHAVEREYRIIHALGTKTDVPVPKVYVLCEDIEVIGTPFYVMEFLAGRIYEDCRMLSIPFEERKQLWFSAIETLAKLHRVDFKAIGLETYGRHSGFYDRQMKSLGKVSQAQAITKDENGNTVGPIPRLDEMFAWFRKNQVKDQATIVHGDFKIDNMIFHPTEPRVIGVLDWELSTIGHPLSDLSNLLQPFYVPASDDASFGMLGFKNSKEPLPVPEANELIQHYCTTLGQPYPIDRWMFAVSFSFFRLAVILQGIAARVARKQASSAQARSYADRFRPVAKMGLDIIDDHPGSKL

SEQ ID NO: 2498 - protein, 368 aa, Parasitella parasitica
MRIKTRQIDSFTPGKTNTNSAASLQKPQATNPIIIDSKPSLHKAEDCELSDRVSLTNAVFAGTDNGLIKTTETVFFDIERFALHLELYRYFHISEDPMDIDDIVPSTCLNLPETHTVGPKQIAQQTGLTSYTSSLVSKKKRTTAGHQVMEAEELLSGCSIHQSTTAEELDRNYQEHEQCRESVRSFYYSNNQCKRRRHLELSKKKAHKRIAAAEREASGFKEGGKALVMFVGDRGHGVGSRIKGHQRFGGTWKQEIHGRYTPTVITNEYNSSQTCLFCFRKLSHPLKTIGDKVKTTNGSFICINDKCPNAFKVVCRDQVSALAIGLAGLASILFGVTFPCFDQQPCHFKRQQFNDLALSFWEQKQQQA

SEQ ID NO: 2499 - protein, 284 aa, Parasitella parasitica
MSQIAEEIKQNQSQMYVLNKKIHGQLVPDSHAPVAADNLMLLLANESTIVQGVDPGIVTTATGVATTVGSLLAAINRFEAISDDKIVPHLMDAHVEFGLTANTVNTAVMSNQDRKKREKSGMQKEQLQRMAVKRRIQEKRVYQRKVAQDKAKMRHKNASFITFIGNWSGSGKISRGTREKDFFVSVDEYKSITTCPSCFQRTTKQAQIRDGKVKSVLGAVVCFNPRCPRRISTRATTSNRDKNGASSIAMIGSPSLVSENGLPLPAFRRTQSNKKVLFNYRVFE

SEQ ID NO: 2500 - protein, 401 aa, Parasitella parasitica
MAKVFSQVQQVFQYLAKLFSEQKLSFKYSFTFKSQYDFQFLGSRASKKKGQDNSCIKTSLVQGTEDDKGSAKFLTAALKALKADLRVRRKEIKNLEKQRQDAGRESRRFEKVNKDLDAALYQKLKDIRKLCNHQYVEVLKLQEQIREARHLPASSTEECIIHIHAATVIQGIDPSLVTMASGIYTSPSTLINSIKRYQGAPQSTEDDKTNTFKLTARFIDKACLKQYNIHSNHKRVQRRRVTGRIRLKKFYQKHCSRHKTKLNGRSAITFVGNWSGVTPENDHLVVVDEFASTITCNSCFSRNQKQFCRLPSGKIRRVPGAVYCINPQCPRRLNSNATTTNRDRNGALNIALVGFSSLISEDGHPLPPFQRSYNSNKFNLSTLKLRQFGDNLKPLKRVQLS

SEQ ID NO: 2501 - protein, 527 aa, Parasitella parasitica
MGLPLDHITVFEMAGLAPAPFAGLVMADFGANVIRIDRSKGFSTDVLTRNKRSIALDLKNPAAIKTLLELFKTADVLLDPFRPGVMEKLGLGPDVLLKQNPRLIYARLSGFGQSGPRSHVAGHDINYLAISGVLSLIGRQGENPFFPVNILADFAGGGLMCVMGILMALIERSKSGKGQIIDANLTAGSSYLATFPYLMQKYGLVWEGERGSNMLDGGAHFYETYRTKDDQFMAVGAIEPQFYAVLLEKLNLSNDDSLPGQLDKEAWPDMKKRFQSIFASKTQHEWCLIFDGSDACVTPVLSYNNANRKADAPSPAPHLSRTPAKKSVCSNDGDPPFLNVGKNSIEVLQEFGIGAEQIEKLLRSNALVDSSDSNKYNKDSSIGEKKQISTTDKWIPSPYKITDLSVKTRIIAYGNASFGTSINEKIPAPTKQIAEAVKKLSKDPKGTYFIHVDEYLTSQTCKKCKQQNLQTSTPPNQSVKYMLRNFCNTVNCDVMASKNIHYILHYMSQYDNKRPLEFARHSDTTKV

SEQ ID NO: 2502 - protein, 289 aa, Parasitella parasitica
MFHRVIDFKKLRFNIDDLTPNGNNKILFGNMFKSDGFSVDLLFYRRERKKMNLTKKLSLIISRFPLILDANHFSQLFTVYSKKLESRKQRSGILPIETNMAASKIASPDSYHEHINYMLTHLNKLLMFAAEIMLVVISNYIKAKGPRNVYVTDFLFKLKWKPLPFREEKEKCPLVIFGDGVFGKDMAKLKNLRCGVVGKLYLTLKKREAAGELIVLTIDEFKTSKTCSSCFDNNLGIVKTPYFKGNSVLACPKCKKVWQRDVNAAINMMTISRAVWMGEERPEVFRHLN

SEQ ID NO: 2503 - protein, 786 aa, Parasitella parasitica
MTEEESHPESSTERRIMTIKSTIQNIWKSNYIEPLHKLVDITNHLVTHTYFFIKYIFLQEMKNTNEAFDMNAYVNKKFFVEVFLSLIERQVRDGAKTGKSRLGNDVVLFRALINAHKDSYFRLAKYTPPKLTNAQQIALYECEKIHTAYINNIRKHFGNRLRMFLNFCCKIKQRSADIRTRMTKARYSEANIRDVIYRTVTQPSNAIKDQVSQKLVPADSSLSSEHLGQVESFLAMYPAEYNFQKSSIYYDLKANPQSHFKAFYKLTELCQLNNLKNFHCFPLRTSFVPAYMTLDAKIANYHILKNKSMKEDKMTIWGLVCDLQNKAMKDQGTLKFHGTIETDGIAASVLKQNFPTSRKRPGGGEGGSGGEDEDQPQYVESLTMAQHQEIQGRCVLIDPNRRDLLFCMKESSTISRKQLYRHTQVCRNKQLRHFKKLQKKLKPESVRLAELALSETKSSSVDSVAFVNYVTIRAEHEDILYEYYGNETADFTQDFDWDIKHEFNIRNQKNLYWGHFFIAQYKGLFPENCIDTLDDRTNLQLQINYLEVMLSQSHVKKRISQDILDRLSLFASETFIWSQRNHTQEDLKEKLNETEELVNSELKLLNLLPFRKMRFSLKVYSKQNDANLVRSLRSKFGADCVLILGNWSAPTTKFHEPIRNKGLIKMLQKNGFTLFLIDEFKTSSVCPDCEGGLQKFKTIPNPRPYQREKMPKVTCNGLLKCKNHSTPKLWNRDVAAVSNFLKILNELRKTGNRPSCFSRSNTETKKRKNNRSPTSASSSKKVKHSA

SEQ ID NO: 2504 - protein, 338 aa, Parasitella parasitica
MFHRVIDFKKLRLNMSDLTPNGNNKILFGNMFKSDGFSVGLLFYRRKRKKNESVVVLNLGDFIHEEVVADYQPISLDPERKSLFTAVVCLESTKQIRKSSTKEYYHLTGSTVYSKKLESRKQRSGILPIETNMPTSKTASPDSYHEHISYMLTHLNKLLMFYGRDTARCHFQLYQCRQRAPEMIVNMLTHGTAKYNKLKRKKKRKKNVKRGEKKKKSNMGEKEYAKLDKTAKKHVQAQKSSMRGGKQTVFDNEKTREAAGELIVLTIDEFKTSKTCSSCFDSNLGIVKTPYFKGNSVLACPKCKKVWQRDVNAAINMMTISRAVWMGEERPEVFTRSK

SEQ ID NO: 2505 - protein, 354 aa, Parasitella parasitica
MNNAIYKLKHDADPSTKNKQRKAFIDLKKPCHHKMEECEIDQEVDESKLVSSGTDNGVVNVTETVAFGVDRLKYHLRLYNHFQVLQDENGTFMEENKDAQFQELPRSFKIRSAEIPQQSGLARLTILGQQVANYEADLSQSIGIQHCSTFGKLETAFDQYSQAKTSVRKFYHSKSNAKKKRRYELAKGKYYDRLAAKERRFTHASTPIMFIGDRGHAVVSPFKGHLRFGGHWKELCHSRYTPTLITNEHNSSQTCLWCFSKLSHPYTALDGQVKMTNGSFICLNAACPQKYVVMSRDRLSALAIGLAGAAQLMLGYTFPCFDPKNTTEKQAMFSHLALVFSNRKQQTSSPSVGG

SEQ ID NO: 2506 - protein, 849 aa, Parasitella parasitica
MEAESDDDFQPPIIRRKRSSRENTQQSGSQKRLKGKDKEIVADDNPILNTTTLDDYDYDDFQPPVVKRPDIGESSSSVNPTFFAAESSTRASHTSNNTPNTPSKRVITIKTTIKGIWKYDYRQPLYDLVHTTNLLVTHTYAFTKYIFLKELATDENFAFNELITKDFFVEVFLSLVSAKAGNSERLKDTTKRYRSLIGKHKDAYFEDAKYTPISLAYAQQIALYECAKVQTAYFNNMKAHFGNRLRALINKLFKKKEKVESLTKEMEANNFSIKEIKQAIRKNVYQPCNQVKLAITKKNMPESGLLDDKSVTQLNEFFSMYAVDYTFQKESIFYDVVANPEKHFKAFYKLAQLSEAYEVKPFACFPLRRTFIPCYMTVDSKILNYHILKNKKVLKMDEKFNAWGRVVNLERKAFKSQGCKKTLHFQGTLETDGVGVSILKQNTDTNRKSVMPKKPLEDIDDETKYIEKLEDAELKQTLGKCVLMDPGRRDLLYCMKETSRADKKEIMIFTKNDRSKCSRHFRRLRKLLQPSQIREAETYLSGFATKSVNMEKFVEYIQARASVKDILYEYYGNETAKSITEFYPESQFDFKVDQKCNLYYENLFVAKIRGFYPQPEHEPNDITLKSHMYHTYLQIMLNQKHISERLNSEKRRKIEDLAKAILEQPHESGHKTTISSLLGKLRLLPFRKMKFSTKLFSDNNDRKLVKNIKKKFGADAVLVLGNWSAPNTKYQDPTRNKGLRRMLKKNGFPLYLIDEFRTSSFCPKCESDLEKFKVIPNPRPHNQEKQPKVLCHGLLRCKNMSCLEQQTSEGNQRLWNRDQAAVLNFRKILNCLRETKQRPPLFSREPSKN

SEQ ID NO: 2507 - protein, 371 aa, Parasitella parasitica
MRAGKTSREFESLHGKRDAGLYQDLRRARHAFNQVYMEMSQIAEEIKQNQSQMYVLNKKVHGQLVPDSHAPVAADNLMLLLANESTIVQGVDPGIVTTATGVATTVGSLFAAINRFEAISDDKIVPHPMDAHIEFGLTANTVNTAVISNQDRKKREKSGMQKKQLQRMAVKRRIREKRFYQRKVAQDKAKTRHENASFITFTGNWSGSGKYVKGHSRRSTRPYYTQLAACEKDFVLSVDEYKSTITCSSCFQRTTKQTQIRDGKVKSIPGAVVCFNPRCQRRISTNATTSNRNRNGATNIAMIGFSSLVSEKGLPLPAFRRIQSNKYALSALFLSHQAHGEDRIPTKGALVLLGDLEFCVLWIRSKNVIHN

SEQ ID NO: 2508 - protein, 310 aa, Parasitella parasitica
MSFSEKANSEDCKWPSSVDKNDENNTLVERTLAFWSKFDVTGARPPTVPNVYARPHHYLKWAHEIQREMSDKQFIQENVPQQTATPGYVYKTYRLSTVSPKKDHKTFIAATQKEIQDKTFKPLKCTDSRGSRTFSLLPLYDCKAKSVKLISKHFGRLSTLVAKQIKISKISINYNKDSSIGEKKQTSTTDKRILSPPKDKTTYVKTRIPAYGNASFGTSMKGKLPAPTKRITEAVKKLSKDLKGTYFIYDDEYLTSQMCNKWKQRKLTNLNAAGSKRKVHAVLKCNSCDTVWNRDVMASKNIYYTMHVTT

SEQ ID NO: 2509 - protein, 298 aa, Parasitella parasitica
MQTNGYYVEFTFKKKLVKKSTSKPLTTADFCEDIKNNQFLIWGVDPGVTDIYTAADSGDASKRERIKRTSCKEYYHICGFNLAKQKRMQHQNNNLQDFDFISKLPILKTSNLIDFVNAAAQRLINYQRTSAYYNYDNCSIGEKKQTSTIDKWILSPPKDKATDSSVKTRIIAYGNASFGTSMKGKLPASSKRITEAVKKLSKDSKGTYLVYVDEYLTSQTCNKCRQQKLTNLNAAGSKRKVHAVLKCNSCDTVWNRDVMASKNIYFIMHYMSQHNNERPPEFARTSDTTESITCMRSP

SEQ ID NO: 2510 - protein, 339 aa, Parasitella parasitica
MPSIVDLYNCFEDNESELKYWKEVVVMELDKNSLVQQQLEGSCRAAINSKKTLQVSNKMNRLRSDDLGKISTLIAATQKKIQDKTFEPLKFTDSRGSRIFSLLPLYDCKAKSIQIDQQALWKIIFDISKLGFKNKQDLNNDKRLFWNLMQTNGYSVEFIFKKKPVKKSTSKPLTAVDFCEDINNNQVLIWGVDPGVTDIYTAAGSGDASKKSIGEKKQTSTTDKWIPPKDKAADSSVKTRILAYGNASFVTSMKGKLPAPTKRITEAVKKLSKDSKGTYFIYVDEHLTSQKCNKCKQRKLTNLNAVGPKRKVHAVLKCNSCDTLWNRDVMASKNIYYTL

SEQ ID NO: 2511 - protein, 367 aa, Parasitella parasitica
MSNSNKKIPYYSDEPSQSPAKSILQKSHDYEEHETPEHKYGALTMKRNYLPENLRAAHEEPDEFALDGQDDELPKTPKKTGIVFPNEPDEWKAIDEKERKIKEDAVQLLPPKIYGQLVPDSHAPVAADNLMLLLANESTIVQGVDPGIVTTAGYWAISDDKIVPLPMDAHVEFGLPANTVITAVMSNQDRNKREKSGMQKKQLQRTAAKRRIREKLFYQRKVAQDKAKTRHENASFITFTGNWSGSGKYVKGHSRSSTRPHYTQLAACEKDFVLSVDEYKSTITCSSCFQRTTKQTQIRDGKVKSIPGVVVCFDPRCPRRISTSATTSNRDRNEATKIAMIGFSSLVSEDGLPLPAFRRTQSNKCLP

SEQ ID NO: 2512 - protein, 347 aa, Parasitella parasitica
MPNQSVQAIKVSATRQGSLKNKGFFIVYDFSCFGYQRSYKRPRKWEEHIQPNASYRWVRFARKKKELEKKAALELEDFSKEEVEQLFLPVAVDPGRKTSFAGTDRRRRKILLKRAAGIENIESQIPTAKTVNMTRTKQYIEYILANIQSSFRFYNFQSAPFRFYDNQGKQRANAEMANILLKDGRKYNKAKRRKTSRNKRRKRRRRKSKNQGEIQAATSNYLPKESIYKKSKFISSGKLPVVVFGDGLKNEENVPMKGQLSGTSGVVLKSLYERLEQLTVAVVMMNEHNASKIVKTAQSCETGTLMQARTWLTYPCLYGMVKEGHQFLKDKENRRRENGLSLPSKSD

SEQ ID NO: 2513 - protein, 490 aa, Parasitella parasitica
MTVEKQLNWDYDALHVNCATLYFLYAKDHNLLKLDGQSVFSSAASIVSDADKTAIFNNFFKSRYLAKLFSEQKLSFKYSFTFKSQYDLQFLGSRASKKKGQDNSCIKTSLVQGTEDDKGSAKFLTAALKALKADLRVRRKEIKNLEKQRQDAGRESRRFEKVNKDLDAALYQKLKDIRKLCNHQYVEVLKLQEQIRDGQSRLFLLNKKIHNQPVIYTQPVQKNALSIHAATAIQGIDPGLVTMASGIYTSPITLINSIKRYQGAPQSAEDDKTNTFKLTARFIDKACLKQYSIHSNHKRVQRRRVTGRIRLKKFYQKHCSRHKTKLNGKSAVTFVGNWSGVGTFVKGHTRRSTKPYYKQLSAPENDHLVVVDEFASTITCNSCFLRNQKQFCRLPSGKIRRVPFAVYCINPQCPRRLNSNATTTNRDRNGAMNIALIGFSSLISEDGHPLPPFQRSYNSNKFNLSTLKLRQFGENLKPLKRGDSLDVLRA

SEQ ID NO: 2514 - protein, 533 aa, Parasitella parasitica
MHEFWQERDPNTLSLQELLAAPSSDVDANSNSNYYILLHCKEDIPEFLILYVPVDKQQTHYKLQTYWSYIRRQHPTIVYSVNLDSGNSHCVTEACVQVATTYSNAIVETFEKRVMSYLYYLIQNICMSMKPDQVKLVVKEYCYQYVFRGEPKWPTSIDPSNKGKLKIRDSCNTLRNLSNESISLKSLSAFLGNYVRWFSYILSIYKEDHRAHSPFDVRQLPLPRRFSITPIPSCRCKFVTVSASALSSFIKGTRPTGYEGQLELLYRVFNFTKLRFRDTKEYYDLTGSTKYTIKLQNLKNEAGITPIKTDIPTAKTCLAAVYHTYAAYMLLHRQALLDFYGFQRAKVRFYLYQGRQKAPQIMVNMLVNGGKKYNRRQRSKKKKRAKQKKRLKKQNRVIPPTTAKPAKFHQYTNKVPLIVFGSGMFGKDSVKLKGNKTGVTDILWRAIKKREKEGDLLAITIDEFKTSRICYRCYEDSLKKVDNVKGVSVLGCENCKTLWQRDVNAAKNMLLISSYIWNDHDRPFMFRRRTTTA

SEQ ID NO: 2515 - protein, 296 aa, Parasitella parasitica
MNSLVKVQERLKTLHFQVALHVNTTGVLITNQQLKTQTYQKFTEPAKRFKEALSRSPDPEILSATFASEEGTYLRTIEHLHPLSTSYPRNYRFQNDSIYYDLFSFETIMDTSLREELVTKFPGAMFVMGDYSAPNVRFQEPIRGKGFRRLLKKSGLRVFLIDENETNKTCPQSPDGTLKSFKSVRNLTPHRSTHTSYSYMSWCTNQSHMNHDLAAGATHRFFNRDSAACLSMIIILKSVRNGTGVLAKYQRVQRQQSAPALQQPHQLIAASTLNTIIYARGNKTCRYVLYVYKFQL

SEQ ID NO: 2516 - protein, 259 aa, Parasitella parasitica
MPGNKANQNQQYHESQFCRYHAIYKLKHDADRSTKNKQRKAFIDLQKPCHHKVEECEIDLEVDESKLVFSGTDNGVFNVTKTVAFGVDRLKYHLRLYNHFQVLQDENDTFMEESKDAQYQELPRSFKIRSAEIRQQSGLASYSTSLNRRKRLTVLGQQVADYEADLSRSIGIQHCSTFEEPETAFAQYSHAKNSVRKLYHSKLNAKRKRRYELAKGKYYDRLAAKERIFNHASTPIMFIGDRGHAVGSLIKGHSRFGGH

SEQ ID NO: 2517 - protein, 376 aa, Parasitella parasitica
MVNQHKSTNNKKDTTNKQREYNDAGMAIEPIDITQDDWRLSILAELNLLPYGENKDIKADQPQMAIMNTRQPIERKQDLIKQKLDMAAARRHQIKEMRLREQLDTALFETIQLLRQQEFERRENHASVVADSLILPLGNESTIVQGIDPEIVATATGIATTAGSLFAAINRFEAISDDKIVPHPMDAHVEFGLTANIVSTAVMSNQDRKKREKSGMQKKQLQRMAVKRRIREKRFHQRKVAQDKAKTRHENASFMTFTGNWSGSGKYIKGRSRRSTRPYYTQLAACEKVFVVSVDEYKSIITCSSCFQRTTKQTQIRDGKVRGSFNPRCSRRISTSNRDRIRATNIAMIGFSSLVSENGPSPTRIPAHTVKQVSTT

SEQ ID NO: 2518 - protein, 350 aa, Parasitella parasitica
MTLVRDAREQLQAAKRAIYEYRHPNTAPATNPIIIDSKPSLHKAEDCELSDRVSLTNAVFAGTDNGLIKTTETVFFDIERFVLHLELYRYFHISEDPMDIDDIVPSTCLNLPETHTVGPKQIAQQTELTSYTSSLVIKKKRTTAGHQVMEAEELLSGCSIHQSTTAEELDRNYQEHEQCRESVRSFYYSNNQRKRRRHLELSKKRAHDRIAAAERKASGFKEGGKALVMFVGDRGHGVGSRIKGHQRGGGTWKQEIHGRDTPTMITNEYNSSHTCLFCFQKLSHPLQTIGDKVKTTNGSFICINDKCPNAFKVVCRDQVSALAIGLAGLASILFGVTFPCFDQQPCRLKR

SEQ ID NO: 2519 - protein, 427 aa, Parasitella parasitica
MVNYSITLLDNYTHITISLETLFHNILIDIKNTVGENQVEAHPLPEHQPLLENCVKSVVVPFYRILRDDLPDQRKLIVKNKLNGAIDHFFDFTCMFLLIVQLTIIDFAMFGNQELNLNTLVSAPFCSLNVSRIQVPPALFGDSTSKSLDLKNLFGLNHLQIISSASFGAVGVKEKTAEDHPTWTSLQKRILKLFLTLNFQVKKETEFREKRLDFQRKVKKLRKARQDKETNEDFDEIGSHDISNRRLYQLKAAIKQLFYNQEPAQEYSMQLRDFYYCKKFNRLRRIVEIKKRTAKDQVTARERSFVAGGRKGAATIVAIGDKGAGVGSTIKGYDRRGGTWHQEKHNCYTTAVTTSENITSQLCVYCYHQISHPELGGSRCLNPSCPAVKRGRAVQTRDVMSAATIGLLAMTKILLNQSVPPLCQKLL

SEQ ID NO: 2520 - protein, 757 aa, Parasitella parasitica
MSSRKTVTEAEVDADLPATEIETFLKRYNRKKDTKSIDHWIKFVEENFQTLKTSSGRDIKRKERATDYQGVNDPIAKVQGKPKSTKEEIRCCTAQMKKIINDRIPKNISKHIQDTLDSTLVEVSDYITGYSVRLLSLILLLKENTFEIEDKSFSLKPITGLAIEDILPRNYEIETTAANVPPPLKRPCLESDTFNKHYKNMFSTDYLQCEMSTLPKLDAYRALRSEASAGQASLVDQELQLEIEAGSIPKAADGLVEMEEEGEIRESADTSRRRLNSLGAVIISMLYDHHGSQIKERHVKDKCSDIQENELRACLTICKLIMPYIPAKKNRYSLPYQLPFVLMANEVLCSSGYSKFKTSLLPLRSPFQLNALKINAPSLCQTVKIGGTLKNILPYQHCEVDKKQEEKKQRVKGSMMPKKRIEEEAARAVLEKRAYLERIQNVKGDLAKARQAHYLLIKYVKDDNTFKENIKDRPVVISKDRYKCMEKVEKMKLDNSVDLEAVAFGGTDNGLVTMSETSRFDMARFKFHLSLHNRFQILDNTEGTTSASDDLEDLDGKKNLSILKTHKIKASQIDHESGAKNLRRNLEKAKKLKRSQDGFTINEIEQKLAIVGAENQDDLKENRKSLKEERFYSLQRRKCLDRFCAAERRYVASQVQRSSILFVGNRGYGVGSSIKGHLKYGATWTPKKHALYITVYETNENNNSQTCLFYYEKLAHPITVIEKEGKKTIKTVNGTFVCSNRRCFTVENGQSHHKFLR

SEQ ID NO: 2521 - protein, 308 aa, Parasitella parasitica
MQIDQQAFWRIVSSCGKTNQEIKDSIPEEKNDETLRSCYSQIFDFSKLSFKNKQDLSNDKRLFWHLMQTNGYSVEFTFKKKPTKKSASKPLTAADFCEDIKNDQVLNWGVDTGVTDIYTAADSGDASKKERIRKQRILSYSNKYNKDSSIGEKKQTSTTDKWIPSPPKDKTTDSSVKTRVFAYGNASFGTSMKCKLPAPTKRITEAVKKLSKDSKGTYFIYVDEYLTSQTCNKCKQRKLTNLNNAESKRKVHVVLKCNSCNTLWNRDVMASKSIYCMMHYMSQHNNERSPKSARPSDTSESIPCMRSP

SEQ ID NO: 2522 - protein, 302 aa, Parasitella parasitica
MGLPLNLSQANAYAQYIYQATVNDSRFPPEWPNVYTNESLNEKLSQRIEYLVDATAEEWNELQTSRTARQRQTTTASLDTTSEASSSAARLNPMSHQTLHRQLPNEENMTWVYHFLSKLPEWNEMKRPQFEAHKVPSKFGDGTFAPLTFLVRYQARLFTIAPCPGYTQKYIRINKNSLGSILKFFDLKQYAHPQNASIQANGIHLNFNIFNFTKLKEDKWIKQEFQRTPEDIVPVVCLGDGNFGRRTFRGRPHGLARTLRRLLHEAKNQGHLLSIDINERYTSQVCSGCGEKKLDNLTLSSS

SEQ ID NO: 2523 - protein, 487 aa, Parasitella parasitica
MQSSFGKKAVLIVGDWSAPNARFHEPTRNKGLLRYLKKSGFPVYMVDEYHTSSCCPECFTIGLENFKEVPNPRPFKREKTPTVLCHGLLRCKNRSCLDNDRRRVINRDTAAVLNFRHILKSLREDGERPRRFERATKKRENIIAMVIYCRYQTSSTYKFIKYFKEKPLSDWEEEDFIRFYDGNNVSKTKRSGLQACFLYCLNCIILQDQDVPDDIKEILKMKRKDIRSSPINTPQTLYVGCKVSNSVNTGTQVTINTNQQSPAPAQTQASPPAQTQASPPAQTHESPPAQTQASPPAQTQTSSSQTQAVPRRKRSVKDANTNIENWNISSPSESSTWLINNIDVCQTFYSYQNSVKEKFVEMQGYLEIENSLYDLLALSGILFLQKDNQHQGLIKNHFSTEDLKMIYKAIKSEITSGKTIFNQNLYFSIKEAIDKFEEDEDELDFSINLLALCKTADQYEARAIKAIVYLFPELISVKNRTMDVFQN

SEQ ID NO: 2524 - protein, 280 aa, Parasitella parasitica
MHEAPPVSIHYETIRDGQSRLFLLNKKIHNQPVIYTQPVQKNALSIHAATAIQGIDPGLVTMASGIYTSPITLINSIKRYQGAPQSAEDDKTNTFKLTARFIDKACLKQYNIHSNHKRVQRRRVTGRIRLKKFYQKHCSRHKTKLNRRSVVTFVGNWSGVSKFVEGHERRSTGPYYRQLSAPKNGHLVVVDEFASTITCNSCFSRNQKQFCRLPNGKIRRVPGAVYCINPQCLRRLNSNAITTKRDRNGAMNIALVGFCSLIFEDGHLLPPFQRLYNSNK

SEQ ID NO: 2525 - protein, 347 aa, Parasitella parasitica
MSNDKRLFWNLMQTNGYSVEFTLKKKPAKKSTSKPLAAADYGDASKKERIRRTSCKEYFHMCGFNLAKQKRMQHQNNNQQDFDFISKLPTLKTSNLINFTRILAYGNASFGTWKGKLPAPTKRITEAVKKLSKDLKGTYFIYVDEYLTSQTCNKCKQRKLTNLNAAGTKQYNLYAIPMTVSHSSLSKNLVDKVLVKFNEGAATTDMYEDFFGYRKQTRQYLGHNFLEILWLSNAAGRKILIEQRITLKWKTNVRFSYNGARCQPSVPIASNRIPIVPSVRIICYHCNNRGHVSKKYDQNNAESVPANVRAVKRASAMLRDRKGAKTTPPSSKRADSERCDRPGLPHD

SEQ ID NO: 2526 - protein, 791 aa, Parasitella parasitica
MMYKAVILSKIRSAKEQRLSAAASNEESNTLEDAFTAALCKDCGDRGHFSKKFYKCKLYSSASADDVGTAGKKRKQTQSIRDAKRRAKRSGVASNNESNSICKRCQKSGHKSSRSAECEYHIKNKQETMLDNLGPNYQAFTRKLPFDTCVKNHYAQNLKARIISASRDIRNVVFRAQIFTNYYIMLRAEQPDNNEVPHCIFRQQYWYSICQLVNAKRVTNSTNLPENMIAVWNVFRSTYSSIIYNQALLSGTSQCLAEACTELATCYQNNFVEYFESRLLFFIYYSLQNIFKSMDSGTLRNIAKTYCYQYICRGEPIWPNTIVLPPGLTEEIFRNRVDQECEQIRALINQRVTLATLSYAPEIVYKCLKHILDKYEDEHFRHCPFDVRRLPLPRLFSILPNPSVHWRYVTISANALSAFVTIPFPRGYSNQLNLFQKVFNFNALRIDDLEPNGENKTLFGNIVRSDGFCVDFLFYRRATTENEDSALIENHDLGVDDFSIEEVSQLYRPSFLDPGRKCVYTATTGLNTTEHEIRRCSIKEYYHFTGSTTYSKRLEQMKNEAGIKAIESVTPTAKTARSIKFGRFLDHMLINMDRLFAFYNFKSAKNRFNLYQGRQRAKEMMVNLLLHGGAKYNRKKRFQKKKNKKRQQRKNRQQQYRRIGKWKPSKFAAEDKRKVPLIVFGNGMFNKDIVKLKGIRCGAVGILWRCLKKREAAGDLLVVPIDEYLTSQVCSSCQTRTLEDHGDVKGKSVLVCKTCNTLWQRDVNAAKNMMSISLSVWNGQGRPQIFRRSNA

SEQ ID NO: 2527 - protein, 255 aa, Parasitella parasitica
MSMDDLTTNGNNKILFGNTTVYSRKLESRKQRSGILPIETNMPTSKTASPDSYHEHISYMLTHLNKLLMFYGGATARCHGTAKYNKSKRKKRQRKNVKRGEKKKKKSNMDKKEYAKLDTTAKKLKWKPLPFREEKENCPLVIFGDGVFGKDMVKLKNLRCGVVGKLYLTLKKREAAGELIVLTIDEFKTSKTCSSCFDNNLGIVKTPYFKGNSVLACPKCKNVWQRDVNAAINTMTISRAVWMGEERPEVYRRSK

SEQ ID NO: 2528 - protein, 291 aa, Mucor ambiguus
MWSDSSIVNKLLKRLLRCLLCVHLRPDEDESQRAWLVAERKAGRDEPSEKIPKTGVPVNDICFARKIRNGRRKIITSEAKKQQKYLRKGKWVKKEHVASRKKMPLTMWKRHWPKMRYSQKGHKISPSEELDSYFSKSDKVCSNRRPCQSLVLSCYHSSSQCQFELRKNRYLDRIASYERKSSSVRHPIMFVGGRGHGYGFSIKGHLRGHWKEERHGRYTPTVTTDEYNSSQTCLFCFGKLSHPTYAKDDAVKIIRGIFLCMNTRCPNNFRFLCRDQVSALAIGLTGVAQHC

SEQ ID NO: 2529 - protein, 332 aa, Mucor ambiguus
MKIIDTLKVSKQSTLNTKEDSCFVKTELVNLNVNLVSQETCYGDDEESESKDANASHSKDPEDNLIPKTFRITSKFIDRGSGQQKQLHKLEKAKKAPNLRQEVLSFEAMKSDYPMFSAKTPDEVEEFEILHESQKQDRRDFYYSNSRCRGQPRYEFQRRRFINKLCVGERNHVSKKNPVLFVGDRGYGINSQINGHLRCGGTWKAKIHAQYCPVLTTNEHNTSQTCVFCFSKTSHPLKIVSRKNKQYLHSVNGTPICMNPDCVLRSRGETHKGRNSLSSLAIGLAGLSAVAIGQSIPCFDPTISKSKADNYKSPAKAFLNRNTTGSVSSLKV

SEQ ID NO: 2530 - protein, 449 aa, Gonapodya prolifera
MPILSMIENPISKSSWDENCQLWPHYLEALRFLLSDLEARTSILVAEGKSYPRPPRKFSLAPIYGFKPHHIMLDERGCRDLHSLHVQLGNRRIPAEELHIRQIFNVRAVENLSEAKQFAGTLTTNGLKVCIQKIMRIPRVDNSSGDGPSFESVELNDNTIVVAMDPNKPGGTVAGGPVSESGVKPSYCFDVSRNEYYHSTGLRASARRLKRYLKTGGWEAMQSSLPTAKTTNYRDALKRLEQFSLVARELLVAYRDSSCTQDNWNFSVARNRVLHRFARRISHLGQRDEKGQDFDFVRNSNRVRRRRKSSHREPVQEPERRDIVFVTSDLSAPERQGISGTTMLLKLLCSILHKGDGNRSYVRAVVNVGEDRTSQECNNCHHHGVPTVLTDVHIDGKKIWRIKRCAQCQTYWNRDICAALNIRSVWLFGNSHNGMRPGNFVRGYRGHPA

SEQ ID NO: 2531 - protein, 914 aa, Gonapodya prolifera
MTESSGPQRLRLRDFEVVVLSCGNQHQKLREDELLSKITQIPQVQARSGWIGGLYKSEIPIVRGGVESHPELALPILYKIYRYFETLPEAQWPIGKNGLPKEPRKSSLLPLKHGFTISHMKMCNLSLRGLLVRSGVSGLPSQDKWIKEGHAKSWWRKLFHISKYEKGTRKFAGEIEIDGKAVSVTLRCPAPDKVNPLTNKVKPKKQLLAEEKLKRILPEAVSVSSNTIWGLDPGRSDLFCATNNKGDSIHCHTAEFREDAYFKKSNQKHTTWTRARDDISRAYADMPRKKTVLLDQLESYGQFALARVDDLLRFSIQNPYRQLRFKRFIFAQKKLAKLAKQFAQEPDVLVGFGDWSNQDSGIIKSCPSGPVLKVMKKQVSHKHVRRFDKETGSKEIRFAKVKIHIFLRLLHPSDILSAKRNKTIYQFPDVADGCGAWMKIQANSSSDQATTMLQPEQSFSNSAVRSNSLSPETVTSPQTANAEVSGAPHVDSRGSTTWAISLRSVIILLVLINIASVGVVTVWLGIDTNSKSISKSSDEASRSIQALGKARLKDASGTIVTALPYLEPNQISGTSGTNFNQYHFLVRRVRCEVINYLLPPETPTATTSGASIGMYPNSSSRSFLNHMTLAKDSIIGGPGQATSLYLTVFNNATCQQMCRTSNTQGRVYGYWWDETTLKVANPTPMINTTIPLGTENFVAVPKGSAVLSDIRVVFNLPIQIMYLSVYSPSGSFIATSSITFLLRDFCSLLDTVKASLTPNTLTYILTTKQQGQVVGISGLGNSTMQLQALFGGSKIKTIFEYPLEQYPTLNTSAALLYQYSGNNLSTTIEDASFEMDNFMFHVTTVQIYNFRYLVVVGAPPSDFVGDTALLAETLRRDGARSSLIVIIAAIVLALVMSGISVVSVWVFVSSPLLV

SEQ ID NO: 2532 - protein, 845 aa, Gonapodya prolifera
MLNPAHGVPAHAPPQPPQAGQAGPPQQAQGAAQGQLPGQQVAQQAQPHGVGMFRAANVDFGGGDQGTEFTITSSLHSFFRKQYWFLERDFEDVCSQVGRLTVEAGLAHNGYIAHVLEEQFNLFWQWDLEAWDGFVAAQQHAVANNPLGPPAPWLPGQPPGFQALPPPQPPLPPAQLAALQATRAAYIAGKLAQFAPLAPNVQNMVQMGIMPIPFPSEVRTLIQPNVNFNAQLIAEVAQGVSRAPFHPPRPPNPQGHPPPPPINHTIIPNNPANLSVANYLRLYYRPQRVLQPYARVQGLGAIVSQVIRQMQTNVRNMISAKNVHIHLKGLFRLKLWPRLSSLNGGVGRRRLNITKRTAAGAAGFIFGLVYRRDPFLMPNKLDDFVQRAINRQVHGHATLQNNVDRYCREVYDWGMAMFGQVDLRPASIENEWDQWYPRLYYIQRCFDESPGVRGVFKKFSLAPHPDNKLPLILVTTQGLHEILMLSKTLRNHGALPQAEQDRIHNLNIPTWNAIRTAPNAAQLGIALWRRFTKFESFETQNHKFAASIRVDGVNTHLNMRKPTRSGIPVTLENYLQRPADDRDLRGKLVSSCDPNRGKTTYHATVDVPGNIVNKRPHLRPSDLNGWPVDYDRGFTTNEYYHRAGFDWEQKLREKCMNADPHIQYYNKHVPSNHTVDHARLLIDLNFRLRHLSRLLLFYGARRWRMMKLKARSTKQRALAALVQKFTRGRDPAECIIAWGAAEFDHASRGHRACPYKLIRKVFASAGVTVILVDEKNTSRVCSKCHQWFPKERGTKQKLWHVRSCTRRNGGCGTTWDRDRNAARNILFLFFFANARNTVARPGLFA

SEQ ID NO: 2533 - protein, 235 aa, Gonapodya prolifera
MEEREEEGFGGRGGRRGERQGGGLGLWPGNSPDGSAWWDAGLCPRYRPSLDLEKDLCRPPNLPQGKFRTYEQSQRVIRETIRRHVFDPIVEMLREGIEVTRVKLVYGGANFSSTSRGHAPSVDRRFIGKDGRQIVRVVEVIFELLEEYHSSALCSCCHGYAEPVTVTNFELHDTVKRRRRPWGLKKCTRCGIVFNRDHNAVRNMEYIYLFRQMTGHRPPGYRVPPSGDISWRSVA

SEQ ID NO: 2534 - protein, 709 aa, Nothophytophthora sp.
MVTKRPRSPTEDDPGPHWEVVPDSRESGEELARSSTETTRRRPDIVTASTGTQEHEESRSSGPWVAIKHRLRDAIGLLRALFFIQIEDERVCLRLRCILQYHTRTLSWMALLRSATVLETTLPGPLPDLQACMPQTLEEDVNVSDLLAVLSTILAHILRGDVSEYRSLVDKLAPGRLLMLERLLGTVYTDELSRGGTLRDVDGFRSWFTVRKRTPEQPINRSLENLQEFPHVPDWIVTERDHTVRREAFAMKSERDQETTELIALQMNLTQERAERQDHSAWSTDDEQGYEREMEEIKVRNKTLLAEKKLLFLRTRKYCLFPTRSQQKTLRQFMGTCRWTYNQAVAHYRKTNDFNAINLTAHYVTKNTRKTLAYLQSMGRPPEWAHDTPASMRGNVIRTFQTNVKSVLSNVTNGSIKKFKIQFSSKKRSPDFTFSEGGRYAKIKQNGSEFYLSISKLKNIRVKVDVLKEISSEIDILYSNGFWYVAIPQTVEPDPYEYRKSCIALDPGMKAFMTGMDLEGNVLEFGRGNKTRLKAVRGRLDAAQSAMATFKNQKGKSKRWQYRAYVRTKRTFLSCTAKLKNLVKDLHFKTCAYLIEHYDVILLPIFKTKDMVKKSSARTHGFNTSILSLNHFKFRQLLQAKCEVRGKSTVVCSEMYTSRTCGQCYRLHVKLGSNDVFACPRCDYRAGRDANAALNIMRYVCAGSLQVFI

SEQ ID NO: 2535 - protein, 648 aa, Nothophytophthora sp.
MKQIQLEAWHLVNLHALRCLENGLPLPDFSDETFFDHCYSGVSTTRQTSLIAQKDPDLWETIKIYQSQRERTGLIEVDHLTGYSELKAELRAQMVVNAGVMIREHFRQRLKLYVGITFGDLGRSLTKKQKKKKADLVKAIMHACYSADETDVAEAEQMRDVLAPDGTEWSEQWIPWPNHIAKKGLAFYVRLLWEFQSVIEQRMAATPNEKGVRAFSLFPVSTTFSRAHIKINGATLAGFYRRIQQRVRDYHWDLTSVGLSVSSFSKNRWSVMRHAFDVAGFETRTPECPLSKPEFALLPVEEKYEYASHLFANSVTTDGYSASVLLFRPQTEEERAEKNSREARVVPPGYVPNVMIGLDPGMRAICTAVREDFRSDDQRHRRRRRSRRKRKKDRPRWIRTPKAPRHRNGRDIVSVTTREYRHLAGFTRFRAWNEGQRKRHPDYQAILHGMPSFKTASYAKYLVRLEYFWRHVQFLMQFCVDRPFLKWKFFRQRMARVAVDEIARRIVPTVSRQTCVAYGDWGRRKGIKGHAPSPVKGLKEALRKRATVVSMDEFRTSKLCSQCHQTLSSVRYSVDTRLPKRKKRKGVVLARNRAEVEFKNKKCYAVLRCDHKQCEARYWDRDVNAAINMLELLKSEVLGLGRMEPFTR

SEQ ID NO: 2536 - protein, 1017 aa, Nothophytophthora sp.
NVRRDFECMLKTDGYAVSVILSKVKAVATGWDVPTLDVSLAGKRVVGVDPGRTDLANCAWMDEAGEPVFSSYSNKEYQQKIGLKKAGAKRRLWMSRANLQEAMTQLPSAKTPSTFTMMAHLEQLFLILNRVLALNGLRRVRGLRFSQHCLRQRVMYDICDRITSPGAAVEDDRPVVVAFGAGMFSSCSRGHCPGPVKGVRRALRERGVEMYDVNEDYTSQLCNCCHGKVVPMYSQGGSMAIHGVRRCLSATCMRKTLNRDVNAALNILYIFTVETLQGDRPRVFTRRYQTELARAAVHSDTTPGHQIKAQFPRTRSGRVDDMELAKEEPAEVELAPADGRAKACATCFQTFATDDELRLHESSAHSSAQPPPPPDAPEPARAEDEKSGDSSDQKPSKTCPKCGKTFATSTNLRTHLSNVSPCVQSGDPAPPQELQMSGKTCPKCGKKFASSQGLRGHLNRVNPCDGERKVPRVVLTKDQAAKRRCDKCGKTFASAQSLRFHMNRVKPCDQEKVVPTTDAGQKEEERKARARFHARKTYLKRLGRLDELGEFQSVIHPRAGGAGGVIPAKLVPEDRERKRSAADEGSSAGNATKRPRSEKNGLVDDIHMQSIPDEAKHEPPVPRQGADTVPPTHGRFVRRPNRGHGGDLLAGGCSCPPCVRRWARKLMARMQQLEDEVVTLRRQAAKGGGRDGTKVPTASPVRNIAATQPPPLTQQTASNAERVEAQSSSSQAGRSLPTKDKPERVVEVAAALSPATSLDAKQDQHLGQKDNVDATTGVSSPSMRGEALSDNKKPDPDPATTIGSGQDQEASHTQAMGDVKKNLTDVYDHLNAQILLNERAVEDSISRVRLLMDADKATAVEFQSQIDELQVSINVEKGKRDVAVAALVAHEWRTRRDEFEALAGPMAARSMPGAMQTFHEKCAEIATQMAQKDQLLAELAQTIEAVRGATSPIGNHGDRRSRYEELGGLSSKIFAEQAAKEVLNHERGEVFMCLVKSSRQIWSLVRSKLAEMGNTSP

SEQ ID NO: 2537 - protein, 468 aa, Nothophytophthora sp.
MEMPGARGPKNDELLLSRDVYNSFRDPTTPRASRQFIHRGWVHNAANQMATMAQNAVSRNFYRRFHKFLKRKYGVDGRDAYSLLERILANAYDGQDTVVLEWRARIPRSATGAPKMTAHLLVPLTYRFLQDIEERNRISQGDPELRQVRSFTVLPTKRGFECSHMKMCKLGLRALLQRAGTRVPPEGPKWNAVEKTYWRRLFNIKKFETANRKFAGQIVTDGKAVSIVMRRPKREPDPEQARVFSMSEFDFYEEARYTKAKQKIKGWQDRNPRVLEAIRNMPTKKSASLEMLGYYIRFMTKRMDLLLGFARRKPFRRLRLRSFIFMKRKLRQLCLVLARDGERTVVGFGDWSNQDVAGIIKKSPAGPVKRFERELAHYCTVISIAEFRTSKVHFDCECELKNQYSQRQCSDGEIRTQKVYSVLHCSSNGCRGITVNRDVNASRNMLRLLQCKLNGVDRPVAYARQART

SEQ ID NO: 2538 - protein, 693 aa, Nothophytophthora sp.
MRLKVRTPQLLLRRLIGARKQACTMESIMDGVTEPNLSIRVDSNAAGTGTIFGSITDEHLVLLFVLLRANPSRRPASGSSFSFFAMSGKRTKVDPPDKKTKRQCSDVGQRKARNKNTECSIVKCSLKSFCQKSASVLPWDSVLKDTNKAVAEAYILANLRVVRLCEAGRPIPALDQEFYYQCLSAVSVGLTARKKVDDEDLRQSVELYKSWRDPNVSFASSAHISYGWFQNASSQMATNASNHVVVNFYRRIQKYVKQRVGITGKERYELLRDVLAPTYAGSDERVLGFRRWIPRNAEGYIDKEKPHLILPVTYRFLQFIEQENYRKREGPRYEQLRSFSLLPMKRGFECSHFKMCKLGLYALLRRAGIQIPEIKRKEGQPCWNDVVDEWWHRLFKITKCETENRKFAGEISTDGKAVSIVLRKPKLPEPEKSPSLKKDPKQYNFGEVWGLDPGRRDLFVATNNFGETIACSTREFYEDAKYTSSNMTTRYWIDHNPKILEAIRNMPSPKTCSLQKLEAYVRFLSPRLDRLLDFRMAKPFRKLKFRRYIFMKNKLRELCAKLTARAGANTLIGFGDWSATDYGGFIKKCPTGPVKKLEKELKRYCIVDSVPEFRTSKLHADCRRELTYQYALRTCKDGIVRRVKVYSVLHYPHNGCFGMTVNRDQNASKNILLLTLPHFLGQDRHPACCRQGT

SEQ ID NO: 2539 - protein, 210 aa, Phytophthora megakarya
MTCRTYYRAQVRDRDARSVLKKKFEAVDEMKSMLARMTNARKARRSTPHDRTKTSRSSEHRLCYRLRRRICFTSRKATRAVSDMHQNLSSWLAMIFKQVLLPSFHTSEMARWYFLEAAGDAIPETAAVRKRQIRRPTARAMLAQAHYRFKMLLKYKMERAGGQLVECEEEYTSKTCSGRGAIKTPHCLALFDRDVNAARNIFHKNMGLLL

SEQ ID NO: 2540 - protein, 606 aa, Bifiguratus adelaidae
MMEAASRAQASTLGKRKPYSGDPDAGPPGDADADGDAVEARDRIMVVKGSITGIGWRNDLIPVLQEFVTTVHTTTFHAFSFAKYIFMAELDEHPEFDMAPWINKDFISEIWLSLVQYQEGRVRERTARFRGLIRRHLQGYLQITGYVKIPLQFAQQSALIEGKKMYVAYTNIKMRFGQHLQRVINVLLDINNRKQQMNRELIDGGLSAEEAKDIVRQAIILPATQFKEAISHRRVVLPELLRSLPIFVEAYNTLQPVLEAYNTGYQFRRDNIYYDVKASPVDHFRAFHQLARLLSFEKCAYSIDSKILSQNILGSRWMNGTEKSQGVNGQLQFRGTIQTDGVGVSIIKNTRDSNEAERATRAPVIEPDVPYVTTLGHRQHQQILGRCVTVDPGRRDLIYCVHETSTAQTPRKFRFTRNCEEKMRKTNKYAGIRQAVKDANPAIQEAETILSRVLSQTIHIDNFNNFLQTRGQQAAVLTAFYAESRTSHVNSNFLFRKLRMSSYINRVQADQKIVRALREKFENAVLIMGNWSAPHTRYHEPIRGVGMRKMLKKHDFDVFKTSRCCPTCQHDSSGNVQANPKSSSISTTANAHRDLSWPSQMYQSNL

SEQ ID NO: 2541 - protein, 260 aa, Dunaliella salina
MIPTYIKNRIKFHTRKNRGIQEPNYDCKLQMDSLGRFYLHIPCHVEACENQASSNRHEWCSLDPGVRTLFTLYCPTKGVSYKLADGDISRVFRLCVYLDKLISKTTKINGNYNQKRKRRKKHYRSIIKLRNRIKNLVTEVHCKVVLLLVKHFKNIVLPTFDVSQMVLKNGKMRKIGSKTARQMMSWRFYDLKMRLLNKAKLYGCNVILETEEWTSKTCTHCQFVKHNLGGSKIYNCDDCKLKADRDVCGARNIFMKSIKV

SEQ ID NO: 2542 - protein, 408 aa, Dunaliella salina
MAGENTLPKKGGRAKKKPKANKCRKFKISTSLEVQSQLRRWFGSTRTTYNWALECIKNKPNVHKCTNAIALRKRFINACNIPKNKAFLLDTPKHVRDTAIKDLTDAYKSNFAKKRTDPLHAFDMKFRSKKETQSITIPSNVIKGFFLENQKQNGEFNMYPTFLKNKIKFHVRKNTKCIPKIENDCKLILDQLGHFYLAIPFYEKACENQASRNQKEWCAIDPGVRTMLTIYSPTLGECYKIGDKGITKLFRLCKHLDKLISKRVRKKRKAIIKLRKRIRDLVTEVHCKSISFLLENFKHIIIPPFRVSQMVRKSERKLSKKSVRNMLTWRHYEFKQRLKEKALQCGVNVYERGEEYTSKTCTHCMNIKEDLGGSKVYSCNHCHLKADRDVCGARNIFIKNALECGRKL

SEQ ID NO: 2543 - protein, 496 aa, Chlamydomonas eustigma
MAVSTMLPDGRYLYISLRDRDRSLRTELVAPRIGLAEDGCYLECVGDDRCCEGARVRLDGAVIPPYHSVDVPAWLVSGVVTTSSEYVTGYLPMLAACVRRSFKLVGDSLDHDVPDIDVRLRVRADLERAVVDVTANGIVVDTCELVRKSGIDLTHRMTALIYNALVTSVYAYGALKTLRTDICDALGEDINSPKLVCLCCSRVASKTTGPGFSKCVRCLQAWYCEGDCLNRHRARCTTGNACLDLEIRDLLINGRINIYYMVGLYGGNPAVMKLTRKQYYTESGATSARYKTERWNRGIQTHLDALSTASTKGVSWTAHEWCLIERGRHQEALWSEYLKPRWARLRLSLYGGKKRVFANFFNRLSVRLPFPAGGRLVIAYGNAKFAPGGPGEQSVPTTRAYKECASRVATYSTDEFRTSKVHCRDDSTLQLLRGSDRRFSLRGLLYNPDLNKFVSRDLNAALNIRRCLVGPKPAILCREGVTQRLEQHIVKVLRRR

SEQ ID NO: 2544 - protein, 296 aa, Coemansia reversa
MICLLEELQATKGNCVLIDPGRGNLIYCMHKRSTADNPCLYCYSAQTTHKTIDPQRFRRYVEMRNCISPVLRGFYENHQTIESLTHQIHKEHGGFKLHRYPLHWKLQLSVYINQQQADARLARNLREKFGAYPVLVLVIGNWSAPNVRFHAPIRSVGLRDMLQAYRFKVYLIDEYCTMVACPVCYHQLEKFCWLDKPRPWQQKNHPRVLCHGLLRFTSERCSEDNMPNRIWNRDLAAVINMRAILHSLRNDNGIPRAFHRGNNNALAAPQPRHPRTSTSSVSGITNSGSASTSAAF

SEQ ID NO: 2545 - protein, 229 aa, Coemansia reversa
MSVSHLAPATNFYIDKQRNKKRRLGHFADIREKVKKNYPGNWIHAAEELLQNMCCSTVNPEKYKAYIKARSEVWELLDNFYNETVTTYAKSHPLHQKLHLSAYWNKVRANDRFAKGLHKKFGRDAVLIIGNWPAGMVRFHEPIRGKGWRDVLRRHGFTVYLLDEYKTSSLCPACGSGLEKFHKIPNPRPWQRVNKKDVLCNGLLRCKNKKLSEVCCEIQGFDSCAYVES

SEQ ID NO: 2546 - protein, 207 aa, Coemansia reversa
MRCKWSSLSQQKKRCVLIDPGRGDLLYCMSEMSTSADRCIYRYSCKNKQKELRTGHYKAICERVKDKYRDEFVKGAEIALSGTSCAPLNIEDFIEYLKMRVQVAPGLCDFYEKYMTDPTVQLQRRESGNVINSVKALRNPVTTHPLHCKLRLSAYINQQQLDKRLVRNICKKFSRNGKDPVLVMGNWSAPMTCFHEMIKGVGMKRML

SEQ ID NO: 2547 - protein, 827 aa, Coemansia reversa
MGNVQSSLPSYYNADPTNEAYKHSLSDYVDLASAAIGARVIRASNERFGAASNLIKPQEPGTADSGKVDAWVTRRHNPETDWAVVRLGSAGTIAGFDIDTRGLDGEQASHVSIQGCLTSDKAAVDSHGNIDDAEWEELLPEVEISANSHHLLALWRATKTPYNFVRITLHPDGGVSRLRILGTVTADLDTDGELDLALVTAGARVVQVSDEKLGAKENLILPGRATSAVRETQGWKTRRSQSDEHSDWAIVRLAEPGFLTRIELDTLFYDGDQPVSAAVQACYTELDSPDRDRECFWYQIVPRTELNGNKLHKIDVTLNDVPFSHIKLLIYPDGGIGRLRAFGQRVKEIEEEAAREKAEAAAEAALVAELAADADSFEQTEILVTETKVKTSTAEKKDARSKTSAAAAAARVETSGDEKDDGSQRKKTKKTEKPASRKKSKSSKTSHDTKEAVEDEDSDKFSSRAGELIQSLTSPLPPRKRGRPRSRAEDETDDGSINTMDSRAKRSHRKTKSRTTAAAQRYVEMRNLVSPVFRNFYENYQTIESSAHQIHKGHGGFKLCRYLLHRKLRLFHAPIRGVSLRDMLRAHVFKVYHIDEYRTSVTCPVCYHRLEKFRWVDNPHPWQRRNHPRVLCYGLLHFTSEKYSKDVLVPIEQSAENHKANIDSVVNPMHTLKTKARAKAKAKARVKKMLRDSPAKNMPNRIWNRDLAAVINMWAILHSLRDDNGIPRAFQHGNNNALAAPQSRCPRTSTSSVSAITNSGSTSTPAASQARHTRKSAWSMPETAGTSATSASVIVGPSNLQVEYLASDSDDPLIKRRRLDKGKEPEC

SEQ ID NO: 2548 - protein, 626 aa, Tetrabaena socialis
MVAAIRSRVIAASRRAVLASIALNLLVREVFHSQHDATIDIRDTTLLRQLMLGTEGANDPDARVSDLFLRYPKLLHNVTDRHLSDRNIYSAAAIKLGTNLRNHLVVNLRRVITKALADVPNDEERVLMLYKLYGWKGGPRKKTKPPKNPPKKANTSSSAAAQMAEIAPEPPTLSAAQLDFVRECRRILGFTDDAEELTERWMDKPANLPRILAFFVAVNCLLEGKLEEPSQVRPFAILSICKIKRHFVTLDTHSIHGVARDAEIVGPKCSSQAFLEHGDAHWASMVNHAKHLPKGGRFTGTIETDGVSVCIHYMRPKAKEEEGSGFAAPNPPKGHVGVETLAEKSKASRNPKSSPLRPTPEQLSRCRIVVIDPGRTNIIYAVEVTPDGVKIYRLTRAQYYQESGVERGKQQAANWLRGTKEELTKLSAASPKGADLQAFLVFVTTHLETSDARWEEALKPRWAQMHLRLYGGKKRVLAKFFDEIARGDPGAPARPVIIGYGAAKFAPGGKGELSVPTCGVFKACRARFPTHLVDEFRSTKVYHADDSILQGVAERRWKGDRMKTVRGLLWCGSTNETKSKFVNRDFNGAMNIRRCFLSEERPAILDRSKCQGRLQFIRTGRVIRMK

SEQ ID NO: 2549 - protein, 665 aa, Tetrabaena socialis
MTCGVFKEMRAGATGAKEAEQEALEELEFELLAAAASTTTVADDATITAVKMKLNSFCKDSPRLRSQIQALVLSMNRLLGEAYAFATFHILHLHDCGMYPAIDRNFFYRCLVAVSANNSRPATLGPELVNSRDVYHALRPLQGPGSQPVNTVGYAQVLADLSIVMATMAGNHLWENLEKRIFNYLKMKYPGQLMGDPLRKKVVEALVRKPLVCTADLFQLSPSVPPDSAAAERLRHARAVADELRVLLPLPSGDHYQTRAHLIIPLYIKMLQEIEEARAAAAATNLTTGKTVRGRVLPGTKLFTLLPQKAGFTISHIPISSMTLLDLLKRASLSSHRGDGRDEDHGALWRKHFAVNRVETRRRLFGNRIVTDGCAVSVMMQEMVPLIASYRQPLSDAELARARATSGGTVVGVDPGVTDVATVATLEGETRRYSSARYYERSKINLSNHRTRKWNAEKRERVEGLPSARTASIAEYADFVQRYLVLLPELLQHRATKGYRNMRFLRYVHRQESIHEICEVIAPREGGLVVVGFGDWRGVGTTPIRRRCSGPLQDIKKHLQKQAHVRLVIIDEYLTSRGCHGCLNRLTNMRAAPHTHGPGKERVQGATTQVHKVLHCRPSSQAAARSCCGTTWNRDVNASKNILLLTMLRLKGYQRPPELSRGHQQ

SEQ ID NO: 2550 - protein, 433 aa, Tetrabaena socialis
MSAEVLASVAEFDSFRPKILVETEAARDALEILGNDPADHKVRLRLFKLLPTKNGFTTSFIPISSMAMLHMLKSMGLENLAGDGRSMDATLLWRKYFNLNLVETKKRRFGGSIVTDGTGVSVLMAKPAAAATCHCGEPLCAEMRTILRERAIARVVGVDPGFRDVVTVAAADGSEPVSYSSRKYYEDAKIFLSQRRTDAWNQGTVELVDSIPTVCTSDLTRMRLHVTAYLANIRELLRHRFDKGYRNMRFLRSVFKRKAVEDICNLIAPAGKVTLVGFGNWSGGKGSPISRRTCGPLQDIKFCLRQRPDVFLKELDEHRTSVTCNGCLQVLSNMRAMSTLVNRFDGSRTVRRTRVHKVLHCRSSDGGKTNRCGASWNRDVNASRNLLMLMMCHVLGYERPPAFTRAWQSHSASLLMGSAIHIIPRGFTSSREV

SEQ ID NO: 2551 - protein, 445 aa, Tetrabaena socialis
MTRGVFSEMRAGATGAEEAGQDALEELEFELLAAAASTTTVADDATITAVKMKLNSFCKDSPRLRSQIQALVLSMNRLLGEAYAFATFHILNLHDCGTYPAIDRNFFYRCLVAVSANNSRPATLGPELVNSRDVYHALRPLQGPGSQPVNTVGYAQVLADLSIVMATMAGNHLWENLEKRIFNYLKMKYPGQLMGDPLRKKVVEALVRKPLVCTADLFQLSPSVPPDSAAAERLRHARAVADELRVVLPLPSGDHYQTRAHLTIPLYIKMLQEIEEARAAAAATNLTAGKTINLSNHRTRKWNAETRERVEGLPSARTASIAEYADFVQRYLVLLPELLQHRAAKGYRNMRFLRYVHRQESIHEICEVIAPREGGLVVDIKKHLQKQAHVRLVIIDEYLTSRGCHGCCGTTWNRDVNASKNILLLTMLRLKGYQRPPELSRGHQQ

SEQ ID NO: 2552 - protein, 276 aa, Tetrabaena socialis
MTLLDLLKRASLSSHSGDGRDEDHGALWRKHFAVNRVETRRRLFGNRIVTDGCAVSVMMQEMVPLIASYRQPLSDAELARARATSGGTVVGVDPGVTDVATVATLEGETRRYSSARYYERSKINLSNHRTRKWNAEKRERVEGLPSARTASIAEYADFVQRYLVLLPELLQHRATKGYRNMRFLRYVHRQESIHEICEVIAPREGGLVVDIKKHLQKQAHVRLVIIDEYLTSRGCHGCCGTTWNRDVNASKNILLLTMLRLKGYQRPPELSRGHQQ

SEQ ID NO: 2553 - protein, 382 aa, Tetrabaena socialis
MSAEVLASVAEFDSFRPKILVETEAARDALEILGNDPADHKVRLRLFKLLPTKNGFTTSFIPISSMAMLHMLKSMGLENLAGDGRSMDATLLWRKYFNLNLVETKKRRFGGSIVTDGTGVSVLMAKPAAAATCHCGEPLCAEMRTILRERAIARVVGVDPGFRDVVTVAAADGSEPVSYSSRKYYEDAKIFLSQRRTDAWNQGTVELVDSIPTVCTSDLTRMRLHVTAYLANIRELLRHRFDKGPDEEIIAATMTELERLFPNEVRADQSMAKIRKYKIIKTPLSVYESRSGREPCRPSQRTPISNFYLAGDFTKQKYLASMEGAIFSGKLAAEAVVEDATMGRTAAARAAAGTGTGSSPELVAASAMLALAAVGMGAAAML

SEQ ID NO: 2554 - protein, 583 aa, Tetrabaena socialis
MVNAIRSRVVAASRRVVLASIALNLLVREVFDRQPDATLDIRDETTLRQFMLGTASANKPDARVADIFLRNPGLLHEVSDRHLSDRNIYSAAAKKLGTNLRNHLVVNLRRVVNKALADVPNDAERVLMLYTLYGWKGGPRKKIKPPKKAKTSSSVAPTAEIAPEPPPLLSAPQLDFIRECRRILGFTDDTEELTERWMDKPANLPRILAFFVHVNRLLEHRGELEDDPLNRGPTCFALLPICKIKRHFVTLDTHSIHGVARDAEIVSSEGGVAGEKGAIETEESRAAKKPKSTAAQGEEAEEKVAKKPNSSPPRPTAEQLARCRIVVIDPGRTNIIYAVEVTSSGVKVYRLTRAQYYQESGVARGKQQATSWLRGVKDELAQLSTVSPKGADLPAFLLFVATHLATSEARWEEAMKPRWAQMRLRLYGGKKRVLSRFFNEIARGQGGADSRPVVIAYGAAKFAPGGKGELSVPTSGVFKACQERFPTYLVDEFRTTKIHHVDDSLLQGVGERRWKGDNVKTVRGLLWCGSTNEKKSKFINRDFNGAMNIRRCFVSAERPAILDRSKCQGRLQFVRTGRVIRMK

SEQ ID NO: 2555 - protein, 619 aa, Tetrabaena socialis
MVNAIRSRVVAASRRVVLASIALNLLVREVFDRQPDATLDIRDETTLRQFMLGTASANKPDARVADIFLRNPGLLHEVSDRHLSDRNIYSAAAKKLGTNLRNHLVVNLRRVVNKALADVPNDAERVLMLYTLYGWKGGPRKKIKPPKKAKTSSSVAPTAEIAPEPPPLLSAPQLDFIRECRRILGFTDDTEELTERWMDKPANLPRILAFFVHVNRLLEHRGELEDDPLNRGPTCFALLPICKIKRHFVTLDTHSIHGVARDAEIVGPQCSSKAFLEHGEAHWASMVKHAKHLPKGGRFTGTIETDGVAVCIHYVRPKVSSEGGVAGEKGAIETEESRAAKKPKSTAAQGEEAEEKVAKKPNSSPPRPTAEQLARCRIVVIDPGRTNIIYAVEVTSSGVKVYRLTRAQYYQESGVARGKQQATSWLRGVKDELAQLSTVSPKGADLPAFLLFVATHLATSEARWEEAMKPRWAQMRLRLYGGKKRVLSRFFNEIARGQGGADSRPVVIAYGAAKFAPGGKGELSVPTSGVFKACQERFPTYLVDEFRTTKIHHVDDSLLQGVGERRWKGDNVKTVRGLLWCGSTNEKKSKFINRDFNGAMNIRRCFVSAERPAILDRSK

SEQ ID NO: 2556 - protein, 352 aa, Tetrabaena socialis
MVIANASGTGGRFTGTIETDGVAVCIHYVRPKVSSEGGVAGEKGAIETEESRAAKKPKSTAAQGEEAEAEEKVAKKPNSSPPRPTAEQLARCRIVVIDPGRTNIIYAVEVTSSGVKVYRLTRAQYYQESGVARGKQQATSWLRGVKDELAQLSTVSPKGADLPAFLLFVATHLATSEARWEEAMKPRWAQMRLRLYGGKKRVLSRFFNEIARGQGGADSRPVVIAYGAAKFAPGGKGELSVPTSGVFKACQERFPTYLVDEFRTTKIHHVDDSLLQGVGERRWKGDNVKTVRGLLWCGSTNETKSKFVNRDFNGAMNIRRCFVSAERPAILDRSKCQGRLQFVRTGRVIRMK

SEQ ID NO: 2557 - protein, 355 aa, Tetrabaena socialis
MLQEIEEARAAAAATNLTAGKTVRGRVLPGTKLFTLLPQKAGFTISHIPISSMTLLDLLKRASLSSHRGDGRDEDHGALWRKHFAVNRVETRRRLFGNRIVTDGCAVSVMMQEMVPLIASYRQPLSDAELARARATSGGTVVGVDPGVTDVATVATLEGETRRYSSARYYERSKINLSNHRTRKWNAEKRERVEGLPSARTASIAEYADFVQRYLVLLPELLQHRATKGYRNMRFLRYVHRQESIHEICEVIAPREGGLVVVGFGDWRGVGTTPIRRRCSGPLQDIKKHLQKQAHVRLVIIDEYLTSRGCHGCLNRLTNMRAAPHTHGPGKERVQGATTQVSNVGMTMFGQVAFR

SEQ ID NO: 2558 - protein, 657 aa, Tetrabaena socialis
MTCGVFKEMRAGATGAKEAEQEALEELEFELLAAAASTTTVADDATITAVKMKLNSFCKDSPRLRSQIQALVLSMNRLLGEAYAFATFHILHLHDCGMYPAIDRNFFYRCLVAVSANNSRPATLGPELVNSRDVYHALRPLQGPGSQPVNTVGYAQVLADLSIVMATMAGNHLWENLEKRIFNYLKMKYPGQLMGTPLRRKVVEALVRKPLASTADLFQLSPSVPPDSAAAERLRRARVVADELRVLMPLPNGDHDRTRAHLTLPLYIKMLLEIEEARAAAAAAAADLSEAKTTRGRVSPGTKLFTLLPQKAGFTISHIPISSMTMMDLLKRTGLSSHKHDGRHEDSGALWRKHFAVNRVETRRRLFGNRIVTDGCAVSVVMREMAPLIASCPQPLSDEELARLLATSGGTTVGVDPGVTDVATIATLDGRTRRYSSARYYERSKINLSNRRTRKWNAETQGLVEGLPSARTASIEEYAGFVQRYLVVLPELLQHRAAKGYRNMRFLRYVHRQESIHEICEVIAPREGGLVVVGFGDWRGVGTTPIRRRCSGPLQDIKKHLQKQAHVRLVIIDEYLTSRGCHGCLNRLTNMRAAPHTHGPGKERVQGATTQTRTAHCPRAPGLCSVEPGGASSAHNTANPCGVAPDAPIVHVHKFLE

SEQ ID NO: 2559 - protein, 666 aa, Tetrabaena socialis
MTCGVFKEMRAGATGAKEAEQEALEELEFELLAAAASTTTVADDATITAVKMKLNSFCKDSPRLRSQIQALVLSMNRLLGEAYAFATFHILHLHDCGMYPAIDRNFFYRCLVAVSANNSRPATLGPELVNSRDVYHALRPLQGPGSQPVNTVGYAQVLADLSIVMATMAGNHLWENLEKRIFNYLKMKYPGQLMGDPLRKKVVEALVRKPLVCTADLFQLSPSVPPDSAAAERLRHARAVADELRVLLPLPSGDHYQTRAHLIIPLYIKMLQEIEEARAAAAATNLTAGKTVRGRVLPGTKLFTLLPQKAGFTISHIPISSMTLLDLLKRASLSSHRGDGRDEDHGALWRKHFAVNRVETRRRLFGNRIVTDGCAVSVMMQEMVPLIASYRQPLSDAELARARATSGGTVVGVDPGVTDVATVATLEGETRRYSSARYYERSKINLSNHRTRKWNAETRERVEGLPSARTASVAEYADFVQRYLVVLPELLQHRAAKGYRNMRFLRYVHRQESIHEICEVIAPREGGLVVVGFGDWRGVGTTPIRRRCSGPLQDIKKHLQKQAHVRLVIIDEYLTSRGCHGCLNRLTNMRAAPHTHGPGKERVQGATTQDCFRLRKCVTFDRKMKDKAADTIKRAWLAYKRRCRARRLAMVRLTLIPIIVRSVQWA

SEQ ID NO: 2560 - protein, 214 aa, Rhodotorula taiwanensis
MAHINSNLAHQLDMDRFASAQPGQLRPPVQDVVRDTWIRVLTKAHPVRDRIQLRYGIERDAEIGTFVSELGRAIAGKIKRQDSDRAKIKWIFFIGDGMSISDPSGASSQNTIMRALPAELRRRGIPCMFVRTPEDYTSQRCPNPRCRRADDEDRRSCAETMTREDGSPEYRLLRCLECGCVFDRDGAGACNVLATGLSWWWYGRPLWGAWIEEG

SEQ ID NO: 2561 - protein, 2183 aa, Raphidocelis subcapitata
MAAPRSPETLAFLDRERLVAFTVEADGNCLIASILAALDLQMAWLPGAVRQRLADALRCLFEELPEAADLLQELLVDGEKFKSLDDLLRACRTSGHPLPVWALALLAPILRVNVKVFTPTEHGPPHTDTWLCPGAVGTIHLLQEQTGVPGLTHLSPLRHLDSQAPPEGAALPLARQDAVVYAGLLWVLPALISNAEQQLRAAATAAEKERLERVLLILKGRLDRLRAPQPAHAEDARPAAQAGGGGGGSSSGGGSRPPQKRERPQPPAASPPAEVIREFEKLRCPLLRLVARVQEGGGSAARNSNDLVEPPQAEKGEQGRGRGGRQRRRRRKRQEKGDSGVGTRALPQTRAQQEEGGLAAAAVIGSGGGGAAAQPPDGDGTRAQIGARRLSNRQRGLLMEALRPESAPAGGQRQKARRRRRRSTQSKVASEGSGTCPSNNVAPAAPVPVAADADSGETGSSSGGTSDTGVTGDCGRKGEDAHRAARRQRRRRARRELARTCSLAEAADRLAAAKRATAAAQAGDQTDALQLEAALAEVARWERVGRAIAARAHRRQRWKAIKRRRRTKEDGLATQPPTGSGDGCSGAGGDEIRLIPSGITRRGPPACRPPADGDSDGAAGEPTRAGARAGLSKKRARDDEVNAGDGGGGGGGGGGGRGGGGGGGGGGGGGGGGGGGGGGGGGGGGGGGGGGGRDGGGGMDFFAEPGGAGTAILDEMFPPDGKGRTAKGEDASRRILAYAGLAHHYEFGGPDLRDAMKDLSEECDTLFPEALPEVLSDFKGNTLAELRKPQGTRLATNLRNALALTPMRVLRLVERIITTELALAAAPPLSAAARRRLVRGAAAALLDPKDGRIWEDQAWEPGDAGGIMPPLKQRLVEAQVNALAAACSSLRSLRVVLERTVRVGTADRCVLDFLREGGVLVDVESPKRAQEAAKEVADEAAAADGDSGGEGAGEDVEEDGDYAEEMPAEEAEPLPAGEEGGAAEQETEAVEALSRGERGLKLLVDVCSVWQGLAQPPQQQQQQQQPPQQPQPPQQPQQPPQQQQQQQQQQQQGQQGQGPVCLQSTAGHLLAALAHQPRPARPPEHERLVKAAQQEASQRNADHLAVALALLWDARLPARPPPTPSSAARSSCTDAYVLLRCALQRARARLPAALRHNVAGTLEAMASYLRGGARGPAVLVWGNCLGRNAELRRDETWGAGAGRGCAISSHVMQAFDEGVRAAGGFVFFMDALTQHLSPRALRGMGCLPDAAGFDGDDDCPCPSGGCSEVSFQEEAGAAAQLVARFLLLALCKPTPNTQRRDPPKVSVLFAGARAAAFAPQLRSALESAGLGVARSRSAKHPSLWTPAAAAGHLKWAGVRSRSDAALAALAAVKAAAPASGEKRGARSRAGQQHPGARYAEWQRADLELVARCAALEKRVRESDAAMEGDAATKAARSETECRAQLCAATAEAKSADAALVAARRRLKHRDEKRHKRRRRSAELAAAHADLERHRRAMPPLPALPAADPCVWKAAVKRALSAFDGAVDASAAARHSLVAATDAYSRLVRACRAPPAERAAHGTAQLRSQLSRRMRHASAAAQLAARHAEHACAALDAAAGQQPEPAGFATKAQRAADEAEAAARGAKAADDGMVTMLTGWDEATNRERLQRAEEEASTAELSVGYAARRLQSVIFDAAFCVGTAQAAAQGPRPGCAPPPGPPPACKAAEGLCHRLRAAAGRAQKLRFSLAPVPHFKTNFVDITDAGARCLHFEFSQHPSRPASFVRATQLTYAKKPERDAATQAAWCALFKPAALQRQKSTVAGGVSTDGVSLCVRVLRRPLPWDPPPRSRASACAVRAAANAEALQRAQAEIAELMRLHPSPLPPATDIAAWDALFLKWGVRFVAADPGIRHFATTIALGGPFAPGTLSPEPLDGIPRGEGGETKRSGPGGPWHRAHSWRANSLQHRNACAFDDYKRWRAGHLRRADPADRAAVAAVPSAKTASAPDFFSYCRAAAAAFEPGMRLHATLAHRRWAVRVQRAKERQLHRVAQSLIFGHPTLSGRWTACRPSPRPGLTIIAWGVASIGTGSPIPRAYIPPVRQLEALLRRHYGRRVIFLLIDEYLTSQVCPFCWEIRPDKFSLMGPKQGPKSRSTAVLACPGCMHSHLNRDASASMAIAARGIGQIAPKAPRGGLDGFDRERKAP

SEQ ID NO: 2562 - protein, 278 aa, Raphidocelis subcapitata
MSAFSFSPFQRRNYIPPGGNKSELRRWLSPRVFVESTAGFRDATGQVAAARKAEQCLRRADPADRARAIHNITTGRTASLAAFALHCRRKLAGFDAGRRLYGSKGARHARLRKHILRNRHFHRLVQMLAWGATSVTGRWWDPTRRRRRAVRKKPAVSIIGWGAASVGAGGPISRKGLGPSRDFERFVRSHYPTVLFAKVDEYCTSKVCTACWKKTHVNFTAGGRPTHKLQVCPDHAPPLVVDRDVSASYAIMTALLSHLFVGGAPEWQRRRRRAGPPA

SEQ ID NO: 2563 - protein, 1918 aa, Raphidocelis subcapitata
MAAGKRRRGRCGRPRRRRRRPQQDARHAARRQRRRRARRELARTCSPVEAAERLEAAKRAAAAAQAGGQAAAIQLQAALADVVHWERVGRAIAARACGRQRWKANRRQRRTESRAVLGATAVVFTAASRAEAAISACAVPRAVRLRSTLPPKPLPGVATRLPNFYRLAPGITRLGPPARRPPADGDGDGAAGEPTRGAGRSKKRARDDAADPGEGGSRGGGGGGGGGNDDGAANAGEGGGGGGDDGGGGGGGDGGGGGSTRKPNYRTFKKTLNAATTHRAVTTWLREVVDAVQPSLYKGRLILGALCTMAVSFPAASVASGEKAGRDDAGGSGNGGSGAQTRAQQEEAGLTAAAAIGTSAGGGGGGDDTRAQIGARRLSNRQRGLLMEALRAESAPVGEQPRQKARRRRLSKVAAKGTGACPSKSVTPRGGSAAPVLVAADTGETDSSSGGTSDTGVGGNGKSAKMRVLQLVERIVTTELALAAAPSLSTAALRRLVRGAAAALLDPKDGRIWEEQAWEPDDAGGIMPPLKQPLVEAQLSALAAARSALCSLRLDLERTVRVGNADLRVLDFLADGGELVDVARPGRAQEAAKEVADEAAAADGDSGGEGGYEDAEEDGDQAEEMPAEEAGPQPAGEEGNAVEQETDATEELSCGERGLKLLVVTAPAKQLILAGALLLHGSAYADKCQSRRDARIATRCAKALPLASTLQSVCSVWQGLVQPPQQLQPPQQPQQPQPQQPQQQQQQQQQQQQQPPQPQPQQLQQQGQGPTCLQGTAGDLLAALAHQPVQAHPSGPLVKAAQHEEAQQNAGLLRMALELLDEGAGAGAGAGAGAGAQAQGPADAYDILCDALHHVDARLPAALHHNVAGTLEAMRSYQHRGAQGPAVLVWGNCPGRNAVSGLDETWGAGAGPGCALSSHVMQAFDEGVRAAGGFVFFMDALTQHLSPRALRDMGRLPDAAGFDGDDDCPCPSGGCNEASFQEEAAAAAQLVARFLRLALGGSPEVRVLFAGARATAFAPQLRSALESAGLSVARSRSAKHPSLWTPAAAAGHLRWAGVRGRSDAALAALAAVKAAAPASGEKRGARSRAGQQHPGARYAEWHRVSLELEARCAALEKRVDESVAAMQETAAAEAACREVECRALLRAAAAEAKAADAALAAARATDKQRLREAAERRRKTAGARHYLKCREEKRHKRRRRSAELAAARADLERHREAKPPLPALPAADPQEWHRAVAQALSAFKDAVDASESARHSLVAATDAYSRLVRACRAPAPSAQSAAPDPSSLLAQLLARLHHVGTAAQLAKLCVEHACAALASAAGQQPEPAGLAAEAQQAAQMAKTAAAWVQAADNGERRVDNALPWDEAASRELLRRAERGAIEAELGVGYAARRLQATIFDAAFCVGTAQAAAQGPQPGGAPPPAAPPAAPPAAPPATPPAEPPAAPPAAPAVAGAFEGVAEGLCRRLRAAVRRAQKLRFSLAPVPHFTTNFVDITDDGARCLHFEFSRHPSRLASFVRATQLTYTKKPERDAATQAAWCALFKPAALQKDASEPFAGGVATDGVSLCVRVLRRPLPGDPPPRSRMGARAVRAAANAAALKRALTEIAGRVRADPDFEDPKRLPAATDIAAWDALFIKWGVRFVAVDPGIRHFITALILGGPFAPDAPSPNPLDGIPEGSVGAPQRPGPGGQWHRVHSWRTNSRQHRNACAFDDHKRWRAGHLRRADPADRAAVAAVPTAKTAHAPDFFSYCRAAVAAFEPGMKLYATLAHRRWAVRVHAAKQKQLHRPGLTIIAWGAASIGAGSPIPRACIPPVRALEALLRRHYGRHVIFLLIDEYKTSQVCPFCWQIRRDKFTLMGPKQGPKSRCTAVLACHGCMHSHLNRDASASMAIAARAIGQVAPAAPRGGLDGFERKRKAP

SEQ ID NO: 2564 - protein, 1439 aa, Raphidocelis subcapitata
MCVDFFAEPGGAGGAHPTAILDQIFPPGSKGRTAKGEDVCRTILAYAGLANHYNFGREDLRKAMEALHKECHTLFGKLPAALSSFAGTTLCELRKPQGTRLATNLRNALALTPMRVLQLVEHIVTTELALAAAPPLSKAARQRLVRGAAAALLDPKSDRIWEDQAWAPGGIMPPLKQPLVKAQLSALAAARSALCSLRLDLERTVRVGNADLRVLDFLREGAKLVDVERPGRAQEAAKAVVEEAAAADGDSGGEGGYEDAEEDGDQAEEMPAEEAEPLPSGEEGDAAEQGTDATEELGLGERGLTLLVVNAPAQQLILAGALLRHGSAYAEKCQSRRDACITTQCAKALPLASTLQSVCSVWQGLAPQPQQPPHPQEQQQQPQPEQPQPQQPPQQLHQQGQGPTCLQGTAGDLLAALAHQPRPERPPQQERFAKTAQLEAAQRNAERLRAALARLDAGAAPANCADAHALLCDALQREGAHLPAALLHNVAGALEAMTSYLQGGARGPAVLVWGNCPGRNVELRRDETWGAGAGRGCALSSHVMQAFDEGVRAAGGFVFFMDALTQHLSERALREMRYLPDAAGFDGNDDCPCPSDGCNEVFQKEAGAAAQLVARFLMLALCKPTTQRRDPPKVSVLFAGARATAFAPQLLSALKSEGLGVARSRSAKHPSLWTPDAAVGHLKWAGVRGRSKAALAALAAVKAAAPAAGEKRGARSGAGQQHTGARYAEWQRADLELQARCAALEERVRESEAAMKGDAAAMAARSEAECRAELRAAAAKVKAASKSPYRQIIAAALRRETAAARRYLKCRDEKRHKRRRRSAELAAARTDLERHRRAMPPLPALPAAAPQAWHQAVARALSAFKDAMDASESARRSLVAATDAYSRLVRACRAPASSAQSAAPDPPSLLAQFAARLHHVGTAAQLAQLCVEHACAALASAAGQQPEPADLAAQVQQAAEKAKTAAAWVQAADNGERRVDNPPQWDEAASRELLRRAEQGASGAELSVGYAAHRLQATIFDAAFCVGTAQSAVQGLRPDGAPPPAAPPAAADTFEGVAEGLCRRLRAASRRTQKLRFSLAPTPSFKTNFIDITDAGVRCLHYEFSRHPSRPANFIPATRLEHPKPERDAATQAAWCALFKPEALQKSSPFAGGVSTDGVSLSVRVLRRPLPGDPPPRSRMGARAVRAAANAAALKRALTEIAERVRADPDVDPKTLPPATDIVAWDALFTKWGVRFVAVDPGIRHFITALVLGGPFDPGTRSPEPLDGIPKGKGAHRPGPGGPWHRAHSWRANSRQHRNACAFDAYKRPGLTIIAWGAASIGAGSPVPRAYIPPVRQLETLLRRHYRSDVIFLLIDEYKTSQVCPFCWEIRPDLFTLMGPKEGPKSRCTAVLACPGCMHSHINRDASASMAIAARSIGQLAPDARRGGLDSFERKSKAP

SEQ ID NO: 2565 - protein, 1659 aa, Raphidocelis subcapitata
MQRYLLRTVASFQTPLLLSRHFQAVYLLFAIKRLFGDPVSGALPQRDRSFLDYVARTQSGHHAGADWIREVMRLLVETPHGGQHTAVSAEVQNVFGVTVQRAAADANWAGGGAAAPAAAVPLPGPAFDAVLQPHALALPDVTGELLNDIVSAHSRQQAQNLRRHVRSAPDRWATLIADQLTAAFRAVGARRLLAVEHRERLARAIVRALLGESDADWNDAAWQRGGAIWGEAGDRDGLDDAQRSVVTGLLRRWLGRRRPALEQLLPPSYYGAVAGAGGVQQRHGDRHGGLYHSSTGRPQSLRDWIVGSFRPIDEAGSDDEDEDAAMVLTIDTGAALMYHVARQREEFEADCNAGGGTTSGDERFPALLAARRRDWLARLRAAAAVRTATRAFQGVAPLDARAINDLRGAIRDLATHAAGIALPVSDAERYPRLGLAVLEQKRDEARSTAAEARRRLQQSQAARDENARQQQQQQQQQQQHQARWQQQQQQQQQLLLRRRLRQQVPQPPHAGPGREDPVVAALASDLGPPAAAAPHAHPHGQFAPLVPPRPRAALWATRKERRQRQNQQPQPMQQRPPPQERRKDARRREHDGALIRRHKAQADADRDWSHSQANVDARLAELDQRVAQRWGMLSPAQAAAWHNGMEAVGGLLQGASQALAAAASAAAHAVQHSQASRQLLGRAELHHANCNDINQSDARRQTAQQAEQRARTAAQQHQHAEVAAATLAAQGVMQASQQIQNAFGLWALATGDLYGAGSGRPYGAPPPGQPTQSAREARFPRPPPPLQPQQPQPQQPQQPQQPQQPQQPQQPQQPQQPPPQQPPPQLTADMAERMVREYEVDLTRLAQHFAAAQLEGALELLALLEAGGGGGGGGGGGGGGGAQQAQHAPAPLPPNLLGNLRDAAREATKMQSEAEHLADLLQKHRFSVTPQPSMACEHLQVPQSAFVEMDRIFQTRVLGHQAPAADEDKAAKWSRWFKDQGSTFAHSFSTDGVVVHFHHTVPETSRVAVACKTAYHAVMAARLGGRPHPIPASTVAAARREACAAARAVRPGAVAADEEARRHAFFDAVRRCGGDPRAANLDPTTLDFDWALPQLDEPYVQASGVDPGLTFPITAAYAAQGPRGQREGFFRFGADEWRHGCGFARDARQRERRKTHSKFQEFCRVEGALPSPHTTDLHQLISRMAWAAWIADVGKEQVYGSLSARRSRMRVHCFLRPRMIHRVIQVLLWHSTNILGRWGGTWRRWVTAGAGQPVPRPLRALCLFGSASLGRGSPISRRVVFPSKEVHTKACAMYSRRGVGRRGSLTDWHMQDEFRSSGVHSQAGNPASDGRSGSGAQKKPQPARPTLHPAPDPRAAVLASLCGTLQQLAERLARALAEWAAASEAATAAACRAAKAEGELAAARPERAGPPTKPDDPAAPAGAEHAQLAAAAAARAALAADNARLRSLLARQAAAYARDGESLCAGLDAANAQLAAVGEQLSAASGEAAQLALLLGPRPAQAAAHTAFLPCGGLDYASASSASASSATSSARGSEDGGARGEGAAPPPPPPPPPARASLRIVTAPQEAAAPALPTVQRPQQHAPTRCDEAAGGSPARRPRTPGREFSAAGGGGSGCRLETQAFSPGGGEDEGPRRAPQTPLSDGGGGGVEVRRGSGGRD

SEQ ID NO: 2566 - protein, 680 aa, Diversispora epigaea
MIPPPKRIIYAQEYPVKNSISNDKKKSYSTLNAKDCKPYWNDRAKVLSERLWLPTMIDYAGLPMNSSSTCSYSTLKNSWFSSTIRQPTNVNCPNIYLPSTLPSSADCKEEERPSIEGKGKKRKKILIVRKNKRRKKDENIIRTLNVKLYPNLAQKRLLKRWMGLMRLTYNTIIDYLQSRRFLIVRVDENKNKYKEMINFPKIQFLRTVAYLKLRSKKVYNDIPNNIIDTTVDEAIKNFNSKDNKTRLKFKTKKDLKNTITIHAQNFPKKNWNQFYISYLFCNSMRTPRKKPYNLIEGSRDLRALHFETKRKNNSWPLEKINNDCKLTYYRKTNDWIFQLKGTHERFVAIDPGVRTLFVMYSPTKGIIEVGKNDAQRLFRLCLHADKLSSTRDKLKSSISKRKKKQAKRIDKAISRIFRRIKNLRNELHKKTINHLVKNYDVVIIPEFNVSNMRFVAIDPGVRTLFVMYSPTKGIIEVGKNDAQRLFRLCLHADKLSSTRDKLKSSISKRKKKQAKRIDKAISRIFRRIKNLRNELHKKTINHLVKNYDVVIIPEFNVSNMVRRETRKINSKTVRRMLTWSHYSFRQRLKHKAEEIGMKMIQNEAYTSKPCSACGNIQNIGGRKVYKCKGCNVVMDRDVNRARGIFLHACHMHAYVGIDSMVINDVLQSIRTIVRFIFGLY

SEQ ID NO: 2567 - protein, 788 aa, Diversispora epigaea
MCIVIRDQLTFLNKNHLFNFLTKPPFYNLAQLNTTYQSAHKIQETYDVSVETLRRWADSGRIAIVRTPGGKRLYSITDIQEIFRDNQQTQITQKAKICYARVSSEHQRDDLERQIANLRQYYPEYKIISDIRLGLNWKRKGFVALLERIHTEGIEEVVVTRKDRLCRFGSELVEWIFEKNGTRLVVLGTDVSAESSEAGELAEDLLSIVTVFVARHNGMQTYDVSVETLRRWADSGRIAIVRTPGGKRLYSITDIQEIFRDNQQTQITQKAKICYARVSSEHQRDDLERQIANLRQYYPEYKIISDIRLGLNWKRKGFVALLERIHTEGIEEVVVTRKDRLCRFGSELVEWIFEKNGTRLVVLGTDVSAESSEAGELAEDLLSIVTVFVARHNGMRSAANRRRRREVVKAQEEQELQNSSRQDTTYLSLSYARGEVKTQTLDGNTVEKKGIEQTKKALRAQCLNAANFNNTELQWVLETPYDIRDEAMNDLLKSYSSNFAAKRKKFKMKFCSKKNQQQSITILSKHWGKSKGVYTFLCKMKSAENLPAELHYDSRLVMNRLGEFYLCIPQPLEIWAENQDPTQSDAVIALDPAVEWGKNDISRIYQLSHIYDKIQSTHDSIHGKVHKRKRYKLRRVMLRIHKKICCLINDCYHKLAKWLCQSYRIILLSKFQTQGMVRREKWRIRSKTARMMLTWSHFRFRQYLLHKVREYPWCRVIICTEEYTSKTCGCCGHIHRKLGGSKVFRCPSCTAELDWDINSARNILLRYLTITSKEPVYAGAGIYPLEPS

SEQ ID NO: 2568 - protein, 263 aa, Diversispora epigaea
MKSAENLPAELHYDLRLVMNRLGEFYLCIPQPLEIWAENQGPTQSDAVIALDPGVRTFITGYDPSGQAVEWGKNDISRIYRLSHIYDKIQSTHDSIHGKVHKRKRYKLRRVMLRIHKKIRCLINDCHHKLAKWLCQSYRIILLPKFQTQGMVRRGKRRIHSKTARMMLTWSHFRFRQYLLYKVREYPWCWVIICTEEYTSKTCGCCGHIHRKLGGSKVFRCPSCTAELDRDINGARNILLHYLTVTSKEPIYAGAGTYPLGPS

SEQ ID NO: 2569 - protein, 403 aa, Diversispora epigaea
MRTKFKRRMTSQLKHCNDGLTPEELLLSRHLVKNNSIQLLTYEKSLEITNRHKLCKRPRSVIPDINVSAESNKTGELVKDLLSIVMIFVTRYNGTHFTTNCRKKRKVFKTQKEQKLQNSIEKKSIKQTKKALQAQYLNVANFNNTKLQWILETPYDIHDKIKSAENLSAKLHYNTRLVINQLEEFYLYPDVRTFITGYDSSEQAVKWGKNDISRIYQLSYIYNKIQSIHNSIYGKVHKQKHYKFRKFKIQGMVKRGKWQIHSKIAWMMLIWFYFQFYQYLLHKVYEYPWYQIIIYIEEYTSKTCGYCDHIHQKLDKSKVFHCPSYTAELDWDINDAYNYTFYEYPWYQIIIYIEEYTSKTCGYCDHIHQKLDKSKVFHCPSYTAELDWDINDAYNYTCCPNPK

SEQ ID NO: 2570 - protein, 373 aa, Diversispora epigaea
MVLETPYDIRDEAMNDLLKSYSSNFAAKRKKFKMKFRSKKDQQQSIAILSKHWGKSKGVCTFLCKMKLAENLPAELHYDSRLVMNRLGEFYLCIPQPLEIWAKNQGPTQSDAVITLDPGVRTFITGYDPSEQAVEWGKNDISRIYRLSHIYDKIQSTHDSIHGKVHKRKRYKLCRVMLRIHKKICCLINDCHHKLAKWLCQSYRIILLPKFQTQGMVRHGKWRILREYPWCRVIICTEEYTSKTCGYCGHIHRKLGGSKVFRCPSCTAELDRDINGARNILLHYLTVTSKEPEYIGLIVGESHDEMKNCAKNGLNQITDKNYRSSTASHIEMIVEVTIVLCKKSTFVFAQLLQRKKDKLSTHVWEIISSAESG

SEQ ID NO: 2571 - protein, 487 aa, Diversispora epigaea
MVVPTIAKLENLQSSQCLWRNVTDYVQLPEGPKRLKSSKKEEKKPPAGKVQLYSTQNERLKLRKWMGTVRWTYNQCLIAIEKEETPYSIRDEAMKDLLKGYSSNFVSNKKFKMKFRSKKDPRQSIVIHSQHWGRSCGEYSFLPKIKSAKPLPEKLGYDSRLVMNRLGKFYLCMPKPLEIRTDQETPYSIRDEAMKDLLKGYSSNFVSNKKFKMKFRSKKDPRQSIVIHSQHWGRSCGEYSFLPKIKSAKPLPEKLGYDSRLVMNRLGKFYLCMPKPLEIRTDQGPLFSERQEKDQAGSRCTYFKTGYDPSGIAIEWEKNDIGRIYRLSHKYDKLQSKLNSIPGKKKQAYTLRRVMLRINKKIRCLVDDCHYHHNYQNFARTQGMIRRGQRRIRSKSARAMCTWSHYRSRQHLINKAREHPWCQIVVCTEEYTSKTCGSCGYIHKKLGGSKEFCCPQCKTKIDRDINGARNILLKYLTKKESAGPFII

SEQ ID NO: 2572 - protein, 315 aa, Diversispora epigaea
MNDLLKSYSSNFAAKRKKFKMKFRSKKDQQQSIAILSKHWGKSKEVYIFLCKMKSAENLPAELHYDSRLVMNRLGEFYLCIPQPLEIWVENQGPTQSDAVIALDPGIRTFITGYDPSGQAVEWGKNDISRIYRLSHIYDKIQSTHDSIHGKVHKRKHYKLHRVMLHIHKKICCLINDCHHKLAKWLCQSYRIILLPKFQTQEMVRRGKRRIRSKTARMMLTWSHFRFRQYLLHKVREYPWCRVIICTEEYTSKTCGCCGHIHRKLGGSKVFHCPSCTAELDRDINGARNILLRYLTVTFKEPVYAGAGTYPLGPS

SEQ ID NO: 2573 - protein, 506 aa, Diversispora epigaea
MTSNIRKRPRSAMPVISTENTSGFLPFWNEYTQEESKKWWLPKKTTCAALDSNSWSESLKKRGHKSWFSIQMVVPTIAKQENLQSSQCLWRDITDYVQLPEGENIPSKRLKSSKKEEKKPPAGKVQRIRLYPTQNERLKLRKWMRTVRWTYNQCLIAIEKEGVKRNKKDLRARYINWGRSRGEYSFLPKIKSAEPLPEKLGYDSRLVMNRLGEFYLCIPKPLEIRTENQGPLFSETQEKEGSGVISLDPGWGRSRGEYSFLPKIKSAEPLPEKLGYDSRLVMNRLGEFYLCIPKPLEIRTENQGPLFSETQEKEGSGVISLDPGVRTFMTGYDPSGIAIDHKYDKLQSKLNSIPGKKNKRTRYRLRRVMLRINKKIRCLVDDCHHKLSKWLCENYRVILLPEFRTQGMIRRGQRRIRSKTARAMCTWSHYRFRQHLINKAREHPWCQIVVCTEEYTSKTCGFCGYIHEKLGGSKEFCCPQCKTKINRDINGARNILLKYLTKKESA

SEQ ID NO: 2574 - protein, 378 aa, Diversispora epigaea
MTSNIRKRPRSAMSVISTENETNTHRRSRKSGGCPKRPLVLLWIQTHRDINHGSQFRWLPKPLEIRTETQEKEGSGVIALDPGVRTFMSGYDPSGIAIVWGKNDIGRIYRLSYKYDKLQSKLLEKKTSVYVIEPSEMTSNIRKRPRSTMPVIFALLERIYTGVVEKVVDINHGSQFRWLPKPLEIRTETQEKEGSGVIALDPGVRTFMSGYDPSGIAIVWGKNDIGRIYRLSYKYDKLQSKLLEKKTSVYVIDDCHHKLSKWLCKNYRVILLPEFCTQGMIRHGQRRIRSKTARAMCTWSHYRFRQHLINKAREHPWCQIVVCTEEYTSKTCGFCGYIHEKLGGSKEFCCPQCKTKIDRDINGARNILLKYLTKKESA

SEQ ID NO: 2575 - protein, 571 aa, Diversispora epigaea
MECVPPPIVEEDEKLPKPKKNKSSKIPAGKTQRIHFFPMQEEKLKLKRWMGTARWTYNRCLVAVEKEGIERTKKALRAQCLNIANFNNTELQWVLETPYNIRDEAMNDLLKSYSSNFVAKRKKFKMKFHSKKDQQQSIAILSKHWGKSKGVYTFLCKMKLAKNLPAELHYDSRLVMNRLGEFYLCIPQPLEIILVPKIDFGFLSILEIWAENQGPTQSDAVIVLDPGVRTFITGYDPSGQAVEWGKNDISRIYRLSHIYDKIQSTHDSIHGKVHKRICYKLCRVMLRIHKKICCLINNCRHKLAKWLCQSYRIILLPKFQTQGMVRCGKRRIRSKTARMMLTWSHFRFRQYLLHKVREYPWCWVIICTEEYTSKTCGCCGHIHRKLGGSKVFRCPSCTAELDRDINEHVYFLIGHDQKCDQIAECYELPSESLTEDFITEYGKYVHMKWFKNLQKLRDADTNNETITHENYRNDRFTTTCTPIKEINDRDRYKADTVKTCITTLKSRLGLLNIALNETYRLKFKAIDKNLRYYHLVCPFGNKDAPKLQNGEDIHYGYNKLPPDELPETVTK

SEQ ID NO: 2576 - protein, 276 aa, Diversispora epigaea
MNDLLKSYSSNFAAKRKKFKMKFRSKKDQQQSIAILSKHWGKSKGVYTFLCKMKSAENLPAEFHYDSRLVMNRLGEFYLCIPQPLKIWAENQGPTQSDAVIALDPGVRTFITGYDPSGQAVEWGKNDISRIYQLSHIYDKIQSTHDSIHGKVHKRKRYKFRRVMLRIYKKICCLINDCHHKLAKWLCQSYRIILLPKFQTQGMVRRGKRRIRSKTAQMMLTWSHFRFRQYLLHKVREYPWCRVIICTKEYTSKTCGCCGHIHRKLGGSRDGRRNTN

SEQ ID NO: 2577 - protein, 497 aa, Diversispora epigaea
MSESVQNINETTLNNKLQIFNNITQNTKSLVISDQDLTGNAGDVSAESNEAGELAKDLLSIVMIFVVRYNEIQKLQDFSKQDISLSYARGEVETQTLDGNSMMDLQSVSRSSQKRGYRCLNVANFNNTELQWILETPYDICDETINDLLKLYSSNFAAKRKKFKMKFFSRKSPSRAPLRCTTCDESVWRILSLYSTTRDMGQKSRFYTIRCSDPGVQTFITGYDPSGQAVEWGKNDISRIYQLSHIYDKIQSTHDSIHGKVHKRKRYKLRRVMLRIHKKICCLINDCHHKLAKWLCQSYRIILLPKFQTQGMVRRGKRRILSRKSPSRAPLRCTTCDESVWRILSLYSTTRDMGQKSRFYTIRCSDPGVQTFITGYDPSGQAVEWGKNDISRIYQLSHIYDKIQSTHDSIHGKVHKRKRYKLRRVMLLCESPWCRVIICTEEYTNKTSELDRDINGARNILLRYLTVTSKEPVYAGAGTYPWNLHDPCRTRIFPYWA

SEQ ID NO: 2578 - protein, 905 aa, Diversispora epigaea
MILPPPPLPSKRIIYAQEYPAKNNISNDKKKSYSTLNAKDCKPYWNERSCQRDCGLPMNSSSTCSYSTLKNSWFSSTIRQPTNVNCPNINLPSTLPSSADCKEEEQPSIEGKGKKRKKILTVRKNKRRKKDENIIRTLNVKLYPNLAQKRLLKRWMGLMRLTYNTIIDYLQSRRFLIVRVDENKNKYKEMINFPKIQFLRTVAYLKLRSKKVYNDIPNNIIDETVDEAIKNFNSKDNKTGLKFKTKKDLKHTITIRAQNFSKKNWNQFYVSYLFCNSMRTSRKKPYNIIEGSRDLRALHFETKRKNNSWPLEKINNDCKLTYHRKTNDWILSWVHERQKELKETHERFVAIDPGVRTPFVMYSPTKGITEVGKNDAQRLFRLCLHADKLSSTRDKLKSSISKRKKKQAKKIDKAISRIFRRIKNLRNELHKKTINHLVKNYDVVIIPEFNVSNMVRQETRKINSKTVKRMLTWSHYSFRQLLKHKAEEIGMKMITQNEAYTSKTCSACGNIQNIGGRKVYKCKGRRFLIVRVDENKNKYKEMINFPKIQFLRTVAYLKLRSKKVYNDIPNNIIDETVDEAIKNFNSKDNKTGLKFKTKKDLKHTITIRAQNFSKKNWNQFYVSYLFCNSMRTSRKKPYNIIEGSRDLRALHFETKRKNNSWPLEKINNDCKLTYHRKTNDWILSWVHERQKELKETHERFVAIDPGVRTPFVMYSPTKGITEVGKNDAQRLFRLCLHADKLSSTRDKLKSSISKRKKKQAKKIDKAISRIFRRIKNLRNELHKKTINHLVKNYDVVIIPEFNVSNMVRQETRKINSKTVKRMLTWSHYSFRQLLKHKAEEIGMKMITQNEAYTSKTCSACGNIQNIGGRKVYKCKGCNVVMDRDVNGARGIFLHALLDGAICMHM

SEQ ID NO: 2579 - protein, 331 aa, Diversispora epigaea
MDKVPYEVLDHAISDAIQARDEIITRNKENQCQHHVLHFRSKKNDHQTITIRAQYCREPLRFYIRLLYNKKLLAVDPNHPRHKMKLPFYHEHRRRNHGWPNEIGKVKMDSKLIYERKLGYWTFVWVHGKSIRENQVKEIHIAAIDPGVRTFLTWYSPTVGHGNIGDNDINCVFRLCFALDAFISRTTRALAKKRNSFKCTQARMRRHIQNLVDEVHKKTALWLTKTFDIIVLPKFNSVQMPHKQKRKINSKTVRKMMSWAHARFRNRLLSKAEEFGKIVITSVSEAYTSKTCSRCGYIKRNLGGNKVFRCDGYGLQINRDLNGALDGALVM

SEQ ID NO: 2580 - protein, 375 aa, Diversispora epigaea
MKRKRSATQELAQKSKKRILIGNVNTSNRNIQITNSGQVSTGNKSVSPFWKNHTKEISIEVVVTSKDRFCKFAYELVKWILNKNGTKIMVLGSDVNIDNTKSDQSRIIKDEKRLKTRRIRMYLTPEEKEKLKMWMGTHGYNDCFTNEKLSWVKRTPREVRSFVIRQLMSAYKTNIKTHGSNFRMKYKSKKDRSQTISILARDWNRDRGVSFRCHRNQEDVKGKVISLDPGVRTLMTCYDPKGQIVERGNGDLDKIFKLSKKYDNLQSDKYQALGRSNKRKRYRLGMKMRRIVKKIRNFVDECHHQLARWLCKSYEIILLPKFESSNMVLKNKRKISKEICELQDNRMYGRLVEIVDSLKKILVDQKRLDVILVIW

SEQ ID NO: 2581 - protein, 613 aa, Diversispora epigaea
MIPPPPPLPSKRIIYAQEYPVKNSISNDKKKSYSTLNAKDCKPYWNDRVKVLSERLWLPTMIDYAGLPMNSLSTCSYSTLKNSWFSSTIRQPTNVNCPNIYLPSTLPSSADCRRFLIVRVDENKNKYKEMINFPKIQFLRTVAYLKLRSKKVYNDIPNHIIDETVDEAIKNFNSKKVYNDIPNHIIDETVDEAIKNFNSKLIYFRKTNEWIFLWVHENQKELKETHERFVAIDPGVRTPFVMYSPTKGITEVGKNDAQRLFRLCLHADKLSSTRDKLKSSISKRKKKQAKRIDKAISRIFRRIKNLRNELHKKTINHLVKNYDVVIIPEFNVSNMVRRETRKINSKTLIYFRKTNEWIFLWVHENQKELKETHERFVAIDPGVRTPFVMYSPTKGITEVGKNDAQRLFRLCLHADKLSSTRDKLKSSISKRKKKQAKRIDKAISRIFRRIKNLRNELHKKTINHLVKNYDVVIIPEFNVSNMVRRETRKINSKTVKRMLTWSHYSFRQRLKHKAEEIGMKMIIQNEAYASKTCSACGNIQNIGGRKVQGMIRIHSPIENTNKYDRKQDNFIELCFTKDLAIAWQDNDINNNNVKDTKNYIDSEQNRKSRKDYS

SEQ ID NO: 2582 - protein, 235 aa, Diversispora epigaea
MKLPFHHEHRRRNHGWPNEIGKVKMDSKLIYERKLGYWTFVWVHGKSIRENQAEEIHVAAIDPGVRTFLTWYSPTVGHGNIGDNDINRVFRLCFALDAFISRTTRALAKKRNSFKRAQARMRRHIQNLVDEVHRKTALWLTKTFDIIVLPKFNSVQMSHKQKRKINSKTVRKMMSWAHARFRNRLLSKAEEFGKIVITSVSEAYTSKTCSRCGYIKRNLGGNKVFRCDGCCLMEP

SEQ ID NO: 2583 - protein, 237 aa, Diversispora epigaea
MTRTLRFRVLNPKYVCNCKLFSSPKYIKANIRRAVEDEDTTRRGVDDGKEIEEESKETHERFIAIDPGVRTPFVTEVDKNDAQRLVRLCLHADKLRDRLKSSISKRKKKKAKRIDKVISRIFRKIKNLRNKLHKKTVNHLVKNYDVVIIPEFNVSNMVRRETRKINSKTVRRMLPWSHYSFRQRRKHKAEEIGMNDHTERSVYFKNMFRMWKHTEYRRGGYEQGCKWGAGEIPSRVA

SEQ ID NO: 2584 - protein, 400 aa, Diversispora epigaea
MGLMRLTYNTIIDYLQSRRFLIVRVDENKNKYKEMINFPKIQFLRTVAYLKLRSKKVYNDIPNNIIDETVDEAIKNFNSKDNKTGLKFKTKKDLKNTITIRAQNFSKKNWNQFYVSYLFCNSMRTPRKKPYNLIEGSRDLRALHFETKRKNNSWPLEKINNDCKLTYHRKTNDWILSWVHERQKELKETHERFVAIDPGVRTPFVMYSPTKGTTEVGKNDAQRLFRLCLHADKLSSTRNKLKSSISKRKKKQAKRIDKAISRIFRRIKNLRNELHKKTINHLVKNYDVVIILEFNVSNMVRRETRKINSKTVRRMLTWSHYSFRQRLKHKAEEIGMKMIIQNEAYTSKTCSACGNIQNIGGRKVYKCKGCNVVMDRDVNGARGIFLRALLDGAICMHMHM

SEQ ID NO: 2585 - protein, 542 aa, Diversispora epigaea
MKNSMIPPPPPLPPPPPLPLPLPPPLPPPPPLPLPLPPPLPPPPPLPLPLPPPLPPPPPLPYWNDRAKVLSERLWLPTMIDYADLPMNSSSTCSYSTLKNSWFSSTIRQSTNVNCPNIYLPSTLPSSADCKEEEQPSIEGKGKKRKKILTVRKNKKDENIIRTLNMKLYPNLAQKHLLKRWMGLMRLTYNTIIDYLQSRRFLIVHVDENKNKYKKTINFPKIQFLRTVAYLKLRSKKVYDNIPNNIIDTTVDEAIKNFNSKDNKTRTPRKKPYNLIEGSRDLRALHFETKRKNNSWPLEKINNDCKLTYHRKTNDWILSWVHERQKELKETHERFVAIDPGVRTPFVMYSPTKGITEVGKNDAQRSFRLCLHADKLSSTRDKLKSSISKRKKKKAIRIDKAISRIFRRIKNLRNELHKKTINHLVKNYDVVIIPEFNVSNMVRRETRKINSKTVRRMLTWSHYSFRQRLKHKAEEIGMKMIIQNEAYTSKTCSACGNIQNIGGRKVYKCKGCNVVMDRDVNGARGIFLRALLDGAICMHMHM

SEQ ID NO: 2586 - protein, 510 aa, Gigaspora rosea
MWNNGNGLGQIISSMARLHATNCQNHVVVNLHKRLTRWIQWKLEKQLQFLSKNNNCTLTHHLVSKLVHNQPFSLPHFVDKLNPQYRILVEIRACYTFRKVKQVILENKLISEDVIKQEWWNYLRPLWKILITFEKNNHVDAESRCSSNRRGRGLCLFTILPHTSFQQQFVLIDSDALYQIFSKINFCGLGRVSKSDFSENIEEWWRVAFRIDKVTTTQRIFGFSIMTDGMSVSANLKKEVTKQDIPVNAYGFDKEGNFHPLDVRDNDRIVGLDPGRKDLFVAMSEEKKPIRCSTKEWHILCGHVYARKKTEVWIKGNNIVENILHNIPTPSCSSITSYNNYLTYVLQHMRILIEFYGERRWLRMRWKSYINRNKAYDKICERITKKNPRTIVAYGNGKFSSCSKGHVSGPIKGLYKELKRRLGKRVRLVDEYRTSIICSTCNGRMDKRSRFWSLKTLWNRDTNAARNIRRLFFYMNSNNGERLEEFRRSQNRGGEELPFTVATSGVSSDA

SEQ ID NO: 2587 - protein, 820 aa, Caulochytrium protostelioides
MFRRRPQAVLAWYEAQCATMEDAPSVGARGRPAPLAIRTTAERGDELEWSPTPALLARLTAAAAEVRADGAVCAATVPWSLTLSTAGIDAWLLAVAPRHQDAAASASASVSARDVSRARQALAQALQALDTQIPPRRRERLKLMLFLAWDRMLPSDASDADALDDDSDAWHPWRPYTRSLAPTHASLADMAGRSWARENAAADAVDAVPPPAPSLTDEMVELITASGSPLAARWEAWHGRWTGYYRQLQPALAHLQATFDAAEGLSSASSSAWRTALVTADMLINTRGLALGSMPSREPIHTAAVPATLADPALEALEYLVPLLDYCNHDAEHANAFWEVGVDGVRLMVKAGAVAAARAAADAHQQADAHATANARAAVDGIPLLISYGDDKSDLETVFLHGFASLPTVRCLDAATVTPMAPPLPLTGLVSALDRALTARAATQAADAKDAAPDAETRFAVLQRLGLPPVLDFMEFALSVSAVSPNAALATAAAPPRSILASGLNTDDRVRLHVMAASSEQPLVRLWEALDELDAADEAAGRVSDSSARIDVAAALFWRSDSQDNGDADDGAAVLEAALAGAVTATLHQSLHALHTAAAAVYRPSGDPTWQREAHAWLDLAEDALTTGTPARLPPFPVHALVQASRWCLDALDVADPHAFCLRSSLAWLARYAVALAALLPSADSAPNRSVNDQYYVEAGMKATQKQSETWQLHLKEPLSEMSSKSTALDAHRRFLEVWLATYEPLWATFLKPCRARQRLGLYSYKKRVFAKFMNRVAKEAATEMAPVVAEVRFRTVLVDEFRTTQHSEESGVLEEPSAS

SEQ ID NO: 2588 - protein, 554 aa, Caulochytrium protostelioides
MWQRHLKEPLLRLSGVSSKGTALDAHHRFLEVRLVTDEPLWAEFMKPRWACQRLRLYSGKQRVFAKLMNCVAKGAATEMAPMVAEVVVAYGASQFAPGGKSEIAVPTARAYQACAHRFRMILVDEIRTTQVHAETNDFPAKDRKEPWNDMKALDELKAHWPPQSPRHSYKDIKNSDRYVYVYPWVMTDGAADSAALCGDLLDPCKQSFKVARQLKVSPTVAPPSPALKPGEVPAAPPDQNPLKVTNPTLCICTSEAMSNNDIAELADKLSNLPTIIRTKFKSVVVLDPKHARLNDKKDEVLVLSKDDHRSGADVMLKGLGLFWPTDAAEQKGFYDAANNQDLCVAVGQSDDQIDAEEAFKYTAALFLDRFALKDPTLVDLNGRSRSFHESHIGCMLFQLRWAGQRLYGKDWKDLPSPATVYPVTLSQPSKHESYYAHFKIDKMPCPKGKKLKFGIVYESECSKKKEKTKVYFTAFQPDAAKWEPVSTNNAHCEEQESNKKRKKTEFTQKKVDLSPATLKDYREMFRQLTHSTEGTAGPVFDIMIYPEAACKIKD

SEQ ID NO: 2589 - protein, 457 aa, Elysia chlorotica
MAEKLRKTLWIPGNEPDSDCTVSITGKLNELVNSIDPAPEALGIYKVKFKLTRHQHNVLKDLLAASNLAWNWTKWLIEDKGIKRKDEKTLQSIVAKKSIEDPLMAPREVHDNAKLLHKTSTIRLTGMKSYLSALKSSMTLHKGRMEKFDVDYKELYPASGTFTVQKLFIKKFDISMVNKGVRSKVPEAFYRLSITPDSFGNRNEFTERFLRISKKRSYDRMPPINHDSQIQLRKDGHWLLLIPCDRSYLRCKQPESIEKSVVGVDPGGRTFQTTYDPIKREVKEFHSNKGAEFRYIELMKVKAKRHEEHAKNVKSFPKYKEHKAAARKYWHKYETKRNDLHRKLSSKMVRENKLIVIGDLSTKNACKKGGKLHKKSKDDLYTWAHYEFRQRLIDRARGTNTKVIVQDESYTSMTCGNCGHRKTDLGGDKVYNCTECGCSIGRDVNGGRNILIKAMIE

SEQ ID NO: 2590 - protein, 459 aa, Elysia chlorotica
MAEIIRKQLWYPGYKPENLSGVVEKLKEVGASNDESALGTFKIKLRPTAYQKACLKRVLAASNLAWNWTKWLIEEKGVSWKDKKTMQAIVVKKSIESLENQDMVAPEVRANQQLLSKTTSVRLTAMCSFVAATKSSMTLHKGCTRKFDVGYKELYPRSGTFGVQKPYIRKFEESMLPAKMPTEARKNFNRLRLSILPNSFAAKGNPNERFLRIGKRRSWESMPPISHDCKVEMRKDGSWLLLIPCDRSYLRFSKPVAEKNHAVSLDPGVRTFQTEYNPFKQETRNHGSQRDKDRINFFKTKAQRHEVLAKTNKKEYVRKEHKRQADKYWHKHGKYRDNIHRELASKLVNENDLVIVGDFSSSRCAAKRAGSKLTKQTRAEMYSWAHYRFKQRLIERARGTGTRVHFQDESYTSKTCGNCGNIKEDLGGNKTYACEVCGVVMDRDVNGARNIMIKSLTKN

SEQ ID NO: 2591 - protein, 1564 aa, Rhodotorula sp.
MGVNGWLPKHLQLDGLGWATSTHHGLERALKEVQDERENSNAFLVILDYGSLYYSTQFCSILGGRDKSDPATARTEARAAVEKKRREDANVIRNTLGVDTCILEIHDGPLRPEAKRATIGKRWKRRNKEREKYGRMKCGQFADEMMSGLGVRSEADFEANDYILIADDEGDRALNRVLTARHELPDPDADVELPRLGELDIFQAERLVCRSDPSSIVVIGRDTDEPAINTARERKWSILVGWNNGVAYRRRGSPADKTWRKKSGPYSDTILLFAPGLDRLYTSSRERRMKRSLLLGQDYSDRGLYGAGQKTIDSGRAKPLLDVDWRNLPALQAALARYFGSGTPTEAAEETARRFSTALRTWAGERVAVLDVSTFYAELDLDPARDPNAPIRRPGLVWPTANWPDARPAKTDQHPLAPAKLSPRMPRDPSRAGQIQPARSPRLRLRPFVESGSVLQGHQDAPPDKPRTPKTRRSKKEREASDDGDDEEEEDDKEEDDDEEEDDDEEEDDEEEDDGDKEDDGQGSKGTKRAAAQPKATGSFGTRARKPTFDYAPASTHRLVHGTWERSLVPECFIEQEEPLKGRRRRKRHLSGSAQRRKRRGHQPWQSRRRTEQSKQRDELLEQALAQAQKLDEDVDDEDVDMDSPSSGIGGPELEMTTGNDKLEGRRRGYVFGKRNLPSSSPPSSSSPPRSSLPPRSPSLLPPKQVPEPPRLVRLRPFQYVLRLVDFCMKQSLPWLRSAYSAWATSVSDPQTVGSAQEGAVRLATLETKGRDGVAHIGAMLAQAGGGREDAQEKARFVTFRQAATAAGHPRPPNFRRHFFITVLRPYDTAIHSESKKFIDDLGELGKSLGSDLVRSHDVLANFGLARTTGPLDPSLAQWLASSVPETHDLLGKTISRLLKKRRFRLLCANRGRAVPRLAASFPAPLQAHDQQRHPPLSDSVLTAIAQLSPTTPQLVASLQRTIEQILEFRDGLLSLIYETKNGQNVKLKCDGAKIKEFIAEEGLKEYMVGAHLLIRRMLGAQLLPNLQLEAFPFDAAELAATLDHYADLCADAERLAKSAIRDLVPALVPGAEKSRLAIAEPLLDLFETRNCASRSSRRAELKSAICSVKVVTVKFNGKSYGQIVVPEPVDLVVLRDESKAVAASVRKIKEIFGLGKKALVSLGKCGATSELLNIICRTERLPRGFLPTGAMSVSPASISLFGCRTTILRHNRAQFLKARGFDLGTISAGRLFERALSRTTEEPVFPRWSNLDPQGKPPRTSKGLPITWPDSDKTGGIVRVREFAATNEDRSTAGIDIGEVELVTLFTSSPYTENGAIAEGVALYARRSLLELQKLSSREASSLLVERQRVLSPSTAPSTGSTESRSSITIAALLSSSTSGRHQQEHARLRSRAEQQGAAAELARHILGGSASKEGVGTAEQAQAALVYVGKGSMVRAGGGHGPRSGAAIARQLEVELRRRQVRCLFVRTNEAYTSSVCPSAHCTNEDGQRNPVIAPKRTDGSTIGRLAFCAAENKMMHHDGVGAANIAISGEKQRLFGLPACPFANSVSTLSGSPSGTASAAA

SEQ ID NO: 2592 - protein, 433 aa, Globisporangium splendens
MKDVPDWWEWLVGARAKEIWLPSDQDKSSPVLSKRLKGKSWFTLNSAIETPAAKTASQSSSPTTVDSEKTPNSMLKVRLYPTNLQAKLLNKMFGTHRAIYNKLVECSREDCRKLKASELTAKYRPISQKHSLANYLPEYHLEVPEGVMDSTFRDYTKALKSSMALFKALKKRDKKTSFPELKFKSRKHNSSSIELRSRDIKSSDGVVRFFPRYFGFSKTEGIKIKEELPEREFAVRLQRTRYEKFYLCIPRVKEFEQTSSSRACAIDPGVRSFITMYDPEGLTLGVDDTNEEIFRRCLTIDRAISRKTKEASKRKRYRMNKRVFKMFQRVKAMIADMHQKVSSWLSKNYKEVLLPSFKTSDMTSKQKRISSKTSRAMLTWSHYKFKMMLEYKVKRSGGKMVECEEHYTTKTCSRCGRTTTSHERKSSIAQAVI

SEQ ID NO: 2593 - protein, 873 aa, Globisporangium splendens
MEDEVAPEADDKHLKDMIVPEYDNESENVIRNTDFKRSSRIFTSLEFARKVFRNWIIRSSIDVFIECTKKAKQLRLFSLVPLKRGFECSHLKICNNGLHGLLKRGGLQVPPSDSRWREEADSWWRKLFRIDRFGTSNRKFAGEILADGKAVSVVMRKPKKTVASRRIDLSDCSQVWGLDPGRKDMFVASNESGPKVPCSTREFYEDARYTESLKKIKRWQDSHPDILEAIRNMPTKKTASVKKLKQHVDFLLPRLDLLLDFHIRKDLHGLIFKQHVFAQKKLQLLCRKLTDGTRGRTLVGFGDWSNRDQVGFIKKSPAGPVEHFESQLERYCSAIAVDEYRTSKLHSECHGELKDQYPKKPCRDREVRVMKVPSVLHCTHNGCRDVTVNRDANASRNILLKCEISGVSLPVAFRRSRQCADVPTGGIYIARLLEHYLRHPTCMAPCFGKRSTLVSTSAASLLTKKSEMDATEQDASAAPRALTAAEKRAARRARVLQGGENRLKLVTGQISTLKEGSSAESAFNKEMDDALNELLGATDDSNTKSTSASVREEQSKTGAGGGATGGAAADPRFALRPDPAQRRRDAALRRQKKEAVVQELLAPLTATTQSRAEVTNTTVLSPAVAAKETTNVVPKSTTAKAPATFSRHAFALRLHSLEEKAITLVIFAAAVYLGFNYAFWLAAAMTIDLQSISTDLDAKDQILLSYQELLAQGLPLDSIRQQMEREHLEGPVVERIERLLSAQFSEAQPNVSFTNKFLPNVWDLPEYFSSLVCRPPVIVCVLLVRLLLTLVANGVHLAFQLPDVKNPQEDDLGFIVNLALSSKPALKDSHRSFVVTGIGYLIKFRKSFDDVFFFLYVLLLAVALRAIWAASFA

SEQ ID NO: 2594 - protein, 342 aa, Globisporangium splendens
MASNVAISKREFDEMDHESKTLFGSRLFVNQITMNGYSASVLLTRLKSETDSVKKKPKQTKTEEDMLNDEGRFLSSEYEAEALVATDPGMRSLCTAVSEGMKTKKKTMHGGRSPRQVGDGIVHSISTREYRHIAGMDKARFRYENLKKRKKHCSKAINSIKSYKTFSFEVYLWRLKIVWKHVSFLLEFCANNAFLKWRFFQSRMKEKTADVMAKRLVPIASVQVLAGYGDWSLRDGISGHASSPAKGFRKALKKQATVVPIDEYRTSKLCSDCHSPLDQALLSTKIKNNKVVLKKTRNVLRCATSSCKANFWNRGVNAARNILSLLKCKLLGLGRLEAFCRG

SEQ ID NO: 2595 - protein, 433 aa, Globisporangium splendens
MKDVPDWWEWLVGARAKEIWLPSDQDKSSPVLSKRLKGKSWFTLNSAIETPAAKTASQSSSPTTVDSEKTPNSMLKVRLYPTNLQAKLLNKMFGTHRAIYNKLVECSREDCRKLKASELTAKYRPISQKHSLANYLPEYHLEVPEGVMDSTFRDYTKALKSSMALFKALKKRDKKTSFPELKFKSRKHNSSSIELRSRDIKSSDGVVRFFPRYFGFSKTEGIKIKEELPEREFAVRLQRTRYEKFYLCIPRVKEFKQTSSSRACAIDPGVRSFITMYDPEGLTLGVDDTNEEIFRRCLTIDRAISRKTKEASKRKRYRMNKRVFKMFQQVKAMIADMHQKVSSWLSKNYKEVLLPSFKTSDMTSKQKRISSKTSRAMLTWSHYKFKMMLEYKVKRSGGKMVECEEHYTTKTCSRCGRTTTSHERKSSIAQAVI

SEQ ID NO: 2596 - protein, 327 aa, Globisporangium splendens
MRSNGLHGLLKQGGLQVPPSDSRWREEADSWWRKLFRIDRFETSNRKFAGEILTDGEAVSIAMRKPKKTVASRRIDLSDYSQVWGLDPGRKDVFVASNESGTKVSCSTREFYEDARCTESLKEIKRWQDSDPDILEGIQNLPTKKTASVTKLKQYVQFLLPRLDRLLDSHIHKDCRGLKFKRHVFARKKLQLLCRKLTDGTSGRTLVGFGDWSNRDQVGFIKKSPAGPLKRFEHQLKRYCTVIAVDEHRSSKLHSVCHGELKNQYSKKLCRDGEGRVMKVHSVLHCTHNGCRGMTVNRDANASRNILLLLECEIPGVNRPVAFCRSR

SEQ ID NO: 2597 - protein, 327 aa, Globisporangium splendens
MCSNGLRGPLKRGGLQVPPSDSRWREEADSWWRKLFRIDRFETSNRKFAGEILTDGEAVSIAMRKPKKTVASRRIDLSDYSQVWGLDPGRKDVFVASNESGTKVSCSTREFYEDARCTESLKEIKRWQDSDPDILEGIQNLPTKKTASVTKLKQYVQFLLPRLDRLLDSHIHKDCRGLKFKRHVFARKKLQLLCRKLTDGTSGRTLVGFGDWSNRDQVGFIKKSPAGPLKRFEHQLKRYCTVIAVDEHRSSKLHSVCHGELKNQYSKKLCRDGEGRVMKVHSVLHCTHNGCRGMTVNRDANASRNILLLLECEIPGVNRPVAFCRSR

SEQ ID NO: 2598 - protein, 272 aa, Synchytrium endobioticum
MVRPTRHRVAGVGPKIGKMATRAAFMKNPSKGRLLDEMFLLPPEMLTKSRYELDDRPRRYVRTPSFKTNGLVLCLLWIDTTSKPPPPDRKVEDAINLPNIFHNSTLRSTHKDAWVIAIDPGATCIAGAVPYDPKHPNQRRNLAVTTKCLAEPERRYRDWLEADKPEAICTAERECTKSDQETWAVFLRRFVISYDIARTYYSSTKYKRKRWDANKAKRGELDRVLEGIVNMVDESMGHKLSRDKQVIVAIGMGDFTSAKSRHVMFTRYLIYD

SEQ ID NO: 2599 - protein, 482 aa, Synchytrium endobioticum
MPHPPSPSLAHHCQTIQLLPSSSSSSSSSSSSSSSLDKPDVMADRAVIPVSMVKQMLSVLSPQLQLTALRAPLHDMVSQAVGTHHSEPLTALLNQDPDSVLRLLANPDLLRTRILEALDSPPQKVPQNEPSTNHPMLPNPDPHAANPHTRDRKDDRPIYHSAYPPTYHQMVDSNRTWEPVLELPAMSLCDKDLQQIAILQRKYVKPWVVWVAVTTKSLAESERRYRDWLEGDKPDAICTAERECTKSDQETWPVFLERFVISYDIARAYYSTKRYKRKRWDADKAKRGELDRVLEGIVNMVDESMGHKLSGGKKVIMAIGMGDFSSTKSRHVMFIRYLICKLRPLGYTIVGVNEYYTSKKCPCCEEFVEMPAMCRGCNKWYHRDVMAADNMVNIVRGYLEHDERPTYLKPPSKNKNTPMKWNADEGGGVKSREKVVYHLQFTDVIIYILQYNYIGTSPGMYLFSNFIWKTGWIREVGGRSIP

SEQ ID NO: 2600 - protein, 299 aa, Synchytrium endobioticum
METMTYDFLIVGSRRYTQRSFQKIVLKVAGVGLNARRAAFMKSPSKGRLPDEVFLFLPAMLAKSRHVLDNSQRRYVRTSSFKTNGLVLSLLWIDTTSKPPPPDRKVEDAINLPNVFHNNTLRSTHKDAWIIAIDPGATCIAGAVAYDPKHPNQRRNLAVSTKCLAEPERRYRDWLEADKLEAICTAEWDCTKSDQETWAEFLKRFVASYDKARTYYSTKKYKRKRWDVDKAKRGELDRVLDGIVKMVGEFMGHKLSDDKKVIVAIGMCDFGSTKSCHIMFIRYLIRKLRALGYTIVGGQ

SEQ ID NO: 2601 - protein, 509 aa, Synchytrium endobioticum
MLPLLKERVVEVVGEDGKQAIEEIEAWVDASLEDDSSSPPPPVQVFYKVNRLLPGPYRWSIVPHTSFGDGYVTMSEECLFDLLFDIPSFQKTVREVAGVGPKISKIATRAAFMKNPSKGRLLDEVFLLPPEMLAKSRYVLDDSPRRYVRTPSFKTNGLVLSLLWIDTTSKPPPPDRKVEDAINLPNIFHNKTLQSTHQDAWIIAIDPGATCIPSPPNALPNPNGVTEIGWRPTSRKPFAQPNGSAPSPTRRLGPSFERFVTSYDIARTYYSSTKYKRKRWDADKAKRGELDRVLEGIVNMVGESMGHKLSGGKQVIVAIGMDDFTSAKSRHVMFTSTKKYKRKRWDADKAKRGELDRVLEGIVNMVDESMGHKLSGGKKVIVAIGMGDFSSTKSRHVMFIRYLIRKLRPLGYTIVEVNEYYTSKKCPCCQEFVEMPAMRRLYCRGCNKWYHRDVMAADNMVNIVRGYLEHDERPTYLKPPSKDKNTPMKRKADEGGTSRAGPSKSRKTR

SEQ ID NO: 2602 - protein, 333 aa, Synchytrium endobioticum
MEYVLRWVDESLENDPPSPPQPVQVFYKVNRLLPGPYHWSIVPHTSFGDGYVTMSEECLFDLLFDIPSFQKTVREVAGVGPKALKIATRVAFMKNPSKGRLLDEVFLLPPEMLAKSKYVLDDSPRRYVRTPSFKTNGLVLSLLWIDTTSKPPPPDRKVEDTINLPYIFHNKTLRSTHKDAWIIALAPGATCIVGAVANDPNHPDQRRNLAVTTKCLAEPERRYRNWLEADKPEAICTAERECTKSDQETWAVFLRRFVTSYDIARAYYSTKKYKRKRWDADKAKRGELDRVLEGIVNMVDESMGYKLSGGKKVIVAIGMGDFSSTKSRHVMFI

SEQ ID NO: 2603 - protein, 263 aa, Synchytrium endobioticum
VEDAINLLNIFHNKTLRSTHKDAWVIAIDPGATCIAGAVAFDPNHPDQRRNLAVTTKCLAEPERRYRDWLEGDKPEAICTAERDCTKSDQETWPVFLERFVRSYDIARAYYSTKRYKRKRWDADKAKRGELDRVLEGIVNMVDESMGHKLSGGKQVIVAIGMGDFSSTKSRHVMFTRGYLEHDERPTYLKPPSKDKNAPMKRKADEGGGLKIRETLAYGPHLQALLALQISYMLRILTPSAHLQLASFLQQLLQQLLQQLESV

SEQ ID NO: 2604 - protein, 440 aa, Synchytrium endobioticum
MSEEYLLDLLFDILSLQKTVREVAGVGAKATKMVTRAAFMKNPSKGRLLDEVFLLPPKMLAKDRFVLDDRPRHYVRTSSFKTNGLVLSMLWIDTTSKPRLPDRKVEDAINLPNIFHNKTLRSTHEKAWIIALDPGPTCIAAVTTKCLAEPERECTKSDQETWAVFLERFTLRSTHEKAWIIALNPGATCIAGAVAYDPKHPNQRRNLVVTTKCLAEPERRYRDWLEADKPEAICTAKRECTKSDQETWAVFLERFVRSYDIARAYFGTNKCKRKRWDADKAKRGELDRVLEGIVNMVDESMGHKLSGNKKVIVAIGIGDFSSAKSRHVMFIRYLIRKLRPLGIYHCGVNEYYTSKKCPCCQEFVEMPAMRRLYCRRCNKWYHRDVMAADNMVNLVRGYLEHDERPAYLKPPSKDKDTPMKRKADEGGTSRGGPSKSRRTR

SEQ ID NO: 2605 - protein, 399 aa, Synchytrium endobioticum
MGIKYFWKYLTSLNVVKEKLGSVDSKQLFGVTGNGAPKGVPGGLKGVDGEGRQGRIYVDILGCFYTEIIRCVELGHPSRPYNFAPLMPPPDRKVEDSVNLPNIFHNKTLQSIHKKAWIIGLDPGATCIAGAVAFHPSHPDQRRNLAVTTKCLAEPERRHRDWPFAQPNGSAPSPTRRLGRLPRTHVRSYDIARAYYSTKKYKRKRWDADKAKRGELDRVLEGIVNMVGASMGYKLSGGKKVIVAIGMGDFSSTKSRHVMFIRWYITGWAEQESKDSLGGLKIRENVAYGSAKVFDPSIRNCQNDCAYHSKVNKPPYIPFMAIPNMAAGTPCSKRCYGAGPKEYGKAISHELGEALLSPAFFGWFDDHNNETADLCNSQVYQEGEVWLQPMWSNEKMACV

SEQ ID NO: 2606 - protein, 472 aa, Synchytrium endobioticum
MLKERVVEVVGEEGKQAIKEIETWVDVSLEDDSSSPPPPVQVFYKVNRLLPGPYRWSIVPHTSFGDEYVTMSEECLFDLLFDIPSFQKTVREVAGVGPKTLKMVARTAFMKNPSKGRLLDEVFLLPPEMLAKSRYVLDDSPRRYVRTPSFKTNGLVLSLLWIDTTSKPPPLDRKVEDTINLPNIFHNKALRSTHQDAWIIAIDPRATCIASAVAYDPNHPNQRRNLAVTTKCFAEPERRYKDWLEGDKPEAICTAERECTKFDEETWAEFLERFVISYDIARAYYSTKRYKRKRWDADKAERGELDRVLEGIVNMVDESMGHKLSGGKKVIVAIGMGDFSSTKSRHVMFIRYLIRKLRPLGYTIVAVNEYYTSKKCPCCEEFVEMPAMRRLYCRGCNKWYHRDVMAADNMVNIVRGYLEHDERPTYLKPPSKDKNTPMKRKADEGGGVKSRETMTYGLHAFDPRMLICSLLK

SEQ ID NO: 2607 - protein, 484 aa, Synchytrium endobioticum
MRDGWMYVVPSRQPYIVKYGGAVKLECRAVGKDGVPIKRASVQHSQCLWGRCQADKGLKWTKKSHFGSEIRNVYQQVAASVKGREFKVKKNPPWNCPGASAHVCHSSKQIPHPYKDADLYHRRVFDYVIYTDLESVSWITMYPGRPFGKLQQPSPLVPGDYRISNRRYTRIVAVDPGIKNLGSLVRATNGFDYDDKDDEMKEMPDIREISLREELNQAQLPAKEKGRRLKQLDQPWTYSNDQWKEKTGINLHHRLNQVRLLKHPHVQQIMADIPSACTSQYQDYIHRPRYLVRHLETLVDYHDKAKSSRWDRYKRKQRALHEICMSIRGSGTKDDTVVIWGNGNFTSLGRKQGAPTKALKRHARRYTHIITYDEYMTSQGCSHCARRGVPEAVADDPRLSGYARAQGKSGHVLMAKRTRANRLASVLEDAGCFVAQRCQPLHAVRYCETCSTVWDRDYNAAKNILHCFLYEPAFSERPRLFKRV

SEQ ID NO: 2608 - protein, 780 aa, Synchytrium endobioticum
MTLYAADDTWLANALLNQRDIASVLPIDRALWYGLELKTVLFASNQITTANLKSVAEPLAAKYQRLVVDLYWDAQNKDFQMCPAPYPSVIPSPTPTMLAATAAAVTGTATTSRAPSPTSTGTDSFIAGYNCSNSIRTLSDLLPYIASYMSDTSSRLAANVVFLVFNLHDLGITPTAGAAATTKTLSSTLLATIGNSSIYTPQDLAKHRSSVNDTWGFVSPYYVTSSSGNITSTSNGWPVAQYLTLTGKRLLVAFGTNTISSAVYDTAVDANTIFSATALAISMTGTGSFDSEHFRLVPGTTGLSYSFVQIQDSALTPFTQAEDLAATIWTWDVNEPSNKGRCAVLKKSNGRWAAADCDGRYAVACRSISDPYQWVISGGQEYHWNGDSLCPMGYRFAVPRSPIESTFLYNALAGTSNDQIWIDYNSNSLKNCWVVGGNTKCPYYDSALIIPDIIAASLREGLLVVVVAFIFLIWQVRRQASWRRIRMRRTEHSQVFILYYYKTTETIELLGVSFHLLHDEPLTKVPSSILVLGFDFVHDRLPRQPHTDRTTNNPRLATFRIMRYRDWLEADKPEAICTAERECTKSDQETWAVFRKRFVRPYEIARAYYRTNKYKRKRWDADKAKRGELDRVLEGIVNMVDESMGHKLSGGIKVIVTIGMCDFSSTQSRHVMFIRYLFRKLRPLGYTIVGVNEYFTSKKCPCGTEFVEMPAMRRLYCRRCNKWYHRDVMAADNMVNIVRGYLEHDERPTYLKPPSKDKNAPMKRKTDEGGGVKARVPTGR

SEQ ID NO: 2609 - protein, 316 aa, Synchytrium endobioticum
MELPNNVHNTTLQSTHQDAWIIAIDPGATCIAGAVAFDPNRPDQRRNLAVTTKSLAEPTRRYRDWLEADKPEAICTAERECTKSDQETWAVFRKRFVRPYEIARAYYRTNKYKRKRWDADKAKRGELDRVLEGIVNMVDESMGHKLSGGIKVIVTIGMCDFSSTQSRHVMFIRYLFRKLRPLGYTIVGVNEYFTSKKCPCGTEFVEMPAMRRLYCRRCNKWYHRDVMAADNMVNIVRGYLEHDERPTYLKPPSKDKNAPMKRKTDEGGVASAESRYIPGWAEQESKGSLGGLKIREKWPTGLLDQTRYQRGLHFNL

SEQ ID NO: 2610 - protein, 308 aa, Spizellomyces sp.
MSVSVYLKHPEADRYGKRTGRKSAKSLEEEVKVQYVENNLPACRTAANVIVIDPNKRDLLYCQDNKGIIFRYTSNQRAMETGSRQQQNQRQQMKKEAKIDLIESRIPSHKTMNLMDFTRYLLVRRVHCEHRKQFYSHPAHTRWKWHSFINKQKSESSLISNMHKKYGDFTVVMGDWSDAGRTAKFQTSSKTKGWRTLFKCNGIDCFLLDDYKTSSVCPHCNSPEFVQKCVKERPHSRPWRQREGKTEKVHGLLGCTNPNCLQQDWMMRYWNRDTLATCNMLSIVQSLLDGKGRQAVVQQVYSGGSVDG

SEQ ID NO: 2611 - protein, 1144 aa, Powellomyces hirtus
MSDRRSPPRKKQRTRSPEEYGDVHDPGGSSADSPWSSDPASSNTNVHTPPQEHPVPQIPATPRKKLRQPHRPDSNPSSSSSSSSSSDWDTSGDDSYSRELARRLRRRKKRKKPPAVPSVVTNKGSFARAWFGTAQERARLMSFINTVHHLAQHATWAIKYWLLRCQVAGSFPVLTLKHIRIILTLLNNPRYNPRAADMVYITTSLRPIIQAYVVEARFTPTTTGNKIQNAINYCAASILANMHTNVKMHFGEKIRSYINQRLRIKQLADVMQRFRSGNDLRLSLRHLYRRARHVKELAVYPEGLLQSPEVLLQLSPLELEVLEDIWGTYPDRAFNLSEDVTVDVDVVACPELYLESYAVVAHLFEMHGLPLFNALPLRTSHTQTYVTIDTKLLRDVVLLCKRMPINNLNNKMNIWAMCFNLGHSSFHRRGQHPFTHRFEGTIQTDGTGISVWLKAPGAATSGGTRKPTRMTKAKRKAMVEALYVDVPQNLERVRRAAQTDGKTNVILIDPGVRDLLYMKELYRAGSHHPDIPHTFPRTLRYTSMQRSSDMNSRRMRRQRETIRAQTLEVLPANFKGPPRTIMHLESTTPSHKTMNVLAFSEWVEWQAVNRASLVNCYNTGIWTTMKFDALRRKMSAEDKLIMHMRERFGPKLLVVMGDWSSQTKGTVPTEATQDASDRTYTITDSVPAEAAQDARIVQNTQNGAGSSTKRVRGAASRTWKGLKVSEISGSLGDLGTLLPIIVALSKTGQISLSASLIFGGLYNIITGLTFGIPMCVQPMKAIAAVALASNMPMEQIVTAGFSVSAIILVLGVTRTISVLNVLIPLPVVRGIQFGTGLTLVSKGVATIKQSDRWEFGNYSWLDNYFIAILSLIVVLSFYNNKRNPSALIIFIFGLSVAAAKIWGGFRLTGGVTTVPTPGFSFPSAIHPSGSDFKNGFLKAGLGQLPLTTLNSVIAVCKLADDLFPRLRKPVASVTHVAVCVGLMNIVGMWFGAMPFCHGSGGLAAQYRFGARTGTSMYFLGVIKLLLGLIFGSSLLALFTYIPFSILGVMLIAAGIEIISITKDLGGLPALTDRKRGDAFAIMLFTGCSTSFFANDGVGFLVGLVASTVFWISRCRHDGLDPYVDVRAKVKEVRGAWGKRVDRDD

SEQ ID NO: 2612 - protein, 320 aa, Trebouxia sp.
MPSLSPEDEKKFTAERASWWQRYTAYQSFCTHTERTHREFHFQVETDGISVSILMFQPASGSASAPPVAPNSKKRKRRQQQQTSSAWVSGLPDSQLLQAPRIVGLDPGRKALFTAVVHSQPAADSLHRGRPCESKYDTLSWSCSRWQEASGIKHRLRKSELWLNRKPALKAALLDTPTAKVWSTDQFMLHIKHRLQHAPEAIAHFGDRRHRQLRWSTYIKRQQAYAAVCKAISNGSRDTVVAYGDASFSSSCCKGNPSTPTVSLRRQLGGRCRVYDTDEFRTSKLCCACRTPMKGMPLPVTGNPQLQALATILPTYNWLH

SEQ ID NO: 2613 - protein, 569 aa, Trebouxia sp.
MSTRQQRRKANQAGRFYNVKSGVNSFFTDQALLGQIQQAVQLVTPLLVEGHLLANLHVLRCIEAGEAMPKLDQTFFNRCFHAVSFGTGNQARQFNRASDPSLATTHDTLYTQSLPANHQRPERPTSVKYMLNAAALKARVDLDNHVATNFFTRSRRWIRLQLEHKLEHKLHFANMEAARVKSWASSQAKFITINSASLLRLLKAAGWADLPSLSPAGEKQFTAERASWWQRCTDYQSFCTHTERTHREFHFQVETDGISVSILMFQPASGSASAPPVAPNSKKRKRRQQQQTSSAWVSGLPDSQLLQAPRIVGLDPGRKALFTAVVHSQPAADSLHRGRPCESKYDTLSWSCSRWREASGIKHRLRKSELWLNRKPALKAALLDTPTAKVWSTDQFMLHIKHRLQHAPEAIAHFGDRRHRQLRWSTYIKRQQAYAAVCKAISDGSRDTVVAYGDASFSSSCCKGNPSTPTVSLRRQLGGRCRVYDTDEFRTSKLCCACRTPMKGMPLPVTERGRKDHGPESYSVRLCRNTECRRILWNRDVNAAINILHLFLDWVEGRPKPPEFCRTGQ

SEQ ID NO: 2614 - protein, 604 aa, Trebouxia sp.
MSTRQQRRKANQAGRFYNVKSGVNSFFTDQALLGQIQQAVQLVTPLLVEGHLLANLHVLRCIEAGEAMPKLDQTFFNRCFYAVSFGTGNQARQFNRASDPSLATTHDTLYTQSLPANHQRPERPTSVKYMLNAAALKARVDLDNHVATNFFTRSRRWIRLQLEHKLEHKLHFANMEAARVKSWVSLLCRAATEDSSIWDLLPIYTSLREPPQDVATELEHLVATMQSLMGPLPVTDESLRREPQSYLAWLHFVLSDFQDAQDTPHAPKLFSMTPQASSQAKFITINSASLLRLLKAAGFANMPSLSPEDEKKFTAERASWWQRYTAYQSFCTHTERTHREFHFQVETDGISVSILMFQPASGSASAPPVAPNSKKRKRRQQQQTSSAWVSGLPDSQLLQAPRIVGLDPGRKALFTAVVHSQPAADSLHRGRPCESKYDTLSWSCSRWQEASGIKHRLRKSELWLNRKPALKAALLDTPTAKVWSTDQFMLHIKHRLQHAPEAIAHFGDRRHRQLRWSTYIKRQQAYAAVCKAISNGSRDTVVAYGDASFSSSCCKGNPSTPTVSLRRQLGGRCRREVAKITDPRATVYDCVETQNVVVYCGTGT

SEQ ID NO: 2615 - protein, 302 aa, Trebouxia sp.
MFQPASGSASAPPVAPNSKKRKRRQQQQTSSAWVSGLPDSQLLQAPRIVGLDPGRKALFTAVVHSQPAADSLHRGRPCESKYDTLSWSCSRWQEASGIKHRLRKSELWLNRKPALKAALLDTPTAKVWSTDQFMLHIKHRLQHAPEAIAHFGDRRHRQLRWSTYIKRQQAYAAVCKAISNGSRDTVVAYGDASFSSSCCKGNPSTPTVSLRRQLGGRCRVYDTDEFRTSKLCCACRTPMKGMPLPVTERGRKDHGPESYSVRLCRNTECRRILWNRDVNAAINHSSPISGLGRRATEATGIL

SEQ ID NO: 2616 - protein, 404 aa, Trebouxia sp.
MFQPASGSASAPPVAPNSKKRKRRQQQQTSSAWVSGLPDSQLLQAPRIVGLDPGRKALFTAVVHSQPAADSLHRGRPCESKYDTLSWSCSRWQEASGIKHRLRKSELWLNRKPALKAALLDTPTAKVWSTDQFMLHIKHRLQHAPEAIAHFGDRRHRQLRWSTYIKRQQAYAAVCKAISNGSRDTVVAYGDASFSSSCCKGNPSTPTVSLRRQLGGRCRVYDTDEFRTSKLCCACRTPMKGMPLSVTERGRKDHGPESYSLARKYQAAYIQLYIRCPAEVALQRNASRSQHQGVPEAVMRRMERLFEVPDPQKHAWEANTIVLDGSRLEMNFASDEIWQQILGMWKDPVQPVADAATLEQTRQHGRAANELSLQHQLDLFCRKAVSEIVQQLKANKDLLLLLLL

SEQ ID NO: 2617 - protein, 437 aa, Trebouxia sp.
MQSLMGPLPVTDESLRQEPQSYIAWLHLVLSDFQAAQDTPRAPKLFSMTPQASSQAKFITINSASLLRLLKAAGWANLPSLSPAGEKKFTAERASWWQRCTDYQSFCTHTQRTHREFHFQVETDGISVSILMFQPASGSASAPPVAPNSKKRKRRQQQQTSSAWVSGLPDSQLLQAPRIVGLDPGRKALFTAVVHSQPAADSLHRGRPCESKYDTLSWSCSRWQEASGIKHRLRKSELWLNRKPALKAALLDTPTAKVWSTDQFMLHIKHRLQHAPEAIAHFGDRRHRQLRWSTYIKRQQAYAAVCKAISNGSRDTVVAYGDASFSSSCCKGNPSTPTVSLRRQLGGRCRVYDTDEFRTSKLCCACRTPMKGMPLPVTERGRKDHGPESYSVRLCRNTECRRILWNRDVNAAINILHLFLDWVEGRPKPPEFCRTGQ

SEQ ID NO: 2618 - protein, 214 aa, Trebouxia sp.
GLPNRHLVQPARIVGLDPGRKALFTAVVHSQQAADSLQGERPAQHRYNSLSWSCSRWQEAAGIKYKLHKTELWISRKPELHAALLATPTAKVASSAQFLHHIRHRMQHTAAAQIHFGDRRHRQLRWRSFIKRQQAYSAICKEISGGRKETVVAYGDAKFSSSCCKGNPSTPTVSLRRKVGHCCQRGVAKIADPTATVCDCVSTQHVLVYCGTGT

SEQ ID NO: 2619 - protein, 249 aa, Trebouxia sp.
MFQPASGSASAPPVAPNSKKRKRRQQQQTSSAWVSGLPDSQLLQAPRIVGLDPGRKALFTAVVHSQPAADSLHRGRPCESKYDTLSWSCSRWQEASGIKHRLRKSELWLNRKPALKAALLDTPTAKVWSTDQFMLHIKHRLQHAPEAIAHFGDRRHRQLRWSTYIKRQQAYAAVCKAISNGSRDTVVAYGDASFSSSCCKGNPSTPTVSLRRQLGGRCRREVAKITDPRATVYDCVETQNVVVYCGTGT

SEQ ID NO: 2620 - protein, 491 aa, Trebouxia sp.
MALIPDTPYTVVKTGFNKVFHYAPLNAMIKQAVDFVTPLRIQGQLLATFHVIRLVENSIPVPRLTETFWNQCYQAVSTSTGPAAEQFDPARNPLLAASLTAYSQHLPVGHQEPERPTFIKDIVTQTAQLAEVNFRNHVVTNFRPRIKCWIRLRIGTYAYFGNMHRRKLKSWASLLLWAGTTPNQSVTALLPRLLHCMPNRHRFLPNLNSRITHDLVEVKKVFWWMMFTGCPQFCKKLSIRKKGWHFDREVLTDGVSVSIVLAQFPSPAPYAILPTMTPHQLPKKPPPPAPSVTGPVGATHPVVQTAGRIVGLDPGRNSLFVAVVHSQRAHTMIGAPQPTPADKYATFGWSRSKWYDSSDIDRRNARSAEWLSQSPLVESLLQTMPSAKLASTAMFGVHIRYRLQHVAPVLQLYTAHRFRKLRWTRHIKKQRAMATMCNDITASNPSTIVAFGDASFCHYGRGNPATPTKGLRRALGQKCHVFEIEGAEMDR

SEQ ID NO: 2621 - protein, 306 aa, Trebouxia sp.
MFQPASGSASAPPVAPNSKKRKRRQQQQTSSAWVSGLPDSQLLQAPRIVGLDPGRKALFTAVVHSQPAADSLHRGRPCESKYDTLSWSCSRWQEASGIKHRLRKSELWLNRKPALKAALLDTPTAKVWSTDQFMLHIKHRLQHAPEAIAHFGDRRHRQLRWSTYIKRQQAYAAVCKAISNGSRDTVVAYGDASFSSSCCKGNPSTPTVSLRRQLGGRCRVYDTDEFRTSKLCCACRTPMKGMPLPVTERGRKDHGPESNSVRLCRNTECRRILWNRDVNAAINILHLFLDWVEGRPKPPEFCRTGQ

SEQ ID NO: 2622 - protein, 1246 aa, Trebouxia sp.
MATRQARRDANKEGKLYSVKTGFNTIFTHPGLAATTLQAVQLVSPILIASNVLANLHVLRCLETTAGDVPKLDQTFFSNCMYAVTHATGHKAVQFDRAKNGELTKSLDIYLQQLPQGHQPLERPTLIKDILNAASLMARTNFKNHIVTNYFSRTLSWIRLQLGQQAFFANMDSRIASSWAKFVCRAAADNITNIWDLLPRYTSLAQPPQHIMDDLENLVATMQQLMGPLPVTEWSLQRRPESYLPWLQLVLKDFEEAQDTPDAPKLFSMLPQSNNNTKFITISSTSLQKLLLATGIANVPSLTAKAGAKEFTQHQESWWNQYTDCISFSKRAQQSRRRFKFQVQTDGISVSVLMFQPFPSTQTDTATAATAAPPPPPGRKRKRQQRSSRAAVGAWVQGLPNRHLVQPARIVGLDPGRKALFTAVVHSQQAADSLQGERPAQHRYNSLSWSCSRWQEAAGIKYRLHKTELWISRKPELHAALLATPTAKVASSAQFLHHIRHRMQHTAAAQIHFGDRRHRQLRWRSFIKRQQAYSAICKEISGGHIEAQGDGSWDEDLTEPDQHASDTAPGVDWAKLQSLAFLAGASTLAAVVAVQLSGKADLQGMAYDNIPKPLQEALPQLDEDKNKGPLSQWDVGAAVQNFTDQGNKQIGGLTLPFDLPHQNDRPKSPEKRKTELQESLDRTKQDREAKTEQSKKERQQRQKQKERDKDEAEKREKERKEKERKEKEKRKKFRDQALMGGYIIGRGVRVVEWDVTESPTGPTGHLVSMKLRALTPDGIRIAIAKEYGLSNYREVRQVSHWVTTTTPYFFEPMRTAATFKMLPDPAFVVWSKHPPTGVHKLPTRSSSPQSADTSSQDTLEGLTADQVTALMLKTISGVAAASRLRPRSDASRAADSASSRQHFNGSGSRSAQAAADRQGPAAAINKASEACEEVVAHSSGAHAQEKHPQSNGAEASAAQTVRQDPERTASGRSQQHVVAGKGISSSSAGHDKRHQPRMQAARASAATLSGYENSDVALASRKDEEQQGNSQASPSSNGSESLPHHAAKSGSENRNEGKASHKTQHLFHRSSKEFAEDASSIVKARPARYPSVRDAVLSGSHASSRHQDSGGSQKDADDSQKSSEQKNAQDGQERSGEDEVAGTLQGEADTNKQSTEKSADKAKEPQLWSEPSVLQCLCDRPSVSADTWGERLKLPDAFVCCTQDEEDCMVIAACKPDSKMLSLFRAYAPHNVLTFMRFARLVSLEQ

SEQ ID NO: 2623 - protein, 441 aa, Trebouxia sp.
MDSRIASSWAKFVCRAAADNITNIWDLLPRYTSLAQPPQHIMDDLENLVATMQQLMGPLPVTEWSLQRRPESYLPWLQLVLKDFEEAQDTPDAPKLFSMLPQSNNNTKFITISSTSLQKLLLATGIANVPSLTAKAGAKEFTQHQESWWNQYTDCISFSKRAQQSRRRFKFQVQTDGISVSVLMFQPFPSTQTDTATAATAAPPPPPGRKRKRQQRSSRAAVGAWVQGLPNRHLVQPARIVGLDPGRKALFTAVVHSQQAADSLQGERPAQHRYNSLSWSCSRWQEAAGIKYRLHKTELWISRKPELHAALLATPMAKVASSAQFLHHIRHRMQHTAAAQIHFGDRRHRQLRWRSFIKRQQAYSAICKEISGGRKDTVVAYGDAKFSSSCCKGNPSTPTVSLRRKVGHCCQRGVAKIADPTATVCDCVSTQHVLVYCGTGT

SEQ ID NO: 2624 - protein, 679 aa, Trichomonascus ciferrii
MSNNVKTTKIPITKLCADSITASVNKLVRAVQPLRHHGEDDETDDGCKDEEDPLPDDGENSGRDPPSPENGGAANGPDDDWRSNWGMRIERVRDLNFTDVTNWEDALGVLYHKLGGRYTPKTQETRRLNEKFGHLVEGYNGHGLDLVKEIVGRSHVIDTEVRERTTMLRNNLQANFVKMSLTYAKRLKMRYMKRVSKFRAVSQSANATSDEFNQAKGDLQALGIGIPTVADQEWEDMLKEQLDNELNSALRALQTLNVEGLLSRAEETSSGPYIKTIARDFNSLLLPQKRTRVREGRNITEPRDEMIAAFPHLFIQPYARLSKLFDHHGFQRFNAVPMTVTYEPQYVLIDNRTLVRSILGFKNDEKPEIIPVYWRVFCQGKEADDGLERLHNRVHTIKKRLRFKGRLAHISDELKPRLDYYRTKYGDAWDPQFLQEDKVVRLCYTQGQRNKALRYLKSKRRTEKAAVDEGINLVQGEMTENSRQSFDLDDFGQYVAAKNARFETLKIHYRRPFGVRAKESRYNAHKRADEGLLELMKDKFGSDCIHIIGHWHDAGRTAKYQQPTVSMGVRNILTSAGIQWYLCDEYKTSSICPFCYSTLEKTDKIRLSSRPHQREKGRTENVHGEKLCVNEACKYTYQNRDNVATRNMYNNAVSWLTTGQGIPPALSIKNGKVNSTQRP

SEQ ID NO: 2625 - protein, 768 aa, Tilletia walkeri
MGSSPPALIFPETLGARRPDYSCPTNRQSLQFSLLACTLACLHACLLSSLARLQLASPFGKSRFPNPTEIPESTSDATSTIFLLGGLDAALLSHSHPPIHQQGPNAVKMPHPPAPPPPVPDPPGASPLAPPPPAPDPLAASPLALSGPALSPANPPPPAPNPLNPAPPGSLPPGPQPPAPDPPAPSPPGSSPPAPLPPASSPPSPSIPAPQQQDGQLWFQQLWPPLPLPAYSTPPTPPPSFLPPLPRPPRPPPHPAPLQPPPPPHPSRAREWIASVATESSRWPSTHGTHSSMRRKPLHIGHSWFTRMETALDAMETTTVSRQLLDATEPLRQFVKRNPAAKPTRHIRAWAKSLSEDEVWRARKVRIFPDTRQKDILRQAVGTYRWTYNRAVHILKTYTGSQPSLTQLRQECVNDEAFDGDADMAWVFRSVYAIREQAVMEAMDAFLATKRRGSGELKFRKKRALFGTLRLPAKQWKGGFQKTYEYWEGGIEVSTEMWSGGEILGLKDEGGQPFGFVAAEEPVSATWEGGGSLSWENGVWYLMVPFVSGKPSDVAEGHHICAIDPGIRTFATVYDPLRQKAFQWGTGRDVKVLFDVALKIDNLLGKMHAPDIRHRARYRMKRAVNRYRMRLRHLVMEIHKKFALWLSKNYDTVLLPSLSAHGISARGRRKIRKSTVRQMFSWAHGKFRDRLSNKISFVEIKEHYTSRTCSQCGADNPRLGGKSVFRCPSPACGLEADRDVNAAKKIFLKWLHDFHQDASFACKLRRRQ

SEQ ID NO: 2626 - protein, 952 aa, Tilletia walkeri
MNEGAMNEGAMDEGAMDEGAMDASQTQSPSQPTAPSSSAADTSPLTQNMAPPTQDTEPSSSRSQVSSAGTPNRTPSKPSPTTGSIPSALSSSAPGAPLAASNRPPGVVQMSSAQIKFAQNAIRSLKARSEARWFLDPVDPVALNIPSYVDVVKEPMDLGTIDFKLSRTLFDRNAEDKGDRPLKPSGKVQQAIARQLNSYPTVASFERDVALVFDNCAKFNGEEHQIAKQGRELQKVFERRMKGMPADKPEPAKKPVEFSDERQSVAGPSGTKKRRRSPPSPDPLADVEMLGTDDDHDARLAEIQAHIARLEAEAASLRSKGVKHKQPPKPTHTATSSPSNKRAKTNSSGEASGSHRAAKKQRRASQPDEVEDTFQEITDQQKEELLSKAEDLPDHLVDGVLRILDEDKTLSVGDEDEVVVDVNGMDPRTLYKLYAYVVGFRSAVGSSGGEAVRSGEQALGGQSPGAEEQHAPQQHPPAEWINSITTQPACWPHIGGSNIMKWDDMDTNAWFSMRTLSLSAPVSVGVDLCEELNRVASLVREEGNRRQPSRPRNRTLPYARAEGPFVTRRERLYPTTEQKEALRKVAGVYRWTFNRAIAYLRQHPHSNLTQVRQATVKSTSIDEQDKEWVFKIPYAIRAQAAEEAHTANRNSQRAQAEGRIDHFTLHFRKRRSGFGGFKLEKRQWKDGTLHIPELLDGPIRVRTPIRSIERDGATVRQQNGKWEVLWSVTAGEEDLPAPAGLGPRVCAIDPGVRTFATLFDPLVGIAIKVGEGANARIFRLGLHLDNLLSRMAASNAKQRYRMRKAANRLRKRIKDLTTDLHKKLASFLRANYDTVFIPTFNAHEMSRRGKRRIGRRTIRQMMSLAHGRFRSWLGWKMKTVEIKEDWTSKTCSTCGRVNYRLGGSDTHRCPSCGTHSDRDVNAAKNIFIHSLFDLRRSLTTTGNGLNTAVVHL

SEQ ID NO: 2627 - protein, 210 aa, Apophysomyces ossiformis
MPQMLSVVKPLFEKNSIPVCGVDPGIRTTGVSTSTTSAWMIQRIRYFTSNTTTELRHNIYNPWGLRASTVNHHSRSNRRRLRKERAKNAEKEGTEAENLRIGREKRTREVFIQQAYHKGIKRLREVQRRKGLVVIVNEYNTSKTCHWCLKPQQLQKYRGKDDKVRKCNGAVCCVNPNCVSVVNGCNTINRDSNASKNIALKGVAMIVSTD

SEQ ID NO: 2628 - protein, 226 aa, Apophysomyces ossiformis
MRDVSKKGKGKEKSSASTSRGRKRKRKRQKRSSQATSSAKAKITEGYMPQMLSVVRSLFEKNSIPVCGVDPGIRTTGVSTSTTSAWRIQRIRDFTSNITTELQHDIYYTWSLQASAVNHHSRSNRHRLRRERAKTAEKEGTEAENRRIEREKRTREVFTQKAYHKYADVERIHFPPDMISQKAVHFYGHWQPTNSRIRGHARRGLKWLCEVQRRRGLVVIMNHYKY

SEQ ID NO: 2629 - protein, 247 aa, Apophysomyces ossiformis
MTILSASQATEEGKKVKAIEKKLSKNNVGNAVDIDSLHNYRKIGTENRDILRKFYSEKKSVKKSKRTQYIYTQKAYATVASNERNFLNGSGKKTNVLLMMIGSVGTGVCSPIRGHCRRGGKQLREQHLQQTSVGMTNEFRSSQLCPYCYQVLSHLNKKKDGYIKKNFGTVICTNSECISVKKGYGSRGRDQNAALNIAVAGTSALFSERHEPFQEFNPKKASKYLLDNNLLASLMSIPEGCGVGACA

SEQ ID NO: 2630 - protein, 413 aa, Apophysomyces ossiformis
MVSSLQERRNNQASVEPETKLTLSKAQLQERTDPTQATILSLEQQLKPMRKETGAVETERKNHSTSARGRTNSTAYRRLKQTCQKIRSKQNTPIVLQEKLKQARRDRYVLNKAMRDASKKGKVAAEKRKRKRQKRRSQATSSTKAKITEEYMLQPLFEKNSIPVCGVNPGVQTIGLSTSTASAWMIQRIRDFTSNTTTELQRDIYNTWSLRASTVNHHSRSNGHRLRRERAKNAEKEGTEGELNKAYHKYADVERIHFPPDMISQKAVHFYGHWQSTNSRIRGHARRGLKRLREVQRRKGLVVVVNEYNTSKTCHWCIKAIQLQRYRGKEGKARKCNGAVCCANPSCVSVVNGCSTMNRDGNASKNIALKDVSMIVSTDGSPIPMFSSHYSSNHKLAQQFARKPTPVPLLHGP

SEQ ID NO: 2631 - protein, 1285 aa, Apophysomyces ossiformis
MQVPHPQIRENKRKRKRVIQSNISLDKAIEALHDVFQNQLVTIISKELEDKPRKNTAKKARFQSEVEKQAKTNKILQELRTRLEKADRVPRTSLEQADDSINVTRGTIRRTLCFHYPEPASIGKLWRDYAAAHFNDAVAEARARLEEHGEVEEAGSSKEVTVNDDSKEEKEIIRTCSVRLSKILREDLDNQVKQTFLETIAITSEQATNYASELGTAVHATMLKYASGSVVLDAESKQAHYQQDGKTFNVLDVIHEEWIRHPELLNSELAIAVAPMPDNIKNYVKALPKKHNDEFLNLFTEAHLQFLHSDYFGRQSYKAQGKSFWSSLQHQGLKDLPKPPAGLSTVMHFQLKQYATDLQNMWAGGLFHKSINHLLRILLRINLASEREKKIQEITEKKLQEKEKQREESSRTMRRKKEWRRRKIKGRLKQERKSLRRLEKRLGIEMDGNQRANLLQRKKSCVEAIRRLEKQAKEKYRPKKADNQPHQKDEEARGDMDKLAISADISVMDDEGIEETIETAIEEAQDELEEVEIKTLKKEPSRRRLIRIQAITKKLLLSTDIDGNVQASDVSDIWNDNDELQKVEIDIVVKLANALRPYVPKGRLSSAISLRLRFVLLSNAILHATGYSKFTANICPTISPASIHALPLDAASMYEMFGSNSAKFNLYKEDGSTIDNIREARTNKSAVIGSFFDQEKVKHICNTRGLEPRWRITITPHQMAVIDSDVKKGRVIDTSHYEERKKKSKGKRADSASSQFEDKSGLDIANITCSLEDAKQRVKALESAEKQIKNALRQREEVVESRMESYRRSKDVARRKVRDKRKSEKFDIYDSRAKQKQTDIYKDLKAAKLERAKSQSELSKIRSQLADQRRLRYIYQKQRDILKKQQTNKETKPKDDEQEQETKLCKVASWNRPGCEANTEFLDISELHQEVKQDPKKTITFGGTDYGLRTLATTVPVTMERARLHFDLYNRQFGDGQTPVSIPKEMSTLPKPMRITAGYLEEKTLCRSFRKKRERRKKNNPAVISAEKTLSKRSSASATTVEQVLESQAVKRNCRRELRAFYHSNRAEHEKRTQKLYTDRIYDQVAAQERKFIKAAATTQTDGRQKALPIMAIGTQGTGVGLRLKGHLKRGGKWLRKRHRRYVPVSMTNEHRSSQLCVYCFERVERAKARRRKSRQWKTVRVNGASQCVNPCCPAYQSGHATQNRDVQAAVAIGLASASNILSANRSTLTPFDPSIFSAGKPFVPGATNFWCVNSSRKLCEELREPGPVAMTGVIRTYASVTEEF

SEQ ID NO: 2632 - protein, 815 aa, Scenedesmus sp.
MVCAATWRQGPGCTRVAHRRIAQRRCPNAPRHRGDHGRRYEAERIIRIKTAAHRDARGIERHRPWQQGRPGRPGRYDRRPPGGGDCVHACLNRVPAYSGTSVAAAGAWRNGRVHHVLNNAFAYSLLACRAECAWRLRKHGLKQRALHAAIQLTAYGRVFVRGRVRQHARLPADLPAVVLGIGDASLGMGGCISGPGPPRQALLALLRTYYARRRVAAVLMDEHRTSVTCSVCGARVEKLRGIYGLVQCPGCTVVAPRDDNAARNICALTLHELLRGSRGTAGGARLAGAFRQAAAAAARPAVPPRVRKMATNVSKKRKFIADGVFYAELNELLTRELAEDGYSGVEVRVTPMRTEIIIRATRTQSVLGEKGRRIRELTSAVQKRFNFPPETVELYAEKVANRGLCAVAQAESLRYKLLGGLAVRRACYGVLRFVMESGAKGCEVVVSGKLRAQRAKSMKFKDGYMVSSGDPTRLYLDGAVRHVLLRQGVLGIKVKIMKDWDPTGRQGPRLPLPDVVKVHEPKEEELHADKPYIGKEAELPPATLPPWSLPRAASARPGYIGPEFAQFPGPGGVPPPEFGGVGLERVFPCVRLRGLPFDVSEDEIRIFLGCEPVDILLVKREGRFSGEAFVVLGSPLQIQMAVDKNKSYMGRRYVEVFRAKKLDYYKAVMAEMYVDGGGMRAGFRPAMPGGYGMPYGGYPANGGRPADPAAAGPGNGAYGEAGPSNVLRLRGLPFSAQKEDIVRWFDDVQITPLTVDNVHIITDYGRPTGVALVEFASPQDAQAAAGKDKQMMGTRYIEVFPSSRDELQRYLPRSY

SEQ ID NO: 2633 - protein, 2196 aa, Scenedesmus sp.
MEPEPEPPPPPIGGGQQEAQQRAGAPAQADPAHPVAPAGLLALPVLNWGAPQPAAPAQPRPPPAGAGWHRAYRGPAEDDWLQPPPPPQQHQHQQQQQQRAGASAPRQPPAAGGFAYQEVVRGPARQDLPGHDCAQCRDFYGALSTWGAPAPGTMMLLPCTHALAPAALQAASRHRAKHAPPETPPGFGTSAALGGGGRGSPGPSSSSRSGSGSGWRGGSPAPRPDDAPVPAPAPPPPVAPQQRQPPAAAPRGAPARAPPKLMAPAGTCTGAQLALLKRELEDKGYALVHGRANGLCGFSLIAIAVLRMLEAAELQEPTHDLRSFEPDVLDMLDEQAGELRSRTVELIRELGLSDQLHPSGVPWRDVLGVAGADAVEELARDLEAGGYPSEAELRALCMRLADLVFLTDVYSLDTLLIALQEQGDAFQASEGNRLVALALPAAAAPEFAPVLGAQNPLPLNHWAAVVPARRPPPRGAPAELQQVREPPRGAPAQQRLQEAAPRAAELAADSSDEEGGPAAGQPRQPLQPLQPLQPLQPQQLGRKERRGKGNGAAAPLGTSNSDSSSSSSRRRRRAATAAAIDAAWEKPVERRAELDASKARAEAAGPSDEDVRRSKQRASYDAKHARRGGGASGGGQSGQSGARSGSVSGGGTSRARSDSAGGSAGSSTGGGTSGARSGGGTPGPPPARGIDPAERAAQPVSGADWEALRRHAQARGEAARAAAMAAVLSAPAASVGWSAGSAAASSDEEEGGPAAKRARGADAAQRRSRGRGRARLRGSAKAATRGGRTPSRGGGRARSRGGAAAAPRGRRKRSRGADEASGRGSPARGAAAAEAGDKAGRRQQQALPRHFAKRRKQQTEQAKKAAAGSGMRVRVCALRGAVRKPEVVPYLEALVCAYSRLGILGRDAHHVALVYGASRLYGLDTRQPPPQPAAQEQGPQQQQPPPAAPPAQQPAPPPPACACYLQAACGGAPLVYDLMNFFSQGNWRRVGGGLSSDLRHALEQACGVNELQRVPLPAWVTGTLHHHLLNPLAELYNTNMQLHLADGQRLEKALDAAALQAWFAAGCAGTPSRAARDCLIAGGAALLYSASPLLWERQGVLQPGEGVVPAAAGDGQDAGRLRLAMAMMRDMLARMRLHLEQPFPAAADGEARAPAAGAARTRQAAGAQATPGLQRWESDEAAGKHGRVLDWARSGMPRAPDAGAQAGGAPLVPQPSEPLAHGAGAAARQQHDAAYDAWRAALARQLEGLAYREGDADAMARRVARDFVVMLGQQHMFAACAPRLADSLAAQQGAAARPALEAMLRRAASLGAAPEPASAGALAAAVESLAEALDGSSGGSGSGSSSSSRSRGQRPPAPPKLLDASAQEPRLRELQRARELGKLEAAVQRLRAAVDASEAAVRLRKEPLKGLQREVAGATVPDRHARNRLRRLQRKDAHAAALRRRLAVEEARLLRARGQGAAPGAAPGQGPGAALPAAAAERLRLALAALTAAGDATVGADLAAVEAEWQAAMAQHHERDAALVQHQRALARPHGAAVAPDADAARRAADAARAARDQGARLLGDCGARLAAARGHLAAARGHLAAAAAAQGRAAPAPPAQQQQQQQQQQQQQQQQQQRARRARPRRRRRLSRRCVAMSRPAGATRGGAQPPQRAGGAGQHPDALVAVTGACKVLRGLRSRHAARVALPKRRAFTLAPVPKYGTQHLHLSTTGMQALDAALRARQARAPAGGQPAGQPPPPPPPPPPTQEGGGYDPVWDAYFDFGRRPGRARGVLHANTRFAGSVTFDLAALHVRVRVEGAADPAPRRGQQSRAAKAAQRAAEHRAGVEAARRLLCDALAPHGVADEAALDALPLDPCELRGVEGLPPGHALRGAAAAVHAGVRIVGIDPGRARMICAATWRQGPGCTRVAHRRIAQRRCPNAPRHRGDHGRRYEAERIIRIKTAAHRDSRGIERHCLWQQGRPGRPGRYDRRPPGGGDCVHACLNRVPAYSGTSVAAAGAWRNGRVHHVLDNAFAYSLLACRAECAWRLRKHGLKQRALHAAIQLTAYGRVFVRGRVRQHARLPADLPAVVLGIGDASLGMGGCISGPGPPRQALLALLRTYYARRRVAAVLMDEHRTSITCSVCGARVEKLRGIYGLVQCPGCTVVAPRDDNAARNICALTLHELLRGGRGTAGGARLAGAFRQAAAAAVDPPA

SEQ ID NO: 2634 - protein, 1289 aa, Dissophora ornata
MGLKGFYPWLRKKRGYHPTLRLPMHHHLPDDAIIRIDVLSFHNKIRRIYTKHAEDKTKAHAILFELLKKYGNPSRMAFYVDGAPALEKKETHRERNNKRVKALKTAKTAFETLSDCVSQGRQPTRQMFKNVEKSLYGGFKWSLRDREDFVHFLQDSDFFAYDSVTTIWRPVGKWDEVKILEYKRAAVLAQTGLLTTKFTALACVSSNDQNKNIPSMGIATNYSIIKDLPDADVPLLVEEHLESPLVVCNQEDIDFTASILVFTTMTQEIAAPEGVSSISSPSSQSATPLVASPVPSLSYELLCQQYKLVKDQHDRAKERKRQGNLSINSNAKPNRQGRHREFRRHRVIDRPAHQPGISRQVHRPRFSYKARPEPQQHEQPSICKQYQRKPYTAEQEERYWQSIAEATRKKAKMKRQREARRLKKEQDLAKKPPLKIDEMDKRQLINAMAWGHPHVFLTIGTVKANSKRAAAAATTGASLLPSSEQQQQHQQQEVSACILDIVGQVRVTRRHAQEFLGAFIETVFERGLTENDRTIMYSLCPAVKSKIRVTPQPNQDSQASSSSSAGAPAENEGEEDAEDDGDEDAEPSAMDKPFIAFYQILLAHIYSRKIKSKTVAERQVGQLVARATSLGITLPPAPPRNVSYPTAGLLESSTKQLYRSIKMMYRNGSINSQADGQPAAVLPMIDPELPAIENYLLLNKASGGSRRIAPLSPLAARYIGFSERQVLPLFWHWPTFKEKIRRMMAEDRYFQDPAIVPALADALDWLVKTTPGRFVTTFLTDVGLPPNKHDKGYRKMTTVMDLDGKGGKVGLREHLGYLRAETFDPMEWRGKGYVLKGSILTDGRLLQLLAFNLKELQSVRYRRVPEDKLPNPLVNTIGGTNSYLTEARNVFSTSAAVESLLAADPSQVSVLSLDLGISCIVGATVSLPPGQTPATLMRPHGKEGDEKKKKARRGKRKPGDRKRRRARQKARKLAKQPQTTRYFDLVVKRKAVSQPTGSFASWLEDWKESTTGASTGRTIQDLESALPPLKGEGASFCEYVAARRAFESDLNDFYNNTNFWKHQWDAKVCRKEEFYKVAEGLLNMIGGSVGRPRMPHQHVVIAVGLAKFTASQGPPSLDGTFQAFFVRLARSLGYLVIGINEYYSSKRCPICHDFVCATSDWRTIYCKTCKRFQQRDVMASGNMNNAIKDHLIHQRRPLYLQPRRQDGSYPWVDVAAGGGSGGGGGEAGGPSAEAMDSSGDGAGGSGEGAAIARKRGVSIVSVEDPNTDVDPTTDAPNSSSTRIEKKAKK

SEQ ID NO: 2635 - protein, 1131 aa, Dissophora ornata
MGYNPVPLYQSVVANIATNRRRRLDVLGTCYCAIRNSYSNTPQDVAHRMLEQEVSRFGSSLDMTLYIDGYQAVEKSDTAAEREGLRKRALERTTTALGTLESRLDQDLRVRKRHFVDVRSGLASSFYWSRESRLEFAQYMQDAGWTVKVADTEADLAIAIDAEPNDITISGDSDMIAYASIRTLWRPVSGGCILVYTVQDLLRALDVTRSQLTALAVVSRNDYNKNIRSLGPATNFSIIKSIKRADPKDIVLAYYLTAGLSSDDTIARLRVPRSFNRYRSIESPAPVSKDSENFPQQPPTAGLEPTSPSSSDPQDQSHPPLTRTRIPRHRQRFSFKERQGKVTHEPPLKAKQLVWKPPKKAPESPNDTSTSSTKKDSKKKDAKAKKTREEPSPDKGSSSYAEKGKKNLLRSLGWHHPISSLEVGTLKINIERALSDWPDLQLEVIKCIKEGSALAVDIKRKAQGLIGGYLEKLRTRMKAVEESKRRDLMEAGKTMSESERLKARQDAVTKDGRETLDYLCGRVEPKVDRDDHDDVDDSQEDSNDLDTEGKGNKHLQFLLSFLTYLYSRNLPDKNSKIGKAVDTFINILVGLQLFDICRNRNELNERMLFTAKSLVRSVAGQLSVELKKMYKNGTQLLYDQVKALKDKGRLEDHTDIRIQENISAAENYIALNELIPSSWRLVPITSLQQPFVTYSERELALFFWKRPLLKQRLVELALSDEDSTILTSTIDLEAWIGGREPGFIIKSFISDIDPVGLSNRQKRKAGNRGAIKLLSLDQIQNHLQLVEETKPKDYHRSGYIPQGSIRTDGFLVQILAFKMRERQDARFKRLAEEDMPPRLTTTVAGVDYFLPEIRNVIRSEQDIKELWPGKDVDRMKILTLDGGQACVVGAFAHLPNGLAETGNGKEKAEGGSCMDGIITTNQESTGVANQGSVTLDPVPPSTSTSTSAQAPVMDPLVTPSRPAYYNLAVKQKAVYQPTFRFRRWLENEKLTIPEGEEVSITDVETRLPPLRGPGASVVDYVRELEQVEQRLKKFYAGDDHRYKRHHWDMKRARQAEYQTVAERLLGIVGGSLGRRVEDNKDTDPVLIGIGLGQFSSKSRLSSLHSTFLSYFIQKARSLGYVVVGLNEFLIL

SEQ ID NO: 2636 - protein, 1311 aa, Haplosporangium gracile
MGLFDWYPFIRRKGYNPVVLHQSVLASQSTGTRRFDVMANCFPVIQRAYSNRNLTQDDPHRILEDDIKRFGNTLNMPLYIDGDQAEEKMNTAKARDAVRHKALHRTEESIKVFEERLNDDMRIRKRHFTDVKAGFKSSFHWSMRSRQEFANYMRHHGWTVFVCRTEADLAIALDAQDNDIIISKDSDMMAYRSVKTLWRPVSNNIVLVYKIPDVLATLGISRTQLTALAVVSRNDYHRNIHSLGPATNFSIIKDIGSRSDARDIITAYLTHGQVRMKNTEDETFENSIRVFILLQQERIKPLVQVSQAQELFLVLQDKFKELCIKHESLKNIRAAGVEKRTEEDVVRLSSPKSFNRFRTVESPKVVAKPNSAPASSPQSAPTPGPSQQTPSLTSNLDADGHPPLARTRIPRNRGRFSFKERTRRVVHAQPPKSKQFKLKFHQERPETVNNLTSAKKTTPKAKKPPPNTKPIADKDKKGLLRSLSWHHPTAWLEFGTLEANARRVSGDAATSTAPEKLPNSTIVQQEVVDCVQEAVQLAANVKRNTQRLIGKFIETLAVRMDAAEETKWTELQRVSPPRAITNTDRRKARRDAVTEGERKILTHLCERLKLNDTDKEQQDVEQGQEEDNTDLDSKGNLEQQFLQSFLTYLYSGNYPRKAGVGVVANEFIDWLAGHGLHRPARTRGDINETMPFTPVKLVRSISVQLAVEMKRIYGHGPQDLHKQAAAMIEKHLLPAETDIGIQDDISAVENFIQLNQITGNRRQIVPLTTSVLPFMSFTEPELASFFWKREPLKTRLTDLVAEDGSPTKAFSDIESWIAGKGPGVIIKQFIADVAPQVKTSRQRRKAGHRGAVKLLTLEQIKSHLTAVQDKWVDPINYATKGYVLRGSIRMDGFRLQVPAYKLRELQSVRYRRLEPAKLPPKLTSTVGGIDYYLQEIRHVIACEEDVEKLWPDVPVDRIKTLTLDGGQVCIIGAFADLVEDVLSQAKGKENMNESPIEVIAISSSALSKVPVPSPQSQGLSTVSSRTIFHNLAVKQKAVYQPTFRFRRWLEDAKQEQVSVDGQQVLISHIESRLPPLKGQGSSVINYVEELERVERNLLEFYAGSGNRFKRNKWDMVRARQYEYQLLADRLFGILGGSIGRRYDSSNPALIGVGLGQFSVKSGLSSLHSTFLNYFIQKARSLGYIVVGLNEYYTSKKCPHCGHFVAQVSPRRFFCHNYHCYHHRDVMAAENMANIVQGYLVQQERPLYLQPVAPDGSYPWLEAPTPAVSTSSTSGSSTSGSSSSAIPPPGRSKRAAIASLASGRSRKMAIQE

SEQ ID NO: 2637 - protein, 1620 aa, Haplosporangium gracile
MIASITTIGRRRFDVLGTSFRTTRNAYSSHPQGVVSRMLQKEVERFGNHLSTTLYLDDPQPVEKASTAQAREAALMKALDHLLTSLETFETRMEANLRIRKQHFISIKKNLVSAFYWPLSSRQRFAEYMKDVGWTVILCNTEADVAIARDAQPEDIIISSDSDMMAYASVQTLWRPVSQDLILVYSMPDVLKTIEFSRNQLIALAIVSRNDYQRNIYSLGPATNFSIIKAIGHKPAVRDLVSAYLQDGKVVTRNMQQEIFVTSMRVFIDQLRTWVEPVVIQTPSQIVFDACRHRFDDLMQRYDHWKQTQGTRSRSFQENIVRVRKPRSFNRYRIVKSPIQVSGSFLPKAAPVPQEHERPSATAQQDDGHPPLNRTRTPRNRARFSFKERTRKTVHDPPPKMKQFVLKYYKEHPTTTTNQASSNKSKAKAETDSTITKKPRGTKGKEGLVRSIAWYHPIVTLESGTLTVNTKRIFTPSSAPASSKPATAMPGSTVPTITAPAPSTPVLDRPDLQRLVVECLQEAPHLAPGVKREAQRLVSQFVEAMNKKMDAAELTVITKLQSTTESMTEADRIRKLFEARRDAISDDERRILDHLCERIKPKKDKGENEGGCEKKDSEDNGDIEDKDGTEQVLFLQSFFVFLYSGKTVESFNKNTGIIPTVNTFNNWLVDRQLYNRPRSRGEIDVQMPFTPTYLLRSVSGQLALELERIYGKRTFDLYEKAVVMKEKEPWGRPLTFRRKEISATANFLRLNHLTNNSRKIALFTASQQPFMSSSERGLASFFWKRKLLRERLEELARQDHTHMTSTTDLDTWIGGKEPGYIIKHFICDVAPQGLTSRQKKKAGHRAAVKLLSLSEIRAHLDVVKDKNLDLRKYALNKDKRGYVLRGSIRTDGFRVQLLAFKLRELQDVRYRRMAEDRLPDRLTSTVGGTDYYLQEIRNVITSQEDIERYWPGKKIEDIRTLTLDGGQACVFGAFAHLPAGLSTKSKGKEPVKNDLPMEGIIVTNQQPAVGAVVQDPSLPTTAQESTTSAPGILPRSVFYNLAVKSKAVYQPNFRFRRWLENEKKAIPDSEDESVLDIETRLPPLKGQEASVVDYIKELESVETRLLEFYSGSNNRYDRHVWDMERARHVEFQLMADQLLKIVGGGLGVRYNPTKPVLIGVGLGQFSTSSGLSSLHSSFLTYFIQKARSLGYLMVGLNEFYANKKCPGCGLFVCQVDMRRFYCPHCHVYHHRDIMAAENMGNIIQGYFVHQERPDYLHPVAEDGSLPWKAKRDDGSSSSSSTATTSNTISSPSEVEDIGAVDAIRATSVTYYGRPLSPSSPEATNQPKYMPFVVNQSSFHYPHILLTMASLATKLASASLNRSFVTLPATASGLRTVLNRSALYPSDDHHGHHGHHESPVAPSIPALKSTSLNNNRSFVTAPAGLSQQKRFNHTSARDTTNIPDFSKYKSGSGDATNRAFSYFMVGTTGAVTFIGAKSTVADFLANMSASADVLALAKVEVDLSTIPEGRNVTIKWRGKPVFIRHRTADEIDEANAVNIAELRDPQNDAERAQKPEWLVMLGVCTHLGCVPIGEAGDYGGWYCPCHGSHYDISGRIRKGPAPLNLEIPAYSFEEGNKIIIG

SEQ ID NO: 2638 - protein, 200 aa, Mortierella sp.
MILPDIQVVLVDPNMVGDESLRADKYRGAFFDPGIENTVTVAIFRSSDTNHIKNIAVTRGSWEQPSKFYRRGFEEAKANHRIPELESTIQPIKFTQATDDAEIRVWFEIFSSTIQHLISVLRVHNRLRSFYSSPLYKIKSRHQKQADNATLNRSIDRAIHETAGSQKYINGVGVRTLFGFGDGAFGSRTGKSMYHIKLMP

SEQ ID NO: 2639 - protein, 1216 aa, Mortierella sp.
MRHIGHADSMLIKNAYSNHPQDKTNTILEEHVIIWGSRDNLVFYVDGGQAVEKQHTTEIREAAREKASVKCARSLDVLEDRIDNNLKVRKSHFTNVRSSLASSFYWSFDDRQAFVTHMAQSGYMIRFCEAEADVAIAADCEPNDVVISGGSDMLAYASITMLWRPVSKSLFLVYDLPNLLRDIGLSRAQFTTLAIVSSNDYNRNIFQLRTIPLLNLRELVCSYLTDPRVVSKNKQDETFQFSIRVFVNLQQTPKHAGTHPSTPIHSTYNDLRPNPRGPFSGCISLGHPIATGLSNHLYSQVPRSLSCPCRIPPQLPKKTIGMQLLLQRPRDTHHCQERGPQESPMLLVSATNEENPALSSTTHGKIHMEPHKASPESSADHNTSTPAKSDAPKKRSPSTSRPVPTNKDKFVKALAWHHPLVTLEVGALDTNIKLVLASEPNLQQEVKQCVQEAAQLAAKIKRGAQRLIGQFIETIGDPRNFEATDRRILDHICERIKPKDQDDSNEQEVDTTDLGDNGNIQWQFLQSFMCYLYSGNYPMRLGVGEVANDFIDRLEKLKLYEPPRKRIATKVVMPLTPNFLVKSVATQLAAGLKRIYRNGSFDLYDKLKTKRDKGGLAETVDFRIREKDSSIENFVRLNKLSGNSRKISPVSSSQQPFISFSERELVAFFFKKDSLTKKLRDIMGLEYAALADVDNWIATKEPGFLIKRFLADVDPQGLTSRQRGKMGYRAAIRLFRKGYILRGSVRTDGFRIHLMAFKIRELQMVRYRRVSEDRLPSRLTSTVGGVDYWLQEIRHIISTKEDPERLWPGTRPEAIKMLTLDAGQAYVIGAYAHLPFAAATTCPTDAPLSASLPGAVKPSPSQESAAARPTDASSSTPSTNIAGPGSFQDLDAARPADALSTSFQESTFVLPTETVPVTSLNLAVNQKAVYQPQFRFQRWLEGEKEAVPEGETKSIADIESALPPLRGDGSRVVKYTAELKGENRLLEFYNGDNNRYKRYQWDLRRARQEEYSAIANRLLSIVDGSIGRIKDKSDPVLIGVGLGQFDSRIRLSSLDSTFLLFFIQKARSLGYIVVGLNKFYTSKKCPICHEFVAQVTLRRLYCLECQVYHHRDVMAAHNMYNLARGYLEDQQRPLYLHPRAQDGSYPWLTPTTTSTSTSTSASTTNSPSTPRKRAASTSTQGQGQPSTSNRPSSKRKRTASASNEALQRRGKAAKEE

SEQ ID NO: 2640 - protein, 1092 aa, Mortierella sp.
MRHIGHADSMLIKNAYSNHPQDKTNTILEEHVIIWGSRDNLVFYVDGGQAVEKQHTTEIREAAREKASVKCARSLDVLEDRIDNNLKVRKSHFTNVRSSLASSFYWSFDDRQSFVTHMAQSGYMIRFCEAEADVAIAADCEPNDVVISGGSDMLAYASITMLWRPVSKSLFLVYDLPNLLRDIGLSRAQFTTLAIVSSNDYNRNIFQLRTIPLLSPWKEKRAQGVHSAVAYPSVTQSLQDCRITYILRSQDLSLALAGFHLNCPRRRSGCSSYSSGQGTPTIAKNEDPRNRPRYSFQQRTRKIRHSPPPRMERYTWNPHKASPESSVNHNTSTPAKSDAPKKRSPLTSRPVPTNKDKFVKALAWHHPLVTLEVGALDTNIKLVLASEPNLQQEVKQCVQEAAQLAAKIKRGAQRLIGQFIETIGDPRNFEATDRRILDHICERIKPKDQDDSNEQEVDTTDLGDNGNIQWQFLQSFMCYLYSRNYPKRLGVGEVANDFIDRLEKLKLYEPPRKRIATKVVMPLTPNFLVKSVATQLAAGLKRIYRNGSFDLYDKLKTKRDKGGLAETVEFRIREKDSSIENFVRLNKLSGNSRKISPVSSSQQPFISFSERELVAFFFKKDSLKKKLRDMMGLEYAALADVDNWIATKEPGFLIKRFLADVDPQGLTSRQRGKMGYRAAIRLLSLDDIRTHLQNLEDPSFDPNNYSRKGYILRGSVRTDGFRIHLMAFKIRELQMVRYRRVSEDRLPSRLTSTVGGVDYWLQEIRHIISTKEDLERLWPGTRPEAIKMLTLDAGQAYVIGAYAHLPFAAATTCPTDAPLSASLPGAVKPSPSQESAAARPTDASSSTPSTNIAGPGSFQDLDAARPADALSTSFQESTFVLPTETVPVTSLNLAVNQKAVYQPQFRFQRWLEGEKEAVPEGETKSIADIESALPPLRGDGSRVVKYTAELKGENRLLEFYNGDNNRYKRYQWDLRRARQEEYSAIANRLLSIVDGSIGRIKDKSDPVLIGARSLGYIVVGLNKFYTSKKCPICHEFVAQVTLRRLYCLECQVYHHRDVMAAHNMYNLARGYLEDQQRLSTSIPEHKTDRTLG

SEQ ID NO: 2641 - protein, 1160 aa, Mortierella sp.
MGIGDTFQLLEEKAFVPTPCNPLGFVPQGNKTGHVDVLAWMRQYLIATYCNILFKLFKEDRLAGRVDWNRSLEDDVARIASERLSDALKKQLTKTFIPGNVLLHIDGQHSGQKAYAHSIRASNSDKDKRAFYHNMAKVKTLMGPFYGRNIPKPRPRTPGNTRDDDDDTPTDRRVPYSARHNVFRRSTKDKIVKIRKTMKALWKKAHPMDDNIKRVTCAALNNLGHNVHSCRGEADVCISTQGGEIYSFSGDSDFLYHPIHTFVRKDPKDPTTMLAYPTQEARASFNLTPAGMAALAVVSRNDYSVHVRGYSLKKNLKVFQSINGAKPSDAIHLSSEVLGWMSSNKYRIRNYTIPSGPSPSADGGDADQHQNQKKKKKKKGGRRTNKKQKTEEEKLKEEAVKREKAAARRRPDTSKKGRTEPNPNATPKNDDPATILDRVLKGKYALNVLEVGTVGQRLKDSIAFHCRKNLPEVRERIFNDLNDFFLALVKIATDVVHAARIALSCYIAKVMFDFPANTQAEIIARKNKLQDIGDIGGKHWFGSVLNAIFRWDQGRTEKQVVREIVGDYRALYAQAGLVHNRWTDLISGGMSSFLRQVGDDMESTIQGHFFGNIKELVERVKTTNPTWCQGEGAPLLNDMYVDPTNPKNDKHMFRNYGIVAAFWTLNAHLPSYRRFALFPKYKHKDLYVTITEKHIMEALPFRPNTSPATLAFLGPFTVRSVIAHPGELVYRLFMTSTVGYKKTSCLMNPSQSGPDFPPFFLPPSVDCDDFQDAYDALQSEYEIRGNRAATPAFSQAKRNFISAIDKAIMEAKDIRSAINDDDKNKERHRRMHILHGSIQTNGLDAKLHAFHTAQKKHLAGTYVPKTTKSLLGDIKTKYPSRDELLRNHLSPEVYRIVAMDPGLANTITAVILDSRSPNRVRNLAISSASQKEPERHYRRGLNAAKHKRGINFLENSIVPVEFPQFRNTGDDWVNWLCLRDSIRLNCVSELGVYKRLRAFYGSIMFKVKNRSLKLAQNATLNKAVGVIIRSCGIKGKWREGDNKVRPLFVAGDGNFTSRPGRPIRHLQFFKKLKTKLEALGYVIVSADEYFTSKSCCQCHTKSEDHITMDRRSIQCTQYNRARDRDHNGAHNMARAALQWMTVFSWPQELCRPTPSSQPQP

SEQ ID NO: 2642 - protein, 1485 aa, Haplosporangium sp.
MHHHGQASMVKGSGPEPVADLPLSTETERAEHSETDDVEFINNWHDSDAEGADHDEGDDTDNAQGYIVDSDQGKTSDSNASRNTDSVTTKAKKTRKSKRVPLRKENSFLGGIGSLKERGTHLTMSVEMAMALSMSERDAVPPEESSTATTGRKRVRKGTSSSIESNGPMTDSEREAWDRVKGLLRKVQDKDRQLKDSMNLLMDVQRQLQESVHKFEDFKSDFEIPAMSLVCIDKHKRKRGEKLSMDERCAVKHLHEIRVLENLNGKYVATGNPILRTSLYLRMSSKTISDVLDEKGLIDLRGQYTRTGTACAFASDLRQYTLDMNLIGRVVTVMCPHKRLMDSWPTDIVIRGHEIIRKTMHTVKLKYKKVGKTINYTETADIRAKKLHYLRGRESDKFKEALFLYGLTSRTVTNTTFAARSLGYIVIGVNELYTSKKCPVCEGFVSQANIRLLHCPTCETNVRRDVMAGHNIANIVRHHLVHQQRPLYLQPIDSQGRYPWMDGSSSSSNDGGNGSGSNSGSESGSGSGSDRKRQEQGPEERPHKKTRHSGNNNNAGADPNGQHHQKGGQGSALPLMHGTMDELLSAEFPLGMGNVRHTDGALNNGVHGNIMEGLDDLFNDDFPSVGNQQHLMHMPGHSQQNTVQHSQSLPASMHFPPTQSPQKQVSPLLQHQTHQTTGSLEPTSVPLPGHTGSTSLQGQQPPHQLPTTPSHLSQSPQVSPAMPLINPSVHQVQPNRPQQTPPTLSPSYPSSIPQQQPQQQPQPMNQPTAPRPVQPSIVQAPSPSQAQVQSRPVSNGQLATPAVARPTAAPNTLAPTATATPIPIAQAGSPLHHILTNVSPATGQQLKSLFALLQTNAVTPNEFLAHAEKLLDPAQFEILDGIRRRHAARPTPEGTASQQQSPNVSAANMPSLTTFPKQSVAPGTATGQIRSAQGMSLQTPDSGVGVPSTTTGISSTQPVSIASATTSMLQSAPVRKRTTDNITVATPPIESKLPPKRVKTEHQSIIPGATGAGISSGTVAQPITPAMPHSFPSTPGPATPGGVSSPATFNRVSLPGQQRASPMATAAGVGATAGGGGVSSAVVGGSGAALRAGATGSERVDYDNITDVISYVGVDLNAESDNIMRDSDSYSRSGGAGDGQDRTRVQNFVNTTLLKTIVERIAATHKLQTVEPDVIAYLALATQERLRGLTEKMIHASKHRGRSLATAPPPMYDEGHAMYKVGIHQDVKRQLLAIERVEREEETKRKEQIAERERRLTAGDDLDENGEPRGGGSGGGGGGGGGAKKGKKGKDGGPAVSARNMSEETRKKFANQTALGFAGGGRTYSWMMGGGGAGAASGGTSSPLPSGPAASSSASSPAPGATTAASPTASGGVTTGGGSVRSSLGRIPTSTSISNSSTLGGGTPGLGASGPAGLATPSLSRGASAGGGSMILPPSTLGRPTSLRDSTRKVNIRDALFCLERDRGGGGGEGSGQRVLIKSYVKWLK

SEQ ID NO: 2643 - protein, 827 aa, Haplosporangium sp.
MVGGAAGRPRDEANKVVIGVGLGKFSTKARLPSLHTSFQSYFVQKARSLGHIAVGVDEYYTSKKCPTCERFFGEVEIRRLYCKTCKTYMYQDVMAGHNICNAVRGHLMRQRHPLHLQPVGAEGNYVWEQAATPQTAASTGTSTGTSGQQGARSRKRAASEGGPAARLCLGESNCLNPKLCVSASTLNMIVQSNRQQQQQRALAARAANNGPAIKRQIEKPEPQPIPGTYTDYKLVSTSRDVLHHIMRFHGTKEVNPATFTAPVKLHRKRNENSYHYRGYYNKYNNQNSANNNNSNTAGSNIRDLSGDVKKEGAGVGGGASTSAAGTVPPTTGADTTLIAPYGGGVRNKQMLFKKRTRQIYIANEEERKKKEIEAAPWVVEDYDNQNNWTGQLEGGQGANYVIFVFSDDGFKVVPADKWYKFSSKLQYATLTAEEAEEQYQKSQKQSNSIRWLMRSKNKAKTEDGEEGAEEDVEREQLVTVDHEDDVGYDEDEARERKRMRGKHGDVDEMDFDEVWQDDEEMPSEMPGFEEDDKDDPRKKHGPSMDSDEDEDEEDTKGRLNDAGKAMKKALRKLEKNKVYESDDDKDPYASDQGSSDSDLDEIDKEKDVKKEDELTGLSQDGSKTKGKAKVNAKGAPLINKKSNMVKPSSTKPVSAKAMKTKTPLPTSRNASAGAQTNSKSSSSTVKIGSSTSQRAHSPTPAVAGGVSSGSSEKKRKLIDSNGGEGSGDIPMKKHARASISQSSSSTSTSQASSSASASQAPNNDSWLITEAEIVSYLKSRKEVTTRDLILSLKDKLRRDPRNKNLMATLTKKVAVPTNGILVLKPGY

SEQ ID NO: 2644 - protein, 297 aa, Haplosporangium sp.
MARLVKHPAPETMKLHKWKPWKHRKEDSATEADLPNEINNNEKKKMKGSSGSYQRKDVKCMDKKGLMYTMRGGHPTVAPNVGTLTSNLKRALEKSNSHLNAGTVGTRPLNELLPIIKKYLQDVYAANAKDVNSQLESLYNDYRRQTWKRHAWDAKKAFDEEYRQLADSLLKVVEGTTGTRKKDTNKVVIGLGLGEFSSKNKLSSLHQSFRDYFISKTRSLGYIVVGVNEYNTSKKCPICEGFVGQANIRRLHYPTSETNVHGDAMAGHNSANIVRHHLVHQPRPLYLQPIDSQGRYP

SEQ ID NO: 2645 - protein, 320 aa, Haplosporangium sp.
LTSTVGGTDYWLTEARNVVKTQQDVVALWRCRPEEIKIFGLDLEQACVVGASALLPKEPAGAGLDQGGDAPAKGPSDATKSAPSPAVYYSLAVKQEAIYQPIFKYRRWLEEQKQQVPSEVTESISDIESRLPSLCVDDANFTNYVKEVEDVKERLDGFYNADQSVKSISGMPERSLMPSSRLLQTAYSIWSEARALGYIVVGVNEYYTSKKCPTYRQFVGQVEIRRLFCKTCKTYMHRDVIAGHNICSIVRGHLMHQRRPLYLQPMDSEGNYVWGQAAMFQTAASTSTSTNTSGQLGARVRKRAASVERPTTRRPSQALS

SEQ ID NO: 2646 - protein, 889 aa, Haplosporangium sp.
MKRGLGRIYLLRILLRLHLAPRREERNRANKLVKTLKKSAKDVVRRAKNFDSENLAKDDIVQKLGLDIDDDNLAMDVDHDGLTKDITQQRKMGRNVWLSNVKWLLNGLSDVVERGKPGKAVQRVNINMALLRKLVGILYPYVPKKSPGKVSISHVTLHAPIVLIANSILRSTGYHEFTRKMAPVASTSSLHSLALGAMGVFEVFCAKGGMFNVNDASGEILTTGGNATLPENKPAIFGAFFDLERLKMICYDHGLRFYNRIVYVNPYTVHLVGNVIPNGGALIRGSESRNRRGHSVVSHIDQEKKRRKGSKATSKWTLEFQAQPLDSKEVKEMVDRLSAEIQDMEAAIKKPRKTAGKGQAEQTLLRRALKRAIPVKNKSDRKKAMESPIYKELGVKRDENRVGRKDLLEMENKLRAKRRELYYYSKLNDVPEKSKIYKAPATTPSNATVFRTNPTWNHFTGEEAIEHLDIKDLIQNCRNGERTVVFAGTDYGLCKMSETIALTRTQLEEHINYYSILLGDTPSSAPRESESSSAPAPAESESEASSSSVRAASSSSSQKPKVSRILCSNKITAPHVNDVSRSQRMGKRREKRLRKGAQEVRDAMDKVADKNNSLNRVTTLEEVDAAYKVRSDNKTRTTLRAFEHSKARMKDLRTQRLRTSRSWNKLGASERRFVQKVGHDEEQTTLPPKVSPINEYCNECQSHHLINSFHGPFTHAKNCTRATKMGVLPVMLIGNGGTSFGSRIKRHASKKMRKEHQKNCVVGITDEYRTSKVCIYCFQEIRVARSRRMINGQPKMVRVHGALECINPMCPSFKEGYTIKARDSHVAAAITIAGGCALLSTSHKTLPPFSRVPIESTDKNTSPSNWNYQNRSPDQSRFEKGFSAKKLGL

SEQ ID NO: 2647 - protein, 864 aa, Mortierella sp.
MFVHYTRTNVCNSLGLLRNQMKLLAIVSKTDYFTNVKGYGLHKNRRIIQAIPDSLLFFMELRYMTKVKVKTLKNGHAKSIFLNRKEDTLKNNAADAYQLSMQNQLNSYRRALGQMLNAQRLRARNFLPQPPPPPGQLPPPPPGPAGHGKRYSARTITVPTPTPVSGPAPLPPAYYQAKAARKAAEAAEEAQRALKRLKSSTSSVSVKSTSSQPQDDGGGDGDGDGDGDGDGDDGESGPADPAPLARKAMKRRHGIVSLEAGTLRANVRRAIAARAVQPSLSSQEVNIFRDGITQKIIDTMKFMTQCRRWMHWAIELFIADANTTPADYVQLMTWTSAQTIVYGIGRYLSMAREQVNADARWPMSRRIVLQALDALAARPLMPLGNILSPPPLNSVQIYTLLVKSVLGGTPATPSTTDTITNFRQLNQTLPFDDQWRFYPQISFQDANIRMSGAGLRDILYATDTPNLRRDMIRVFGPRNQCTDLAYQLFVERTNYAQTTMSMSAAAPYYMTPAPAVGTSSSAAPQLPGRRYRVTTGSIITNGFEVRVDAFDIRTRRPPPYKREISPLVRVRRIENFQADDPATWQRLTNWATVNGDLKVIGIDLGEVVPCSATAMTQTQPNRVTNAIITRKSMYDSAEGFLSALNERKRVPIRLNPSPTSTLKVSMVVPSIVEHEAAMPPRGRSDTVSILDFGAWMRVCEYPMMDFYGSFWFKRKQWDNERGFRGDYERAFCGMLRTAGINTNAPIGPNEHVVIAFGNGYFNTHTGRPTLHTAMTRFFIKKARALGIILCQVDEYKTSSVCPRCDSVDVEREMRTFHCTPAIDSVGAHNIARIAMDYIQNGARPVSLMRPAAVANLGHLPSLEG

SEQ ID NO: 2648 - protein, 485 aa, Podila horticola
MVDLGEVLEDWTKRLCEWKQDLVKVGFAPGTAAYHLTKEKRDHAERMRISLKQKIRDAKESGYYWTRISHEKKSETATTTMSTHTGTTAPQTLTTPTGKHMKCCDYAHLIDLSDIGPEIKLYFGGVDYGFRTMSTCMAITQEELRKAIWHANHARESGQPIGTSVPHLPVLRPSSDIKASTIHELSYCQTAINKLNAHVRKQPNVQAVLSQLADMRAAINANPSLKAIDDAANVQRECARFLIDVYNCARVQHDKRHVEIQTKIAYSKLAAEERAYICQDEEGVDDGVRKLAIIITGTSGTGVGSSIRGYAKRGGYKLMDAHGRNSIVAMTAETNTTKVCFACQTEQEAVKATLQKEDGTTTTKVVNGAKRCPNPDCERVKARMAVLNRDCNAAWGMAIAGGSEIYTGQRPPAYRRQIHVSRPGPGLARPPSMHPLIALRVHNMTPDNIPALAPPGGGSLIEIGMPSPSAQLDLPWFGHGTPKDV

SEQ ID NO: 2649 - protein, 1471 aa, Podila horticola
MVHLLQSGEQYPVHEKSDLVFRQIANALKIVIYLFSANRKPQVYPRDMPQKPEIAIGILDATSSFHTIGNPFSVLSVSPHIHPMDLDLPVPPSLVSSTSSSPSPTESPPHITTYRPHRRRPAPPKDLSFPGDDSSLWRPSLRDACVTKLDGFITSAVEGVLKKRGLADDAKETELENKKRILYNDLIGRDDVPRGTRPIILANARERCSAVPEKLETNHLHRRLADAGGVQVWKNVVEETFEDKWTETQKKAQSTPQATGTGRTGTRRRPASKNESITDVTPSTGPSLQAGPASIESPSEWQGTISRELSQCIQPWLLPHLETLDSIAIKSQKHFTNLMRELAFLVHKGLFVISKGDVFTEPGKQSPALLIHLQDLAPTLNSDDTVDVAPLPQLFQGALQGSDDQRKHPAASLFTQGHLQDLFFAFCAVGRDNHRTDGAQPGTPRHLWDRITDEIKARSDTGSIMQVEDGYSRLTTTMIRQLSAAVQRIWTGPLFNKMFDRLVNTVVRERLKHLNMATATLPVTRELVDTKEGAVHTTGAEAEDPPEAPLKTITMSAWRRRSRSLCDELNKALGMPGDDVRHDRKIHVIEYQMSKHLLKKPTPKSFKFRQLTRKERASRIIGNDGDGAEEDEDDDENNGEDGDDGEDDNDGPSNGVRTKDKGSKPVSKTRTFSQRVKWLAKTLKNLLESPAIDMHLNRNWLKKSDSLGLKGSDVTDDELNILVKIATILRPYVPKRVKVDGESHTKPAPALVVLRINASSCLPSSPLVHDTPFHWVLSSFKSQWNSAPGHFDAHQANGSSVFPCDLQKVMSSPENRLDYLRSFFNIDALQTLCKAYNYTLRPRLVYNTLNKDGRKGHPSKSHLDERRKQRFGKPAYDRSYWEQQYLNSSLSKDEIDQALEYKQQEVNTLDAEVKSISKRTKKLEREKSNAAIQAVGPWTPSFRFYTRAQRRFWKAYAEQQQQTETLDQAKKDLTWLRQVRIVAHSKTPPNPKALSLTKATTDYRRFEEDAQHLDISELINNPNIIKAWGATDYGVKRMSETVVLPTPVIQPHMNQFAVLEDLGDEDSNNASEALGQLIQEPVEHSLVAAGGKVSKDQAQKHGLVEKLARVPKTHTITAPQISAICHSASNAHRRQRRLRLEKNHTINIAIDNLKKPAVVPLAAKSLQDLDNALVVHRRDSPLIESFENSHRRLKELRTQHRRTGQALQIVTAHERRLIIRQARTAEGGSSEDTYKVSTQDGWCTQCSEHHRMHLDETLQYVYDPVCPKELKEVAVILLIGNAGTGVGSFIGGIEKRGGKRLRHHHMRSAIVCITNEFRTSKTCSLCLWRVTLARSRRLVDGKLKAVRVNGAVECHNQACPSVQKGYCIKSRDGNAALNIGLAGISTLTRPSRKTLSQFSQRPTTQPCLFPAPASSALVSTSPSGLATTKYSSTHLDETFSDISAHQEQTPAESTEASVKDATGIPASLAEA

SEQ ID NO: 2650 - protein, 311 aa, Podila horticola
MLSVARPTLKHRAWMEAQKNAVLVEPTGQDDIQPFTSSANATTRAQESIQLSTNNTEAAKAEPKSISGIESALPPLRGNRASFTDHMKHRNANKDALDMFYNDKKFKFKRHKWLAQRARVEEYYRLADGLLRMVGGSIGTRKKDEDKVIIGIGLGRFTSTSRLSSLHGTFEAFFVNKARALSYLVVGVNEVYTSKKCPKCAQFVAQTKNLRRLYCGHHCKKYMHRDVMAGHNTCNILRGHIKKERPDYLQPVDQYGNYPWKEKESKHKAQPKSAPGPSQQASSGGSGDNRGVRKRRATESDDKNENEKGGK

SEQ ID NO: 2651 - protein, 1315 aa, Mortierella sp.
MGVHGLWAWMRKKKVEPELHRVNHLYPTSLHLSSEKATIRLDFLGSFFPSVLWAYSNHTRDKAHYILESLLHKLGNQQRVVIYFDGEPAEEKLATQLQRQQLRNKAQSRASNVLDELRNRVDSGLGVRKIIFSKVRKYLRESFRLSTTDRDALIAFLKSKGWIVVLCETEADVRIAKDCQVNDIVISRDSDMLIHTKVKTLWRPIGHATQGKFLVYKIPIILASLGLTRTQLTSLGVISRNDYTRNIPTLGIATNYSLVKRLDGKQDVPTLIHQYLELDSVVLKNVAKQSFSLSINVFVYIRQTPITATSAIPSTDTLNYTALRSEFDRVCKVHAQLKKERQKAKLEKRSDARIPRHKPHQHFNRFRTIDQVPPSLPASASHKKPQNRPRYSFKMRRQGKEHDPPAAMTLYKRKDYKRPPDKPVVPSPPKSKKTPIRSVVTDQKKKTLLKALDFEHPLVSLDTGTLHVNVCNVHKSDPSFADEAVRCIQGAVREASNVKRRCQQLVGMYLEIVLSYKSINNTDRDILDHLCMRLSEKDINQAEEQVNASASATDTSTSTSSATISSTTSASASDTSTSTSSATISSTTSVSATDEADEEKNDTREDEDSSQNKQQVFLRSVMACLYSKNRPQNGSTASNFITRLEELDLLRTENILARGSSRRETEYAPSSLVRSVASQMSVELKKQYKNGSCELYKKLQQQMNWKLLPSNSAVVLQRDMSSIENFARLNALAMHSWTPIPLSPVEYGFVDFSEYDLANFFWSRDKLQDKLKDLMAPDFPSASRDKFNKTWCVADWLPGKEPGYLIKRFVCDIGKEGLTVRQQGKAGHRAAIKQLSFQQLFNHINHLRQPSFDPRTYNEKEYVLCGSIRTNGHHLQLLAYKLRELQSVRYRRYKEELLPNRLLTTTGGTDYFLTEIRNLIKSPKDVEDLLGCNTDKVREEVRVLGLDLGQAFVVGASAVQATPPKRRRKKRRKRGKKRGRRGRKKRSDTSMTAATDLRPPNYYNLAVKQKAVYQPIFKFRSWLEVKKRCTIIATEPAREELPNAQHVHTAVGSDLVTATDIQHQAPAPQDERAIRTICDIESSMPPLRGPKVNLKEYLEHRVTYAEQLDRFYNHDALYKRYSWDARKAQKEEYRRIADSLLKMVGGSIGARKKEGEKVIIGVGLGKFSVTTRLTSLHTSFQSYFVQKARSLGYLVVGVNEYYTSQKCPTCEHFVARVGDDIRCYYCPNCKKYMHRDVMAGNNICNVILGHLEKQQRPKYLQPVDKYNNYPWMEPNEPSQLARQTPASRRKREVAQLDEDDEPPKPKKHNDKILNA

SEQ ID NO: 2652 - protein, 317 aa, Mortierella hygrophila
IKILGIDLGQAFVVGASALLPSRNKHLDAEGGPEGAQKDPLVKQPTTKYFNLAVKQKAVYQPTLKHRRWLEQRKAQPLEGGGSICQIETSLPARFGPDASIAEYTTRMQEVEAQLGSFYGSVVLKKHRWNARKARDEEYRLIANRLLEMVGGSLGAKRKESNKIVIGVGLGQFSSRIRLSSLHESFESYFIQKARSLGYIVVGVNEYYTSKKCPTCGEFVGQVDLRRLYCSECKKYMHRDVMAGHNICNVIRGHLLKQERPRYLQPKDIDGNYPWEEKQSFRPRPGGSGAGGHKGKGVKRKATDEGTDSSQFRRVSV

SEQ ID NO: 2653 - protein, 320 aa, Mortierella hygrophila
ARQKARKLKEPQTTRYFDLVVKRKAVSRPSDSFAGWLEDRKEFTTGSSTVRTIQDIETALPPLMGEGASFREYVAARRASEEDLDNFYNQTNFWKHKWDSEVCRQEEFCKVAEGLLKMIGGSVGRPRMPHQRVVIAIGLAKFTGARSLGYLVIGINEYFSSKRCPCCHDFVCATSDWRTLFCKICKRFWQRDVMASKNMNNAIKDHLIHQQRPLYLQPQRRDGTYPWMDVTTGGDSGGGGGGEGADGPPEAMDVNVDGAGSSAGGGPAAASPSMAATTTVSGPTRKRRATSIVSVEDPNTDVVPTADTLSVHSKNKSKKQ

SEQ ID NO: 2654 - protein, 529 aa, Linnemannia zychae
TELATFFWKREPLKRRLKDLAAEDGSFTNTFSDIADWIAGKGPGNIIKQFIADVAPHVATSRQRRKEGYRGAVKLLTLEQIKSHLRAVQDEWVDPVNYNTKGYILRGSIRTDGFLLQLPAYKLRELQSVRYRRLEHAKLPPRLTSTIGGTDYYLQEIRHVITCKEDVEKLWPGVPVDRIKTLTLDGGQVCVIGAFADLAEDVLSHANGKENANESSMEGVTTTTTTVTTTKTTDNQLTINATTSKSSKVPVPLPHTQGSPTVSSRTTFLNLAVKQKSVYQPTFKFQRWLEDAKKEQVCVDGQQLSILEIESQLPPLKGQNSSVINYVQELERVEEYLQEFYAGSGYRFKRHKWDMKRARENEYQLIADRLLGIVGGSVGRRYDPSNPVLIGVGLGNFSARSLGYIIIGLNEFYTSKKCPHCGNFVAQVTLRRFFCHTCRTYHHRDVLAAENMANIIQGHLVQQERPLYLQPVASDGTYRWQKAQTPAVSTSSLSGTSTSDSSSSAIPSQGRSKRASASLSSGRSRKKAA

SEQ ID NO: 2655 - protein, 578 aa, Linnemannia zychae
LARLDNTTVTSTHDLEAWVGGLAPGLIIKNFVCDIDPIGLSNRRRRRCGHRAAVSIKSLDAIRSHLQVVKESKPKDYQVKGYLPRGSISTNGFRVNILAFKLRERQDARYKRLPQEDLPNRLTSTVAGTDYYLTEIRNAIKTKEDIEKLWPGKDVKRMKILCLDGGQACVFGAFAHLPMGHESSTMDKGKDSAGEGRGSAGEGRDSADEGQDRSGEGQGMEGVLVTSRKAIVDASHQSQVCEHSPIPTPLQSAIQPAEASEPAFLNLVVKAKAVYQPTLRFRRWQESEKTIVPDNEEESVHDIESRLPPLRGSASSVVDYTRELLQVEDRLKAFYAGDDHRFQRRQWDHARARQIEYQAMAERLLGIVGGSLGRRLEDNQDDDPILIGIGLGQFMSNGRLTSLHSSFLEYFIKAARSLGYFHRDTMAAENMYLVVRERLDNFQRPKHLQPIRADGSYPWQDNPLIETAQSSTSAPTSVSTPRRRKRTSVTYQSKPSKATRLTPSNLQGGLAPQLGHLQKKLRYNIRDGISIYQHETDTDTIAHLIQRGEQDIAMVQAWKTVDPRWLERIFKKPTPKKK

SEQ ID NO: 2656 - protein, 1347 aa, Linnemannia zychae
MGCRNLWRFFAKKKHKPSKRYLHDQHSALATPENRVRIDIQGAIFQTIRQAYTHCSSLEAAHKLVLKHIRKIGRREDSVLYFDGNPAQEKQGTHQQQASAREKALRAAEENVEEFAERVQTGLRIRKQLYINIKKNLAKGFYWDPEARESLIVYLENEGWTVTRSPTEADVQIAADCKAGDIVISGDSDLAIHPSVSLIWRPISGYKFLEYKLEDVMAALAISKTQLTVLGIVSHNDYNVNVHGLGCSTNFSIIKSSSGTDIPGMVADYLANSQVIVKNKDKLDFDASIEVFAFGRQTPILRQESNLCALTVDRINDKFNNAKERLAQWRITEAEATLLSKIAMTDRVSRHKASQKFNRYRVIDRPTPQGKKPLINRSTTYVVQPGQPVPHVPLATYRPRYSVKSHVRKAHNPPNAMKQYKLKPWKAKDPIANETPTASVTDKPKAPSRGPRLPSIERMSKAQLVTALSWKHPTVTLDIGTLAGNVNNALKVKDISRDPIELAEDSAVAKETIDCIRAIAKEANRVKHKCQGLFGAYLERINRDGVTSYDKEILKEFCPPIPQKMIENAAFNTSPSYQDSTIDDDDDTSDRQVQFIGCFMRYLYSNNYPRDTGVGTVVNRFISRLEQMEMHTPVRIRGSIDKKSEFTSGLLVRLASTQLAAEMKKIYWEGSVQLLEQLRTKFERDQKANTPNIRADKDKNTNTLKDADTVGDLGSAEHTADDRDTVPNRNRDKGTASNGKKDGSSRQLDSFTLSISNSMSAVENFLNLNKLAKNARRIVPMCSQEGRFLSFSETELLGLLCSRPLLQDRIRSWADHDFSTKPSASNLQNIWLDSKEPGFLIKMLLVDVGPKNLTSRQRGKAGYRLHTMADIREHIDPLRQDTFDPRHYDSKGYALRGSIRTDGYCLQLLGFKLKELQRCRFNRACRYPLPPRLTSTIGDLDYHLTEIRNVVKTPADVARIWPDCQPDAIEILCLDLGQAFVAGASALLPETARSTMLTQSTPLISSIAPTPPVTSNQVFHNVAISQKAVSQPTLQHRRWMERVKSIVPEGGESSFNDLECNLAPLRGESASIIEYLEGVRRIQGPLDDFYNGNNMLFKRHAFDAKRARQEEFIKAANRLLNMVGGSVGCKRKPENMTVIIIGLGQFKSSSGLTTLHGSFQAFFTQLARSLGYVVVGVNEFFTSKKCPTCEQFVYQVNIRRLFCKSCKSFVHRDILAAHNMCNIVKSHPLIQERADYLQPIDEDGNMPWKKNDSAAPTHNPSATSSPLPKKAQKIKAPPAQNPSSSNRSSKKTQKSKVPPTQDFSPALSRPFKRSNIDDEPQPSSAPSRPSKKAKPVPNVSSRDLAPR

SEQ ID NO: 2657 - protein, 305 aa, Mortierella antarctica
MPNKVAVLTVKRAALYAPIFRDRYVMNQLKEKPPPIPRSDTTARLTAAFRSNGSINDIQNGMVGFGDGSSQAVKEHLRAWERAFRKLREFYSCHTYKKRNWARRKAFRAEYDYAVTGLLRLALLDGEMNQLHRKVVPGMKKTLFVYGSARFNTHTKLSSLHTSLMGFFYRKATALGHVVVVADEFRTSSICPSCDAWVAKPTMRLDTHTYFDVKIRPDRADQVLAWTQAAAQDESSALAGVEYVGHVGELTNHLLYRVPKHQDDPNDDGLEEQRNKHVVDTLSAVQGVLQVDIQTLRQRAKRDEL

SEQ ID NO: 2658 - protein, 1111 aa, Entomortierella chlamydospora
MIQYAYSNFPVNKAQQHVQSKLDKALDKATALIYFDGAPPVEKVQVHRKRKETRRESLDKANKHADMLMERIDQHLRVRKRHFQSVQQSLRRAFHLDPAEAGSLLDYLRSMGWEAIESETEADIRIARDCLPGDVVVSGDSDLLIYQSVETVWRPTSGGRFLEYVIDDILDTLGLARSQWIALGVVSKNDYNSNIYGLGWATNFNIIKALNGDDPSTLVQQYLEDPRVMENKKNITFDAPARVFIHRLQTPISQTSMHHPPATIRLEEPSITFQSVSEKLRTAKENLAALKAVQQEPKIGKKSANIEARHKPTQKFNRYRTIDQPPSESNTVFRPRYSFKARQRTKTHDPPKALKQYEQKVPKDPVKSPEDVKSTSTTSSKRSGIKPPLPTNTLKRKDLLKALTWEHPTSALDVGTLHKNVEYALGESHAAREEVIKVIRRAVRVASKEKRRCQRLIAEYIQLIVSPENFHDDDRAILAHLCPYSSPCNSSSSIENNKEDEQDADDTDFDDSSDKQVQFLQSLMISLYSQNKPLGKIANVVNTFISRLEDLELLPQRQQPRVGALKKKTEFPSGALLRSVSVQMCAELKRHYKVGCEKLLEKLTKQQEKGLLPAECRVEVRSDVSAIENFAYLNKLADNAWRLAPLSPVKDGLVSFSELELIAILWQSPILKPLIQNLYTITSGVPSLEIIQKGLEPGRMINALLCKVGIDGLSWSQRKKAGIRAAIEMPASTFKKKELQSVRFRRYPEDVLPNRLLSTIGGTDSFLTEIRNVIQSPDIQEYLGNEPDRVKILGLDLGQTCTVAASTLLPQDASASEQLFLNLAVKSKAIYQPNLKHRRWMERRKHQALPGSNKSEESGQSEESGQSEESEESIADIESNLPSLRGKDSDKYLFERHDWDVRRAKQEEFRTIADRLLQSVGGSLRKKRDEDNKVVIAVGLGKFQSKSGMTSLHDAFAAYFVKTARSLGYLVVGVNEFYTSKKCPVCTNFVGQVTIRRLYCRTCRAYLHRDVMAAQNMCNIVQGYLLKRERPEYLQPKSIDGTYLWTTAISEASSSANLDPTTLEQASGTEPSAKGPSKTSVFLRKRIASDSELEEQVEELTIEPKKTTAHI

SEQ ID NO: 2659 - protein, 966 aa, Podila clonocystis
QDSVSTVLHRYEQNPEVQAAKARYNQQEEAIRLEKPVNIHAACRVYVDGKETPLTKAQTDGKRLTEHLQEQHVHGLKSRLVQASRTRREVIKSKKSQALTADQQQQLHCQRHYNRFKTMDCPSVQAPPPLPLYSLPQQAPPLPPPAPAHPLPPPASAHPLPHPPPAHQLLDQRQQQHQETINRQRQDRPTSVSTRAEACKKEHKAQGFDKLKSKRYGIRVRMVQPQQQQDNVSGDDGELPEGLVFKPFKPYTSVSPIAPKKTQRHSTYIPKDCQMTKQDVVKSITGFHQITTLSVGQLGRNIGHTVLPQCIPTNDPVDVKMYYAAKAGIATTETIQRIVRVANALLRHGQKALALFIASATSADLHRLKDTIFHKHRHCTVEVAISEAARKRLGKLGKVNNSNSTETLATIEAISEQGEEQEQDSSYPEEEADESGTKGDHGGFFGSLLQYMRTPTATIKYNNRHIALIRPIRTQYIQACPLDEAEFKILNHGLESSIVQTIGASLAVQNIRHYIGLTTGEDPSFIDISTKPPGWLLTHLITPVGGSLQSPVHNHMGQAHNNFARITTTATVEELNVLREAIRTQAIGNESSSQFLMDRRPNEDHVIINPKPGQPTNLLPSYLLRGMIVTDGRSLHLSAINLQLRKGKRFMTELTTNSNDGMVYRHHVLAPDPHRCLPSLTTAIPDQAALSQLFPDVSKVDVGAIDLGKEFMAAFTCRRYDRPDFVYTVHAKTKALYQPTNKAAKELERCLDNSTVTHVAGNESAISVYQSALPSLRSDPKHRVLLEQTDEYQQYAAFYNNHGRQQKRKEQAKRARCGEFDVLTNHILTAMGTHRARSLGYIVLGIDEYYTSRRCPSCKCSGSDAQDFVGYIGLRRTYCSSCRTWFHRDLLAASNMVEAGRYYLQHLSRPAHLLPISEDGKWVYNPWYGPVPPPEVPTGQLLDRRALQGQGKAQQMDVEMQDATAV

SEQ ID NO: 2660 - protein, 1944 aa, Gryganskiella cystojenkinii
MANTIFEQQLRSLQFPPATTILYMDGPSPEEKRATREVREARCTAGLTKADALLSEMEDIQRQGKKLRKQHFRKLYKAINAAFYFSADLRTSLARYLRDKGWMVTECPSEADLQIALNCKSNDIVVSGDSDSLIHSSSIKTIWRPLARGGYLEYDVPSLLQQLELSRASLTALGVVCRNDYTSNMKQMGLATNYEILQSLEGEDVDTLVNSYLTHPEVVLKNPIMTHFDSALKVFTRQEFTTWDHSLPPQVIQQEDALTETRLPPTLSGILARLRDLQNQLKIKNESPNTAHASEFEYRFNRYNTVDREPAISPPPHASGRKYKYRKRYAIKTRSRMIEHERPDVLKQYILKPWTAPPESPKESGPPPASKIPTKKILHKLDSMDKKWLVKELHMDKKWLVKELQWDHPTRILDVGTVNANVTRALAKGSLPNAYLPRIKACLSKVTKIAATTKRACQQAIGQYLENLSLENLDDQDKLILRLLCRPFTANDVLPANGVLPANGVLPANGVLPANDVLPAEGATEPGSVGQVEEEETEEEVDESDDSNDRKNPALQFFMSLLSAIYNAEPPKMSLELQRAKYMPKTLATEPKKESDSIQAVREFLIKAKDFLPPQSGQATAVYPSSTVLRSTALHLSVEYMKHYRNGSLDLCKKIRSLKKKGTLPSDTVDNIDLTLSPVENFIVLNRASGCRRCLSPMSYMGTGFVNLSELDLTKIFWYDNILCRRLQECAFPHFNLQIPEQVSLDTVGIWVGTSEPGMLINKFLTDIGGYAADERKKKKNFSRSAMRMSLNDIRSHLRYLRQDGFDPSSYNTNGYLLRGSIRTDGFRLQVLGFKLNELNCVKYRRLPPERLPDRITSTLAGTDYYLTEIRNIVKSQEDVTRLWGDDVDPRQIKILGIDLGQAFVVGASALLPSPTEPNSTPRPTRFFNLSVKQKAVYQPTFKHRSWLEHRKGRASAEMQSVAKIESELPPLRGPGASIKSYVEQINNVRAQLESFYGSVVLKKHKWNAQKAKVEEYKVMANRLLELVGGSLGAKRDKDNKVVIGIGLGDFSSKMRLSSLHGTFQSYFVQKARSLGYIVVGVNEYYTSKKCPVCEDFVGQVDIRRLYCSRCKAYMHRDEMGGHNIANVVRGHILNQQRPRYLQPVDAEGKYPWEDGRAVYRPKSTTIRPSKAIKRASVKRKAPVDWSEQDHDHVKRKPDYRPSTAHHSSTSATATTTMRREGTIDYTDEYNRFMARLEAFHQKHGTVLNREPVLGSQRLDLLKVYKLVTAYGGCEKVTSERGWKRITLPFNFPPTCTNSAYVMKSVYVKNLELFEQEDFFGKEVPVNKFETAESNISRSREASQAPSTGSKRGPYLTAHMKQQLQQQQLQQQQQQQQQQQQQQQQQQQHHHHQHPTPQPPMQPHAPSTPAATPAGSTAVVPARPANYLEGYYIDGGHQNRILLALKSELPNEIDWAFSRLIALSFEWNDFSLKMIPGLFNELLAFAQPFFDWWSTLEPKEIEELAEEDLLNMSDAHNMERVLQVFHILRNLSFLDQNTIILTEHMAYRKMLQQGLSMPSSTQLSELRIYCLDTLESLSIHITLRSKFDVYLRELHKLLQTNDKALILGSLRALTRLAANEHNEKILSDIDPEIIDRISQLLLIQDEELIGATLDYLYQFSSFHGDAAVQIAKNFPGNIVSALVRFLSWGSPKSVPPPVTADPAQQILIEPYRALHWVQSNFESSPQAYIYESELFKLYQTKFMAHGPMLRSADLITVSRVGFPKMETVFVQEVEGAPPVQIIKGISKKPWMDFSGADNRILCRWIGCQSVAATEEELFKHTVQEHIAPNMGLYTCQWLSCRRFTTPTIDRQQVIKHLKTHFPLTPTVKPFSNRPRWFDMRPTVLGTRELAGIPLTAVFVLRNLSRQKRNQKLFLPYEESLARIMGEFPKMAAFIVDILTYLRVG

SEQ ID NO: 2661 - protein, 280 aa, Gryganskiella cystojenkinii
DMTMSPTAPSSTTTTSSTTTTSSTTTTSSTTTTSSTTTTSSTTTTSSTTTTSSTTTTSSTTPVPNIKPNGFCTLCQTHHRPALVTERITDQSGQQTERYVLRHMQQCPKTAPVVIPLFLHGAAGMGVGSRLKGNAKMGGNHIPERHMHHGVVAKTNENMSSQTCPFCFHLVRLARGRRVVKGEGKLVRVHGAVECINPDCISARCGYGHRPRDTNAALNIALIGYTILTSPTRQTLRPFTNNPHRWLHPNPDASCRATGEITQSDVAAPRRTKDLDFGPT

SEQ ID NO: 2662 - protein, 1295 aa, Gryganskiella cystojenkinii
MSQLSLYTARRSEEKGQKGWYPFLRKKGYHPPVLNLSVAATTSNTSTRRIDLLSRFSVIRYAYTHNSVEQAHLTLEKDVAQFGTKENSVIYVDGPQAVEKEHTAKIRLEALEKAVDRCEKSLGVLQERINESMKVRKKHFTDVKTSLASTFYWSLTMRESFVEYMTRAGWKVQTCATEADVAIARDCQPGDIVVSADSDMLAYSSISVLWRPVSRSLIFVYNILDICQILGMSRIQLTALAVVSNNDSGKNIFSLGPATNFSIIKSIEKPDVRETVKAYLEDSRVVSKNTDNKTFEYSLRVFVDLQQTPVSTPRRLSCILSHGELYERFKGLQVLYQKKKDSDAQQQPSTGKDQIIRLRSPQSFIRYRTVESPAMPRPGPGSRLSEPSSPQPPQQLAKNPLDVSVATSPPQESTDHAPLQRARTPRNRHRYSFKTRKGEMARPPPEKMKQHVFKPFKEKTDNSEESSDLDETIPKAKIKPKLKTLRTSTTSNKTRKLAITHHLAYHHPTSSLDVGTLQANVGRIAAISPILRSQIVQCLRDAVRDAASTKRRGQRFIGRFIEHVNRLGSQLESDDRVFLDLLCPRVTKKDAKDHKDGEDDDDEDDLTDLGSASTVKKGDHGSFIWSFLIHLYSGNYPRAHGVGQKVNSFIVRLGELGIYTPPRSRSEVNEKTPFTPSDLLESVSGQLRVELKKMYKNGSCDIHQKLKKMKKRGLLGPSVDIGIQESISAVENYLTLNKLSQNPRRIIPLTSSKQPFVAFSERELAGFFFSRGGVLRARMQELVNGGCTSIADVHEWISEKEPGCLIKSLLVDIAPGNLTVRQRGKAGHRAAIELPTLGELKIHLEALDDKDFQPKNYTRKRYFPRGTIRTNGFNIQVLCFKLRELLSVKYKRLPDDRLPPRLTSTVHGTGDFLTEIRNVLGTKEDVARLWPDVNPQDIKILTLDAGQAYVVGAYAHIPRSGKGKDLAHGTPLSVKVSFPATSTSTATTLTLVQPRGISTPPSAAHHKTHHHNLAVNQKAVMQPVFRYRRWLEEEKQLKPEGPEQQLPSKPDIKLQSIATIESQLPPLRGPHTSIVNYVTKLEEVEERLSDFYNGNNDCFRKHTWDMKRAKHVEYQAIANSLLQIVGGSQGEHRKGDNPVLIGIGLGKFGSSSRLSSLHSSFLSYFVPLARSLGYLVVGLNEFYTSKKCPDYENFVAQVTLRQFYCPRCKRYQHRDIMAAENMSKIVRGYLVDQERPEYLHPKTSDGRYPWKTSTNSGQGETGNASTTIPVSIPRPRKRAFISTLPQGSTKAAREI

SEQ ID NO: 2663 - protein, 1144 aa, Podila epicladia
MKLGNKDELVLYVDGLPAAEKPTPTINASKTVLRLANARSESSSHWRTASRPTSTFANTTSTLPTKNSVQPSAGPWDSRDFVDYMANNDYEIILCATEADIKIAADCKEVDVVITGDSDLLYYKIVPAVLRPIGRGKSRRYWLYDKAAVLDTLDLTAMQLTALAVISGNDYNRNVPYLGIETNRKIIRGLAAVEDETTIVEKYLADPQVVFKIDKDESKNWTISSYADSLKVFVNMQQDIAPQPLTTPADLDTDTIPSYLALRSRMDQFKARFAEHTKAAYEARVAKRAQNAAQSLPPAEKKPRNIFATIDKPGPVRPDKYHPRYTPKVRYDPIKEQAPPLISYQHFTLDLGPLTKNVRAVLKDSPAAESVINCIRGAVHEASTVKRRCQELIGLFLNEVFFPAPAPGVPRPKEPAATISSQDQSFLDDLCPCLLSKEMAADAENENGAEDGHGECNKTTFLQCFLIYLYSGNLPQNKGKGVAINTFICRLQDLGILPKSEMTKAETLKNIKEYTPSHVVRAVASQLTAELKRHYKHGCKQLSEKNGFMTFTEIELGAFFHKRDDLHPELESLIGFKDNDRSLTQADVICDWLPFESPGKLIKHLVAPVDPDPDPITGPLCGRKKTEAGIATVVKIPTRADIRTHINTLCTEGFDPRSYTQKGYILCGSIKTDGYSMQLLTFKVCELLSVQYKRYPSEVLPDRLLTTTSGTGDFLTEVHNVFQTKEDVERLLGCTSDQADTISYLEIDLGQACVASAYAILPSYKEPRIGGHRRHRGHKKRGSRGRKNRGSRCGRVTKDTRARGKRHINLAAKQKAVALPTLKHRAWMEVQKNAVLVEPTGQDGIQATTQAQEGVQQLTNNTEETPAKAEPKSIIEIESALPPLRGNRASFTDHMKHRNANKDVLDMFYNDRKFKFKRHKWLARRAREEEYHRLADGLLRMVGGSIGTKKKGEDKVIIGIGLGRFASTSRLSSLHGTFEAFFVNKARALGYLVVGVNEYYTSKKCPKCGQFVAQTKNLRRLYCRHCKKYMHRDVMAGHNICNILQGHIKQERPDYLQPVDQYGNYPWKESRSKHKVQPKSASGPSQQASSGGGEDGHGVCKRRASEGDDENDSKKCGKRPKAVVGKRKTTMNKGKPSTAMHVDS

SEQ ID NO: 2664 - protein, 478 aa, Apophysomyces sp.
ATKSFIIDADKCKDAEILVRQLPEAIQEEINEFVCRQRNDLEKILLKKIGDKGTLLTFSIVLVQHVHIKDLIDHFYVGQYLAESGLKQSWYRYQYQATTVRKRGDCFTFVFDVATKVVTGGKQSSIVKKVNRCYKTKLHKRIPGTELPRYATKSRFLTDGLRLVAIYTDWCRSSFQQQRKVFLPEVRTLARRLREQQDNKPDSDLINYSGVVDLDLGETCAAASFYLPFDSERPGVQLTIKRNELYGRNGMNAAWLEDRKSKCGIDEDEAVLACGSQNSSLNKLLVYIRAWQYGDRGIRLRNFYANKSIMRRSWDTSLSLSSSLDKACNLVMKSTRKNVQLGKNNPSSKNRQKPVVFGFGMDGLRSGSRRGAPSSMDRRLMDRLRRHVRASDSDHKVCQVDEYCTSKVCCKCVQNGKVFFTKYLRRLSEEKDQEVIRILVCDVCEGVFRRGGNAAHNIASIASSIFMHHRRPAYFIRP

SEQ ID NO: 2665 - protein, 383 aa, Apophysomyces sp.
MKLIRRRQLRGDEGSENDDDDDGNNDVASTSTRGSHSRQLAGSKRKRKQSASEKAAKRQSGKERRYMSAKKSITPCPTCLENLLSDTAYSHSRSSHHDCPFQKLRKRQQEVGKTKTVCRKIGLDALLHINDSNDRQLRINSAKTTVIRSLETANTTNRTADMEKIHRYIDSILQAFGPLTVFYGRHDIRNRRRLGEELVNIFINGGNKRRYPPGSGERLLYTHWPLRSGTRWRRQLRRQSQVIDGDPPPKENEWKKVPTDNDATKVPVVVFGAAKFGRKTYKGKLGGLADKYRTLLQMAGKARRLILVDMDEYNTSQVSSKCGKKSLCGNEMSMLQETFVPSLKILSPMATDLDSWLDPPPPHSKNVLMFTNEIYWEFGTRRG

SEQ ID NO: 2666 - protein, 667 aa, Apophysomyces sp.
MFQYIAEANIREQINKFATNMVNRYKTSIETFDGDRCQLEVENLELGKAGADQEDLEEHDQKQEQERQAVGDILADLANNVHIQIENFITTERNLQVKGIRVSEVNLSECLGKTGRRGTNGGGNDEDDVFHRTHGGKLSKAKAARLIPFLIYFLERREGNFKSFVLYSLQAHHPFLSSIIEQLEQELQAGPNERGAHQLTRERKNLQNACTRLQGIGRTDPFSALFDICRQATIARDGSVDVRDRGYMRWLDQRILGNINKPRFTKRRVFRTDCVRLYCIYNDWLRSCSGNTTCKYLTELRRTTRETLKDTWEGDSHGDQFDYLQHYDGIVGLDFGEVCAAASVFRPREPGLCGSQLTIKRGYLYGRTIPNRDWLEARKAVNNIDDIEAALSEGSPRSTYARYQEYLRQLKENDNNIRPWKFYSNRSVRRRVWDNVISQRSYLDKACYLITNQAMHTFGMNREIDPTTRHVECPRLVYAFGLDRMSRKSRKGALAPMDHKIAKTIEGRIDNMPIYTLKSTNISRRSSIGQEKVLRIVQCANCGRTFHRDGNAADNQTTIARYMLRFQQRPRWFIRPSRRLETSSDGEATASGFRRSPSEGTTLISGSSQERASVREATRTPGPRRRPREEEALETTRSVRRRTRARRTQTMVEPPGSAGRTSQREEE

SEQ ID NO: 2667 - protein, 1026 aa, Apophysomyces sp.
MLEAKLQRLLEKEEQTTDEEARPPAKRQKKGRSRTTTKRKQNADERAAKRQARDDRKAQVDADRETPHKHCPTCIKASQVAVLKVTLASNEEERQRHRAEEQCCITKSRTHSRASNKDCTGYKERQAIKTKARLGGKVRPSTIKHGLAGLLQILPVAEQAQFLQGVETVVDYNRKLAIQAHLFLTYYLTYRLDAGLPIMPAFFDMHFVNGIFQLLLGGRFTSRAIFSQAIRDDLDTAFARYIEMFPNARCQKVPSPAARPPIAFSGLLASTATQIASTFTSHDLKRGQAKAYAQYAYQASANDPQFPPEWPTLYHSGAIDDVLNDALQTAMDEATDEWAAIHDQIQQDRRRRQDQGRTRSSSVASTSTDPLPESMEAPSPAVSISTIGSMGASQLDISADSFSVETSTLTAYPQLFLPVLFRILQVMENWNVADQELPATPQPEATPVWTRHWLQSLPAWESLKHRRRTSLVRAITKLVNDQVLFDPARLPVGFDQASIDTMTEFIHQAQQELAEGTFTPPTYLVRSQARLFTIAPVAAFTRKYVKIDHETLGIILRHFGLGQHTAMPHTPVPADRPHANFNIIDLSKMKASENSLSTDGFATSITFKKAVPENPLPSLALDDIKEEHLAQCKIWGVDLGVSEIFVAVDGSDAGTYEDPSTAANAPHQVLKFSAAEYFTKAGMKKTNASILEWKRADGITAIEAALPSPKSARMSNIEDHIRAVLQALPRLLSHYGARYQQLRFHSYRGKQKIQKEMVDIFLTGGAKYNGDHHNVSEAVALSRTRADGQMRSKRKARPHIIAQAAAPKPNKWQKAMFQETHRDICNVVCVGDGAFGRRTFRGKVSGQANMSTKHTRPKCAAAAVSGIWTMLKSMSNPNCTPSYYATTVDACGSAIVTQRATSMPWHSWPSSPATTLKAGLKSSPENKDKKQSGSQKPATVKRLRYLRIQQRNGRKTLTTLQGLSQDVDIKRLLKAVKKSFACNGTAVDDPEHGEILQLQGDQRLKLAEFLVVEGIAKKADIKVHGF

SEQ ID NO: 2668 - protein, 363 aa, Apophysomyces sp.
MDNVPPGNQRQLALSDMDPSMLDDLEIWGIDHGVTQVFVASNGCDPHAYINDNELTDEPSLATPDNPRHKIRQFSAAEYYCLAGFPKTNTKIREWKDLYGIPQLESSIGSPKTSSLQGIIYVLDLLLEFYGTDAQQLKFLNYRGRQKANDEMVKIFTNGGIKYGPHRERGNSLEVFERRRKTDGTLRRRRCQWNQTEALPPPSAPRAEKWRPLPYTQTPKIPLLCAGDGRFNRRTFRNKPHGLAKTFRKVLKQAQRQHLLMVVDVNSSWTSKVCSKYGSRGLENVLLDEDDQSSKLHSVVCCKACHTMWQRDYNASRNICAIALFAIYGFRPLVFTNDYGQETEGQQGQNHSPHPGTRNLLDE

SEQ ID NO: 2669 - protein, 232 aa, Apophysomyces sp.
MSLNCIADKLLGQYGTQNIPLQWTHKMKKRKRKRERWRVKAFEQEDMRPAIVAFGDADLRPMPGQAPLPIKDFRRILSHKALVVCIDEFRTSKVCSYCDRDTVELIRLTFIQSMLNRKKYLRLGTENRRRQRCMREDNSVLCYSSQCTQAREYGPQSWKSILYPVRMCPHCLSDTNEQHQLIWNRDVNTGKNMRRILREYIQSGCRIDSRPPALQRPARPPQTTQEQLVTGG

SEQ ID NO: 2670 - protein, 302 aa, Apophysomyces sp.
MITYGDMCQLDILKKKQKVKETEPDEDEEKEEIKLCKVASWNRPGCEASTKFLDIAELGREASQDPEKAITFGGTNYGLRNQKLDDGQAPVSVPEEMPKILRAMKIKAGYLEKKAFSRKFRKKRETRKNVWYRWSQDLTTLFYHSNRVHHEKRAQKLFTGRVYDQVAAQKRRSVKTAATTDKVGTRKVMPIMAIGTQGTGSGSRLKGHIKCGGAWLHRRHCRYVSVSMTNEHRSSQLCVYCFERVERAKARRKKNGKWKVVKVNGASQWVNPNCVAYRSGRATQNRGVEAALASASNLLSAD

SEQ ID NO: 2671 - protein, 620 aa, Apophysomyces sp.
MANDRGIQTAEEDPEGDDDADMMSLDGQSSAYGSIATTNASISTMGVSSLQINNPLPAMQPICITTSTLTLYPHLFIAIMYEILREIEDFNSNDVRLLPLEPQSVNKNWVYHHLSQMADWARLNHRQRSKLVGALPKIINEGVEFDPLRLPRELSCPDIFVQLTEQSHQQIITLIATTQASIQAGTFTTQEYLTRPQLRLFSILPVPSLTRKFIQVSHQSLAEIMRHFGLGEYALSSTSAASNTIHQNFKIFDMKKIKHGVPPGNQRQLALSDMDPSMLDDLEIWGIDHGVTQVFVASNGCDPHAYINDNELTDEPSLATPDNPRHKIRQFSAAEYYCLAGFPKTNTKIREWKDLYGIPQLESSIGSPKTSSLQGIIYVLDLLLEFYGTDAQQLKFLNYRGRQKANDEMVKIFTNGGIKYGPHRERGNSLEVFERRRKTDGTLRRRRRQWNQTEALPPPSAPRTEKWRPFPYAQTPRIPLLCVGDGRFDRRTFRNKPHGLAKTFRKVLKQAQRQHLLMVVDVNESWTSKVCSKCGSRGLENVLLDEDDQSSKLHSVVCCKACHTMWQRDYNASRNICAIALFAIYGFRPLVFTNDYGQETEGQQGQNHSPHPGTRNLLDE

SEQ ID NO: 2672 - protein, 576 aa, Apophysomyces sp.
MFQYIAEANIREQINKFATNMVNRYKTSIETFDGDRCQLEVENLELGKAGADQEDLEEHDQKQEQERQAVGDILADLANNVHIQIENFITTERNLQVKGIRVSEVNLSECLGKTGRRGTNGGGNDEDDVFHRTHGGKLSKAKAARLIPFLIYFLERREGNFKSFVLYSLQAHHPFLSSIIEQLEQELQAGPNERGAHQLTRDSRASAEQIHSAHFSISVGKLPSQEMDPLMSEIEATCDVGLDFGEVCAAASVFRPREPGLCGSQLTIKRGYLYGRTIPNRDWLEARKAVNNIDDIEAALSEGSPRSTYARYQEYLRQLKENDNNIRPWKFYSNRSVRRRVWDNVISQRSYLDKACYLITNQAMHTFGMNREIDPTTRHVECPRLVYAFGLDRMSRKSRKGALAPMDHKIAKTIEGRIDNMPIYTLKSTNISRRSSIGQEKVLRIVQCANCGRTFHRDGNAADNQTTIARYMLRFQQRPRWFIRPSRRLETSSDGEATASGFRRSPSEGTTLISGSSQERASVREATRTPGPRRRPREEEALETTRSVRRRTRARRTQTMVEPPGSAGRTSQREEE

SEQ ID NO: 2673 - protein, 297 aa, Linnemannia gamsii
MSKDAAWTSISESTTVSTPRTTGKCDKTIHHNLAVNQKAVLQPQFRYRRWLEDEKKAIPEDQSDSIANIESRLPALRGPGSSVINYMKELERVEDRLLDFYNGNNNRFKKHTLVMKNAKHAEYQAIASRLLGIVGGSIGRPRDVSNPVLIGVGLGKFQRIGRLSSLHSTFLSFFIELARSLNYIVVGINEYYSSKKCPDCQEFVAQVTLRQVYCTHCKRYYHRDVMAAENMCNIVQGYLVKQERPRYLQPITQDGRYPWDTTSTTGVGTSTVSTSTSASTSASAATPSQVPKRTSSI

SEQ ID NO: 2674 - protein, 270 aa, Linnemannia gamsii
MQVSSTMTYGQVSQYIRRYFETPNPFGALTDYDMFDMDDGKQSLDEAVVVLPPTSKITAPLSNDLTFSRQHAQSREKDLQADRKVSRAARAAVQRLSDTPMSTAATLIEVNYAEDIRREVRADTRAFFYSNKRRRQAKTQKLRTTRTYANLAASQRRQIKSEVKEKIKQKLKAKNQTNTHMKTESQESQQEETMTNPEDPEKVQIIPIILHWTGGSCVGSRVKGHAKRGDGKMCHQHRLYGVLAHTDEHRTSQVCCACFQQVELAWATRA

SEQ ID NO: 2675 - protein, 1401 aa, Linnemannia gamsii
MSLFDWFPFIRRKGYNPVELYHVIIDNLSTTSRRRFDVLGSCFPAIRDAYSKHPQKEAHSVLQKQIERFGKNNNMTLYLDGPQAVEKSATAETRESKRQKAIEKLSGRLDTFETRIDEGSRIRKQHYNDIKKDLGSSFYWSLDSRQDFAEHMRGQEWIVVVCDTEADVKIASDAQPGDIIISGDSDMLGYANIHTLWRPVSKTVILAYFLPDVLRTIGLSRAQLTALAVVSKNDYQRNIKGLGPASNFGVIKRLPGLSDPRLIVAAYLSDPTIIMKNKQEATFNDSIRVFLEMKQQQVMDPFRPNPTQAVYHALQKRFLDLCQKRESLNDVKGSEAQPRPVEEPIVRLRVPRSFNRYRPVESPANVAKDTGTHPMQSEDSGHPALARTRIPHHRERFSFQERTRKKAHAPPPRMKQFTLKYYRKPLETTNSKSTPTKPKTSVKKAPSSARKPLTEMKKVGLVRSLDWRHPSVSLEVGTLNANTKRVFMSGCTSSTTPPPTTPGSISLSPTTPSLLASNLQRTVVECLQECSRLAADKKREAQRLIGVFVETLRIRMDSAEETLRIKLLAEKQTLTEEQRIKARRDEISDTERQILDHLSERTKPKDEEEDEEEDEDEDAADSKRQINSDLDEKVSNQEGFLLAFLTFLYSGNYPRERDLKGFGPRDFLPKDKGNDEDKVKNKKTNAGVVVNHLIDWLVAGHFYKPLRRRDEIGVKMSYTPTNLVRSVAGQLAVEFKKMYRNGTYELHKKVQTMQQKGTLEASIDIRIQEQISAVENFLSLNKHTNNSRRIVPITTLQQPFVSFSERELGAFFWKREVLKRNLCELALQDGTRLYSIDDLDSWIGSKEPGFIIKRFICDVGSEGLTSRKKKKAGHRAAVRMWTLDDIRSHLQQFLPEDEKKVKANAKVDKEDDFHPAMYKEKGYVLRGSILTDGFRVKLQAFKLRELKDVRYRRWREDRLPPRLTSTVAGTDYYLQEIRNVLTCKEDIQRFWPGVDVKDIRTLTLDAGQACVIGGFAHLPEELAKKTKGKEIVKDLSPNDIVASEHLAPAFVSTSPASSSSTTASSLTAHDTSFGSSSNDLTPLSIQNVFSSTTSAQPSTASPVPSLRPVFFNLAVKTKAVYQPAFKFRRWAKSEKDSTPVGQDRSVTDIETHLPPLRGPSSDVINYIKELERVEEQLKGFYNGPDAKYKKHKCDMQRAIHGEFQLTAHRLLGIVGGGLGIRSDPSKPVIIGVGLGKFGTKSGLTSLHSTFLSYFIPLARSLGYIVLGLNEYYTSKKCPACGLFVAQVDLRRFFCSHCQVYHHRDIMAAENMANIIQGYLFDQQRPDYLHPIAPDGAMPWKQEPSGGSSKSSGTVGTTSTTGPTSTKTAAGGSTKAAPPSKRQRERSSTVSSLEQSSSKARK

SEQ ID NO: 2676 - protein, 402 aa, Linnemannia exigua
MTRVKELQSVRYRRVSNNKMPNPLSIAIGGTNNFLTEARNVFKTTEDAEDLLVADPSQISVLSLDLGTSCVVGASVSLPPGQTPATLKQPFDKERGKKKRRTRRAKRKPGSRKRRRERKKACKQVKQPNASRYFDLVVKCKAVSQPTHSFPKWLEDRKENATGQSTGRTIQDIETALPPLKGEGASFCKYIAARRASEDDLDNFYNNTNYWKHKWDANVCRKEEFYKVAEGLLNMIGGSVGRPKEPHQHVVIAIGLAKFTAAHGPPSLDGTLVRWATWSSGSANTIPRNHAQTRTLYCKTCKRLRQRDVMASDNMNAAVRNHLVDQQRPLYLQPKRQNGTYAWTGVMAGIGDEVVGAFQRWRQRPGLQFKDLPKSPRVNDQYRNTRTPSVPPVALPLNWSLP

SEQ ID NO: 2677 - protein, 824 aa, Dissophora globulifera
VSSASSSGSSTPSGASISLASSEGDAVQTTYTQFMSSNTYSVHTYTRPPPAQIQTPTTAKRSKSKRAKRKPQPIYNPSSRRARATPAAAAGQGGNPKSTTPEAILDSLLSSRRATISMNCGTVPTRLKSSLRYKRDLDDIERESLAGTMINLIREMARIATEATRRAQQAIAIHIAETMENHTGMDNASIAARRTALVHYSGFHNDTFFRNILQDIFTFYEQGPPRGRPRNMTKPHNIVVEDIIFEYRYFLFNNDLEPSPLNDNIQTGLSHLFALAGDRLGDQVQTHYHRNISELVSRLRRYNPAWCQGAEGTNVLGTINNGISTVHDQVSLFWILNTRLPQRAQMAFFPESPFRNSFFNITELMLVQAVFASDAGAALDPIKDLVGATVTVANKFVAEHPGELIHYLFFDKKLDYCRSTTVLATSPIRNNLQGRPVLKLSKPEKKAKRLLLHELSDNPSNADNKHALWEFLDEHLITPAQQKEDLDTGLTRNKYVLTGTLSTNGHELRVLAYSLTKPRPPAIPGPNTTRRKLEDVMTLNTQTSVMNVFPYNESFTVVGIDPGIHNTATATIIKSENENIMDNLSIPRSADAFCIKAFQSGLSRIKGDWVAEVTLPPGHPEGPGDEFLTVSEMEQAITPVVCTQAPTGRRQTWVNLSASIRAHVESVVSVQPGLRKFYSSRTFEMKRMHLKQARTATLDKGVTRLCHAAGLIKKVDNISPKPLFVVGDGHFGSRNTPVLHQRFISFLKSKVQALNGEIRCADEFRTSMVCCQCQTVGVLVNRAIQCPGCNQARDRDHNGATNLALATLSLLRGDGWPIALQRAA

SEQ ID NO: 2678 - protein, 1407 aa, Podila minutissima
MVITFHERSIICHLCLQGLVHLAHVASTSSTPSQDGTRTASEFHLKFSEPVVCPWICPYSDGINDVFTQQHQPRSISFGKTVKLQTASKYHDPQYMGVQHLSSCITSTNGEDPDLHQQETHFDTLSVLFSLLQHITFSILMEICKREQQKEIRAQQATAPNLSIIKQQTIIRGPPQQIDGSGRNPESLDVPGISLIDDIRVITNRARDDTILVLDNGGKIHADKCNDEEFLSKKISQACARVHRHLSSFLTPENTTLHLDGEPSIEKSAERTWRAQALEKRIAKVEQDIERRIMRLMNISSRTYSRLKNLYKAPADVMMAIMVGMKAFGWKTCQCKFQADTCIANEMQLNPKIAIVARDSDLFVYEQVQELTMPVSRNRKKVHKTFSKRVVLQSLSLDSALQLLLASIVSSNDYFIGFKGISFKDAVNTIKTIKLDHNGGSTSREIIEGGISEFTKRVDMTRKKPLDVPDGSFDNALSAFVDLVEHPGQDATASLSTHKQIKTLVKNIIDYKNKEPDPKPHPIVTDLDRDELTDGSPLDLEGQSVLHARRRGLKAESQRRRRQLKRQVKREERREREGHFEAHAAISDHIGDHDWTPRDSSSASKKRSINVDVPSTLDSAAPSSSINCSTGTTTQSKDKGKRRKVEPVEPPPTFPASSNTSLGSISSQGHEIALPQMKNQGAKTTVSSSSPDQQCASMESSATIKPVKGDMLQKQFRKAFQPVSMTAGTIEECLYRSTKMTKQENKTLAQTIDNNVTYLNDIRSFGFMALQLLVMSELGHVSPDTRDDEFSTDGVQQHLHPLNLVLDTVHGFTIIRHILRFLMDGKLSTIGRQPKPENKAINEQCRKLAERAYNLLTLQPSPETGEQLQNTRVILPMTTKAHASSLSHLKDQMASEMMTAVRQHFKKLPNTIKGLEDTNGVSGGDEIIDTIETPEDLEKEEKAKIPNGRIEHCWRDTLKLPESNRPVFFPSTGWKDSFLLITEPMLVDILWTPNSESRKILESHGIDLTMASHWVKQDYGRLIKTLFIGDRDQIRQDPCRQQKAYGKHSALMSTFGQYTDDKGSHTHGQQQLQSYLKAWFAHLAEKKKATPEMRATLSPPPLPMPPCSLDRFALSNSFTTNGKVLNLNAVDVRRRWNNKPIWINYLDKEFPTADSISERFQGQPVITVGVDPGEKISASFCALDPRHPRQVRNLSAKRKSLYQPVLKGRSKLEMRRSRQQTQMIQTEPNKVIRVEYPSIMDQESTLQKSYSNMEQLKANIEQELYVFRSLRDFYSSSATKKLDFDQRNAYKGEVDMAISGALKMAPRDQGLFVYGNAKFNTQKSLSTLHSSFKRQFANRAMSQGYNVVLADEYYTSTKCPDCTSGKDVRLAKPQPRSFVSTPQGSDSTLGPPPSSKTLTLNYLLYGT

SEQ ID NO: 2679 - protein, 201 aa, Podila minutissima
MVAVKAQQQANRHKETKYFDLVVKRKAMSQPMDSFINWQQEQKKVIIGRSTGKSITELETALPPLCGKGASFSEYIKEEFNKVANGLLQMVGGSIGRPCMEHQKVVIAIGLAKFSSMHGPPTLNSSFEAFFTNEAHSLSYLVVGVNEYYLLKWCPICNNFVSQTSEWHALYCHTCKHFRQRDTMVSDNMNIVIKGHLKDQQ

SEQ ID NO: 2680 - protein, 239 aa, Gamsiella multidivaricata
SIEQIESQLPPLRGPEASVTNYVARLEQVEDQLMEFYNGNNNRFKKNTWDMERAKHIEYQAIANSLLKIVGGSIGERCKSPVLIGVGLGDFRSSKRLSSLHGTFLSYFIPLARSLGYVVVGIEEYYTSKKCPNCEEFVAQVTIRQLFCPHCGKYYHRDVMAAQNMSNIVQGHLLEQKRPLYLQPKTADGRYPWIEPSTSDQGAVDGTSKSTGSTSARKKRSSPATPTSRKRPTKMAKEL

SEQ ID NO: 2681 - protein, 372 aa, Mortierella sp.
MSETISSLWSTLGSLSNRYYVLHGLPDTHHTDYGGEVLEQPTSQVITEATDTEATIAQPFQHSGLGVCSTSAESLDQAYLSERTLSGSSPQEATMEVMRFAKSNRITAKQVKEVGGVGKVTRAREYLLRSPENQMIPELHNEVGKNSVPKAHTVREVDSAQATRRSAAQPLRDFGACKKLKKGSHHKDIQLQRAWQKIAADERRRIQDFARGIRTGSRLGGHLKYGGKKVIETYALSVPVLMTDENMTSKVCLLCFAILRLVKELRLVNGIEKLVTINGAVQCDNPDCESVRTGYARRGRDSNACVNIALAGFTTVLSDDRQPLPPYRRSTRPKGATPSESQSLATGTTQTSSISTMEPFSTVASDAADKLV

SEQ ID NO: 2682 - protein, 256 aa, Mortierella sp.
MASDGDENADLLEGHGDFEHDEAFRSGEEPEGDDDEDEEQAEEDDEDEEENDDEDQQGAQEGDGMEQGGQDPLNDAGRIQGHLGYLRENNVRETLCGFYLSKWYLKKAWKMHEGQITSYDFGIKAIMRLAGQKSVNEGRKRKQDVITAVFAVGLASFNTQTGLPSKHGESERRFVTGVRSLGYDILGVHEYYSSAKCLRRDCNTFLEQIKKTRSKYCRQCQAYMDRDQVGSENIAIICQAQIRDQERPPKCKSQGN

SEQ ID NO: 2683 - protein, 208 aa, Mortierella sp.
MSVPPDQWSTRQTEMSVLRHQWDARGAYKAEFFAITDSLLGMVGGSIGRRRDSENKVVIAVGLGDFKSKVGLGSVHTSFASFFVQKCRSLGYIVVRVNEYYTSKKCPECKNFVAEVTTRRLYCPKCMTYMRQDVMAGNNIANVVQGHLLHQQRPLYLQPVDGNGHYPWMQAMSSSSSSSNSGGSSSNGGSSSSSNSNDDEKRNKTTIG

SEQ ID NO: 2684 - protein, 542 aa, Mortierella sp.
MSHPKKNARKWEACLAKNNAVRNALQDISKKENSFLNVRTMAQTDARSNKRLVLRAFENSKRRQKDQHNQRLRTTRSWPRLQQLRDTMFKNTPVKRSQIAVKALGSGVPQSVSTSISATVPASSSAATTSVARATAPTITAPRPAPQVSPVNGWCPGCNRHHIPKQTDAKVFRHVEKCPRYDRSKLLIVPVLFIGTAGTGVGSRIKGHSRRGGGKMRDQHRRYCPVGMTDEYRSSKTSRSRRLVNGEIKTVYVNGTVECVDPDCESFQCGYTIKSRDPHAAVGIAIAGASSHFEADRAVLASFTRGIKSATTKNTSTTLGSSCSQYPNGYNGRPQIYFGFTQALRLRSKANIMASHKIAKNGPADEIELSVAQALFDLENNVTDLKKELKPLQISSAKEVETGNGKKAIVIFVPVPQLKAFHKIQQRLTRELEKKFSDRHVVFVAQRRIMAKPTRTSRAKQMRPRSRTLTSVHEKLLEDLVYPTEITGKRTRVQTDQKRIIKVFLDAKDSTSLEYKLDTFCAVYRRLTGKEVVFEFPAHHAE

SEQ ID NO: 2685 - protein, 220 aa, Mortierella sp.
MPSLEKRLPDRQTIIGDVGPIEDIVVVGVDPGEKVSATFCMLDPKSPAQVSNLMVKRNALYGPVLGYRNRMDDIKRCKPGGSELPSIKEIEESLGDSSFTSLDHHISTLENFAGAFRILTEFYSSKTAKKFQWEKSKSMQAEKDLAFNGAMRMVPKGGDGKRRPALFIYGDGQFNTKTKLTTLHTTFKNYFFMKCPGKHVDLRSPQEGQQCVWKLDVSVG

SEQ ID NO: 2686 - protein, 1148 aa, Mortierella sp.
MGIEGVFRYLEDEKVETAPADKALIRTADIDVLSVFFSYIRSTHQRLKYQSFRSTAQPTTPGSTDTVMTRLIHALHNKLRGTFDKDEVTLHFDGLPTTQKSKARERRRAKCDQDIRSMYDQAQKLQEMINCNNYSRSQKRKIARSLRKVKSSWASARVIDKDTKDGLTSGLRDLGWRVCCCEGEADVCIGRRARQHPGELVAVSADSDILFHGVRTLYRWDSCRRVFTTYDVCELIKKLGVTEAQWVVAAIVTSNDYSTHIRGQSFRKNLALLRDCDADDEQGVLDQYCRMMSVRRDMFEPSTQVFIDKVETTMDDQKSNGDIDQTMKDLASRVTQYFQEFKAANKEGVLKGVSESGAAGAEIACQEGMVIVEEAMSKSEAIKSDPRNAKRRPSAYRTSGHDYRAKEFHEPAIDLNRDDATASRSTKKRKRRANSKGKKKKAKVSKEKRHKSKVLRTPASRRARQQEEENKDSDTIKKGRKRNPGNMIGDVLNSNFATVTMNMGTIRHRLQNGLEQNYQANNHLKLSQHIESTIEGLVKINTDLIRCGSLATLNYINEIMAAHPSIDPASGDVEIRCKLFKYIAGESHGFFKTLVKGLYHWNNDLKGKGESFDSASAAIRSLREMPGDKNAMMQRVMEHLNGAAPSTFLEQTGQVLGDMARCHFRAFIPELQKRIAVWNPEWAMTPEGHGFLSTIDSKGKSSVHDVVSLFWILNTRLPVSKRLVYVPMPAFKDNYCLITGEDKLITLESLETSTPGYKQAKEDVKKAIKEHVLALESTTRSGKYVITGTLQTDGHQLKVHAYSLAKRKKRDMNENEEEEDDQNTGSCSTKPLTAKTDQQDDAGASKTKKKMRYLTEAIPGAAALEQEFGDQEDYVVLAIDPGIKNSATAVVSDSLTQEKAWNLSLPKGCHTWNSLRYTKLLDRLKDKGTVRDLEAKILPLECTDPREIGTVQQFQELKCSFQDHAESVFKVENELREFYGSRVLKIARYRKEQGEKAEVDRAVRGMLRATHARATIDDRRAIVVIGDGDFHGKNGRPVKANGFISKLKAQAEGEGMLVCCVDEFRTSIFCCKCHQRMQTKGRSVICPDPTCGGHRSPDYDKAHNLNPRTGFQRDRDHNAGQNMANAALQWVKEFKWPEALDRRLAKEQ

SEQ ID NO: 2687 - protein, 399 aa, Mortierella sp.
MATNSPGKLLVYNVPDLITTLGLTRDKLTVLGIVSRNDYDSNIASLSPATNFKLVKNASGGVPSIPASTKTQILIQNAHKKDQASSPRGWMKEQKDKDTGEGSDSITAIKSSLPPIRGENPELSNYLTELGNVEDQLDCFYNGNNNYKSNKWDLERSKEYEYQKMTDQLLGMVGGSIGRKRDGNDKVVIAIGLGKFSCHSRLTSLHGSFLAYFVQKVRSLNYIVVGVNEYYTSKKCPVCEEFVGQVKIRRLYCARCQTHMHRDTMAGHNICNVVRGQLMNQTRLLYLQPIDKDGNYLDGKEYGRIIAQACHASTAVLHKTRDMTDTREYLADINSMHKVVLEVKNLPQLEELSSKLSELDVPHVTWREQPEDILTCLSTSPIRRDPKVKEAFKKCSLFR

SEQ ID NO: 2688 - protein, 401 aa, Mortierella sp.
NRTRVVVTWAEDPGVKTLSENVFLTVEGIQESVNRFHVLQDLDDDQAIVQPEPWTQEQREKARRQVQEMKIPTAHRITAKQIDEVSHGRRLRKTRERVLSEEQYAGAKDGIESTSKSPLATASTLDDVTAAVNARTPVINTIRSFNKDPRLIQQRRTTRHRTKMAWARLCSNLRKSATDYTIQNLTSQERGIASVDQSTGFCSGCNKFEVGKCASSGQYRHPTHCVRTVPEVRHVAFVGAAGTGIGSRFKGNFRLGGGRIREQHRQFGTVIITDEHMTSQRCCFCFTKTRPGRARRMVDGTQKIVNLHGVKECTNPACPAFRYGYTTRPRDSQACVCIGMAGYSALDLEKKDKDLPKLVTSPKEPIAPFRSFLRPHERQRTSLDPPVTASQRDPQRLPQGL

SEQ ID NO: 2689 - protein, 899 aa, Mortierella sp.
MHSKQDEKDIATAVDTFFKELKDPASRQTNSAAISNALKRRLGELTDTPRYILSNAEAAYRKAAPEPIARPSSNLRKDIANSTDPNPLAFWRKAVNTEFDAIWTSTVQAKEAKDVESKSKRRKGNRGKQTSNGDKAPVQDAIPDVIDPTATDGNTDEDEGDTWRTCTVSLHQVIHPSLGSDDYQTIVGLLKQGQEYTTNLVDTMYMIHKGTILQCIQEGTKEPNQRTLRRLKALTKVLIELPSPKSQFDMDHVKKSGFKGSNFTDDELHLVLKIANFLRRFVPRRWKGTNDKDYRQHTPHIVLDAPLVVISNAILRLFGRYQFTRRIAPMLRQATCMGCNSEPHNCSMCSVHRVLDITTLLVHGEISNVQNVVNPRHNKQMVFKGFFDTGKIDTICRKHGLQFGQRMIYVDRHTLHLSGPQVQDCANRHSVKSAYEIRRKATRGRPDVGRWRQEFSSSGLTREQIESKIEEESLEVDAKMMAREGPRNRVARLRRECSTGNSNAKNCEQESKMVMMSQLKVTQHCLRQEELLFNTLDSEWEGSKKELNYWNRMLTGAKIATWTLASRQCRSNVFLTMEGITESINRFHVLQDLDEEAIDEPKPWTPQQREEAREQVEKLKIPKAHRVTAQQVNEVSFGRRLRNTREQLLMEDRYIGAKTDVSLAAASTLEEVTAAFEARVPVINDIRNFNKDSSLIKLRRTTRHRTTTTWARLASNLRSKAVDYMIERLTPQERGVACVDSSTGFCSECKTYEVGKCRSSGHYHHPTHCVHTVSEVRYVGFIGSSGTGVGSRLKGNFRLGGQRIREQHKQFGTVIMTDEYMSSQRCCFCFRKTRPGQSRRIFDGTQKVVNLHGVKEYSNPTCPAFRIGYTTRPRDTQACVCIGMSGFSALNLGDRRGRT

SEQ ID NO: 2690 - protein, 1134 aa, Mortierella sp.
MAIEVTTPTPTVPSISFRTQARAQSCKRKVELLEEDCLKAFNRACTSEITSSIERCLKTPIKRAKNSTTEDPETIKTSLKDSLIERTSVPRGLLRQTTAIVREVSGINNLTSEQVQPRLGTKSENISKWRKHVEAHFEELWDRRGVALNKGPQQPDDYLDDKEDPATDEQDQSKDLRTASATLKGVLAPQMSQYAGEFVQIAQSRQSELTGVVREVSALVHKTILLIAGGELNSPVFDTSTVTKFDLMTALPSGFQPRTNVDQVLRIAPLPPGLQERLVESIKSKSKKDDLSTLLSQGHLQYLYSHFMGTLRGKGNVSERHPIWDLLTHPIQSKSDTESIPEPPRGLTMTINTCLRELAVNIDVMWSGSIYDKLLDYLLRVLLRLHLAPLREQRYWDNRQAAANKKRDNTSPTPKKARKIRKDRKAKIKRLCDELANASSPQHVSSICHQLSVVTTQEIRDTSSLWEGTPDEEYGPFDDESDDESDDDDALGGVGAVAPVNQQDPQGVKEPSRSRLRKLQGVLKMLLQSPAISQHVDRNWVKKSGPKENDFTFEECNVLAFLANLLGPYVPKLKLTEDGKTEDSLAHVALRAPLVVMANAILRLTGYGQFCRKICPQISAGVLHALPLSAPNIYEMFCSKWPNQFDVVDLQGNPITSVASITATPSNKDVMFSAFFNMDAIQGICQAHNIKFANRITFVDPLTIRILGEVIPHGPHRNGYPVTSEFENKRKDKKKRRGRDWKQEFQGLGISIVEAESNLETVSRQATENEKIVKTLRHDLSLLERDLSQVNKAHSDAEKLSKSTSQGMSLKDYPTYSQVKDARAPVQELRSKLIPAEADLKDSRRARYFWEKVCTAARKEGTISTRNNEGVKMTRPSGDRPVAEDNVETIDLSGLANRRMTYSGTDYGLKKMSVTVPMSHNAIITHLNRFHALGTLDPDDPPPKLEELRIPDPIIITAPQVNSISYATKASRNRERRLKQDRNSEVRTSLEELGNLQVPLRHATTMESIDEALATTRRVSETIQSFESSPANVKDGHTRALRTKRAWSKIAAHERSIIKNHEQVTSPPPTDPRSRNVIPIMLTGTAGTCIGSRIKGSAKRGGGKLREEHRKHAIVERDWPKQHGPSTAAQRPDD

SEQ ID NO: 2691 - protein, 1720 aa, Mortierella sp.
MKFLSRRLATLVAIASVTCLISMRSVLGQAAPDAVDNADPSSQDFDALNHGDKPHKHHHKKPHHKWPHKKPHHHKPPKVIIDREVNLVCDGFIIDKLKCPLRPIPLAMESAENQAPFDAMNNGGGIPVEQRYVGMSSPCSKDLPANCTAARAMAAAQAAEESTETVLNKRATEFEATNNGGKHHHHHHRHYRHHYQGKHHHVKHHHVKHHHVKHHHGKHRHGKHHHGKHRHGKHYHGKHHHGKNHHGKHHHVGGDRNRHPYKNLCVAIGDFCGSKLYGCDFDKTYYRCAAIGEPPFVNLVDAKVCGGNNEGESDCKCPGDGKTPVCDSQLPAACNADPTMVYHCLGGADSKPEVFKRCRPGTVCIANPGQGATCGFETCDCDGNQKYCSSQFLDRCGLNKNTVYSCVDGKLTERKACSDDQECVAVSNGAYCGSKDCKCPDDGTICGEIFPASCRLPATSLYTCKKGESPTVSEDCLPGYCTASVASISAAVVLRLWPKTSALTNALAEALACGSSFAPRCGLDPKTIYTCTGSGSKPTLGEQCENSCLVQAGSSICAKSDCTCPGTGSDPVCGHGLPASCHADANTICHCPGGKGSKPEVLFDCKPGTKCLKRPSPEGAVCGGVGCDCEDENEICSNQFDENCGYEKSTIYKCTPGGKPEKVKTCDSSKTCVSVSDGAGCGPNDCKCTEDGTTCGEIFPLSCRIKTIALYTCKKGEAPIFLKDCHPDYCSASKAQLAAAAVFSSTANDKCTDKCTCPGKGPVCGSTFKPDCNMGPSTLYNCDGIGGTPTPGEVCGQGGCTVTNGNDKCNPIDCTCPGTGNVPVCGSELPSSCNALPNTIYWCPGGSGDTPKVLSQCKPGTMCMKKPAPEGAVCGAPNCNCIGDGEVCSNQFPDECNLEPNTIYKCTSNDNPEKVKTCDATLACINLGDEAACGSPDCKCPEDGVSCGQIFPLSCNLKTTALYTCVKRADPVLKEDCYPNRCIASKSQLEAASIFLSTAADVCVDKCTCGSKGPACGSTFLPECKLDPSTLYNCEGNGKIPVAGEVCKEGGCTVHNGDDKCSTSQCTCPGTGLVPVCGAELPKECNAAANTIYQCPGGSGSQPEVLSVCLPGTMCIQKPEGAVCGGVDCNCLGDDEVCSNMFPDSCGYEKNAIYKCTPGGTPEKVENCDTTEAWSQANDVRSTLGGSLAVVPVPTVPNIAASASAPVAPATLPPGPSFSLDGVFTTSLTKIWEVDPMSPSPVVPAAPSRAPLFALDSMFKKSLSIQTSQSRLVGSDIYAAVLPAASESSLAHPPPLSATTQASQSYSVSRSTIPRCVPENCFTTSLSCKPHAQIIPPALGGDPLGKPTTLSPAEVQERVRRKRARRKRRKKEKAPHMPFMPSNAFKASVYHHTSAPIDEDPVEDDSKSRKPKTKRAQIYVAVPRTRRTTSKNKDDDGDGDDGDGDDDEADDGTGAGGGGGGNGIKRLTVASLIKGTLKGKFTETALNIGTLLVCLENGIRANQLDGTLDYKTIAKEVQVCIAQAVRVASEARRLVLLAHFCYVAKLIADNPDPLNPDHIRSCKDPRAFKIKTRLLKVATSATKHRGINKIIQAAGCVDRWEIGQVRPLFVVSDGDFRAKKGPTLHLGFVGLLKKVEARDMIIICADEYRTSVICCQCLTSGTLEQRAIKCTNCGQERHRDHNAAHNIAQATLQWLSLTRKPRQDEDEDGEENEEESVTNA

SEQ ID NO: 2692 - protein, 1132 aa, Mortierella sp.
MLIKNAYSNHPQDKTNTILEEHVIIWGSRDNLVFYVDGGQAVEKQHTTEIREAAREKASVKCARSLDVLEDRIDNNLKVRKSHFTNVRSSLASSFYWSFDDRQSFVTHMAQSGYMIRFCEAEADVAIAADCEPNDVVISGGSDMLAYASITMLWRPVSKSLFLVYDLPNLLRDIGLSRAQFTTLAIVSSNDYNRNIFQLRTIPLLSPWKEKRAQGVHSAVAYPSVTQSLQDCRITYILRSQDLSLALAGFHLNCPRRRSGCSSYSSGQGTPTIAKNEDPRNRPRYSFQQRTRKIRHSPPPRMERYTWNPHKASPESSVNHNTSTPAKSDAPKKRSPLTSRPVPTNKDKFVKALAWHHPLVTLEVGALDTNIKLVLASEPNLQQEVKQCVQEAAQLAAKIKRGAQRLIGQFIETIGDPRNFEATDRRILDHICERIKPKDQDDSNEQEVDTTDLGDNGNIQWQFLQSFMCYLYSRNYPKRLGVGEVANDFIDRLEKLKLYEPPRKRIATKVVMPLTPNFLVKSVATQLAAGLKRIYRNGSFDLYDKLKTKRDKGGLAETVEFRIREKDSSIENFVRLNKLSGNSRKISPVSSSQQPFISFSERELVAFFFKKDSLKKKLRDMMGLEYAALADVDNWIATKEPGFLIKRFLADVDPQGLTSRQRGKMGYRAAIRLLSLDDIRTHLQNLEDPSFDPNNYSRKGYILRGSVRTDGFRIHLMAFKIRELQMVRYRRVSEDRLPSRLTSTVGGVDYWLQEIRHIISTKEDLERLWPGTRPEAIKMLTLDAGQAYVIGAYAHLPFAAATTCPTDAPLSASLPGAVKPSPSQESAAARPTDASSSTPSTNIAGPGSFQDLDAARPADALSTSFQESTFVLPTETVPVTSLNLAVNQKAVYQPQFRFQRWLEGEKEAVPEGETKSIADIESALPPLRGDGSRVVKYTAELKGENRLLEFYNGDNNRYKRYQWDLRRARQEEYSAIANRLLSIVDGSIGRIKDKSDPVLIGARSLGYIVVGLNKFYTSKKCPICHEFVAQVTLRRLYCLECQVYHHRDVMAAHNIAQDGSYPWLMPTTTSTSTSTSASTTNGPSTPRKRAASTSTQGQGQPSTSNRPSSKRKRTASASNEALQRRGKAAKEE

SEQ ID NO: 2693 - protein, 1008 aa, Mortierella sp.
MDASVQNATPDEMLVETSGDIDADDEDQSCDSNVKEEQSDNTQVEEDQAVKGKELRTCTATLGQLLGDDRPNIERLLDTKQEALFDFKDEMGCAAFKVTLAVCQGLLHEDKRTLDLREVFPPFFQFRDKYFQESPVILAGAVTDDLCRYVTEGLRQGGRHTDALGMLRQGFLQYMAARVFGTKSITSATSEALHPTWDKCIAAIQDTADNTPGSSTSTSIANTTLDPPLLAHQAPTGLSTTLNALHREQITDISNLWEGGLYTKLRNSTLRYCLKLWLRLAAEQRYRNSRANYAQQKQEKLEKKADKKKELSHNTKNWKRRSIQLFDQLDHTIAKHHLESWTTPHIAKVLNLIDIHEQQRPIKPTASTTRLLTYVDKYTIRLTGYVNKDRAHPPVRSKYEEKRKKHKAHPSAIQWEQERQELGLSTVEAKNMAESKKKAVESKTKELNPLKKRLTSLEQALSKAVEVHEACGKDDTKERLRLYGFVQDARAAICEIRPPVLELERSIRTLKQETHYLNSYTRSDKTNNNSSNTTNNNNGSSNSNVQDVEQQRFSEPSFSEPAMQDFVESTSIDRIQGECTHINKQLGPSATDRGLSKMHVTVPVKWNTLLALRNRFDVLSDESAGESDPVEGVQDSMDEPSPSPSRKDLVQSIKFAEANVISARHMQQISGVQKATSRREKRLRQPKSEKVRDAHAALAGSSLHNTQTLEEIEAAQEVRRKERKHLRAFEMSAVAKKERYLVEMATKRAWAVVAADERRHIKGHINAPSPPLDILRTEYQEPNHSEEGSGAPSSGIQGSSNPSSNEPVQGSQQGTVNQDNGFCSDCSKHHLPDFSRTGLAYPTSCPSNELPFVPVLFVGTAGVCNGGRLGGHLKYGGNRVIEQHMCSSPVCMIDEQNTSKVCPFCFQHMRLARATKIVDGQRRSVRVNRAVECVNPSCLSFQLGYTKRARDSNASMNIALNGLLSSPRPTVKSFLLTKETSDQPSPPLMPLASILALKTLSLLQLRSW

SEQ ID NO: 2694 - protein, 1584 aa, Actinomortierella ambigua
MATRTTIVLAPVRAPVPPKSRGHQPDPGTDPPPNRIPFQQLIDLESPHWNNQPNQKHFQTRINQALLDCEQNDGESVQGTSDPLNDAFVDPELRDGRERTYHTVAGLLRHGLIVTQDDSRRDVSTFIKRHFLGETSEYRLQLDIHNEGTEEIMAVKCPPNTRLLFSHLASTLHAKIYIFSNRAAPRLYGSPEAKTACAFLHVVDSFLGTSEYLTLSFANHKTKRMLRRQSVTATTQQPRSAPPGYPAQYRETQRARHKASPFDHSDAAQNELIHSFEIAWRGGSGTPSEERLAEVKAQLTETLDAIASIFQEKRQARLKPNDRALALDDECLALLFWLNIFGDKFDDVWSGVYNNILLGAVTPTEQPSRPEAKDSDDDDDDDDDDNDGDGDDDRKKVETRTCTATLKQTLRPELRDNPVVLSRIVELLEQMQCAATNLEDEIYELVHKELLVLASGNMWSDNPGSFDLSTLLPPGFELGTPERTLSVAPLPDGLQDEVEAAIKSKSGSELVNLFSQNHLSKLAHHFSSSTMDGRLHIESVDGTSPSFWTRLAQKVFAASSCQPLQSRSGMSKTGEAHIRQCSTMINNLLHGSVYTKSLDYLLRFLLRAWLAPCREASNKERRSKHVGDKKALVQERLERRAGRLTPSHWRHAMRKLCDELADCDQVDSIAQTRRESAIRRRRRLMRDIAALSKKDPGQRFWDQHPIKPLDDSAHLDDFEARGEHDPPDGDDSDDDDSPELLQEDLDHKMLIDKTTEASVELLQVGLDHKMLIDKTTEASATSSPATMHAASESTPTTSPSVREPSRKQLQSLQVVLRTLIESPSPLAQYSLEDVKNAVYKDHNFAEAELEVVRDLANKLRPFCPRRCLNDSEDGYRQHSPNAALRAPIIVLANAVMRAMGHSDFTRRICPHIAAGDTHALHLGPQQLFETLCASSPRHFDVQNADNNPITNTTDVTADRRNKRCLMEAFFDMTKIDSICGRHGLKFNNRQTTTDDDPLRHPITSNYQSRCASNDGKWRRLWQEQERQGLTQEDVAQRIAEAKENADTIKKQLDASRRRFRQLQSQAKGAIQIFNEDKKNRNNFISMKEHQQDARRASKDVSRLVEARSNANKEAYFWRKIESAAKAATRLGKKTVAKKKKTVGPTTPSWKSPGSEDVPQHIDASPLLGSHGQYSSSGRKNVVVCWTEDPGVRVMSHNVPRTIEELQRSVNQFEALQNLATSAMDVDTEDDGNDLPGPNKTTTLEARSHSEVVAALKRAQAMKLPAATKVTAKHLNQVSFTTKFMKTRERALADPKNVAASNALKAVSTKEAALSSATTIAQIDKAAGIRRLAKDELRKFNDSRNLKKLRRTKRHRNSRALAKMASHVRDNATKHALNQQKPEPEHESMPSSVDQTTGYCSNCEEYEMQKVTSGCFQHPTSCVKHRPQVVHIGFVGDSGSGVGSRIGGHVRRGGGQLRAAHRQHAVVAITDEYLSSQRCPLCFERTRPARSRRKKRDGSIKTVLVKGSMECRNHDCSSFCCGYTTKPRDSQGSFNIGTNGYSLLTTKRPLDCFSRYEYQRLIAGAQTRAQLQASGAMDTPQWGYF

SEQ ID NO: 2695 - protein, 326 aa, Actinomortierella ambigua
MDTECEKRPRDKVYSLQDGPADPPGLFKWLLRPWCSRYIEYDIPTRLDKTGLSRAQYQALGVVSHTDCSFNLPRLGIATNIKIIKAISYNKDTASAILQRYYIDPKVVAAYAAHTSDNLHLSRPHSRAAAEKVYLDCQETPLSPYDRNNRLFRETLTQMRVSKVNDGESIGAMPPLHQDQYDCRPKGTRHRSRSSTSAGAWSQARGLGYIVVDVDEYHASRRCPRCKCSGSDKKDFVEYIGMRRAHCVRCGTWFHRDLLAASSMVEASHTYVTDLSRPEYLLPIAKHGRFVWNPWFGVELPPKVNPDSDRRQASPRDKKKSLGGIR

SEQ ID NO: 2696 - protein, 421 aa, Actinomortierella ambigua
MLSVRFKRPGYQPEVLPDRLITTIVGTCDPLTEVRNAFATKEDVDRRLGYSIEQADKVSYLGIDLGQTCVAGREPRIGGRSHNRHRGCKSNGRRNKRGFRGGRQQGSKGSKKKKKKKGKKDPSPGGMRHIELFGKQKAVSQPTLKHRSWMEAQKRRPLNQSAVQEGVHESTSIAPVSTIHQQTAGTPDPVETSIPSISTIESAVSPLRGANGCFSKHVDRNEDNKEVLDKFYNGNKFFFKRHKWHARRARQGVYYRLADGFLRMVGGSIGEKKDKDNPVVVRIGLGRFRSTSGLSSLHGTFEEFFHPKEVPPLAMTLWCETESLRRLYCSKCGKYRHRDVLAGHNICNILKSTVEQQERPLYLQPMNEDGSYVWMEKDGKNKDQQAISTSPSPNQAAPTSGKRHMEHDGDERANAKKQAIA

SEQ ID NO: 2697 - protein, 487 aa, Mortierella polycephala
MRKVDLVRVMQYKHPSETLDIGTVSANVKKALKDQPNLVPEVERCLQEAVHLANDLVNSPLVDFIEHIATPGMVEKSGREMLDLICPRVTNTNCDEVEEEEEDGSRTKNQVSLLQDCSQRLAIMFYEVPLEQMDFVQLSAFKLKELQSVRYRRLPETVLPPKITSTAGGVDYFLVEIRNVVKTKQDAGDLWGCEPEQIKILGLDLGQACILGASVLLPRHARLEGVKNVTMNEPVGQDSQMKVDVPCTKDKDGDVPIGEPCNAIVPTSAPAPVKAIYHNLAVKQKAKHKWDAQRAKDDEFRPIADHLLKLVGGLIGLKRDEANKVVIGAGLGKFSTKTRLSSLHESFQSYLAQKTRSLGYIAAGVNEYYTSKKCPMCEQFVGQVEIRRLYCPTCNYSMHRDVMAGHNICNAVRSHPVDQQRPLYIFNRSIWMGITLGCKMQGHTQKPKVAPAAVLTAIALWDKDKDETKGELVGASEPPPWRLTRLE

SEQ ID NO: 2698 - protein, 1410 aa, Chlamydomonas sp.
MGDDRREMTWHELVHELPPELLTNVLVAVGAWTLGGGVVHSATSVCRGWRAAITASGAAPLAALLVAGHGSRDRAMVRAARLGSTSVVTHLLGWHIEGHLQDGVPPRADCNGGQALLQAAEGGHTEVVRLLLGWPEAAPRADCQDSLALVQAAAEGRLEVVRLLLGWHEAAPRADCNEGEALVNAAERGHIDVVRLLLGWPEAAPRADCDEGIALVRAAERGHIDVVRLLLGWPEAAPRADCDEGAALVRAAGGGQIEVVRLLLGWHEHAPRADCLEGDPLLFAARGGHIEVVRLLLGWHEHAPRADCLKGWALVLAAGRGHIEVVRVLLGWPEAAPRADCNGGQALVMAAGGGHIEVVLLLLGWHEAAPRADCQEGRALAHAAEGGHDDVVLLLEGFGGDDDTDEVTDEVTDEVTDEVTDAVTDAVTDAVTDEVTDEVTDEVTDEVTDASTSAVPVKTSTVTSVVKCALAKTLDMPPDKCREFVTFVDKCVDSLSRMMRQASIGMLYYLTAMAERGEHIPNLMMEATNGCYWRKWLILDVKAIVSADDWEVISSSAVLDGDVDDDFEFVSRPSTYSAITFATAVKNNAWRPLVPRIARLTKAIVMEYGVGDEKKKLCSDLVSKIRGMRAPDVADLPMWASDHVLGVRDCLGMDGTSYMFDDYGKRLDFHDLFMFNFWMQKQFTSLKKKRLALSPVFSVHRQHIHLDTTSLVELACRMFPESKEVVAYKSIVSTALPEAQKKPIAPTRNEKRCVGCQQLGSSRHKCVGCTERRVVVQGAYDDSMVAYKKELPELRKKHKEKLTEDKKSDEYKSRHIASKAAICRSLFGRQMPGRTSSGWSFDGAITTDGVSVSLQFSKTVPETEKPASGTKKRPRDKVVVAETYDRHLPTSVSGAAGCSTIVAGNDPGRTTIATVAVLDENGKHHVWKLSRGQYYTDAGIKKQDRLKHQRDAALQPAWRNLGGDAANGEDNDEDEEAVDTSALRTASSIDVKAYAEKYAIVRRQWWEHALKRRESRDAFQRYIGKRSVLDRFWGGVKRGLEKLFPKADRRCIAYGSAYATMPSSGRGEVAVPTTGQGQDGVGSRADCMEGLALVHAAKGGHLEVVRLLLGWHEAAPRADCMEGLALVRAAKGGHLEVVRLLLTWHEAAPRADCLGGTALVEAAEGGHIEVVRLLLGWHEAAPRADCRGGMALVEAAGGGHIDIVRLLLGWPEAAPRADCHDGLALANAAEGGHLELVRLLLGWHEAAPRADCRGDLALLFAAMGGHVEVVRLLLGWHEAAPRADCGGGTALVEAARSGNIEVVRLLLGWHEAAPRADCRGGLALLYAAGWGHLEVVRLLLGWHEAAPRADCQEGQALVYAAERGHIEVVRLLLDWPEHAPRASCQNGQARVRAAERGHVEVVRLLEGFGG

SEQ ID NO: 2699 - protein, 528 aa, Chlamydomonas sp.
MSETVVKCSLKRLLVAPPDIKEAIVKAVEKRVVQCSIRTQNATVALNLLVRQLFDGCADPLIPEFWDTTFVRQLLLGTDGAHKPVAEITQLFKDNPLLAPIEERSLADSNIYTYAAKKLATNISNHLVINIQKVVKRYLYDGAGLTTADAVQAQFLIYGWDLTKKKKKDKKNEVVDEEAVKRVVADVRKQLGLADDQKIGTMWYKSKPNLAPMLRMFVFANRALERAGKKLFNILPICRFKAHFITIDKTSVVGILNDAKFGRGEKVTLEKLDWRAFLGADKLAGKNCTFTTTIDTDGLAINVHFTRPKNEGHSSEVEKPSLEGKRVLACDPGRSNIMYVVEKLDDGRFEPHKLTRRQYYAESGIFKANENSARWNKGVIDKLEKLSTASPKSVDLGAFSLYVNAIASVRDALWEEYLRKRWREQTFRLYGGKKRSFAKFFNGLKLTPDTVLAYGASKFASGGKGELSVPVSRAYKECRARVRTFNVCEFRTTAVHWRDDTVLQTVVKSSGDGGRPVPPSTGRGSSEN

SEQ ID NO: 2700 - protein, 492 aa, Chlamydomonas sp.
MRTQNATVVLNLLVRQLFDGCADPRIPEFWDTTFVRQLLLGTGGTIKPVAEITQLFKDNPHLAPIEGRSFADSNIYTYAAKKLATNISNHLVTNLSKVVKRYLYDGAGLTTADAVQAQFLIYGWDLTKKKKKEKKNEVVDEEAVARVVADVRKQLGLADDQKIGTMWYKSKPNLAPMLRMFVFANRALERAGKKLFNILPICRFKAHFITIDKTSVVGILNDADFGRGEKVTLEKLDWRAFLGADKLAGKNCTFTTTIDTDGLAINVHFTRPKNEGHSSEVEKPSLEGKRVLACDPGRSNIMYVVEKLDDGRFEPHKLTRRQYYAESGIFKANENSARWNKGVVKELKKLSTASPKSVNLGAFSLYVDAIASVRDALWEEYLCKRWREQTFRLYGGKKRSFAKFFNGLKLTPDTVLAYGASKFASGGKGELSVPVSRAYKECRARVRTFNVCEFRTTAVHWRDDTVLQTVVKSSGDGGRPVPPSTGRGSSEN

SEQ ID NO: 2701 - protein, 528 aa, Chlamydomonas sp.
MSETVVKCSLKRLLVAPPDIKEAIVKAVEKRVVQCSIRTQNATVALNLLVRQLFDGCADPLIPEFWDTTFVRQLLLGTDGAHKPVAEITQLFKDNPLLAPIEERSLADSNIYTYAAKKLATNISNHLVINLQKVVKRYLYDGAGLTTAGAVQAQFLIYGWDLTKKKKKEKKNEVVDEEAVARVVADVRKQLGLADDQKIGTMWYKSKPNLAPMLRMFVFANRALERAGKKLFNILPICRFKAHFITIDKTSVVGILNDAKFGRGEKVTLEKLDWRAFLGADKLAGKNCTFTTTIDTDGLAINVHFTRPKNEGHSSEVEKPSLEGKRVLACDPGRSNIMYVVEKLDDGRFEPHKLTRRQYYAESGIFKANENSARWNKGVVDELEKLSTASPKSVDLGAFSLYVDAIASVRDALWEEYLRKRWREQTFRLYGGKKRSFAKFFNGLKLTPDTVLAYGASKFASGGKGELSVPVSRAYKECRARVRTFNVCEFRTTAVHWRDDTVLQTVVKSSGDGGRPVPPSTGRGSSEN

SEQ ID NO: 2702 - protein, 492 aa, Chlamydomonas sp.
MRTQNATVALNLLVRQLFDGCADPHIPEFWNTTFVRQLLLGTGGTIKPVAEITQLFKDNPHLAPIEERSLADGNIYTYAAKKLATNISNHLVFNLQKVVKRYLYDGAGLTTADAVQAQFLIYGWDLTKKKKKEKKNEVVDEEAVARVVADVRKQLGLADDQKIGTMWYKSKPNLAPMLRMFVFANRALERAGKKLFNILPICRFKAHFITIDKTSVVGILNDADFGRGEKVTLEKLDWRAFLGADKLAGKNCTFTTTIDTDGLAINVHFTRPKNEGHSSEVEKPSLEGKRVLACDPGRSNIMYVVEKLDDGRFEPHKFTRRQYYAESGIFKANENSARWNKGVVKELKKLSTASPKSVDLGAFSLYVDAIVSVRDALWEEYLCKRWREQTLRLYGGKKRSFAKFFNGLKLTPDTVLAYGASKFASGGKGELSVPVSRAYKECRARVRTFNVCEFRTTAVHWRDDTVLQTVVKSSGDGGRPVPPSTGRGSSEN

SEQ ID NO: 2703 - protein, 767 aa, Chlamydomonas sp.
MCRKQYTNLMDDEDDEEDEHDGDDDEDDDDDESATPKTRTVTSVVKCALAKTLNMPTEERTRFVKTVDGLVGALSRMMRQASIGLLYHLTAKAERGERIPNLMKNATNGTYWRRWLRLDVEDVVSADDWSFINSSAVRDVDAECSFPGIDRPSNYSAITFATAVRNNAWVPLVPRVIRLTKAVVMRCATDSDEEKLCVSLVSKIRGIRAPDVAGLPDWASDHVLDVRTRLGMDGTSYLFDDYGKRRDFHDIFMFNYWMQQRFTVLDKPRLALSPVFSVHRQHVRLDKTTLVEIACRVFPGREEVVAHKSLVSRSLPGPPTAPTLNDKRCVGCQQLGKSRRMCVGCSERKVDVQAAYDESIVAYKAALPSLRATHDANLSSLKKSDVYRASKAAICRNLFVSSIPGRASSGWSFDGSITTNGVAVSLQFSKKVPKTEKPTSGTKKAPPVVAEEYDLRLNTAVSGVDGRLTIVAGNDPGRTNIATVAVLDENGKRHAWKLTRAQYYIHAGITKQNLRKERRDAALKPVWQDLGGSADDDTSALRTASSVDVASYVAKYEKVRPQWWSHALKRRESRDAFQRFIGKRSALDRFWVGVKRGLEALFPDAEKHIVAYGSAYATMASSGRGEVAVPTTGAYNACRRIFGASGVAVVDEFRSTAFEWETGKRKTAVYRKRDGVGVRAGAVTDSATAAARRENGSPIEVRGLRFSPERRLFLNRDAHAAVTIARLHVMELCGLGRPRPFARARASDVVATKTTTSANSDEGKAGL

SEQ ID NO: 2704 - protein, 264 aa, Geosiphon pyriformis
MTFPNSPTIAHSTFTISLTPGVNNIDIWVSVPIMTTEYGGGVNGIFMVNGAVSPAEDTQAERYYIFIKNKLIYFRKTNEWKFTWVYEIEKQVHETQVDRFIHAVSIDPGIHTPFTWYSPTKGIGKIGQQDIGRIIRICICMDNLISKKNKLIQSTSKRKKKKAKRLDKAIACMQRKIKHLQNEIHRSSFHSKAEELGIHVIIQNEAYTSKTCSWSGNIQNIGGSAIYKCRNCKTVTDRDENGAWGIFLRALILSGDHAGNSSNA

SEQ ID NO: 2705 - protein, 233 aa, Umbelopsis vinacea
MTIWGVDIGINDVFVAADGIAEEPHRYRKLSSKEYYHLSIVEPFDRNLRSKRLAFSTYRNKKRGIHEVCRRLTFGSKKYGRQCLPRHPHNSDQSAIRRDFWTPILLVDFLAEDNLQQYMIAFGKTSFGNMRDKKPGPVKTIFRHLCYLSRMKSNIFVVAMDEYLTSQICANCDRRTLKNVRESRNFDSKVWNRDQMASKNIKYIFEYMATHNNERPQQFRRPAGEPPPHNVEK

SEQ ID NO: 2706 - protein, 202 aa, Umbelopsis isabellina
MNSSKNYSDSDAGPLRSLETKGKQKANDEGLAAPSILVPSKPSLPTSSMIWRQAPRMHHVYHLLHLRRKLPAPSKRILDHLRSLHRKNVQVSVVIIDELMTSQVCAECHQRNLIHVKDRSVPYNRRGANIHAVLKCSSCSMMWNRDVMAAKDILYIFEYMALNSNKWPDLISANHQRTPGKTLAVEDLAVGWVVRVEEEADS

SEQ ID NO: 2707 - protein, 385 aa, Umbelopsis isabellina
MEQQLFIREPVPQTRATKGFVHRQLRETVDFRRLPRRFRSTLENHVRDSTNIDQSTIQHYDNHFFLENTRRPRTKASISRNEFRPQQFTDLRGSALSDKSFTGAIRTDGIALKFICERPSHATEATLTPVDIATEIDLNSATVWGLDPGLRDVFVACDGVGTGAGQSRQRHRFNEALRYIFRNFEAMKGYYTTGLKKLKYHNYRNKQKALTEMCKRLFTGSRKYQEGNLDIQQANLQKWKPLAPSDNAGEAERPTVVAFGSATLVGLRGNVPSPTKIFRKALLNYVKSTRRNLPCSRKYVVMIDEYFTSQICPRCYTRSTFNQCDNSNMKIHPVLNCRTCNTRWNRDHMARLNLRSILLYMAANNNNRPEEFRRDEAILILIWII

SEQ ID NO: 2708 - protein, 288 aa, Thamnidium elegans
GVLRTNGVDLEFICARPVPANSLSLTPSDVSLKVDLSSAAVWGVDPGLRDAFVAVDGNHQERHKIRTTTTAEYYQLAGFNKATITRRKIGSLNLFNAAAIYIFNNFLIKKQQTLSEISKRLITGSRKYDPTRHMVIEDSNKKWKQLSLGDGPEESNKPVVLAFGAAMFGNLRGNVPAPTKVVKDSLIKFARERNKKVPTYVVMIDEYLTSQICPRCQTRTTSNEKNSSGLKIHPVLKCSTCDTRWNRGHMASMNIRSVFLYIAQNNNNRPKVFRRTYSLILTYILYNI

SEQ ID NO: 2709 - protein, 216 aa, Thamnidium elegans
MKSIQIDTQAFWRLVNQSGIEGYKKVVKKKKVGPKEKLPADFQEDIENGCNIWGVDPGVNTIITSVDTHVIKIEVQMLYAAESTGVKTSTNNENTYSPPAPSDNLETPGKTIIAFGDGAFSGNLRGHKAAPVRLIKKALNKYCGNNLEICMVDEYLTSQILHTILKRQQTTCNIVWNRDIMTAYNILDIFLFAAKSNNQRLDAFKRQNTTSEQSSV

SEQ ID NO: 2710 - protein, 224 aa, Thamnidium elegans
MFTNMVRTDGYGIDFILAGPERQSNKLPNLDVNDFTPEGINERFHLWGVDPGQINIFTASDGHDTDPHQLRKYPTAEYYTRAGLKKTNLHILNYKNADLQFQEAEQRITTHKTANLERFLEYVHSVLNNLDILLQFYDHRFTALRFLNYIGRQRADAEMTCSNCSGNNTEDVRIDDVSLFGVLHCLNQSCNTLWQRDINSSRNMHSISWNVIMNHEVPSGFQRQ

SEQ ID NO: 2711 - protein, 1390 aa, Thamnidium elegans
MFGVYFAGVLFALGWWTFIDGLTILWNLPDRLIAPGIEDWAPGIVTTLGMIMQGFALMAGGLSGSVAVLVTKYIYNENNLDLLNTYLGITDVVQCSLIMFSTAVLCTAYFFLFFFVINRSTLKCIRDIVCGVDCDPEDLTNKIHEFMKSWRHRENKGYAFSNRKMAQDYIARVVLRRTKAGEDFKLTNRSSKCSRRKKRRLLRQQHQEELRPNEDFRRTVVAYGDASIRDTYKGNTPIPVKLVQRAVAGKAVIITVDEFRTSVTCCHCRQRLQDIVSPLYICNHRKKKHRSLGSGENMTESRPSLKCYDDENHILHRVSQCPERRLSGNRVNYPLKLCPQCPVNNRNRLISHTLSPYLFGLASSNYPIQYWNRDINAAANIRNLSNYQEVNKTKDCTNILGENTWLSDKFPKVITTVIEEHPKIVNGVVIPVDTTKPNPNNEEFDNLYLDMNGIIHPCCHPENKPAPATEDDMMIAIFEYMDRVVDMVRPRKLLYMAIDGVAPRAKMNQQRARRFRASQLAQIEHEAADRIANELAAIGQAHQLPAKKEHFDSNCITPEGEHKVMEFIRVERSRPEHNPNTNHVMYGLDADLIMLALGTHEPHFKVLREDVFVDNKNRNSCFKCKQPGHAVNQCKVSDEAIAEMKREEAKLAVPKPYVLLHVNVLREYLEHALKFNIPGIPWDLERAIDDWVFMCFFVGNDFLPHLPSLEIREGAISTLSLLWKSTMPMIGGYMTHNGEVDLKRVQVLVTELGKMEDEIFSERKKTEERRSQGAKRRRLENDRRARETKMFDPNGPNFGDMTAAPVNNPNAVMSNRDIVANRAELRMANLSAAAALKAELSGIPPPAAPSSEGTAGVKRKVDELEEEEEEDDEPEDAMYGIIEKDSEKDIAQAESDAKAILKRVDDEKKAKDEAARQREPDDEVRLWETGWKERYYKTKFDITLQERDAIRDIVKSYCEGLVWVFKYYYQGCVSWSWYYPYHYAPMASDFINIDTFDIKFDKNAPLKPFEQLMGVLPAASKMHLPKAFHNLMTDGESPIIDFYPTEFDVDMDGKKWEWQGVVKLPFINTERLLTAMNTVYDQLNEEEQHRNSEGPSILYVSEDHKVYNSISNVYTKRSANERMILDARLSDGLTGEIDKDPECIPRSTLRTPLPDFDLPDIANDKSISVSYYLPNTEGTQFSSQLLKGLKLENSLGYEDVQLATFEKIDTRQRYNSNRGWTPQINHMEDYREYNNRGRGRGGNDKHRNDPSRGYGGGYNHGYDDGSRFPGTQQYGGNQRRDYGGGGGGGYNNNNSYGQHQHNNNNYGQQSGGYNQPYYGYQQQQQPQQGYGGGGGYQQGGGYGQQQSYYNQQSGSGYGNNNRGRGGHRGGGGGNRGGGYGNNRGRGGGYY

SEQ ID NO: 2712 - protein, 273 aa, Thamnidium elegans
MIQAGLRDVFVAADGNHLERHRIRTITTAEYYQLAGFKKATITRGKIGRGDTEERAIISATPSLKASSLDLFNAAAIYIFNNFVNITLYYDRDLKFNKLKFRNYIKKQQTLSEISKRLITGSRKYDPTRHMVIEDSNKKWKQLSPGDGPKESNKPVVLAFGAAMFGNLKGNVPAPTKVVKDSLIKFARERNRKVPNYVVMVDEYLTSQICPRCQTRTTSNEKNSSGLKIHPVLKCSTCDTRWNRDHMASMNIRSVFLYMAQDNYNRPEAFRRT

SEQ ID NO: 2713 - protein, 364 aa, Thamnidium elegans
MVKLKERISHLTDDMKKKGCSVEEIKLAIKNYVTSPVTQLKLAVSPKDINQIPKEFLDQKAIQHVNSFIPSYPKNYKFKKVSIYYDAIANLVKHLKAYFKLAEICESYKFKLFQCLPLRNTLIPSYMTIDTIILNNQILKDSKRSKLDKSSIWGKVVNISNEALKDQGPNKSIEFRGTIMTDGVGELIVKQKFETSKSSISGPKINVVKEDFQNQKAKELKSTKFRKLHQRFKPTSIQECENKISQYSSSGVNADTYVEYLKVRTQVSPLLEEYYGNEDVEKNQRQDNLIPFRKMKLSSYINQIQADKRLSKNLRKKFGNDCILILGNWSACHTKFQEPIRGKGMRKMLRKERFQVYLLDEYKT

SEQ ID NO: 2714 - protein, 273 aa, Thamnidium elegans
MIQAGLRDVFVAADGNHLERHRIRTTTTAEYYQFSGFKKATITRGKIGRGNAEERAIISATPSLKTSSLDLFNAAAIYIFNNFANIALYYDRDLKFNKLKFRNCIKKQQTLSEISKRLITGSRKYDPTRHMVIEDSNKKWKQLSPRDGPEESNKPVVLAFGAAIFGNLRGNVPAPTKVVKDYLIKFARERNTKVPTYVVMVDEYLTSQICPRCQTRTTSNEKNSSSLKIHPVLKCSTCDTRWNRDHMASMNIRSVFLYMAQNNNNHPEAFRRT

SEQ ID NO: 2715 - protein, 273 aa, Thamnidium elegans
MKKQDIKLQRRNKNLENVNTGIYPGARDIVCAVDCNKDQLINKQTIKLHSRKFSNASYQEYSGMKWNNKIEFENRRIADMQNVYDQIETRNVFTILGMRQYMNSMTVLTQRDRVRRQLRENPNLTIQPIRDINDQWRTIVAYGDASLLGSYKGHDPIQSRMENVYYLNLSAIRQSMLQCNHRKIKHKDIIDPENGRPEKCYYLKCSSEDDDTILHRTSECFERQPSKYWNRDINAACNIRNIVTQYITANYNLDSRPEQLSRRRQDVAPNEES

SEQ ID NO: 2716 - protein, 300 aa, Thamnidium elegans
MQLQNNPEEIVRNFLFSGTDNGIAKMTEIVPLNLESFNYHLRLHNVYSPLADTQESTDDVKELPFNPLPKLLTVNAGDIDLSGENSFSKAITVQDTKRAYREQIVSREQLREFYGSRKRPSAKSKVEILGYKFRSHLFTQERKEMKDDKKHLIMFIGDSGTGAGSTIKGYRRYGGTWKQKIHDQSNTTCITNENKATQTCIYYLCPLYNTKQQVMMKREMIQKSINVAFICYNQACDSVRNNRNVQRFGYDHRFIRSIILLFNQTFPQSATILSQFNTNFKDKTYSFLTRSEFRARGDAS

SEQ ID NO: 2717 - protein, 223 aa, Thamnidium elegans
MKLPYEINLQIFNFLNRGKTDTCAIIFKDWSKPALQLYFKYVYVGEGNVEAVKKLVLGRQKLLPCTITQRIPELKKKTSTLFVKYAEALSKNTVHYKTKEVVDDKEEKYHKRKRSKIIIGDEEDEHRCGVTGVFWRTLKKCEAESSLIAAAIDYYLTSQICSGYNNRTLKDAGNKEKSSIICEACNKIWQRNVNAARNMLAVASSIFKNKDVPAAFKRATASN

SEQ ID NO: 2718 - protein, 372 aa, Thamnidium elegans
MSKAKPVFLPFDLFSKEGELISSLPSAIKDKQLYLDQFLILRVSRNIYRGTPKKKPGKTANHQQKIKKLEKTAEELNKQLQDRKNSFNLEEADCHIRNLKKERNSSSHEGQRNVMAAEIKIMKQRRWTDFKHIEILRREIKEARRKAYFFRITTLADNVQDVSQNHEASDDFIDSLLTNINDLKLSRTDYDLQTISVTVGVSLKMFNAHLNLYNEFNPEHPLERRTTELFTRRTKDRVAAKERRFVKGKSKKAIPMMAINNAGTGVGNCIKGYDRRGGKWLANLHNRYVPIIMTDEHMTSQLCLYCYFPIVHPRTLDNKRILGASRCLNPDCPAFKHGRATNNRDVMSAAAIGISAITKVLYNQNFPPLSKH

SEQ ID NO: 2719 - protein, 378 aa, Thamnidium elegans
MLNRSVTQLRPQITDILQSITQLLQQIRQIRTQFKNEITIIRGRLTQQHGVIVNVIIESRDTAYRVELGRLVEYLTDEERLLQAQLSTQVHIFIQNKQTHLAALRQYENQHRQTIETNPEGNQFFPKITNATFWSHVYRKVANDPNQLNTNIRFNQSIQRTFADFEISRKIPGTEQSSKCSRRKKRRLFRQQHQEELRPNEDVRRAVVAYGDASIRGTYKGNTPIPVKLVQRAVASKAVVITVDEFRTSVTCCYCRQRLQNIVSPLHTCNHRKKKHRSLGSGENMIESRSSFKCYDDENHILNRTSQCPERRLSGNRVNYRLKLCPQCPVNNGNRLYWNRDVNAAANIRSILVEYIRQGFNLDSRPVQLSRGQQDQGL

SEQ ID NO: 2720 - protein, 204 aa, Thamnidium elegans
MNPTNNNQTFETIMFDPKAKKADGRKRQVTDEPEGNTQPSTKKKSRGPKDEWTPARRLAVLKLKTYRLFIYNRKRRLELTKRRYCDKTTAIEGKFSGTKKPIMFIGGRGRGIRSSIKGHQRFGEFKKQNKHGQNTPTLITNEYNGSQTCLFCFNKLSHPVSAAADKISISKGTFICLNSNCPKAFKPMCRDKVSALISLIYPLV

SEQ ID NO: 2721 - protein, 200 aa, Thamnidium elegans
MKKKIERATITRGKIGRGDAEEKAIIFATPSLKTSSLDLFNAAAIYIFNNFANITLYYDRDLKFNKLKFRNYIKKQQTLSEISKRLITGSRKYDPTRHMVIEDSNKKWKQLSPGDEPEESNKPVVLAFGAAMFGNLKGNVPAPTKVVKDSLIKFSRERNKKVPTYVVMVDEYLTSQICPRCQTRTTLNEKKTALPRLKGI

SEQ ID NO: 2722 - protein, 225 aa, Thamnidium elegans
MPDIPIYKYTPLPALEVKITIPFDDYEAYIKKEPEVHGVKWVYKSYRCASGLMSKDIIYKSDSWPKYYQHHRAGTPRKRTRDNMENPPVQKELKKIDCKAKFQISFDPADPSDKTIIAISRRSLVILVDEFRTSVTCSRCHGTLEKKYTRQKEGEEHCKYLIYCLKVFPTCLDGKKIWHRDVNAAINIKDIMMDYINSQYDIKSRHPSLCRGTPPAVILPTATSS

SEQ ID NO: 2723 - protein, 250 aa, Thamnidium elegans
MFTNMIRTDGYGIDFILAGVDSGQINIFTASDGHDTDPHQLRKYSTAEYYTRAEFKKTNLHILNYKNADLQFQEAEQRITTHKTANLERFMEYVHSVLNNLDILLQFYYHRFTALRFLNYIGKQRAGAEMVNIFVNGGKKYLRREFKQTGRDEKRGNSKRRKKRRPVKKKGKGKAKLKSFESDNRIPLVALGSAVFPTSMKAIISSLARRLVTTLKKAEDEGLLVIVPVTEHIASNVSEHNLNTYFLQNI

SEQ ID NO: 2724 - protein, 449 aa, Thamnidium elegans
MVKLKERISHLTDDMRKKGCSVEEIKLAIKSDITGPVTQLKLAISSKNINQIPKDFLDQKAIQHVNNFISSYPKNYKFKKGSIYYDAIANPVKHLKAYFKLAEICESYKFKLFQCLPLRNTFIPSYMTIDTMILNNQILKDSKRSKLDKSSIWGKVINISNEALKDQGPNKSIKFRGTMITDGVGVSIVKQNFETSKSSTSGPKNNVVKEDFQYIKEISKEELLATKGKTVLIDPGRRDLLYCMHEDSTAKKKKLYRYTRNQKAKELKSAKFRKLRQRFKPTSIQECENKLSQYSWSTVHTDAYLEYLKVRSQVSPLLEEYYGNEDVEKNQRQDNLIPFIKMKLSSYINQIQADKRLSKNLRKKFGNDCILILGNWSACHMKFQEQIRGKGMRKMLRKEGFQIYLLDEYKTSSICPSCEHQLENFKECINPRPYRRSNNPTVKCHGLLR

SEQ ID NO: 2725 - protein, 1382 aa, Thamnidium elegans
MSEGSEGKTEIISVDEYLTSQTCNNCKKQSLNHISTTGSKRKLYDVLKCDSSFIGVSAVSQFITYVAYRRRELDIKLMYSQNILDMIYNYNKFRKTNLQKMIIIIFAVFALSLGFIPTLFTKLNRSTYIYSERNFVTLQKEGATWSTANMPVLDDFLQFTQVVEKPFPTTKKIMETYLKNNLNQNITRNPTGLWFLVDPKKSFEFTSDQYGSIDGFFTNVNASLSGSGSTLRTFTAFSSRASDTMPPTSSSLRGCSNDPTNLITNISAKAGFVIEAVHTYDYACYPMYDRSSAVYVINKIPNKLSMLSVNDNIYRSSQLNPGVTALGSFGVSLFNHNNTHMSMGIKKMASMTFFNYKAKMTSPHDCRLNNKFENATADFKNLPHNYMLCYLLDMMPPWNVPTPSIRVVQETRKYYEQNRAMNVVYTVQNGNTYEEGQSVMIDLNMFTVFNLKGQLADDKEHLIAYETKSYGATMNIFASIASMRARWTNNDFSDFTRVTTDVTSAVDTTPAWIVAVVLLCLLFLLPQFTRLLVRRDPLYARDFRTILITTLENESTSTNSLNKKIEAKRIDMIANPSIAEKIERTTAKASALKEVGPKYATSKKRACKDCGTLGHASMTNKVCHRHEEHLRELKKSRFVIKTSFKNTINLANNKVNASFCVAVQKVVVIAFAGMTIPPLTHTFLYDFASLIMNLGSKALPHVVENFNRFTEMLGDTYIPERFYSQVVTNIIRRYPALIHNHVADNYKKRSLRHFFTCLSSTNSEFRISCSTAHKRELAQQIFDSISNYISTSYKESMNLTEPQKAIITRLKNESARLMGPLPLTTANVGARPHLYLPWLYHVLQRMEQVDSIKEHVPEKKANIGFIHRKVKELVRLVDFPRKFQKTLENHVQEAINIRAGKPKLRRPNCNTYQRRTRQDLSVEKKASLDHFVQETRDSISTNTFRPENMQMRHIPINRLALAESWNCQYTKKKKKSITQLCWKAFDMTKIGFKSFDQLNNSDNRKEFTGALRTDGVDLYFICDRPVPANSLPLTPSDVSLKVDLSSATVWGVDPATITRGKIGRGDAEERAIISATPSLKTSSLDRVNAAAIYILNNFQTLSEISKCLITGNRKYDPTRHMVIEDSNKKWKQLSPGDGPVKSNKPVVLAFGAAMFGNLRGNVPASTKVVKDSLIKFARERNKKVPTYVVMVDEYLTSQICPRCQIRTTSNEKNSSGLKIHPVLKCSTCDTRWNRDHMTSKGQPRGLNAARKLRIHRRDQRWADKQYKKRALGTAFRSSPFGGSSHAKGIVLEKIGVEAKQPNSAIRKCVRVQLIKNGKKVTAFVPNDGCLNYVDENDEVLIAGFGRKGRAIGDIPGVRFKIVKVAGVSLLALYKEKKEKPRS

SEQ ID NO: 2726 - protein, 283 aa, Thamnidium elegans
MNREEIIKIPDETSPLVSNNEKNPVQFNEKSPVRSIEKSLIRLLFEALFELAGLPDVFVAADGNHLERHKIRTTTTAEYYQFAGFKKATITRGRIGRGDAEERAIISITSSLKTSSLDLFNTAAIYIFNNFQTLSEISKRLITGSRKYDPIRHMMIENSNMKWKQLFPGDGPEESNKPVVLAFGAVMFGNLRGNIPAPTKVVKDSLIKFAREQNKTVPTYVVMVNEYLTSQICPRCQTRTTSNEKNSSGLKIHPVLKCSTCDTRWNKDHMASMNIRSVFLYMA

SEQ ID NO: 2727 - protein, 985 aa, Mucor plumbeus
MRRRRKRQLDIYIPGKTTINPPASFGDDGQGCLQSKRSTSNDKTNYMNALEAQFNIRISNSIKQCKSQDYDKLYEALLNGTRLSKRVVINAAESINVGAASIESFLRNECKKTKKKSVEYWTDYVRKNFITTKLSISNIEASISSTGNIRVDDDDDDSNDDVDEDEDEDDEDTGEYEEGTQYRACSASLRSVLRSDLSQQVQSLFASTINDNMQSVSDYLSDFSNQVFKMILIFNEYNFVLENHAVSLVAHEGNKISQVLLEGYLEKDASVAKPLDSKYLEDEEFKANYHKMFQDPHLELIHSTFYGAKGAQDSSLKTYPLHKAIVDVLGHDEVNLYKDLSSHVTKMARQLYYTNLHNMWSDNTIVNKLLTRLLRFLLIIHLCPDQDNDFKANKAKHQDKGKKATRRVTNCRIPEERISLLRMTRNGRRRLFANEEKKRIKYLQKGKELSASLCQRRLDTYRQVLEREREERDSGRKEKLEKKRGREGDNDDDVEDALVRDDINTEKTKDTPRRRIGQLLQVTRTALFQKQTVTRSYFEMKLKNLDDKEFETIIKIVNFVKPYIPDKDNYHHFQYQLPFVLMANQVLRSIGYDGQVITSSYGLEFVNRIHILHGQKTIRIYGALDYIQQRQKKPEAINKPIAQDKDEDDTLNALNNRRSILETLFKERRKELDQFILTAKSVRASKRDWKNKVADRDKYYREAEMTKLKKRELMVGIRNVRQDLQSLKRQIYEYRNPSTPLTSTTSPNPFIINSKPCHKKVEECMLDTDMNLDDVVFSGTDNGIIKTTETVYFDINRFTFHLELYNRFQILEDAMNTYDTYNLECMKLPLSLTIGPKEINQGSGLASYTKSIVQKKKSKIEGHAVLDEEEKLSNYSLYQCQTVGELQEAISHHCNAREKLRSFYYSNSQCKQRRRLELKKRRFYDKLAADERKSSSAKRPIMMIGDRGYGIGSRIKKHQRFGGHWKESRHGLYTPTLITNEYNSS

SEQ ID NO: 2728 - protein, 376 aa, Mucor plumbeus
RPPLPRLFIISPSPSFRWKFVTISVNSLCCFTKDKLPRGYNAQLNLFYKYFDFKGLGFKSIDDLRPNGLNNVLFFNTIKSDGFAVDFLFERIRAAALKEEVERIYQSVFIDPDRKAVYTAVIGLDTSNHQIRQCSTKEYYNLTGPTKYSSRLQKLKYIKGLTSIETNIPIQKTYSSILYDRFIQYIIVHKDKLLALYGRQRAPEVIVNMLFNGDKKRNKKKINKTKRSKWRKMKKAAKKRNELLDRKARAKKKRNDNSISSTVKAHDITKYSRKRLVKLRGLRHGVTSMFYRTLKEREKESELLVVPIDEFRKSRICNICKTDTLYKASHTGGFGVLVCKTCKTLWQRDVNTFKNIMSIASSIWNQDGSPTAFKRV

SEQ ID NO: 2729 - protein, 557 aa, Mucor plumbeus
MKQEKKEAKQQKTNNTNAVFSNCKEVGHSSSRSPLLNNRKATNGTALPSDMIPAWDTFRIKYPTIIYKVNLASGNSQCISEAYTVVATSYLNNIVELFKAKVLRYICYILQNAFMTMSPDHVAKIAKEFCYQMVYQGNPVWPKNIQLSEGEQSRIKEACIPLSTHIDVQVTLKSLSASPEKFVRSLAYILPEYEREHLAHNPYDVRRLSLPRLFTISPSPSFRWKFVTIIVNSLCCFTKEKLPRGYNAQLDLFYKYFDFKGLGFKSIDDLRPNGLNNVLFSNTIKSDGFTVDFLFEKRRATALKEVKKDIENHDLVLEDFEYEEVERIYQPVFIDPGRKAVYTAAIGLDTSNHQIRQYSIKEYYNLTGSTKYSSRSQKLKDSKGLTSIETNIPTQKKLAVQLCMIDLSNISLSIKINYSLSMTKRKKWRKIKKAAKKSNERLDRKARAKKKINDNDVSSTVGAHDITKPNKWKPAKFEYDKSKVSLIVFGTGMVGKDSVKLRGLTHGVTGMFYRALKKREKKGKLLVVPIDEFKTSRICNICKTDTLYKASHTRSCL

SEQ ID NO: 2730 - protein, 745 aa, Mucor plumbeus
MYKSLILNKIQAVKASRGSGERPQSTCKDCKEIGHYNKKYYKCKLFKEDKADDVGTSKKRQTSAIKNVKREVKRQKVIADPNVRCINRKGTSHKTSRSPDCPRHILSKLEVMNQNLGTGFQSFARKLPFDTCVKERYKSVLKDRILSASEDVRQLLFRAQMFVNYFIILRSNENIPGCIYRQPFWYSICQLVNNRRVTNSNVLPLGMLDDWNNFRRQRPTIIYKVDLASGNSQCLSEACLQVSVTYLNTVVETFEQRVMSYLYYLVQNNYMSMKPDQVKLIVKEYCYQYVCRGEPKWPASVTLSDDLKLRIRNGCDSLRNHTTESISLKSLSASPGNYIRCFSYILSAYEEEHRNHSPFDVRRLPLPRLFSISPKPSCRCRFVNASVNALSCFVKESLPRGYENQLQMFHRVFDFTKLRFKDISQLRADSENTVLFNNLVRSDGFAVDFIFNRKKQESIIGGHDLTLEDFTYEEVEGVYRPVFIGPGQKAVFTAAVGLGDDHQVRRCSTKEYYDLTGSTKYSIKLQRLKVERGITPIETDMPTTKTCQATVYLTHTTYMLLHRHILFDFYGFQRVKDRFFLYQDRQKASQTMVNMLVNGSSKYDRKQRNRRRKKRKRKFMRRQNKNKKIHITTIAKRKWKPSKFRQDKTKVPLIVFGARMFDKDLVKLKGNQCGVTGILWRALKKREKGDFLVVTIDEFMTSRICNICHEDSLRKVDGVKGHSVLGCQNCKKLWQRDINATRICY

SEQ ID NO: 2731 - protein, 691 aa, Mucor plumbeus
MYYKEIIYAKIQSVKYQRNSKTIPTCVDCGLVGHYNKNYYKCSKYNPDTADSVGTSCKRNQSFEMKQEKKEAKQQKTNNTNVVCSNCKELEVFNNNLGKAHQSFTRKIPFRSCIRNNESIIATTSSSVNPQSAVTIKSRIISAYDIIPDCIFKQNFWYSICQLVNNRKATNGTALSSDIIPAWDTFRIKYPAIIYETMSPDHVAKVAKEFCYQMVCQGNPVWPKSIQLSEGEQSRIKEVCMPLSTHIDVQVTLKSLSASPGKFVRFLAYILSEYEREHLAHNPYDVRRLPLPRLFTISPSPSFRWKFVTISTNSLCCFTKEKLPRGYNAQLDLFYKYFDFKGLGFKSIDGLRPNGLNNVLLSNTIKSDGFTVDFLFEKRRATAPKEVKKDIENHDLVLEDFEYEEVERIYQPVFIDPGRKAVYTAVIGLDTSNHQIRQCSTKEYYNITGSTKYSSRLQKLKDSKGLTSIETNIPTQKTCSSILYDRFIQYIIIHKDKLFAFYGKDTAKDRFFLYQGRQRAPEIMVNMLLNGDKKYNKKKRNKTKRKKWRKMKKAAKKSNERLDRKARAKKKINDNDASGTVGIHDVTKSNKWKPSKFEYDKSKVPLIVFGAGMVGKDSIKLIGLRHGVTGMFYRTLKKRKKEGELLVVPIDEFKTSRICNICKADTLYKASHIVVLVFLSVKHVKHCGSEM

SEQ ID NO: 2732 - protein, 272 aa, Mucor plumbeus
MEDLAVFFVPPSSILTINSDDIYHRSGNKSFLKSLERKKKQTMKGQKALDAEEELSGSQLSEATSSALDQLTQPYFQQRGLIREFYYSYTITNERRSKELRRQKFLDQACSNERRFINQGQRGNTIAFVGDRGYSVGSHIKGFKKYGGKWKPQNHSRYISTINTNEYNTPQTCIYCFHKTTHTVHRVDNTLKTNNGTSVCTNPACILVKSGSSHKGRDAISSLEIGLSGLSYLALGVPFPPFNPSVGHHHTDFTNIATILFQFTMSSYFIHN

SEQ ID NO: 2733 - protein, 693 aa, Mucor plumbeus
MPFLKHVEYLKQKYAEKRSQLPKCKDCGIEGHEHKGSYLCSQYIKNTRKKKGPTKDDYETKIDKQKGKQMRLEQEKAGSSSSSSSAPICGSCKEPGHLNAKSKECLNYKATLSEMLQKDFGGSMEQFTRKLYLESVLRPSHKALFTDKVIKLSEFIRNVTFRAQIFVSSYIILNQDSDSLSAITQQNFWYSVSQLIMGQEVTNKKFLSNEIVFSFVAFRQTHPSILFTLKDHKITGYSDSLSAACVTLATTHLNHIVENFERRIVYFIQIKLKDVYKDMPKGFLYIMAREYCYEHLLGSNGNPKWPKQFDLVRIAHVNQITDIIQELKNRLLITPTTTNLTVSPTKFLSVLGYIISELESICDNCTDPLDKPRNFSLVPTPSLRWKYISINCRSLATIVKKKSGTTYKENIEQFYSTFDFKKFGFENLEELLSPESKVRFMCSMMTDGFGACFVFARCKPKKETDPNVFDLEDFQADEVKEHFLPCALDPGRRQIFTATVAHSPEELEIRRCSGKERACYAGTNRRATYVERLKTQQNVKTIETNLPTAKTVNNEKFQERIRYLLVHLPRLFQFYSYKSAPFRFNDYQGRQRANAEMANILINGGKKYNKMKRKNTIKNRKQRKKKHKDKKITKDKGALVKLKKPVKWLKKSTFKNSDAIPLIVFGDGMKNKDTVAIKGHTSGATGALKESFN

SEQ ID NO: 2734 - protein, 428 aa, Mucor plumbeus
MQISFFNIKRLIAVSSSHGLIFTNRIHILPGLKAVWLYGTLNLNQAFASDQDTKVKSAILAAEKKTLENLLKQQQKKQKEFFLNNSIRQLKKNGKLILIEGKNGTWKTYEARNLSPSSPVSESNKIIFTNDKPNHRKVESYKLHSNLDVCNLTFSGIDNGIVKVTETVAFDIHRFKCHPELYNRFNVLEDQDSDTTEGSISDEFVPSQFLSLPVSMKINPKSVNQGSGLANGNASDLGKAFERSSRSLYIIMDFYFSNANAKRRRRLELTKSRYYHKLAAQERAFTQSKAPIMFIGDRGHGVRSIIKDYQQFGGHWKEKIHGRYTSSLITNEHNSSQTFARDKVIKINNESFICLNNKCHNKYVVMSRDKLSALAIGLAGIAQLLFGGTFLCFNHQSAKEQELQFNNLALAFCTEIACRLALVESQTL

SEQ ID NO: 2735 - protein, 750 aa, Mucor plumbeus
MYKSLILNKIQAVKASRESGEQPQPTCKDCKEIGHYNKKYYKCKLFKEDKADDVGTSKKRQTSAIKNVKREAKRQKVIADPNVRCINCKGTGHKTSRSPGCPRHILSKLEVMNQNLGTGFQSFTRKLPFDASVKERYRSVLKDRILSASEDIRQLLFRAQMFVNYFIILHSNENIPGCIYRQPFWYSICHLVNNRRVTNSNVLPPGMLDDWSNFRRQHPTILYKVDLASGNSQCLSEACLQVSVTYSNAVVETFKQRVMSYLYYLVQNIYMSMKPDQVKLIVKEYCYQYVCRGEPKWPASVALSDDLKLRIRNGCDSLRNHTTESISLKSLSASPGNYIRCFSYILSAYEEEHRIILLLIFVNVSVNALSCFVKETLPRSYENQLQMFHRVFDFTKLRFKDISQLRADGENTVLFNNLVRSDGFAVDFIFNRKKQESIIGGHDLTLEDFTYEEVEGVYRPAFIDPGRKAVFTAAVGLGDDHQVRRCSIKEYYDLTGSTKYSIKLQRLKDERGITPIETDMPTTKTCQATVYLTYTTYMLLHRHTLFDFYGFQRAKDRFFLYQGRQKASQTMVNMLVNDSSKYDRKQRNRRRKKRKRKFMRRQNKNKKKIHITTIAKRKWKPSKLRQDKTKVPLIVFGAGMFGKDLVKLKGNQCGVTGILWRALKKREKEGDLLVITIDEYMTSRICNICHEDSLRKVDGVKGHSVLGCQNCKTLWQRDINAAKNILLISSLIWNGSGRPEIFSPKARDLL

SEQ ID NO: 2736 - protein, 226 aa, Mucor plumbeus
MMTDGFGACFVFARCKPKKETDPNVFDLEDFQADEVKEHFLPCALDPGRRQIFTATVAHSPKELEIRRCSSKERTCYADTNRRATYVERLKTQQNVKTIETNLPTAKTVNNEKFQERIRYLLVHLPRLFQFYSYKSAPFRFNDYQGRQRANAEMANILINGDAIPLIVFGDGMKNKDTVAIKGHTSGATGALQRELQLRSKTFGSVVVDINEFRTSKVSIVTVFKH

SEQ ID NO: 2737 - protein, 741 aa, Mucor plumbeus
MVYIPTTESIVPTYVDCGLVGNYNKNYYKCSKYNPDTADSVGTSCKRNQSFEMKQEKKEAKQQKTNNTNVVCSNCKEVGHSSSRSLLCKNHLSSKLEVFNNNLRKAHQSFTRKIPFRSCIRNNESIIATTSSSVNPQSATTINSRIISACEDVRQLIFRAQIFVNYYILMHKDDIIPDCIFKQNFWYSICQLVNNCKATNGTALPSDIIPAWDTFRIKYPAIIYKVNLASGNIELFEAKVLRYIRYILQNAFMTMSPDHVAKVAKEFCYQMVCQGNPVWPKSIQLSEDVQVTLKLLSASPGKFVRSLAYILSEYEREHLAHNPYDVRRLPLPRLFTISPSPSFQKLPRGYNAQLDLFYKYFDFKGLGFKSIDDLRPNGLNNVLFSNTIKSDGFTVDFLFEKRGATALKKVKKDIENHDLVLEDFEYEEVERIYQPVFIDPGRKAVYTAAIGLDTSNHQIRQCSTKEYYNLTGSTKYSSRLQKLKDCKGLTSIETNIPTQKTCSSVLYDRFIQYIIILKDKLFAFYGKDTAKDRFFLYQGRQRAPEIMVNMLLNGDKKYNKKKRNKTKRKKWRKMKKAAKKSNELLDRKARAKKKINDNDASGTVGTHDVTKSNKWKPSKFEYDKSKVPLIVFGTGMVGKDSVKLIGLRHGVTGMFYRTLKKREKEGELLVVPIDEFKTSRICNIFKTDTLYKASHTRGFGVLVCKTYKTLWQRDVNASKNMMSIASSIWNQDGRPTSFKRI

SEQ ID NO: 2738 - protein, 530 aa, Mucor plumbeus
MKIVYILSIKSIVSTCVDCGLVGHYNKNYYKCSKYNLDAADSVGTSCKRNQSFEMKQKKKETKQQKTSNTNAVCSSYKEVGHSSSLSPLCKNHLSSKLEVFNNNLGKAYQLFTRKLPFRSCICNDKSNIAATSSSVNPQSAATIKSRTISAYCIFKQNLWSSICQLVNYCKATNGTILPSDIIPAWDTFGIKYPAIIYKVHLASGNSQCMSEACTVVATSYLNNMVELFEAKVLHYIRYILQNAFMTISPANVAKIAKEFCYQMVCQGDPSVFINPGRKTVYTAAIGLDTSNHQIRQCSTKEYYNLNGLTKYLSRLQKLKDNKDLASIETNILTQKTCSSIFYDRFVQYIIIYKDKLFTFYDKNAAKDRFFLYQGRQRAPEIMVNMLLNRDKKYNKKKRNKTKRKKAKKKRNNNNVSSNVRAHDITKFNKWKSSKFEYDKSKVPLIVFGTAIVGKNLVKLRGLRHGVTGMFYRILKKREKEGQLLVVPIDEFKTYSICNICKTDTLHKASHARGFGVLNQDGRPTAFKRA

SEQ ID NO: 2739 - protein, 642 aa, Mucor plumbeus
MVYIPTTKSIVPTCVDCGLVGHYNKNYYKCSKYNPDTADSVGTSCKRNQSFEMKQEKKEAKQQKTNNTNAVCSNCKEVGHRSSRSPLLNNRKATNGPALPSDMIPAWDTFRIKYPVIIYKVNLASGNSQCRSEACTVVATSYLNNIVELFEAKVLRYIRYILQNAFMTMSPDHGNPVWPKNIQLSEGEQSRIKEVCTPLSTHIDIQVTLKSLSASPRKFVRSLAYILSEYKREHLAHNPYDVRRLPLPRLFTISPSPSFRWKFVTISVNFFIDDLRPNGLNNVLFSNTIKSDGFTVDFLFEKRGATALKEVKKDIENHDLVLEDFEYEEVERIYQPVFIDPGRKAVYTAAIGLDTSNHQIRQCSTKEYYNFTGSIKYSSRLQKLKDSKGLTSIETNILTQKICSSILYDRFIQYIIIHKDRLFAFYGKDTAKDRFFLYLGRRGAPEIMVNMLLNGDKKYNKKKRNKTKRKKWRKTKKAAKKGNERLDRKARAKKKISDNNVSSTVGAHDITKSNKWKPTKFEYDKYKVPLIVFGTGMVGKDSVKLRGLRHGVTGMFYRTLKKREKEGELLVVPIDEFKTSRICNICKTDTLYKASHTRGFGVLVCKTCKTLWQRDVNTSKNMMSIASSIWNQDGRPTAFKRV

SEQ ID NO: 2740 - protein, 393 aa, Mucor plumbeus
RLLITPTTTNLTASPTKFLSVLGYIISELESICDNCTDPLDKPRNFSLVPTPSLRWKYISINCRSLATIVKKKSGTTYKENIEQFYSTFDFKKFGFENLEELLSPESKVRFMCSMMTDGFGACFVFARCKPKKETDPNVFDLEDFQADEVKEHFLPCALDPGRRQIFTATVAHSPEELEIRRCSGKERACYAGTNRRATYVERLKTQQNVKTIETNLPTAKTVNNEKFQERIRYLLVHLPRLFQFYSYKSAPFRFNDYQGRQRANAEMANILINGGKKYNKMKRKNTIKNRKQRKKKHKDKKITKDKGALVKLKKPVKWLKKSTFKNSDAIPLIVFGDGMKNKDTVAIKGHTSGATGVLQRELQLRSKTFGSVVVDINEFRTSKVSIVTVFKH

SEQ ID NO: 2741 - protein, 222 aa, Mucor plumbeus
MVNLNRKTESIDTRFRSRVCSNERSFCSGTSGQDSLIMFIGDRETCVGSTLKGHLRYGGRWKPKLHAVSSLVKFTNEHKASQTCMYCFSPIMHPLKNIKIKGKTISKTINRAFLCLNSRCVSAKNHRTVQSSDKTSALAIAVSGLSYMIFNETLPVFNPYTSQPNTRIFLRPLLSVKETEIGTAAMLLYRLIEFGKYRLIVLLHLPNIVIIILARFKISNPA

SEQ ID NO: 2742 - protein, 489 aa, Mucor plumbeus
MAREYCYEHLLGSNGNPKWPKQFDLVRIAHVNQITDIIQELKNRLLITPTTTNLTASPTKFLSVLGYIISELESICDNCTDPLDKPRNFSLVPTPSLRWKYISINCRSLATIVKKKSGTTYKENIEQFYSTFDFKKFGFENLEELLSPESKVRFMCSMMTDGFGACFVFARCKPKKETDPNVFDLEDFQADEVKEHFLPCALDPGRRQIFTATVAHSPEELEIRRCSGKERACYAGTNRRATYVERLKTQQNVKTIETNLPTAKTVNNEKFQERIRYLLVHLPRLFQFYSYKSAPFRFNDYQGRQRANAEMANILINGGKKYNKMKRKNTIKNRKQRKKKHKDKKITKDKGALSTFKDSDSIPLIVFGDGMKNKDTVAIKGHTSGATGALQRELQLSLTNTRPLTPSAPNDMTTADCYARIDQFLNNNASIKDFKIEDDNHGMGMISTADSYSPKQAINMRLSQSTIGNYLINNGFQCTSNNTSIYTRK

SEQ ID NO: 2743 - protein, 228 aa, Mucor plumbeus
MVYHDLVLEDFEYEEVERIYQPVFIDPGRKAVYTAAIGLDTSLTSIETNIPTQKICISILYGRFIQYIIIHQDKSFTFYGRQRAPEIMVNMLLNGDKKSNKWKPSKFEYGKSKVPLIVFGTGMVGKDSVKLRGLRHGVTGMFYRTLKKREKEGELLVVPIDEFKTSRICNICKTDTLYKASHTRGFGVLVCKTCKTLWQQDVNASKNMMSIASSIWNQDGRPTSFKRI

SEQ ID NO: 2744 - protein, 719 aa, Mucor plumbeus
MMSVQARNDKLQQLRMSREAKRQKVIADPNVRCINCKGTGHKTSRSPDCPRHILSKLEVMNQNLGTGFQSFTRKLPFDTCIKERYRSVLKDRILSASEDARQLLFRAQMFVNYFIILHSNENIPGCIYRQPFWYSICHLVNNRRVTNSSVLPPGMLDDWNNFRRQHPTILYKVDLASGNSQCLSEACLQVSVTYSNAVVETFKQRVMSYLYYLVQNIYMSMKPDQVKLIVKEYCYQYVCRGEPKWPASVALSDDLKLRIRNGCDSLRNHTTESISLKSLSASPGNYIRCFSYILSAYEEEHRNHSPFDVRRLPLPRLFSISPKPPCRCRFVNVSVNALSCFVKESLPRSYDNQLQMFHSVFDFTKLRFKDISQLRADGENTVLFNNLVRSDGFAVDFIFNRKKQESIIDGHDLTLEDFTYEEVEGVYRPAFIDPGRKAVFTAAVGLGDDHQVRICSIKEYYDLTGFTKYSIKLQRLKDERGITPIETDMPTTKTCRATVYLTYTTYMLLHRHTLFDFYGFQRAKDRFFLYQGRQKASQTMVNMLINGSSKYDRNQRNRRRKKRKRKFMRRQNKNKKKIHITTIAKRKWKPSKFRQDKAKIPLIVFGAGMFGKDLVKLKGNQCGVTGILWRALKKREKEGDLLVVTIDEFMTSRICNICHEDSLRKVDGVKGHSVLGCQNCKTLWQRDINAAKNMLLISSLTWNGSGRPEIFSPKARDLL

SEQ ID NO: 2745 - protein, 1117 aa, Mucor plumbeus
MNALEAQFNIRLSNSIKQCKSQGYDKLYEAFLNGTRLPKGVVINAAESIDVGAASIESFLRNECKKTKKKSVEYWTDYVRKNFITTKLSISNIEAGTSSTGNIRVDDDDDDDDDNSNDDVDEEEEDNDEDTGEYEEGTQYRACSASLRPVLRSDLSQQVQSLFASTINDNMQSVSDYLSDFSNQVFKMILIFNEYNFVLENHAVSLVAHEGNKISQVLPEGYLEKDASVAKPLDSKCLEDEEFKANYDKMFQDPHLELIHSTFYGAKGTQDSSLKTYPLNKAIVDVLGHDEVNLYKDLSSHVTKMARQLYYTNLHNMWSDKTIVNKLLTRLLRFLLIIHLCPDQDNGFKANKAKHQDKGKKATRRVTNCRIPEERISLLRMVRNGRRRLFANEEKKRTKYLQKGKELSASLCQRRLDTYRQVLEREREERDSGRKEKLEKKRGREGDNDDDVEDALVRDDINTEKTKDTPRRRIGQLLQVTRSALFQKQTVTRSYFEMELKNLDDKEFETIIKIVNFVKPYIPDKDNYHHFQYQLPFVLMANQVLRSIGYDGQVVKLMPIIQPTALHSFLIDTTTLYALFCSTQCRQRMFILDFKGNRIKQGLALANKDAVFSAFFNINQLKKITSSYGLEFVNRIHILPGLKTIRIYGALDYIQQHQKKPEAINKPIAQDKDEDDTLNALKSRRSILETLFKERRKELDQFILTAKSVRASKRDWKNKVADRDKYYREAEMTKLKKRELMVGIRDVRQDLQSLKRQIYEYRNPSTPLTSTTSPNPFIINSKPCHQKVEECMLDTDMNLDDLVFSGTDNGIIKTTETVYFDINRFTFHLELYNRFQILEDAMDTDDTYNLECMKLPLSLTIGPKEINQGSGLASYTKSIVQKKKSTIEGHAVLDEEEKLSNYSLHQCQTVGELQEAISHHCNAREKLRSFYYSNSQCKQRRRLELKKRIFYDKLAADERKSSSAKRPIMMIGDRGYGIGSRIKKHQRFGGHWKESRHGHYTPTLITNEYNSSQTCLFCYSKLSHPISIVAGKIKTINGSFVCLNQKCPNAFEVVCRDQVSALAIGLAGVAQLLFGVTFPCFDEKSNYTNRIKFNDSALDFLYRKQRMGSPLDGGNTL

SEQ ID NO: 2746 - protein, 270 aa, Mucor plumbeus
MFHRVFDFTKLRFKDISQLRADGEKTVLFNNLVRSDGFAVDFIFNRKKQESIIGGHDLTLEDFTYEEVEGVYRPAFIDPGRKAVFTAAVGPGDDHQVRRCSTKEYYDLTGSTKYSIKLQRLKDERDILCLISMVSKEPRTGSFSTKVTKRHLKPWRKWKPSKFRQDKTKVPLIVFGAGMFGKDLVKLKGNQCGVTGILWRALKKREKEDLLVVTIDEFMTSRICNICHEDSLRKVDGVKGHSVLGCQNCKTLWQRDINAAKNMLLISSLI

SEQ ID NO: 2747 - protein, 1336 aa, Mucor circinatus
MSSSTTQKQPAAIIIEEGSVSLGKRKRQTTSKDDKEILRNLVKEVLQQKLSNIISDNIKKYNEEEMVVFLETKKTCPQGSLEMVSNLAKTNHNIHPTPKQISNGLASLGGTKQLWEQVKKDHSKRLYKEHKNKALSQQQQQQEEQQPPENNENEANSIGDDEDRLRMTSLVAIVSVLRDDIPNDLVYNSLKQAAMDATTAVSNVSALVRMTLLSLAHHNISIIERDDVQLKKEKSGFDITKILPKSFAIRNREPLDNINKIMVAPPNLSLKEQLDKLYKPNTRAKDLQELYTNVHLQFIQSHHLGNKKDNNNDTIHPLWGDLVFKKCDLQQQTWSETNIYAKAQRYLIRILLRIHLAPEREQRTIERAKAIIQKTKEEKQEQSSTSQPQQISRKQIKSKIQHECHQMAKHIRHGKLHEDDEHKYAMRVQSCIKRLDKLASILKDLEEGKSGIGTKAEKDKDIERVATNLGPGDLVEMWEGEIEEEEEEEEGQNVMEKGTTSTNIISSAGRGSRSKGKSVAPTPEEKVKEASATRIRKLEGLIKALLRNPKIARTGSVSDNEVLKASHDKSLKSDEIVVVKLITDQLLPYAPHSDSMCLLTQLPFILLANSILIAVGYHDHVQEISPIVAPHKIHTIPINPAIMYETLTPHKDGIPQGPFEVTPVGTDKAITSSYAARKNGDPMWWSFFDKEKVISLCNRHKLLFANRMVVRPDKTVSILGLIKDDHVPVVSEYETRQKKNCKKKKKKKRKGAYVAKEHIGKSLQELQQQLDHIEDMINKMTAARDILKTQFRETNEECNRTKTERLKSRGSIKRLLSQKLKGQVYAKRKKSHLLKLVQRYIKDWRSSKYNLNKAIENHGTIGDLSVDVPPTKPTPERMQHEDVTANIDISGLHLKKVAYGATDYGHVVLAQTIPLTNDDVQFHVHLYNQQQEYEQQQLEQIEDLVNLEKAEFIGDSEEKQEVDFFSSQLQQQQESDNNNNNNVQEQLQKHQLEETDQTLQQREQSDRHCFWVIQTCTDHDSIRLTDQPLSNQQIEQLRNKLTNEIKFTKKEYSIDDLKLSKPFSITHEQVDEESFNRKFNRRRSKKNKKVVAAEELLNKNSFNGIMEPSEILKRQKNRLSVKNTLRDFYYSPSAMNERRHQTVKNKLVYFKLARAEHRYVKKVAADKLYLKKKEVTVMMLIGLAGMGFNTFLKGRPRRGGKKFRGAHYHSTAVGLQNEHRSSQTCAFCFSPLELLPSNIVKNGKKKKTSHGALICTNPDCPAVKAGYTTFNRDSVGATGIGLAGTTTLLSPDSIPLPPYNPSPTTTTSSTTTSKFQLDEKFSLVSPSLRSYGMYIK

SEQ ID NO: 2748 - protein, 315 aa, Mucor circinatus
MRHHPDEDVVLPIQSVYDMLMQNPATVSSADQFRQYIYTLSAAHNDIHVRFNCHFYHRETLLKLFSARKSALENLANRLIGLDQPEDAPLPFFNSTSKEERKQHRRQFRRPRRPHPGYSFEDHTIVGYGDGRFKSSMKTYEPLPVETFRAVLARRTLVVLEDEYRTSVVCSYDDSRTRMFRAADGSVQVCREHRKRRIRRIHENGNNSRRQCWCLDDEKDNLVPTSQCDNAQDAVGFRRNVYALKFCDECDLLLDRDINGARNIGRILLAYIESNGDVNSRPLALSRGNNRRALVDVNDDEFDQDEEQQDIEVLE

SEQ ID NO: 2749 - protein, 882 aa, Mucor circinatus
MEKIKERVSVPDIENFVHNQPFKDALVNTTTAITNMWSRKRLTHDLRVLIRVLLRVRLRPEKFSRYIEYRTSKKKAKNDGDNDDAKSKNDQDSSNVKNDRTWYSKNKFICDELGEKLQSTDPNKQAIAMKLFQRLVVSNNPTDNTSTTVSVSNIDQGDDLEDIEDLDFDDDDEDEQEHTNLLVKSDENNSSSSPKATELQNEKKESTSRTIRSLVAVVTTLVKSSDTGHEIEASDVKKLVYSSSTIGDHELAAAAEVINLLRPYVPKSSKGQDPDCSMFTLAPLAFITITVLRAVGLPKQAWEMSHKAEDVIALPLSARALYELFSNYYTIYHRDETPITSHAEAGKNQKETIGGFFDIQIIDKICKKHHLQPLWSMKFVNRYTIQWLSYKVISSSNAASPTQSTDTKRRQQKKSLNDNEKEQLQEEISKVKTEVNDLRKELKPANKNHAEACKERMTRRVAHNNSWKRIKSLRAAGVLPDTELFEIKETQWNAVKDSKKKADECRDEAYKVSNELRCKNSQLYQLEKQLHGQSLPPLKPLVDKSLLKEFDLHDPKTFISSSDPGLVVTTCTIGTTSKQYLDVINNYKNLYTLLECEDTSYEMDIDAEEEGNMDVPGSSNIIVAPSQSSILSPASSSASLLSLPYLLKRVTNNTPQSMDSKTLSKKNRWKRERKKRKKEEISRDSLNRDQKTRSLLDKLAHKKLVAKIRREMVNGVKNAKVIHSFGAWKLRNSPIKGHRRRSSKKVQAAAKQCEHDKVIEVDEYLSSTVCPYCFQRLSNHIYRRNDKLVKVNGAKTCNNPHCPSRTTNSTTMTRDAIGAFNIGLITISSLLSTTGEPIFPFSRTSSKNIKYTRQDLDNIFNTAMPPSDGSVQHRHEVRLGSN

SEQ ID NO: 2750 - protein, 431 aa, Mucor circinatus
MGDFVKYTKDYIHHKLQRAETHQDILTINSTKKQQTLLFDALENNALETLKQDVARSVHSTEEASSFIVDLGKSAVIDLPNLVTIKRSKHATDLRKMFENDHQISRYTIRMLRTNGVCLQAVMTDWAHPRRKLQHRQFKYLPEIRKFAFRKCEELGQHDSNLLDEYEGVFGINLGETWTAGAFYLPTDTEHQPGVQHTIRRDELYGREPINRKWLENRNEQTSVHNIQRDLAKSGGSKTSNVDTKMSMRSEIDKACERIINMADASRQRAIEEGALSELSTRKNKFLIGMGLDRMDTGNRKGAKSGLAQQFADKLYDHAKARQEPVQIDLSRIDEYCSSKLCCHCFMEGEIMYVEYLRRSPAPSRQFYKDNLDNQGKEKVIRILVCENCHKKFHRDRSAGSVQASIATSSILEHGQRPQAVIRKSRRINSQ

SEQ ID NO: 2751 - protein, 1280 aa, Mucor circinatus
MSSSTTQKQPAAIIIEEGSLSLGKRKRQTTSKDDKEILRDLVKEVLQQKLSNIISDKIKKYNEEEMVVFLETKKTCPQGSLEMVSNLAKTNHNIHRTAKQISKALARLGGTKQLWEQVKKDHSKRLYKEHKDKDRLRMTSPVAIVSILRDDIPNDLVYNSLKQAAMDATTAVSNVSALVRMTLLSLAHHNISIIERDDVQLKKEKSGFDITKILPKSFAIRDREPLNNSNKIMVAHPNLSLKDQLNKLYKPNTRAKDLQEICTNVHLQYIQSHHLGNKKDNSNDTIHPLWSDLIFKKSNLPSTADGSSITTAAAIKEFNTNLQNMWSRTNIYAKSQRYLIRILLRVHLAPEREQKTTSKIQHECHQMAKHIRHGKLYKDDEHKYATRVQSCMKRLDKLASILKDLEAGKSAIDAKTEKDKNIDCVASNLGPGDLVEMWEDEIEEEEEEVVEEVEEGQNLMKKVKEASATRIRKLEGLIKALLRDPKINRTGNVSDNEVLKAFHDKSLKSDEVAVVKLITNQLLPYSPHSDSICLLTQLPFVLLANSILIAVGYHDHVQEISPIVSPHKIHAILINSAIMYETLTPHKDGIPQGPFEVTPVGTDDAITSSYAARKNGDPMWGSFFDKEKVVSLCNRHKLIFANRMVVRPDRTVSILGLIKDGYIPVVSEYETRQKKNRKKKKKKKNKGIHVAKEYVGKSLQQLQQQLDHIEDMINKMTAALDILKTQSREATEEWNRTKTERLKSRGTIKRLLSQKLKGQVYAKRKKSHLLKLARRYIKDWRSSKYYLNKAIENHGTTGDLPIDVPSTKPTPERMQHEDVTANIDVSGLNLKKVAYGATDYGHVVLAQTIPLTNDDVQFHVHLYNQQQEHQQQQFEQIEGLVNYEKAEIIDASEEKQEVDFISSQLQQQESDNNNNNIQKQLQEHQLKETDQTLQQRQQSDRHCFWAIRTCADHDSIRLTDQPLSNQQIEQLRNKLTNEIKFTKKEYYIDDLKLSKPFSITHEQVDEESFNRKFNRRRSKKNKKVVAAEELLNKNSFNGIMGPSEILKRQKNRLSVKNTLRDFYYSPSAMNERRHQTIRNNLVYSKLARAERHYVKKVAADKLHLKKKEVTVMMLIGLAGMGFNTFLKGRPRRGGKKFRGAHYHSTTVGLQNEHRSSQTCVFCFSPLKLLPSNIVKNGKKKKTSHGALVCTNPDCLAVKAGYTTFNRDSVGATGIGLAATTTSKFQLDEKFSLISPSLRSHGASQTSTVIHGPFKSNYIFPFPQFIPQESYKRQNYVNQRF

SEQ ID NO: 2752 - protein, 1647 aa, Mucor circinatus
MGVKNIHNTLKSKNVFNSNDNLKQYLDSNNVTHVFIDLCQSFFWVLRKRAVDLLKPQFENVAGGIVTDIISCCLNLYFNPVTSQPMPRSIVLAVDGESLPIKSETHNKRDQFATSKFREAQELYKSRGIKNKDFITAAKSAVRFTSEIKTAIIEILKKTYQTFDPLANFLPAIYYYQAPYESDGMIIKLASMLPSPQNQTAIISSDSDLLVYKGCLDVMRIMEIKWGAPSIGSIISTTKLCTKQGILQKLHLKHQDDSTFDMAEKRLMILASASGNDYAKNIYGISFAKLRTQMLNLMESEGKDGLGTHPDEMLASLLSIYNRVSDKTKFDMQCALYTYCVFTTGPPQQNDDRVPSSSSTTFELKEHFTTVLDKLRTTFYSTQRDTEQQQQDQQQLQLQHQQHQQQQQQQEQQQEHHHHHHHQETQRQKEAQKEEQNKEAQKEKEKEKEKEKEKGKQKESPSASESVHWQLRSFEGRSSSVRVAPLTSSGNCRLRLGSSAVESSSSVASSSDQGPEAQPYCSSAITSGSPREPALTNIPSNGKKAGRYIFIRDVQRIPMDATVPEYKGDLSKRQQRRTSPSAKRQKTKQKGKGKAINTQDNKNKNDDDDDDDGEEERLSTARTTAAIYHGPAKTIYYRKPGATEETKVVQISRTMKTWTCGLNSSVLAKACQRYAPFDRPSQQSQLVGQPSSSSSTIADAHEASTTAVSGIKNPKAQIVNPTAVHQGNLLTCVIYHEVSQLSLVRQIAMLIGNMIVRYALELNESSKTKVYRSFFSTSSVKIWKWIIYCATNYRPSGYDKNNSTVHYDRATIDQYNIQNLPTNPLAFVAYPGDEKTIKGLSYIMRENTELRSIILYVRQLWFSGYNDQNIPWLPSSWLRREVLDAIAEDIDIHFRQTLVSHFVDNFSKYITVRLKEQAQVALDWPSDDKFRRYVLRRWQKEPLDPTDHQVEKNLKDKGDVINNSVQNWIKSTWARIRRTGKKATMVLVDQELERKAKVPRGWTTEEGFSEYLTTQIWEIPLEVDARHSSMINIEKCKEASAALRKTTRKVQTDVDAFIKQEKNKWQQFVGRPIGTRASQVDINSNQAPVDLFDCFGMKRVNQPTAGSRRQRDANSDEASNQGQDDNDSQDEVGSTEHAYILTSILARILEDYPEKISFSICPTAPSKNVFIPLYGSYTRNILTHMGDFVKYTKDYIHHKLQRAETHQGILTINSTKKQQTLLFDALENNALETLKQDIARSVHSTEEALSFIVDLGKSAVIDLPNLVNIKRSKHATDLRKMLENERQIPRYTIRMLRTNGVCLQAVMTDWGRPRRKLQQRQFKYLPEIRKFAFRKCEELGQHDANLLDEYEGVFGIDLGETWTAGAFYLPTDTEHQPGVQHTIRRDELYGREPINRKWLENRNEQTSVHNIQCDLAKSGGSKTSNLAKLLTFIRTWQAEDRGFRLHDAHSSKAELHRSWDTKMSMRSEIDKACERIINMADASRQRAIEEDALSELSTRKNKFLIGMGLDGMDEGNRKGAKSGLAQQFADKLYDHAKARQDPVQIDLSRIDEYCSSKLCCHCFMEGEIMYVEYLRRPPAPSRQVNKDKLDNQGKEKVIRVLVCENCHKKFHRDGSAGNVQASIAASILEHGQRPQAVIRKSRRINSQ

SEQ ID NO: 2753 - protein, 717 aa, Mucor circinatus
MFEAEVQNLDDDDNNNDDDGDHTFEEELVYKESQKSSSAEQESLSIETSSSTVATSSLSIPSTPTTDVSRTTIRCLEAVITMMSMSSKIDQRVTANDVRKAIYSSTKIPEQACEVASCIIKFIRPFVPKKKNDNSDPNVTVFNLAPFVFLSNKILEAVKLDKQTIAMYPVLQEKQSLHLSARGIYEIFRESHEMYGSDEAVVRDRMHAGRHRLAVLSIFFNMTSIQRILEEHRLRFHLILEYVNKLQICWIGYRITKKQKSSSSSSSKVRNDDDDDDGDKEELQKEIKKLSQEVSRLASLYTKENKILASHVSERMVKSSPYNTLMKKMSREKKKPIENQDKQWLSNVEEEKNVLSKALKEARKKVDDQWLKVSSTHSNLREKRSYLYYLNKKNKNQTIPGLKKLLSTDDLKKFKILVSDPKGTCITGTDPGIVTTTTTTGKTLAEYYTDINRHIALYALPDTDIGTDTEDDDVVMEGVEETSSSSKNVSNITKLVKPVNNSPRWMNSITHSSKHARYRERKKRKKENVKSEKLERDRKTRELRTRKAHERLAAKIRTSFGSSKMSFFHVVGSWVPRNSPIKGHARRSSRKVVEALDKPQGDHVVKVDEFLSSTICPYCFARLTCQTYKRDGKIRISNGSKCCSNPLCPSRSKHWTTMNRDGVGSHNIGLNGVCGILAKDGLALPPLRRSAPQVPRKQENNLKKIFISQLHQLVQGN

SEQ ID NO: 2754 - protein, 271 aa, Mucor saturninus
MNKNIFQTEEQELKKSLGIDQIETNIPLPKTTSHDTYILYITYILQHIDTLFNFYGFRNTNSRWCNYIASQKSIEDAVNILLNGSTKYNKQRRKNKKKSKKRRRSKIVDSLKSKPKIIKREHKEKFEEGDRNKMPLIIFGDGLKNKSQTKFKGLRSGVTDKLYRQLKRREKLGELLLVDINEFKTSKTCNSCLSNDLKNMRCGADEKSSHIHQILICKRCNIFWNRDVMAAKNMLAISQSIWDGQGRPTVFKSLNATSNVVTSSHSSEKKV

SEQ ID NO: 2755 - protein, 438 aa, Mucor saturninus
MTFGFSFYYSNRYNLQFVGLKKSINKDMQKTPIINQEQPCLVIDNSQIEKEIKQPNDAIKIQKKEYAALGKSIQVEEWNRMNLGRSFRAKEKSNHPWDTKLYKQLKEKRSDCDNIYSQLRKLNSSLKDLRYRMFALNKARHRQSLPISTNSLQIPDKMKADLKNNRLLIQGVDPGIVTTAAISCVKSSTLFESLNRFQMLENHEPCTIPISNQKGYEYDYTANKINQAVLSNTHRLQREKKKKYDIEKNRLTRKIRLNTYHKKHYSATKRDIFSYHGWKQGSILFFVGNWSGKGAYIRGHTRRSMKPILNRFNSVANDHIAVVDEFKSTITCSSCFEVTTKQVVRVGEKRVKRIKGAVTCTNHNCPRRLSPTRRTTVNRDMNGTINIALIGFSCVVSNNSLPLPPFRRGIYNANKFNLSHHYQCASLATLESPVVPET

SEQ ID NO: 2756 - protein, 256 aa, Mucor saturninus
MNGVVNRQKQEIERKKSNNIEHIETRIPSPKTTGAENYKRHITYMFQHFEALVTFYDFQTARIRRSNYIGNQKATDHAINILINGSTKYNKNRRKNTRRNKGKRRKLNSRYTRDLSNTKQSKKGKQAARAFKKKFEEGDKSKMPMIIFGDGLKNKSHVQIKGLRHGVIDKLYRQLKRRENLGELLLLDIDEYNTSKTCNGCLVKNLENLKYGGHKIHQILNCNNCHIFWNRDVLASKSMFTIATPIWSGNGSPSVF

SEQ ID NO: 2757 - protein, 288 aa, Mucor saturninus
MFIIRIESLLPTGTNKKMFANMVRSDGFAVDFIFYKEKTYSEHINQVDLILDDFEFNEHEEHYLPITIDPGKKAFFTAFAGSSNDTSDFRKCSIKEYYHITESNIPTSKTPHESVYIEYVNYMLENIARIFSFYNHETAKDIFFLYQGRQRAPEQMVNMLLRDTKKYQTKTRTQGKKQTNFEKYKTKVPLIVFGNGMSRKDHVKIKNIRTGVTGGLFRKSKSKERTGNLLVVDIDEFLTSHAQNVRVELWVVLASPVIVFSFARRALNMMKIARSVWNGDGRPEPFRR

SEQ ID NO: 2758 - protein, 364 aa, Mucor saturninus
VEINAYNALRPVLDSYGTSYSFKKHSIYYDAKAQHENHFMAFVQLARLFETVGLSLFCMENKIKLDYWKQVVDPNAKPFKAQEENKLLRFYGTIQIDGVGVTVLKKRIDRQSSYTSIMKEADEKFKYISDLSTQEHKAVNGRCVAIDPGRRDLLFCVDKKSTVETSIKFRYTKHDQDKTRKFKKYRNILQAMKSNNSALHQAENFLAENQSSSLEMEGYRRFLERIGQNYAVLDNFYGYTTTSSQNPQFMLRKLRLAAYFNKQRADMQLINSLKQKFGKDAILVLGNWSAPNARYHGPIRGIGLRRLLLRNHLSLLLIDKFNMSRCCPSCHNMSLKKFKQIDNPRLYQRSNYPLTLCHGLLRCC

SEQ ID NO: 2759 - protein, 202 aa, Mucor saturninus
MQSVLWQYIYITNLRFFPQPQNFSNDRIVNPQFYAAYLEMMLSQKHISQRFDDDEKRRIIALGLEINRRPNQSDLNRKTLSTVLENLQLLPFRKMKFSLKMFYEQNDQKLVQNLKRKFGPDAVLVLGNWSAPNTKFQEPTRNKGLIQMLKKNGLTVYLIDEFKTFSHCPDCGDVLEQFKMIFNPRPFRRNTMPIVKCHGLLR

SEQ ID NO: 2760 - protein, 500 aa, Mucor saturninus
MRFSQHLRQSINVLLNVKQRKAEVKQALLEQGVDPKIIEDLIFQDVTQTAKNFKMAITTRPTNMTLLPQNSQVEINAYNALRPVSDSYGTSNSFKKRSIYYDAKAQPVNHFMAFVQLARLFETLGLSPFRCFPLRRSWFLGYVQIDSKILCQNILNIRWSNNIDKLDYGKQVVDLNAKPFKAQKENKLLRFCGTIQTDSVGVTVLKKRIDRQSSYTSTIKEADKKFKYISDLNTEEHKAVNETPIKFRYTKQDQDKTRKSKKYRNILQAMKSNNPAVYQAENVLAENQSSSLEMEVYRRFLERLGQNYTVLDNFYGYTTMSSQNPQFMLRKLRLAAYFNKQRADMQLINSLKQKFGKDAIFVLGNWSAPNALYHEPTRGIGLRRLLLRNHLSLLLIDEFNTSRCCPSCHILSLKKFKQIDNPRPYQRSNYSLTLCHGLLRCTNQTCMTKMQTQGFQYKLWNRDLAACLNMISIILNLRNWSNPRTICTSCPLKKRPQMGK

SEQ ID NO: 2761 - protein, 435 aa, Mucor saturninus
MCTINSSEFELSFVQPSRAHKNSSEFDLQDNTFERASTGTRSKLAREFRSSFRTLDPIYNNALETLRSVLTSHPVDYQFRGNSIYYDPKARLLVEHRRAFDELVISFIYIELPVFNCFPLRRSWARCYTTIDSKILCQNILGRRWTNRQDKIAIWRERLLKKLLEDVLRWILDEEICYSVCMKTQPQTIQTSFALPNQDNFEKIKKYRRIREAVKLARVAAAERLLINYDSLNRDEFEQYIANRSNRTDIIQYYVNFLTNHRTAHPLHRKLRLSAYIRRQQGNEDLISKLDIQFGVEAIYVMAGKRVCLIDEFRTSQCCPTCEIRSLETFRMVDNPRPHRRREDPRVIRHGLLRIVPRLWNCDMTACLNMVDIVRSFRAGNGIPPQGFDVERFPRTNGEKQEPKMNKQTLEMFVNVVTRIFQACYRRSTIDTLKW

SEQ ID NO: 2762 - protein, 313 aa, Mucor saturninus
MFSDEQKYISDSSEKMVQINPGKPQDTVQSGEKKKKDDNAKHFVLPRIFSLFPNPGLQWRFIKIDSQNVTGIFPGSKLKKEIDETLFSFTQRYFYDCFNFAKSKIRSIKDLKELPATNGKMFLKGMYTDGYTCRLLFCRRTEPSSLNKSIALELDDFNTEEVNTYFRPCTVDPGRKDVFVSYHGDNDMRRLSSKEYYNMGGLTQRHKQEQELKKSLGIDQIETNIPSSKPKINKREHKENFEEGDRNKMPLIIFGDGLKNKSQVKFKGLRSGVTDKLYRQLKRREKLGELLLVDINEFKTSKVSIVMYINTFD

SEQ ID NO: 2763 - protein, 761 aa, Mucor saturninus
MNQPAGENRGLKRKETFEAKKEKSVAKRNRSSASSSSSTLICKSCDTSGHSSARSKLCPNHNYTLQELIEKDIGAKYQRYTLSLPLKGFLNETDDDDDRLQKAVNKIQDLSSFLRLVLFKAQIFVNDYILQYPNNLSNEFFQQNFWHSLYRVVCKQLSIRDFQLKYANIHHLEDAWMELNNLEGVNLNVEKDGLKNYGQVLATACETTATCYNNYYIENFQKIICNYFIYMISKEFPDVKKSVIRKLVYEHVLDQVLSSDPVAVLNDDSIPPLSQETKNGLQAFINPLIVELKNRLPSFTITKATQNTAPFEPGKSQDTVQSGEKKKKDDKAKHFVLPRIFSLFPNPGLQWRFIKIDSQNVTGIFPGSKLKKEKDETLFCFTQRYFYDCFNFAKLKIRSLKDLKELPATNGKMFLNGMYTDGYTCRLLFCRRTEPPSLIKSIALELDDFNTEEVNTYFRPCTIDPGRKDVFVSYHGDNDVRRLSSKEYYNMGGVTQRHKQEQELKKSLGIDQIETNIPSPKTTSHDTYILYITYILQHIDTLFNFYGFGTTNCRWCNYIASQKNIEDAVNILLNGSTKYNKKRRKNKKSKKRRRSKIVDSLKSKPKIIKREHKEKFEKGDRNKMPLIIFRDGLKNKSQTKFKGLRSGVTDKLYRQLKRREKLGELLLVDINEFKTSKTCNSCFGNDLKNMRCSTDEKSSHIHQILICKRCNIFWNRDVMAAKNMLAISQSIWDGQGRPTVFKRLNTTSNVVTSSHSSEEKV

SEQ ID NO: 2764 - protein, 696 aa, Mucor saturninus
MDSDRSLSSTPGTPGSNMSTSSSLTPGDRIISVKSSIDGIGWDPERRERLEEYVVTVHNITTHAYSLSKCIFLRAIQEDENFDIRRCINRDFFAEVWLKLTRYARGRAGGRTAATRAFIDTYLDDYLEVTGFVPPDFRYGQQASLIEGAKIFTSYSNNVQMRLGSHLRQAVNHLLRIRQRKAELIAYRRREGLIDALIKSEVYREITEPATRFKELIARRLPQDFVLDGEQFGDPIYNNALETLRPVLTSYPVDYRFRGNSIYYDSKGRPVEHMRAFYELALSFIDIELPVFNCFPLRRSWTPCYTTIDSKILCQNILGRRWTNRQDKIALWREVINLNSDALKHQENGELQFRGTIQTDGVGVTVIKKRMDRESRYTARFAVVVESIQYISQEIAQETVGRCVTIDPGRRDLLFCVHENSTANNPNKFRFTKQYQDKFEKIKKYRRIREAVKPARVAAAERLLVNYDSLNRDEFEQYLENRSNMTGIIQNHYVNFRTNHRTAHPLHRKLRLSAYIRRQQGNEDLISKLDEQFGVEAVYVMGNWSSPNTRFHEPVRGLGFRRLLQKAGKRVYLIDEFRTSQCCPACERRSLETFRMVDNPRPHRRRANPRVIRHGLLRCTNQNCRAMTNNTNRIVPRLWNRDMAACLNMVDIVRSLRAGNGIPPRFRRGGAPQNQRRRARTQNEQANIRNVRQRRN

SEQ ID NO: 2765 - protein, 821 aa, Mucor saturninus
MRPRIYPDTEDFMNAKITAKLAKMGEETSTSTMNQPAGGNRGLKRKETFEAKKEKSVAKRNRSSASSSSSTLICKSCDTSGHSSARSKLCPNHNYTLQELIEKDIGAKNQRYTISLPLKGFLNETDDDDDRLQKAVNKIQDLSSFLRLVLFKAQIFVNDYILQYPNNLSNEFFQQNFWYSLCRVVCKQLSIRDLQLKYANIHHLEDAWMELNNLEGVNLNVEKDGLKNYGQVLATACETTATCYNNYYIENFQNIICNYFIYMICKEFPDIKRSVIRKLVYEHVLDQVLSSDPVAVLNDDILPPLSQETKNGLQTFINPLIVELKNRLPSFTITKATQNTAPFGILPALRHILSKYESIIAENSTLQKRHSETGKPQDTVQSGEKKKNDDKVKHFVLPRIFSLFPNPGLQWCFIKIDSQNVTGIFPGSKLKKEKDETLFCFTQRYFYDCFNFAKLKIRSLKDLKELSATNGKMFLNGMYTDGYTCRLLFCRRTEPSSLIKSIALELDDFNTEEVNTYFRPCTIDPGRKDVFVSYHGDNDVRRLSSKEYYNMGGVTQRHKQEQELKKSLGIDQIETNIPSPKTMSHDTYILYITYILQHIDTLFSFYGFRTTNSRWCNYIASQKSIEDAVNILLNGSTKYNKKRRKNKKKSKKRRRSKIVDSLKSKPKIIKREHKEKFEEGDRNKMPLIIFGDGLKNKSQTKFKGLRSGVTDKLYRQLKRREKLGELLLVDINEFKTSKTCNSCFSNDLKNMRCGTDEKSSHIHQILICKRCNIFWNRDVMAAKNMLAISQSIWDGQGRPTVFKRLNAASNVVTSSHSSEEK

SEQ ID NO: 2766 - protein, 1311 aa, Mucor saturninus
MKRKAQVDDERNVRQKPRPLLLEYSHGESSSTEGSSDGDVPLEFYCLDSNIASFTSSTSDNTRLSELLETAVSNFEVPFNDNKSRLRNYFFSHQLKIIPNAGQLAFNNNLTTDVVPTVQQLVKILNNGADNPFIIKSKKYDGKIVVPKGNLLLYACSRIYNCRIYLFSSRAKPKVIHPPSNSQLEKDNIPNIAVFKHCDSFSTEWFALRVCLKPGAHTKKPINVVNTIISPAAEKRQIGEKKPRQAYTKIGNDLDDEILRLLEEEVKFMYEKKWSSFKAKQKNKPNMIENFSESLSRKSLPTGAANIIQAKLEQKIKSNHFADFTESDIPPSGVWVQQKINRLKKQNKFTIEGFVNNFIANITEHQQSLELKAESSSSNSFSSLNSDQTDAEILIDTEDSAEKDYRTVSRSLKRVIHKDFHYNSFLSHMEELQKECSLCAHGLSQAAGLFTESVISGAIFPTKPESYFDYSCIGLTELTAHVGQEQIAILNRKEKEFLHKSNTFTYLGFWRILSNCVGGKSSSKSQHAVITFIKNNLEDQYKHNFVSNSTIAYACHQYYINFTNLWTFQKYMQDLKAVITLTIRANLCRQRFFSKSSTVSPKAPSPNRGSSVKKKTNRLFLMNELFDCLLIHNQHKKSGKLFVIEKLVEKLFQSADTATNVEKAVTGMNPPSLDVRMFSFEYESELEDEEDLVVTSSSNFDDVKAVTLDYAQKDLTAKEVRALSAVCIMLIQSWNTEKEVDADNIFEKLYCNSQESIPRTALLFCAKLVNGLIKMRCKKEEECLGSFFGMRKLRNSVVAFAKEHNTRNRMGIYSLHPTTQKKVSIRLDSKSLYLLFAKSYNIHKSENTYFTNYMNISTENDKRLIFANFFDISYVERILKEQKLHPTFSFIFSNKHSLQFLGIKNTLESSSKLSSDTRPEMEKAPKNNDSLDDHVNLKETIRSLNEEIKESKKRQAHLSRSLLPLEKSRMDQARNFRKEEKVKNKWNKDKYNELKETRAKCDKVYTELKSIRAAISNSQVEMYRLNKLFHKQPPPAIINKSSASDEDVACLAKGKIAVQGIDPGVVTTASFKGVTSSLLFESINRYTALKNIEPIKSVAKEKQISLDFTAKIVNHATFSTKHSQERQRRDKLDMNYLEKKKVFRKIRSKDNNIMWSFLGNWSGVTTYMIGHTRRSIKPIIAELQKIEKDKLMIVDEYKSTITCTSCFEPTTKQVLRRGESIKRIKGAVVCVNKNCPRRVYNKSTTSNRDQNGALNIALIGFSALVSDDGLTLPPFRRGVHDPNKFNLSENLMQARIAMQRSPGEPVTNFSL

SEQ ID NO: 2767 - protein, 304 aa, Mucor saturninus
REVINLNSDALKHQENGELQFRGTIQTDGVGVTVIKKRMDRESRHTARFAVVIEPTQYISQEIAQETVGRYVTINPGRRDLLFCVHKNSTVNNPNKICEAVKPATRVAAAERLLVNYDSLNRDEFEQYLANRRQQGNEVLISKLDEHFVVEAVYVMNNWSSPNTRFHEPVRDLGFGRLLQKAGKRVYLIDEFRTSQCCPACKRGSLETFWMVGNPRPHRRRANPRVIRHGLLRVMTNNTNRIVPRLLNRDMAACLNMVDIVRPLRAGNGIPPRFRRGEVPQNQRRRAITQNKQENIRNVLQRRN

SEQ ID NO: 2768 - protein, 996 aa, Mucor saturninus
MHKSENTYFKNYLDISTKNIERAEITSNLFFHNFKSARAELEEAPKNNDGLNDIANLKEAVRNLNVGIKESKAKQARLSRLLLPLEKLRMDQARNFRIEERGKDKWDEEKYNDLKEARANCDKIYSELKSVRATISNNQTEMYRLNKILHKKPQSADNINKEVISDEDIKSLAKGEIAVQGIDPGVVTTASFKGASISLLFERKGNNNVVWSFLGNWSGITTFMKGHTRRGLKPVITELQKTEKDKFMVVDEYKSNVTCTSCFETTTKQVVRRGNTIKRIKGAVVCVNKNCPRRMHNKSTTSNRDQNGALNIALIGFSALVSEDGLTVPPFRRGVNNPNQFNLPNNLMQARLAMQGSPGEPFKFSLFFVSMYYFNNNDNSSSEHHSQHNHDGPLFSQPLDPSTLSGPLADYDNIITDPLFDSNHNWDFYSQQHLDPQQEAILLNDPNFLRQHQLLHDQQKELHSRLLHDDERPEQVSNLTAMFEPIVVKIEQEEDQDKKSKRINHRRQQVVMKTTINDDDKVDHQRRFNELQARFRVNYARKPSVQQTSNNMKPASSKTPKQSLLPQQQALQDKPSLSLEPTTTTATVNAANHTTTTASATTAANAAVSVSSQVMTDEELSSSFPSRTMPIQIQRVPRLNSLQPFDAESHQKQLDNQLDKVDFDDITVSELKEMLRQRGKPATGKKAVLLQRLQEERDLSKGGRSAGSYGSTGSGGRLLSNRHSQPVPFSRSINIDTPQRPRSFQSSSPVMIHNPDISSPIHTISPSSPGASLHRSIANMHIGSPPAISRRYSPYSPRLSSSPKPVHHEYSSSVPLTMGESPNNNTLTTPNNTTNNNNNINSNNYNNNNMMLSSSYSVRSSCRYYNNPKTYKPFMSSALATPDREEDVNPFDSFYARGSGDAPIKEEDTSEFSNYYGDAGTRPVHEGEMHSFGPGEPVEGNMDWIDPTAFENILQQQVSHDQLLSNDQIMAMINTQQQAFDFRLDDSNFSHPYYHQ

SEQ ID NO: 2769 - protein, 803 aa, Mucor saturninus
MRPRIYPDTEEFIDAKITAKLAKMGDETSTSTMNQPVGGNRGLKRKETFEAEKEKSVAKRNRSTASSSSSTLICKSCDTSGHSSARSKLCPNHNYTLQKLIEKDIGAKYQRYTISLPLKGFLNETDDDDDRLQKAVNKIQDLSSFLRLVLFKAQIFVNDYILQYPNNLSNEFFQQNFWYSLCRVVCKQLSIKDFQLKYATIHYLEDAWMELNNLEGVNLNVEKDGLKNYGQVLATACETTGTCYNNYYIENFQNIICNYFNYMICKEFPDLKKSVIRKLVYEHVLNQVLSSDPVAVLNYDILPPLIQETKNGLQAFINPLIVELKNRLPSFTITKATQNTAPFGILPALRHILSKYESIIAENSTLQKRDSEPGKSQDTVQSGEKKKKDDNAKHFVLPKIFSLFPNPGLRWRFIKIDSQNVTGVFPGSKLKKEKDETLFSFTQRYFYDCFNFAKLKIRSLKDLKELPATHGKMFLNGMYTDELDDFNTEELKTYFRPCTVDPGRKDVFVSYHGDNDVRRLSSKEYCNMGGVTQRHKQEQELKKSLGIDQIETNIPSPKTTSHDAYILYITYILQHIDTLFNFYGFRTTNSRWCNYIASQKSIEDAVNILINGSTKYNKKRRKNKKKSKKRRRSRIVDSLKSKPKIIKREHKEKFEGGDRNKMPLIIFGDGLKNKSQTKFKGLRSGVMDKLYRQLKRREKLGELLLVNINEFKTSKVSILMYINTFDNDLKNMRCGTDEKSSHIHQILICKRCNIFWNRDVMAAKNMLAISQSIWDGQGRPTVFKRLNATSNVVTSSHSSEEKV

SEQ ID NO: 2770 - protein, 591 aa, Mucor saturninus
MTIKSSVNGVGWRPFYVSILKKLVQKVHIIVTHTYSFTRYIFIQELNLNLEEYAVQGFYKEVFISLLDAKVRNNDKLSSKVKKYRDMINKYKTSYFRDASLTPIKLANAQQIASYEATKIQTAYNNAVALQFGNKLRMVINRLIGLKHRISQLTSDLKKQGCSEEEIKAKVKSNIMEPATQLKLAISSRNINTVPKEFLDQKAMKHVMDIFSAYPETYKFKKDSIYYDAVVNPKKHLVAFCKLAEICESNKFKSFQSFPLRKTFIPSYITIDTMILNNHILQDSKRSKLDKTYIWGKVLNLSSKPFKGQGPNNSIQFRGTIMTDGIGISIVKQNFDTSKGGTGNIKTRLVDEEFKYIEQIPKDELLATTQKCVFIDPGRRDLLYCMHENSTINDKQIYRFTRNQKAKETKSTKLKKLRQQLKPNDIQECENRLSKCSPLTVKKEGFIEYLKIRAQVTSKMQAYYSNEDVEKDQRLPNMIPFRKLKLSSYINQVQSNKRLSKNLRKKFGDDCILILGNWSAAHVTFQEPIRGKGLRQMLRNEGFKVYLLDEFKTSSVCPSCDHKLENFKKCINPRPYRRSKNPTVKCHGLLR

SEQ ID NO: 2771 - protein, 617 aa, Mucor saturninus
MEKLFQTADTASDKENTMMVTKLSSVDADMSFFEDEDECEDEADLLVESNSDLNDDKSITLDNTQKDLTAKEVRALSTVCIMLIQSSTIGNEVDAKNIFEKLYLDTQESIPRAALDFCAKLVNGLRKIRCKKEEECLGSFFGMRKLRNLIVGYAKEHYKRNRMGVCSLYPISDKKISIRVDRVKSTLKNYSKLDIKARAELEEAPKNNDGLNDIVNVKEAVRNLNVGIKESKAKQARLSRLLLPLEKLRMDQARNFRIEERGKDKWDEKKYNDLKEARANCDKIYSELKSVRATISNNQTEMYRLNKILHKQPLPADNINKEVISDKDITSLAKGDIVVQGIDPGVVTTASFKGVSGSLLFESINRYTALKNLDPVESATNEKQVSLEFTAKMVNNATFSTKHRQERHRRENQKIQTDVSYLEKKRLTRKIRTKKFYQVFFSRHRKRLVTSEGKGNNNAVWSFLGNWSGITTFMKGHTRRSLKPVITELQKTEKDTFMVVDEYKSTVTCTSCFETTTKQVVRRGDTIKRIKGAVVCVNKDCPRRMHNKSTTSNRDQNGALNIALIGFSALVSEDGLTLPPFRRGVNNPNKFNLSNNLMQARLAMQGSPGEPVTNFSL

SEQ ID NO: 2772 - protein, 821 aa, Mucor saturninus
MRPRIYPDTEDFINAKITAKLAKMGEETSTSTMNQPAGGNRGLKRKETFEVKIEKSVAKRNRTTASSSSSTLICKSCDTSGHSSARSKLCPNHNYTLQELIEKDIGAKYQRYTISIPLKGFLNETDDDDDRLQKAVNKIQDLSSFLRLVLFKAQIFVNDYILQYPNNLSNEFFQQNFWYSLCRVVCKQLSIKDFQLKYATIHHLEDAWMELNNLEGVNLNVEKYGLKNYGQVLATACETTATCYNNYYIENFQNIICNYFIYMIFKEFPDVKISVIRKLVYEHVLDQVLSSDPVAVLNDDILPPLSQETKNGLQAFINPLIVELKNRLPSFSITKATQNTAPFGILPALRHILSKYESIIAENSTLQKRDSETGKPQDTVQSGEKKKNDDKAKHFVLPRIFSLFPNPGLQWRFIKIDSQNVTGIFPGSKLKKEKDETLFCFTQRYFYQCFNFAKLKIRSLKDLKELPATNGKMFLNGMYTDGYTCRLLFCRRTEPSSLIKSIALELDDFNTEEVNTYFRPCTIDPGRKDVFVSYHGDNDVRRLSSKEYYNMGGVTQRHKQEQELKKSLGIDQIETNIPSPKTTSHDTYILYITYILQHIDTLFNFYGFRTTNSRWCNYIASQKSIEDAVNILLNGSTKYNKQRRKNKKKSKKRRRSKIVDSLKSKPKIIKREHKEKFEEGDRNKMPLIIFGDGLKNKSQTKFKGLRSGVTDKLYRQLKRREKLGELLLVDINEFKTSKTCNSCFSNDLKNMRCGTDEKSSHIHQILICKRCNIFWNRDVMAAKNMLAISQSIWDGQGRPTVFKRLNATSNVVTSSHSSEEK

SEQ ID NO: 2773 - protein, 562 aa, Mucor saturninus
MRTPIYPEIEAFIQTKKLKKYESQQQETASETINKLSKRKKGVKRKDTPEEKKAKSDVTKARNVVPNTSNLVLKELIQQNLGSQNQRFTVSIPLKSFMPSVDENANNTAVEKIKSLFMFLQKVAYNAQLFVNFYILKQPNSLPNELLKQNFCEKQENTYAFLNPLILEIRIHILEKYESLIVETPLPVPVSQLQIIPQEQSDETDQRYAESPVNETALELQDFNSEEIDRYFRPCTVDPNSKDAFVSFHGNKDVRRLSSAKYYNMNGSANRLKLEQDRKIEQGVQTIETNIPSVKSAVADKYITHVKYMMQHKDTLFNFYNFQTARVKWCNYIGKQRALQDALNILINESKKYNKGRRKKTRKNKRKRSKTATKYQSSTPQASSRRGKRASRNHKEKFEEGDKSKIPLIFFGDGLKNKSHVKISGHRHGVSEMKYKQLKLREKLGKLLLLDIDEYKTSKNCNNCLESSLENLKHKSGTDNRSIHQIFFCKKCNIRWNRDVMATKNMYTIATSIWRGDGRPDVFKRQSATSNVVATPSPAMVKRCLQVSECLKVNFDSFEKKN

SEQ ID NO: 2774 - protein, 282 aa, Mucor saturninus
MLHSQSISVKPKSRFVVSNELRERLKKDRVLVQGIDPGIVTTASINCVKADTLFESINRFYMLENEVSDIQHSQVRDYSYVHTASKVNAAVLATNHRIRREKRQKEGKTEKPISLERSRVTRKIRTKRYHKKNCSRYRSGMFKSHVLDKLRSSLKRLECVEKDETFIVDEYKSTVNCSSCFEPTKKQIIRVGDHGRKRIKGAVTCTNEICPRRLSSRSSTINRDQNGAMNIALIGFCHLVSEDSLTLPPFRRSNNNSSKFHLSKNFQRTSLATLRSSGVPDN

SEQ ID NO: 2775 - protein, 789 aa, Mucor saturninus
MNQPAGGNRGLKRKETFEVKKEKSVAKRNRTTASSSSSTLICKSCDTSGHSSARSKLCPNHNYTLQELIEKDIGAKYQRYTISIPLKGFLNETDDDDDRLQKAVNKIQDLSSFLRLVLFKAQIFVNDYILQYPNNLSNEFFQQNFWYSLCRVVCKQLSIKDFQLKYATIHHLEDAWMELNNLEGVNLNVEKDGLKNYGQVLATACETTATCYNNYYIENFQNIICNYFIYMICKEFPDVKKSVIRKLVYEHVLDQVLSSDPVAVLNDDILPPLSQETKNGLQTFINPLIVELKNRLPSFTITKATQNTAPFGILPALRHILSKYESIIAENSTLQKRDSETGKPQDTVQSGEKKKKDDKAKHFVLPRIFSLFPNPGLQWRFIKIDSQNVTGIFPGSKLKKEKDETLFCFTQRYFYDCFNFAKLKIRSLKDLKELPATNGKMFLNGMYTDGYTCRLLFCRRTEPSSLIKSIALELDDFNTEEVNTYFRPCTIDPGRKDVFVSYHGDNDVRRLSSKEYYNMGGVTQRHKQEQELKKSLGIDQIETNIPSPKTTSHDTYILYITYILQHIDTLFNFYGFRTTNSRWCNYIASQKSIEDAVNILLNGSTKYNKKRRKNKKKSKKRRRSKIVDSLKSKPKIIKREHKEKFEEGDRNKMPLIIFGDGLKNKSQTKFKGLRSGVTDKLYRQLKRREKLGELLLVDINEFKTSKTCNSCFSNDLKNMRCGTDEKSSHIHQILICKRCNIFWNRDVMAAKNMLAISQSIWDGQGRPTVFKRLNATSNVVTSSHSSEEK

SEQ ID NO: 2776 - protein, 821 aa, Mucor saturninus
MRIPIYPDTEGFIKLKKQHLYEKLQQQEIEGIAVHNNFKGEAKEKKGIKRKDTAEEKHNKSAAKRARNSHLVIAAAISCKSCGESGHSSARMSIPLRSFFPTSDDDAFNNTLNKIKSLSMFLRNVIYRAQLFINYYILKYPADLPNEFFQQNFWYSLCRLINENMSIESFKQKYISHIPHLEEIWTELSGLEGVSMLVKKEGLTNYGQVLASACENVATCYNNFYTENFENIVSNYFIYMIRAEFQDLRMSYIKSIVYGHILEILFNVQPSTLPENIGSSVNKETQDKIRKFLNPLIVEIKNRLPPAPITKATLNKAPFDIMPVFRHILSKYESMIEANQEVTTSIQLPLTLPQQSDLLQQTEDSNQSRKRPKKKKSSIKNKISNAHKDKEKRFQPPRMFSLFPNPSFKWRFIKIDNQNLHGIFGRRIRQVQEETPFSFAQRSFFECFDFRKLKINSLAELQSLHEKGRMFLNSFYTDGYTCRVSFCRKKKPVSSLENVTLTLNNFNSEEVQQYFRPCTVDPNRKDVFTSYHGENDVRCLSSSEYYNMNGVINRQKQELERKKSNNIEHIETRIPSPKTTGADNYKRHITYMFQHFEALITFYDFQTARIRWSNYIGNQKATDHAINILINGSTKYNKNRRKNTRRNKGKRRKLNSRYTRDLSNTKQSKKGKQVARAFKEKFEEGDKSKMPMIIFGDGLKNKSHVRFKGLRHGVIDKLYKQLKRRENLGELLLLDIDEYNTSKTCNGCLVKNLENLKCGGHKIHQILNCNNCNIFWNRDVLASKNMFTIATSIWSGNGSPSVFQRQSATSNVVAAPSSVTA

SEQ ID NO: 2777 - protein, 344 aa, Mucor saturninus
MAITSRPTNMTLLPQNSQIEINAYNALRPVLDSYAQPENHFMAFVQLARLFETLGLSPFRCFLLRRSWSPVYVQIDSKILCQNILNIRWSNNIDKLDYWKQVVDLNGKLFKAQEESKLLRFCGTIQIDGVGVTVLKKRIDKQSSYTSTIKEADEKFKKSKKYRNIVQAMKSNNPAVYQAENILAENQSSSLEMEGYRRFLERLGQNYAILNNFCGYTTASSQNPQFMLRKLRLAAYFNKQGADMQLINSLKQTFGKDAIFVLGNWSAPNALYHEPIRGIGLRPLLLRNHLSLLLIDEFNTSRCCPSCHNLSLKKFKQIDNPRPYQRSNYHLTLCHGLLRQIYLL

SEQ ID NO: 2778 - protein, 821 aa, Mucor saturninus
MPRTPIYPEVEKFIILKKRAKLKKVKSDSAKESSTTQTPKRTSTKRKDSPNVIIAKKSTKRSRQASTSAAVFSSSKCSSCQEEGHNSSRSRQCNNYNLNISELLQIKLRPNYQRYTLSVPFDTFCFNTQNKTSSLKKIKDISSFIREVLFKAQLFVKFFILQHPTKLTNDFFEQNFWYTISRVIRGSSNEVRSILQAYKDKKKERPAGQNLDVAQLISSFAELSATMNGNLFVPESGLKNYGQSLSTACEIVATTYNNYYIENFENIICNYFIYALKTKYANAKVGSIKKLVFNHVYDQVFTHPQLSSIHVDILAFFDPDVGNNLTSFLDPLILEVKNRISTLPLSKESLNNEPFKILPVLRYILKKYDDIYNAQATQNEKIDSMKSPLPRRFSLFPNPSLHWRFIKIDSQNLSGIFPDAKQNKQPNESSFDHQQRCFYQMFDFKRLGIQNYENLQALPEQKERMFLNGLYTDGYTCRVLFARKVFPSPPEEKIRLELDDLSSEEVNKHFRPCTVDPGRRDPFVSYHGGSDIRRLSSSEYYNMGGNVTRMKEQQKHKHRLGIEKIETDIPSPKTASVEQFVSYITYMSQHMNTLFDFYDFETAQVKWLNYLSSQKAIQESVNILINGGKKYNKDKRKETRKNRKRRKKNRRPRTNPVERTLITAPKSKSKKNKACFEVGNNSKMPLVVFGDGLKNKDHVKLKGLRHGISNKIYSQLKLRERIGELLLVDINEFKTSKICNCCLQPNLENLKVSQDDHTKKIHQVLKCITCNIYWNRDVMASKNMFTIAHSIWNGNDRPTVFKRQTATSNVVASAHSSESTA

SEQ ID NO: 2779 - protein, 633 aa, Mucor saturninus
MLKTPVWPTNMVSSPALTEYLLALIMMFKVSSVHTPLTVSKISENPGIVITSLFKILRATEMSNVAQTVAAEEPQDSVSLPWVYNMLSITCENEVEDINKRRRSALARKIRNAINSTTPVALSKPSFLSEVNFNKVQENVLATRLQLAQSRIYLSDPETRDPDVIIPERKDCFIPENFSIHHSLKTFSMMPHYGLKRQYVTIDITTLRSLVNRSDIIKRIAIYDQSLDAYARDSTYFMSLFDLKKLGQSGSVTEMLNRRKVMMRNILCTDGRSADFLFTRPAVPKDNKDIRLEMNDFETWEMQDVLRLWGADPGVTDIFVASDGNGNDAHEIRSISTAEYYVKAGYKKNQVTTKSLKQEEGITTIETNIPTHRTSKLSTFEQHLQYYFTHLDTLLQFYDGRFTDLRFSNYRGQQRMDNELVNIFCSGGKKYNPDEKAHPCRNKADYKQRREKKKKKKNKKKMTLQVGKSSLSAPATAYTTVSVTTSGPSTETQNQKWKKAPFKNEKKVPLIALGNAVFNVTMKGKQSGMLHRLRKKMEEASADERLILVYTDEYLSSQMCSNPSCLLKTLENVRIPDVGKIHNLLTCNSCNKLWNRDTNAARNIYSIASFMQKNNNLRPSRFQRPATDPQSSI

SEQ ID NO: 2780 - protein, 244 aa, Mucor saturninus
MAILSHSSSRDIRNGCTVWGVDSGIIDLITAVDSSGDKERQRTTSLDEYYHLCGYNQATFQRYKHQSQNESVFQLISQLPSLKTTNSHDFLLASKKRFVDYDILCNYYNNDNWSSKLKFKTYIKKQIKAVEEICKRLVVGSKKYGRESKTGIKTATENTSIHYPNALQDAEKLLTSTVIAFGDATFYSSMRGNKAATVKLIKKKLQQMRGGTIQICFIDEYLTSQVCNVCKNRTLENVSTATPK

SEQ ID NO: 2781 - protein, 680 aa, Mucor saturninus
MDSDRSLSGTPGTPGSNMSTSSSLAPGDRIISVKSSIDGIGWDPERRERLEEYVVTVHNITTHAYSLSKYIFLRAIQEDENFDIRRCINRDFFAEVWLKLTRYARGRAGGRTAATRAFIDTYLDDYLEVTGFVPPDFRYGQQASLIEGAKIFTSYSNNVQMRLGSHLRQAVNHLLRIRQRKAELIAYRRREGLIDALIKSEVYREITEPATRFKELIARRLPQDFVLDGEQFGDPIYNNALETLRPVLTSYPVDYRFRGNSIYYDSKGRPVEHMRAFYELALSFIDIELPVFNCFPLRRSWTPCYTTIDSKILCQNILGRRWTNRQDKIALWREVINLNSDALKHQENGELQFRGTIQTDGVGVTVIKKRMDRESRYTARFAVVVESIQYISQEIAQETVGRCVTIDPGRRDLLFCVHENSTANNPNKFRFTKQYGDKFEKIKKYRRIREAVKPARVAAAERLLVNYDSLNRDEFEQYLENRSNMTDIIQNHYVNFRTNHRTAHPLHRKLRLFAYIRRQQGNEDLISKLDEQFGVEAVYVMGNWSSPNTRFHEPVRGLGFRRLLQKAGKRVYLIDEFRTSQCCPACERRSLETFRMVDNPRPHRRRANPRVIRHGLLRCTNQNCRAMTNNTNRIVPRLWNRDMAACLNMVDIVRSLRAGNGIPPRFRRGEAPQNQSKNPK

SEQ ID NO: 2782 - protein, 821 aa, Mucor saturninus
MPRTPIYPEVEKFIILKKRAKLEKVKSDSAKESSTTQTPKRTSTKRKDSPNVIIAKKSTKRSRQASTSAAAFSSSKCSSCQEEGHNSARSRQCKNYNLNISELLQIKLGPNYQRYTLSVPFDTFCFNTQNKTSSLKKIKDISSFIREVLFKAQLFVNFFILQHPTKLTNDFFEQNFWYTISRVIRGSSNEVRSILQAYKDKKKERPAGQNLDVAQLISSFAELSATMNGNLFVPENGLKNYGQSLSTACETVATTYNNYYIENFENIICNYFIYALKTKYANAKVGSIKKLVYNHVYDQVFTHPQLSSIPVDILAFFDPDVGNNLTSFLDPLILEVKNRISTLPLSKESLNNEPFKILPVLRYILKKYDDIYNAQATQNEKIDSMKSPLPRRFSLFPNPSLHWRFIKIDSQNLSGIFPDAKQNKQPNESSFDHQQRCFYQMFDFKRLGIQNYENLQALPEQKERMFLNGLYTDGYTCRVLFARKVLPSPPEEKIRLELDDLSSEEVNKHFRPCTVDPGRRDPFVSYHGGSDIRRLSSSEYYNMGGNVTRMKEQQKHKHRLGIEKIETNIPSPKTASVEQFVLYITYMSQHMNTLFDFYDFETAQVKWLNYLSSQKAIQESVNILINGGKKYNKDKRKKTRKNRKRRKKNRRPRTNPVERTLITAPKSKSKKNKACFEVGNNSKMPLVVFGDGLKNKDHVKFKGLRHGISNKIYSQLKLRERIGELLLVDINEFKTSKICNCCLQPNLENLKVSQDDHTKKIHQVLKCITCNIYWNRDVMASKNMFTIAHSIWNGNDRPTVFKRQTATSNVVASAHSSESTA

SEQ ID NO: 2783 - protein, 273 aa, Mucor saturninus
ENIDIDDQLVLNDLTFSGTDNGIVTITEISHFRLDRFKFHLNLQNRYSLLSDSKEGHDVGSLDENTLQYLNIPKIFKIKSSTIHYKGGAQKLRDGLRRAKASHDDTIVQEVEAELSQHSFAHADNVSDEQKKNETMNCDIVHTSTDFVLWRDKPSRPPNQVHKGHSIQSEINSRYTSVCVTNEHNTSQSYVFCFSKTSHVPHSPINGNYVIQTIDGTSMCYNLERISVHHGHSHKGRDTVSILVIGLTGLANLILETTFSPSHPNISHSNTDS

SEQ ID NO: 2784 - protein, 614 aa, Mucor saturninus
MELNNLEGVNLNVEKDGLKNYGQALATACETTATCYNNYYIENFQNIICNYFIYMICKEFPDVKKSVIRKLVYEHVLDQVLSSDPVAVLNDDILPPLSQETKNGLQTFINPLIVELKNRLPSFTITKATQNTAPFGILPALRHILSKYESIIAENSTLQKRDSETGKPQDTVQSGEKKKKDDKAKHFVLPRIFSLFPNPGLQWRFIKIDSQNVTGLFPGSKLKKEKDETLFCFTQRYFYECFNFAKLKIRSLEDLKELPAINGKMFLNGMYTDGYTCRLLFCRRTEPSSLIISIALELDDFNTEEVNTYFRPCTVDPGRKDVFVSYHGDNDVRRLSSKEYYNMGGVTQRHKQEQELKKSLGIDQIETNIPSPKTTSHDTYILYITYILQHIDTLFNFYGFRTTNSRWCNYIASQKSIEDAVNILLNGSTKYNKQRRKNKKKSKKRRRSKIVDSLKSKPKIIKREHKEKFEEGDRNKMPLIIFGDGLKNKSQTRFKGLRSGVTDKLYRQLKRREKLGELLLVDINEFKTSKTCNSCLSNDLKNMRCGTDEKSSHIHQILICKRCNIFWNRDVMAAKNMLAISQSIWDGQGRPTVFKRLNAASNVVTSSHSSEEKV

SEQ ID NO: 2785 - protein, 404 aa, Mucor saturninus
MEEKSSKFASKGYVYRKLKELPFTSAMNRRKFSSLLEETLQSINSSKAFVQGRKLSQLSPQQLFNFPKLGFRTRESLTTGKKTFNNVITTDGYSVSFLFTRLVKRSIALKSNPTDFVSDIRNGCTVWGVDPGIIDLITTVDSSEDKERQRTTSLDEYYHLCGYNRATFQRHKHQSQNESVFQLISQLPSLKTTNSYDFLLASKKRLVDYDILCNYYNSDNWSSKLIFKTYIKKQKAVEEICKRLVVGSKKYGRGSKTGVKTATENTSIHYPYAPQDAENPPTRTVIAFGDATFYGNMRGNKAAPVKLIKKKLQQMRGDTIQICFIDEYLTSQVCNVCKNRALENVSTAKSKRRVHSVLKCNNNSCNIVWNRDINAAKNIFDIIMFAAHNNNRRPPAFERPEQAT

SEQ ID NO: 2786 - protein, 451 aa, Mucor saturninus
MNMSAFIDTYLDDYLEVTIFVPPDFRYGQQVSLIEGEMIFTPYSNNVQMRLGSHLRQAVNYLLRIRQREAELIADRRREVLIDALIKSEVNREITEPATRFKELIARKLPQDFVLDGEQFGDPIYNNALEILRPVLTSYPVDYRFRGNSIYYDSKARPIACFAVVVESTQYISQEIAQENVGRCVTIDPGRRDLLFCVHENSTANNSNKFRFTKQYQDKFEKIKKYRRIREAVKPARVAAAERLLVNYDSLNRDEFEQYLENRKLRLSAYIRRQQGNEDLISKLDKQFGVEAVYVMSNWSASNTRFHEPVRGLGFRRLLQKAGKRVYLIDEFRTSQCCPDCERRSLETFRRVDNPRPHRRRANPRVIRHGLLRCTNQNCRAMTNNTNRIVPRLWNCNMAACLNRVDIVRSHRAGNVIPPRFRRGEFPQNQRRRARTQNEQANIRNIRQRRN

SEQ ID NO: 2787 - protein, 773 aa, Mucor saturninus
MPRTPIYPEVEKFIILKKRAKLEKVKSDSAKESSTTQTPKRTSTKRKDSPNVIVAKKSTKRSRQASTSAAAFSSSKCSSCQEEGHNSARSRQCKNYNLNISELLQIKLGPNYQRYTLSVPFDTFCFNTQNKTSSLKKIKDISSFIREVLFKAQLFVNFFILQHPTKLTNDFFEQNFWYTISRVIRGSSNEVRSILQAYKDKKKERPAGQNLDVAQLISSFAELSATMNGNLFVPENGLKNYGQSLSTACETVATTYNNYYIENFENIICNYFIYALKTKYANAKVGSIKKLVYNHVYDQVFTHPQLSSIPVDILAFFDPDVGNNLTSFLDPLILEVKNRISTLPLSKESLNNEPFKILPVLRYILKKYDDIYNAQATQNEKIDSMKSPLPRRFSLFPNPSLHWRFIKIDSQNLSGIFPDAKQNKQPNESSFDHQQRCFYQMFDFKRLGIQNYENLQALPEQKERMFLNGLYTDGYTCRVLFARKVLPSPPEEKIRLELDDLSSEEVNKHFRPCTVDPGRQDPFVSYHGGSDIRRLSSSEYYNMGGNVTRMKEQQKHKHRLGIEKIETDIPSPKTASAEQFVSYITYMSQHMNTLFDFYDFETAQVKWLNYLSSQKAIQESVNILINGGKKYNKDKRKKTRKNRKRRKKNRKPRTNPVERTLITAPKSKSYSKKNKACFEISISLRHRRLICNCCLQPNLENLKVSQDDHTKKIHQVLKCITCNIYWNRDVMASKNMFTIAHSIWNGNDRPTVFKRQTATSNVVASAHSSESTA

SEQ ID NO: 2788 - protein, 1151 aa, Mucor saturninus
MLFSTRSKPIQIYPNGNQDNTLRCFYILEHKDSYLGKCTYYALKAVGKPLSIEKNQADHSKDHFMAIKRQESEKKPRKEAHKLGKTLDDLILKLLAEETNKMYSKKWEKFSNKNGKHKSIEDFRSSLSSKQLPTGVIPIVKAKIEVMLRRNEIESMSAEDIPSSGMWLHRKVTSLKTQEKLSVERLINNYMEVLKDNYKEPAVEHEPEPINDEHESKPDGLTDFTKPEELIRTVGKTLKGVINKNFDYKILKDRLEQLQNSCHASIYGLSKALNALIHLIITGGLDSDINTHDVFRFKDVDFGNDGIGETEKDLVYLSEQSLKSLCDEKTFSYNGFWNIMSHCIGEKFPNKNTDILKAIIQQLNSNDAYHFTTTPALASACKQYFVNFENMWSHDQYRQDLRVCITLLLRINLARSRFFNKKKYEAKKIDDSKKSQVVSKKFKAKKSVTQKMEALFKLLIKFQGSKYRKMHCIAKILKNLFSSTDCTIPPCYDDRKSNDESPGVADAENKDEHEEDLQSSDDEDDDFVVSEDTIVLDNATINRDLTARETNALIAVVMMLCSSETIEGDVSPEYIKRQLYKDKQETIPQEALVLCSKVVNNLRRISLKKDAEASFINCYKMRYLRNVLVNFAGAKTKFKKRRYYPVIEEKRVSSVFVNYATLYTLFCKDYNIFNSEGDMYTSVHDIKETQDKQFVFKNFFDWCTVDRIMKEQKMTFGFSFYYSNQYDLQFVGSKKSINKDLQKTPIINQEQPCLVIDNGQIEKEIKQLNDAIKIQKKEYAALGKSIRVEEWNRMNLGRSFRAKEKSNHPWDTKLYKQLKEKRSDCDNIYSQLRKLNSSLKDLRYRMFALNKARHRQSLPISTNSLQIPDKIKADLKNNRLLIQGVDPGIVTTAAISCVKSSTLFESLNRFQMLENHEPCTVPISNQKGYEYDYTANKINQAVLSNTHRLQREKKKKYDIEKNRLTRKIRLNTYHKKHYSATRRDIFSYHGWKRGSILSFVGNWSGKGAYIRGHTRRSMKPILNRFNSVADDHIAVVDEFKSTITCSSCFEVTTKQVVRVGEKRVKRIKGAVTCTNHNCPRRLSPTRRTTVNRDMNGAINIALIGFSCVVSNNSLTLPPFRRGTYNANKFNLSHHYQCASLATLESPVVPET

SEQ ID NO: 2789 - protein, 821 aa, Mucor saturninus
MRIPIYPDTEGFIKLKKQHLYEKLQQQEKEGITVHNNFKGEAKEKKGIKRKDTAEEKHNKSAAKRARNSNLVIAAAISCKSCGESGHSSARMSIPLRSFFPTSDDDAFNNTLNKIKSLSMFLRNVIYRAQLFINYYILKYPADLPNEFFQQNFWYSLCRLINENMSIESFKQKYISHIPHLEEIWTELSGLEGVSMLVKKEGLTNYGQVLASACENVATCYNNFYTENFENIVSNYFIYMIRAEFQDLRMSYIKSIVYGHILEILFNVQPSTLPENIGSSVNKETQDKIRKFLNPLIVEIKNRLPPAPITKATLNKAPFDIMPVFRHILSKYESMIEANQEVTTSIQLPLTLPQQSDLLQQTEDSNQSRKRPKKKKSSIKNKISNAHKDKEKRFQPPRMFSLFPNPSFKWRFIKIDNQNLHGIFGRRIRQVQEETPFSFAQRSFFECFDFRKLKINSLAELQSLHEKGRMFLNSFYTDGYTCRVSFCRKKKPVSSLENVTLTLNNFNSEEVQQYFRPCTVDPNRKDVFTSYHGENDVRRLSSSEYYNMNGVINRQKQELERKKSNKIEHIETRIPSPKTTGADNYKRHITYMFQHFEALITFYDFQTARIRWSNYIGNQKATDHAINILINGSTKYNKNRRKNTRRNKGKRRKLNSRYTRDLSNTKQSKKGKQVARAFKEKFEEGDKSKMPMIIFGDGLKNKSHVRFKGLRHGVIDKLYKQLKRRENLGELLLLDIDEYNTSKTCNGCLVKNLENLKCGGHKIHQILNCNNCNIFWNRDVLASKNMFTIATSIWSGNGSPSVFQRQSATSNVVAAPSSVTA

SEQ ID NO: 2790 - protein, 206 aa, Mucor saturninus
MNISSDLKDVVSKLRLKDALESNRLAINGIDPGIHSTALANCTSAKTNVISIKRYSVLNGLIKAENVALEDDYKASVLDITPTFLHGASLYKNHRRKRESRTKKGITTHPKQLQKDRLTRKIRSDIFLKKMISNQRKQVKSKIIVNFVGNWGGDATKIKDIIRSSLKPVISRLKAVENDMTLTVDEYGLTIHCNSCFKKMRLQCHR

SEQ ID NO: 2791 - protein, 238 aa, Mucor saturninus
AAERLLVNYDSLNRDEFEQYLENRSNMTGIIQNHYVNFRTNHRTAHPLHRKLRLSAYIRRQQGNEDLISKLDEQFGVEAVYVMGNWSSPNTRFHEPVRGLGFRRLLPKAGKRVYLIDEFRTSQCCPACERRSLETFRMVDNPRPHRRRANPRVIRHGLLRCTNQNCRAMTNNTNRIVPRLWNRDMAACLNMVDIVRSLRAGNGIPPRFRRGEAPQNQRRRARPQNEQANIRNVRQRRN

SEQ ID NO: 2792 - protein, 922 aa, Mucor saturninus
MSLNDTYKNKSVREIIQMMKERKKRAIQAKEEGEEENKEEDNEGEYEEYAEDPGPSTPVKRRRQSRNRKYQELFEKKMEKQVGRLQKKSKVVAGDGAKKCKRCTEAGVYNEERAHTTTRSPLCPFHQTTKQEAITAALETKITSTFTRKIGLEASLTSNMDGEAKTIFCDNVLTLVNFMRETAIKSMLFANFYILKLLQKNKADDDWVLPMIFFSPVFFKSCQQLVCGRDMSSNNTMFDKADIIESFRQYKLLYPGGSQVSTDTGGIFYSSAQSSLATQSATIFSNHVVESFEKRMKSYFIFCLASFKFTKPEKVAVAEYLFNKCTMLKTPVWPTNMVSSPALTEYLLALIMMFKVSSVHTPLTVSKISENPGIVITSLFKILRATEMSNVAQTVAAEEPQDSVSLPWVYNMLSITCENEVEDINKRRRSALARKIRNAINSTTPVALSKPSFLSEVNFNKRPRCYYTERKDCFIPENFSIHHSCKTFSMMPHYGLKRQYVTIDIATLRSLVNRSDIIKRIAIYDQSLDAYARDSTYFMSLFYLKKLGQSGSVTEMLNRRKVMMRNILCTDGRSADFLFTRPAVPKDNEDIRLEMNDFETWEMQDVLRLWGADPGVTDIFVASDGNGNDAHEIRSISTAEYYVKAGYKKNHVTMKSLKQEEGITTIETNIPTHRTSKLSTFEQHLQYYFTHLDTLLQFYDGRFTDLRFSNYRGQQRMDNELVNIFCSGGKKYNPDKKAHPCRNKADYKQRREKKKKKKNKKKMTLQVGKSSLSAPATAYTTVSKWKKAPFKNEKKVPLIALGNAVFNVTMKGKQSGMLHRLRKKMEEASADERLILVYTDEYLSSQMCSNPSCLLKTLENVRIPDVGKIHNLLTCNSCNKLWNRDTNAARNIYSIASFMQKNNNLRPSRFQRPATDPQSSIS

SEQ ID NO: 2793 - protein, 565 aa, Mucor saturninus
MKENGSDEKAIKSAIQSKIYGPCNQISRAVARKEIPAVSILDDQSRKELNSVFSCYPKDYTFQKDSIYYDIAAKPENHFDAFFQLAKLVEAKTGKVFICFPLRTSFIPCYMTLDAKIIHFHILKNESLLQAGKKFKIWGSVVNFEKKAFKNQGVDKTLRFQGTLETDGVGVSIIKQNTDTSRKFFTTSVKRVVDDQEQYIEGLNQADLKPVLKTKTSTVKEKQTLIFTKNNRSKCSRHFRYLRNQNKPLVVQEAETTLSKTESKSTNLEKYIQYIKARSFVNDTLTDYYGNETLKPQEISYFPESEFSFRVDHKCNLYYGNIFISRICGFFPQPQNFSNDRIINPQFYAVYLEMMLSQKHISQRFDDDVKRRIIALGLEINRRPNQSDLNRKTFSTFLEKLQLLPFRKMKFSLKMFYEQNDQKLVQNLKRKFGPDAVLVLGNWSAPNTKFQEPTRNKGLIQMLKKNGLTVYLIDEFKTSSHCPDCGDVLEQFKMISNPRSFRRNTMPIVKCHGLLRCQNTACVTQGRKFWNRDQAAVLNFKHILFNLREVGERPALFSRKNEQTQ

SEQ ID NO: 2794 - protein, 669 aa, Mucor saturninus
MDSDRSLSDTLGTPGSNMSTSSSLAPGDRIISVKSSIDGIGWDPERRERLEEYVVTVHNITTHAYSLSKYIFLRAIQEDENFDIRRCINRDFFAEVWLKLTRYARGRAGGRTAATRAFIDTYLDDYLELTGFVPPDFRYGQQASLIEGAKIFTSYSNNVQMRLGSHLRQAVNHLLRIRQRKAELIAYRRRTYRRLPQDFVLDGEQFGDPINNALETLRPVLTSYPVDYRFRGNSIYYDSKARPVEHMRAFYELALSFIDIELPVFNCFPLRRSWIPCYTTIDSKILCQNILGRRWTNRQDKIALWREVINLNSDALKHQENGELQFRGTIQTDGVGVTVIKKRMDRESRYTARFAVVVESTQYISQELAQETVGRCVAIDSGRRDLLFCVHENSTANNPNKDEFEQYLENRFNMTGIIQYYVNFRTNHRTAHPLHRKLRLSAYIRRQQGNEDLVSKLDEQFGVEAVYVMGNWSSPNTRFHEPVRGLGFRRLLQKAGKRVYLIDEFRTSQCCPACECRSLETFRMVDNPRPHRRRANPRVIRHGLLRIVPRLWNRDMAACLNMVDIVRSLRAGNGIPPRFRRGEAPQNQREEQEPKMNKQTLEMFVNVATKIFQACYRRSTIDTLKWGSESARSYDNIKVKSKREAEIKYANPTLQLRAPWMSLRDPLNM

SEQ ID NO: 2795 - protein, 373 aa, Mucor saturninus
MKKLRNVIVLYASNCGYRISPKQLNLCNVSHYDDKEYESIHVTSKGLYKETDNSVRKFTSVASTSSNKKELFRNFFNVDYLLKRFKQQNLDPRTVNNQTTTLKSSFEKSKPHEATTQEKEDAKKLSDDIEADKAKLKNLSSTLKVLEIKRLQEASAFRKEEKKKNGWNTVLCRELKRVRTEFNSTYKEIVEIEATIRQNSTQLYELNKLVYNKRDDTMNISSDLEDVVSKLHLKDALESNRLAINGIDPGIHSTALRKQVKSKTVVNFVENWGGDATKIKGIIRSSLKPVTSRLKAVDEYGSTIHCNSCFKKMRLQCHRRDNMFKRIKGAVACYNTKCPARLQRHTTVNGDANGAKNIGLIGFSKLVSSDGTV

SEQ ID NO: 2796 - protein, 679 aa, Mucor saturninus
MFSDEQKYISDSSEKMIQPNRKETFEAKKEKSVAKRNRSTASSSSSTLICKSCDTSGHSSARSKLCPNHTYTLQELIEKDIDVDDDRLQKAVNKIQDLSSFLQLGLFKAQIFVNDYILQYHNNLSNEFFQQNFWYLLCRVVCKQLSIRDFQLKYANIHHLEDAWMGLDNLEGLNLNVEKDGLKNYGQVLATACETTATCYNNYYIENFQNIICNYFIYMICKEFPDVKKSVIRKLVYEHVLDQVLSSDPVAVLNDDILTPLSQGTKNGLQAFINPLIVELKNRLPSFTITKATQNTAPFGILPALRHILSKYESIIAENSTLQKHDSEPGKSQDTVQSGEKKKKDDNANHFVLPRIFSLFPNPGLRWRFIKIDSQNVTGILPGSKLKKEKDETLFSFTQRYFYDCFNFAKLNIRSLKDLKELPATNGKMFLNGMYTDGYTSRLLFCRRIKPSSLIKSIALELDDFNTEEDVSVSYHGDNDVRRLSSKEYYNMSGVTQRHKKEQELKKCLGIDQIETNIPSLKTTSHDTYILYITYILQHIDTLFNFYGFRTTNSRWCNYIASQKSIEDAVNILLNGSTKYNKKRRKNKKKSKKRRRSKIVDSLKSKPKIIKREHKEKFEEGNRNKMPLIIFGGGLKNKSQTKFKGLRSGVMDKLYRQLKRREKLGELLLVDINEFKTSK

SEQ ID NO: 2797 - protein, 1329 aa, Mucor saturninus
MKRKSQVDDKRSIHSHFLFTCQVLNINLLLLTDVRQKPVPLPLEYSHGKSSSTEGSSDGDVSLKFYCLNSNIASYTSSTSDNTRLSELLETAVSNFEVPFNDNKSRLRNYFFSHQLKIIPNAGQLAFNNNLATNVVPTVQQLVKILNNGADNPFIIKSKKYDEKIIVPKGNLLLYACGRIYNCRIYLFSSRSKPIVIHPPSNSQLDKTNVSNIAIFKYCDSFITEWFSLELRKKPGVYVKKPSNVVSTTTTLAAEKRQVGEKKPRQAYTKIGNDLDDEILCLLEEEVKFLYRKKWSSYQTKQKNKSNMIQKCSESLSRKSLPTGAATVIKAKLEQKIKSNQFDTFKEADIPASGLWVQQKINRLKQQGKFTVDGFINNFIAEITNQQSLESTSESSSRTSIPSFESENDTEICIANTDLIDVDYRTVSRSLKRVIHKDFDYNIFLQSMENLQNECTLSMHGMSQAIGSLSESIISGAIFSSKPKFYFDYSCTGLNDLEAHLRKTPIAILGPAEKEFLDDSGILAYLGFWSVLSYCVGGKLNLKNKHPAIEFIKSNLEARHMHDFVTTPTISYACRQYYTNFTNMWTYQKYMQDLKVVVTLIIRANLCKQRFFSKPSMVASKASSSKEFSSGKKKIKKLFIMNELFECLLKYNQHKKRGKLFVIKQLMEKLFQTADTASDKENTMMVTKLSSVDADMSFFEDEDECEDEADLLVESNSDLNDDKSITLDNTQKDLTAKEVRALSTVCIMLIQSSTIGNEVDAKNIFEKLYLDTQESIPRAALDFCAKLVNGLRKIRCKKEEECLGSFFGMRKLRNLIVGYAKEHYKRNRMGVCSLYPISDKKISIRVDSKSLYLLFAKSYNMYKSENTYFTNYLDISTENDKRLIFSNFFDISYLERILKEQKLHPTFSFIFSSRYSLQFLGVKSTLKSYSILDLKARAELEEAPKNNDGLNDIVNVKEAVRNLNVGIKESKAKQARLSRLLLPLEKLRMDQARNFRIEERGKDKWDEKKYNDLKEARANCDKIYSELKSVRATISNNQTEMYRLNKILHKQPLPADNINKEVISDKDITSLAKGEIAVQGIDPGVVTTASFKGVSGSLLFESINRYTALKNLDPVESATNEKQVSLEFTAKMVNNATFSTKHRQERHRRENQKIQTDVSYLEKKRLTRKIRTKKFYQVFFSRHRKRLVTSVGKGNNNAVWSFLGNWSGITTFMKGHTRRSLKPVITELQKTEKDKFMVVDEYKSTVTCTSCFETTTKQVVRRGDTIKRIKGAVVCVNKDCPRRMHNNSTTSNRDQNGALNIALIGFSALVSEDGLTLPPFRRGVHNPNK

SEQ ID NO: 2798 - protein, 874 aa, Mucor saturninus
MLKRNEVESMSAEDIPSSEPAVEHEPEPISDEHESKPDGLTDFTKPEDIIRTVGKTLKGVINKNFDYKTLKDRLEHLQNSCHASIYGLSKALNVLIYLIITGGLDSDSNTHNVFRFKDVDFGNDGIGETEKDLIYLSEQSLKSLCDEKTFSYNGFWNIMSHCIGEKFPNKNTEPMQQLNSNDAYHFTTTPALASACKQYFVNFENMWSHDQYRHDLRVCITLLLRINLARSRFFDKKKYEVKKIDDSKKSQVVSKKYKAKKSLAQKMEALFKLSINTDCTIPPYYDDIKSDDESPGVADAENKDEHEEDLQSSDDEDDDFVVSEDTIVLDNATINRDLTARETNALIAVVMMLCSSETIEGDVSPEYIKRQLYKDKQETIPQEALVLCSKVVNNLRGISLKKDAEASFINCYKVRYLRNVLVNFAGAKTKFKKGRFYPVIEKRVSSVFVNYATLYTLFCKDYNIFNSEGDTFTSVHDIKDTQDRQFVFKNFFDWCTVDRIMKELKMTFGFLFYYSNRYDLQFVGLEKSLNKDLQKTPIINQEQPYLVIDNSQIEKEIKQLNDAIKIQKKEYAALGKSIRVEEWNRMNLGKSFRAKEKSNHPWDTKLYKMFALNKARHRQSLPISTNPIQIPDKMKADVKNNRLLIQGVDPGIVTTAAISCVKSPTLFESLNRFQMLEIMSPNKINQAVLSNTHRLQREKKKKYGIEKNRLTRKIRLNTYHKKHYSVTRRDIFSYHGWKRGSILSFVGNWSGKGAYIRGHTRRSMKPILNRFNSVADDQIAVVDEFKSTITCSSCFDVTTKQVVRVGEKRVKRIKGAVTRTNHNCPRRLSPTRRTTVNRDMNGAINVALIGFSCVVSNNSLPLPPFRRGIYNANK

SEQ ID NO: 2799 - protein, 833 aa, Mucor saturninus
TRNDSSDDDFQPPILGRKRRSRENTPYIDSQKKFKGKGKAAEHEPDITSTIGIPDSTRNVVSDNLIDYSSDDFNESPPAIHTLRSHGGFKYGSEFTVAESSSSVSKRRPVASNRSPTPEVFITASESSTSVTARDSEKISKRVITVKTTAKNIWKPLYLQPLYDLVNTTNSLITHTFAFTKQLIAKHKEAYFQDANYTPPSLPNAQQIALYGCTKIQTAYHNNIKAHFGNRLRQFVNIILQKRERANNLRKEMKENGSDEKAIKSAIQSKIYGPCNQISRAVARKEIPTVSILDDQSRKELNSIFSCYPKDYTFQKDSIYYDIAAKPENHFDAFFQLAKLVKARTGKAFICFPLRTSFIPCYMTLDAKIIHFHILKNKSPLQVGKKFKIWGSVVNFEKKAFKNQGVDKTLRFQGTLETDGVGVSIIKQNTDTSRKFFTTSVKRVVDDQEQYIEGLNQADLKRTENKCVLIDPGRRDLLYCMKETSTVKEKQTLIFTKNNRSKCSRHFRYLRNQNKPLVVQEAETTLSKTESKSTNLEKYIQYIKARSSVNDTLTDYYGNVSLKPKEISYFPESEFSFRVDHKCNLYYDNIFISRICGFFPQPQNFSNDRIVNPQFYAVYLEMMLSQKHISQRFDDDEKRRIIALGLEINRRPNQSDLNRKTLSTVLEKLQLLPFRKMKFSLKMFYEQNDQKLVQNLKRKFGPDAVLVLGNWSAPNTKFQEPTRNKGLIQMLKKNGLTVYLIDEFKTSSHCPDCGDVLEQFKMISNPRPFRRNTMPIVKCHGLLRCQNTACVTQGRKFWNRDQAAVLNFKHILFNLREVGERPALFSRKNKQTQ

SEQ ID NO: 2800 - protein, 943 aa, Mucor saturninus
MMKERKKRAIQAKEEGEEENKEEDNEGEYEEYAEDPGPSTPVKRRRQSRNRKYQEFFEKRMEKQAGRLQKKSKVVAGDGAKKCKRCTEAGVYNEERAHTTTRSPLCPFHQTTKQEAITAALETKITSTFTRKIGLEASLTSNMDGEAKTIFCDNVLTLVNFMRETAIKSMLFANFYILKLLQKNKADDDWVLPMIFFSPVFFKSCQQLVCGRDMSSNNTMFDKADIIESFRQYKLLYPGGSQVSTDTGGIFYSSAQSSLATQSATIFSNHVVESFEKRMKSYFIFCLASFKFTKPEKVAVAEYLFNKCTMLKTPVWPTNMVSSPALTEYLLALIMMFKVSSVHTPLTVSKISENPGIVITSLFKILRATEMSNVAQTVAAEEPQDSVSLPWVYNMLSITCENEVEDINKRRRSALARKIRNAINSTAPVALSKPSFLSEVNFNKVQENVLATRLQLAQSRIYLSDPETRDPDVIIPERKDCFIPENFSIHHSRKTFSMMPHYGLNRQYVTIDIATLRILVNRSDIIKRIAIYDQSLDAYARDSTYFMSLFDLKKLGQSGSVTEMLNRRKVMMRNILCTDGRSADFLFTRPAVPKDNEDIKLEMNDFETWEMQDVLRLWGADPGVTDIFVASDGNGNDAHEIRSISTAEYYVKAGYKKNQVTMKSLKQEEGITTIETNIPTHRTSKLSTFEQHLQYYFTHLDTLLQFYDGRFTDLRFSNSRGQQRMDNELVNIFCSGGKKYNPDKKAHPRRNKADYKQRREKKKKKKNKKKMTLQVGKSSLSAPATAYTTVSVTTSGPSTETQNQKWKKAPFKNEKKVPLVALGNAVFNVTMKGKQSGTLHRLRKKMEEANVDERLILVYTDEYLSSQMCSNPSCLLKTLENVRIPDVGKIHNLLTCNSCNKLWNRDTNAARNIYSIASFMQKNNNLRPSRFQRPATDPQSSIS

SEQ ID NO: 2801 - protein, 452 aa, Phytophthora idaei
MTGYSELKQAMREQLVVNAGVIIREQFRKRLRAYVLIKFGKTGDDLTSEEEKASEKLVGQIMYACYNVEEADMLEALQMRDVIMPDGEEWSEKWIPWPDNIKKNGMEFYIRLIWEFQSVVKDRMEAVPNEKGVRALSLFPVSTYFTNLHIVINGTTLAGFLSRIRDRGQGNLMEDWNMPQMKISTASFKVMRWTVMRRAFAIGRFETRKEECHLTKTEFLQLPVEEKYEHASHLFANEIKTDRHLAGFNRFRAWNESQKRKFPDYKSVIEGIPSFKTSSYEKYPKRLDYFWQHAAFLLRFCLERPYLKWCFFQKRMARVAVDEIARRIVPTSGQGVEGGAAEARGGGFHGRVQDEQALLAVPPVTFQRAVPDPGLPQGRPETQEEEDEEKVLSRDWSRAEIKSKHCHVVLRCENEDCEARYWDRDVNAAINMLELLKSEVQGRGRMGPFRRS

SEQ ID NO: 2802 - protein, 289 aa, Phytophthora idaei
MLNSVGVANTRCELARRVAEAALVTSTRDLREEDAAREYLRLQAPRRRSRRKVRRPRRKNRKKGRSKLKLRRKRNFPKWIRRAKRARHRNNRDIVSVTTREYRHLAGFNRFHAWNESQKRKFSDYNSVIEGMPSFKTSSYEKYLKRLDYFWQHAAFLLRFCLERPYLKWRFFRKRMARVAVDEIARRIVPTVSRLTCVAYGDWSRRDGIKGHAPSPVKGLKEALRKRAMVVSMDEFRTSKICSQCHQSLSSVQYPTPVFPKGVQKPKRRKMKGKVLPRDWSRAEIKSKH

SEQ ID NO: 2803 - protein, 752 aa, Phytophthora idaei
MRRKRKYEDDQEVEIDLVADALAQLPSPSQGTTTAPPTYRLKETTKDINSSVICKLTRVCRLPWLVEEIKKVCVVMKQVQLEGWHLANLHVLRCLKEGDDEVPELTQMFFYRCCAATLGNIEKRDRPKDQTQYKSFHETCQRYWANRERETAYTSESMLNAGALITETAKLMEINALNVIALHFRRRLHQYIRFRYARNYKETKKLVNSCYRVRSEPELDGDGNPTGKTTKVWTEWDETEDPVELELRGWLKIVPWQSQIRANSAHFVHKLYDMLVWIEKYVAEHPNTKGARLYTLLPVATSFQAAYIKLNGSTLHGLFARIIHIPEVEDLLKNELDIVPTKKKTLGAQRPFTKPTFQKNRTEILRKVFDVEQFETRNRKFADEVKTNGYGASILLIRPVTTTLVTVIEKKEATRDKKSKAKTPEEIAEADSFAKDLFKLRADYSPDVLVGIDPGMRSLVTAVSIGHLPSRRRQKSQRGKHCRRRRGRRRKELVTEISTSEYKHLARMNDYRFYHENLKKREPWYAGVIRAMPSFKTSSYDVYLQRLQFFWKHLRFLLAFGSEQAFLRWRFTQDRAKMKALDTLAQRLVPKASKQVCIAYGDWSRRDKIKGHATGPVKGFVEALRKRATVVSMDEYRTSVTCSRCHKRLTQARLLTKVKRKEDGTDIRLKSQPSKKEAKEIAEMAKFRNPKLADKTIVLKYTRNVLRCTNSSCKANFWSRDVNAARNMLELLSSGLKGKHGARRLRAFRRSK

SEQ ID NO: 2804 - protein, 426 aa, Phytophthora idaei
MEDWNMPQVKISTASFKVMRWTVMRRAFAINRFETRKEECLLSKTEFLQLPVEEKYEHASHLFANEVKTDGYSASVLYYRPKHEELDGEDDYLVPEGYSPDVVIGLDPGMRSLCAAAREYLRLQAPRRRSRTKVRRPRRKNWKKGRSKRKLRRKRNFPKWIRCAKRAHHHNNRDIVSVTTREYRHLAGLNRFRALNDSQKRKFPDYKSVIEGMPSFKTSSYEKYLKRLDYFWQHAAFLLRFCLERPYLKWRFFQKRMARVAVDEIARRIVPTVSRLTCVAYGDWSRRDGIKGHAPSPVKGLKEALRKRAMVVSMDEFRMSKLCSQYHQSLSSMQYPTPVFPKAVQKPKRRKMKGKVLPRDWSRAEIKSKHCHVVLRCENENCEARYWDRDVNAAISMLELLKSEVQGRERRGAKWRINAKYCRVDF

SEQ ID NO: 2805 - protein, 471 aa, Bradysia odoriphaga
MKCVNCGNKNHDMFMSVRSLKKDGDASGNMMVNPVLAHYKFKRSIFITKTAVDVAKQLAETGQVVPSRPVPYKHEHKSKSPEQRQTNKGKFETAKQTTLIIIGNFKMRPDSPMKGHPRSALGQFHRELRRRCDMLVQDEHNTTKACYLCRNKLEIAQPPERFAQCRCTNACNRFHSKTQDPSHIFDCYRKAPNLPIKFQCSDRILKLSEPHPRHVNRKVVKDIDSSSTGSCISKQNPVSTRLEHLAAPIFRRIYTTRQKIESNRKVPESVKQNLNLHIQRSMYNIYSRLENVKFPHAMDLRRKPLRKSIKSSTQDSENRRVVFERLCQPQRKPRTESPVKLSVEKRPVSMEVIKRLSVPRKIKSAEQINYKVTSRPLQSEEYYEKLSQPRKILEEIINRETEQKLTSMKRTNEIAVPLSRLQRRKFMKGDNEMKFPVSKAALEYKASANIKKLAQPKTDPSESSGKSKKKK

SEQ ID NO: 2806 - protein, 409 aa, Phytophthora aleatoria
MVGREQIGRIVVTFNDRLLRFGYMLFEKMLNKSQKTWKRKNSRTSSPSLTFSLPDEMERKQESCDDSDESKHEKKVAPHSVMKIKLNPTPEQKKDLAEKYRGVSQKHSLAQYLPDYHLEVPEEVMNETYRDFTKALDSSLALYNSLKERDEKTSFPCLTFKSRKDNTTSVAIQARSVSSLVAGIFRIFPTNFGLKRDEGFKVREAIPEMNCSIRLKMTREAKFYTCIPRVKAFPEMQSNRVCAIDSGVRDIITLYDPGGLILGVTDCKDKIFQRCLSIDRLQSKLASEHRKRHRYRLKKLIYRMYQRIKCMVKDMHQKCSKWLSVNYDEVLLPKFATSEMTQKQKRISSKTSRAMLTWSHYKFKVMLADKMGRTGGRMIECTEPYTSKTWSRCGRINYTIKKQKTFQCP

SEQ ID NO: 2807 - protein, 272 aa, Phytophthora aleatoria
MSVRLQRLREGEYYINVPRLRTFPESKSNRVCAIDPGVVNFATVYDPDGRTFSVKDARSVLKRKFEAVDAMKSILALKDNACKERHQDKVRTKEKKGRKSSKSAEHRFRYRLRRRMRFTSRKASRCVNDMHQKLSCWLSENYHTVLLPSFQTQEMVRKHLKEVASDATPETASVEDNAAIDKRKMRSPTARALMAQAHFKFKQLLKYKMKRTGGRVVDCEEEYTSKTCSGCGTIKNNLGGDRVFRCASCHAVLDRDVSAAKNIFHKNMGLLA

SEQ ID NO: 2808 - protein, 306 aa, Carpediemonas membranifera
MTIERGVTALTPAMKRCLRVHVNWSATKNLTDEQVAEYERDHGDITKLRRVLSVKTDGVSVAVTVWVGREKYRGGRVADRPTYKKGSNNKRARLGQDDAEATPAPDIQALMGFDPGARSLGGYTIRRPDGQSVSGVLAKCGYTATPTLRVNMSAASFKTTSLEALKQSIRFVHENIVQIINEGTRKCFRRATFANHCLRLKHFARAGRQLLDDLGGRPPEPIHLEVAYGAALFGSADTPSCAPYRHFARALPGIMLRHNVVVTVTMVSEFRTSIVCPYCKAHFRRVVHTPHHALPESRVRGSSMAR

SEQ ID NO: 2809 - protein, 421 aa, Carpediemonas membranifera
MVAAFNTAHPPLPGDKLLAGPKLVPLVPMAPIRPGFMHVPCSLNVLNPAWLAQLGVDPEHHTTERMTREQLEALPPNIRRVLSVKTDGVAVDLTVQVGALPYVSRRASGNPTMKRKVRERLGVDDADARPAPDPDAHLMGFDPGARALGGFFIRHPDGTTSSGVVPKCGYTKTPSFAFDMTPASFKSTNLDSLQNSIRFVLLHEQEIFDAGMVKSFRRVRLTNHILRQKHFHRAGELLARTLGWTPRRLPRGIAPPRAAPTRLVVFYGSARFKTPRRVHPCAPYGRFAKSLPHIMRAVNITAEVRMTNEFRTSLVCPFCRARFRRTRYTRRTMRCHNPNCQGAPWYRQQRLNSDPTTTWLNLSHRDKTAAQNILDCGLMADAQYQASAFRNPRPPARLPNYNPNTPITANQPLVFASGQAN

SEQ ID NO: 2810 - protein, 511 aa, Carpediemonas membranifera
MRLWHDEFIIRLCTAFRAARQQCPREFDVWLGEYATSTKLSLVNALEGYCWRLAKIITRVDTALTQRDPDVPRDDITRLRTEQRAVKAIVDEHLAKISTPGRVDEGVLLTLPCVWRISAALGELTDMVAAFNTAHPPLPGDKPLAGPKLVPLVPMAPVRPGFMHALPPNIRRVLSVKTDGVAVDLTVQVGALPYVSRRASGNPTMKRKARERLGVDDADARPAPDPDAHLMGFDPGARALGGFFIRHPDGTTSSGVVPKCGYTKTPSFAFDMTPASFKSTNLDSLQNSVRFVLLHEQEIFDAGMVKSFRRVRLTNHILRQKHFHRAGEQLARTLGWTPRRLPRGIAPPRAAPTGLVVFYGSARFKTPRRVHPCAPYGRFATLLPHIMRAFNITAEVRMTNEFRTSLVCPFCRARFRRTRYTRRTMRCHNRNCQGAPWYRQQRLNSDPTTTTWLNLSHRDKTAAQNILDCGLMTDAQYQASAFRNPARLPNYDPNTLITANQPQVFASGQAN

SEQ ID NO: 2811 - protein, 328 aa, Carpediemonas membranifera
MQAAQYTPMPSKIYTAKASVNKAIGEINGGGDNNAPRRGNLEPGMRSFTQAKHTFTCLLACVSASAHALTPPRTVNLFDQEVLAQIGSSNKRARLGQDDTEATPAPDIQALMGFDPGARSLGGYTIRRPDGQSVSGVLAKCGYTATPSFRVNMSAASFKTTSLEALKQSIRFVHENIVQIINEGTRKCFRRATFANHCLRLKHFTRAGRQLLDDLGGRPPEPIHLEVAYGAALFCSAGTPSCAPYRHFARALPGIMLRHNVVVSVTIVSEFRTSIVCPYCKSHFRRVVHTHRTMLCQNPACEGAPWRVERLRRHPEQRVILLNLSHRD

SEQ ID NO: 2812 - protein, 312 aa, Carpediemonas membranifera
MSLRQPRLVPIVPMAPVRPGFMAYSETMGLLDENFCHRVGINPTLPHATKPLTEEQKRRYRDNPRSMGRLLSLSTDGVCVAVTIKRGFGRYRPQHDASMPVRKRARGREKERPRLGTNNAEAPPAPDPDAHLMGFDPGARSIGGYYIRHPDGTTSSGVLPKCGYTKTPSFGFDMTAASFKSTRLVSINNSIRFVLDNANDIFEAGMRKSFRRVRFANHILRQKHFARCGQQLAREFGRHHPIATPIRLKVFYGSSGFTTPAGMFIPCAPYRKFAREIVPLLKRTAPPSSALTATPPTSEFVRVMTSTFTHIV

SEQ ID NO: 2813 - protein, 364 aa, Carpediemonas membranifera
MGRLLSLSTDGVCVAVTVKRGGHYRPQHDASMPVRKRAKGREKERPRLGTNNADALPAPDPDAHLMGFDPGARSIGGYYIRHPDGTTSSGVLPKCGYTKTPSFGFDMTAASFKSTRLVSINNSIRFVLDNANDIFEAGMRKSFRRVRFANHILRQKHFALCGQQLAREFGWRRHHPIATPIRLKVFYGSSGFTTPAGMFIPCAPYRKFAREIVPLLKGYTIVDLNMANEDRTTVVCPHCHAPYKRVRPRDDQHVHPHRVMLCENPQCRGAQWRATVPDALNVDHRDKSAAETSCGVLLPRKMSSVALRSVAHRSRAFQHHSSIINWLTANIRLRTDDVVCQFGTLIVPFRPCLEVRTMCLYCAT

SEQ ID NO: 2814 - protein, 409 aa, Carpediemonas membranifera
MGRLLSLSTDGVCVAVTVKRGGHYRPQHDASMPVRKRAKGREKERPRLGTNNADALPAPDPDAHLMGFDPGARSIGGYYIRHPDGTTSSGVLPKCGYTKTPSFGFDMTAASFKSTRLVSINNSIRFVLDNANDIFEAGMRKSFRRVRFANHILRQKHFALCGQQLAREFGWRRHLPIATPIRLKVFYGSSGFTTPAGMFIPCAPYRKFAREIVPLLKRYTIVDLNMVNEDRTTVVCPHCHAPYKRVRPRDDQHVHPHRVMLCENPQCRGAQWRATVPDALNVDHRDKSAAETSCGVLLPRKMSSVALRSVAHRSRAFQHHSSIINWLTANIRLRTDDVVQFGTSIVPFRPCLEVRTMCLYCATQKFARRHGYSGEKRAICFPIQACTITRENRTHEFALQGGPEASKRG

SEQ ID NO: 2815 - protein, 583 aa, Carpediemonas membranifera
MPSKIYTVKASVNKAICEINGGGDNNAPRRGNLEPGMRSFTQAKYTFTCLLACVSASAHALTPPRMVNLFDQEVLKQIVSIAQQKVSKAKAADRCRWIGDLAMWRDPDITPLVQDFVTAYSYLGLCKPFDTWLGEYSTATRVRLSRASPGYLTRLRAGLERVRPLLHDQPGVRQDFLDTLGELDTEVAAIAADHDRYHPQMHASPEGQRVGRTGTVAEALVGVLSCVTRMSAAVTKLVTLTRAVNLELSQALPEPKLIPMAPVRPGFMTLERGVTALTPAMKRRLRVHVNWSATKNLTDEQVAEYERDHGDITKLRRVLSVKTDGVSVAVTVWVGREKYRGGSSNKRARLGQDDAEATPAPDIQALMGFDPGARSLGGYTATPSFRVNMSAASFKTTSLEALKQSIRFVHENIVQIINEGTRKCFRRATFANHCLRQKHFARAGRQLLDDLGGRPPEPIHLEVAYGAALFGSAGTPSCAPYRHFARALPGIMLRHNVVVTVTMVSEFRTSIVCPYCKAHFRRVVHTHRTMLCQNPACEGAPWRVERLRRHPEQRETYFSISLTEIRAPARTSFGAPSMQLQIR

SEQ ID NO: 2816 - protein, 539 aa, Carpediemonas membranifera
MVFIVACSWLIVSSYGVSPSLRAWFTRYANSVKLWLARTVKTYRDRLQGSLARLEEALAGVGSPAFFQQELAGVHAILGRVNPEILACLPSLFWAAHMGENDGLPVSEAAPRILSCVWAIADGVEKLSGLISHFNGEYSMSLRQPRLVPIVPMAPVRPGFMAYRETMGLLNENFCHRVGINPTLPHATNPLTEEQKRRYRDNPRSMGRLLSLSTDGVCVAVTVKRGGRYRPQHDASMPVRKRARGREKERPRLGENNADAPPAPDPDAHLMGFDPGARSIGGYYIKHPDGTSSGVLPKCGYTKTPSFGFDMTAASFKSTGLVSINNSIRFVLDNANDIFEAGMRKSFRRVRFANHILRQKHFARCGQQLAREFGRHHPIATPIRLKVFYGSSGFTTPAGMFIPCAPYRKFAREIVPHLKRYNIVVDLNMVNEDRTTVVCPHCHAPYKRVRPRDDQHVHPHRVMLCENPQCRGAQWRATVPDALNVDHRDKSAAENILWRSLATEDELGHSPFSRTLIPRLQTSFQYHQLANRHHSSADG

SEQ ID NO: 2817 - protein, 538 aa, Carpediemonas membranifera
MVFIVACSWLIVSSYGVSPSLRAWFTRYANSVKLWLARTVKTYRDRLQGSLARLEEALAGVGSPAFFQQELAGVHAILGRVNPEILACLPSLFWAAHMGENDGLPVSEAAPRILSCVWAIADGVEKLSGLISHFNGEYSMSLRQPRLVPIVPMAPVRPGFMAYRETMGLLNENFCHRVGINPTLPHATNPLTEEQKKTLPGQPQVNGPSAQPEHRWGLCGGDGKRGGRYRPQHDASMPVRKRARGREKERPRLGENNADAPPAPDPDAHLMGFDPGARSIGGYYIKHPDGTSSGVLPKCGYTKTPSFGFDMTAASFKSTGLVSINNSIRFVLDNANDIFEAGMRKSFRRVRFANHILRQKHFARCGQQLAREFGRHHSIATPIRLKVFYGSSGFTTPAGMFIPCAPYRKFAREIVPHLKRYNIVDLNMVNEDRTTVVCPHCHAPYKRVRPRDDQHVHPHRVMLCENPQCRGAQWRATVPDALNVDHRDKSAAENILWRSLATEDELGHSPFSRTLIPRLQTSFQYHQLANRHHSSADG

SEQ ID NO: 2818 - protein, 504 aa, Carpediemonas membranifera
MTSSSFASAPPSGQLVNSALASSTCGWANMPRAPSWLVNALEGYCWRLAKIITRVDTALTQRDPDVPRDDITRLRTEQRAVKAIVDEHLAKISTPGRVDEGVLLTLPCVWRISAALGELTDMVAAFNTAHPPLPGDKPLAGPKLVPLVPMAPVRPGFMHVPCSLNVLNPAWLAQLGVDPEHHATERMTREQLEALPPNIRRVLSVKTDGVAVDLTVQVGALPYVSRRASGNPTMKRKVRERLGVDDADARPAPDPDAHLMGFDPGARALGGFFIRHPDGTTSSGVVPKCGYTKTPSFAFDITPASFKSTNLDSLQNSIRFVLLHEQEIFDAGMVKSFHRVRLTNHILRQKHFHRAGEQLARTLGLTPRRLPRGIAPPRAAPTRLVVFYGSARFKTPRRVHPCAPYGRFAKALPHIMRAFNITAEVRMTNEFRTSLVCPFCRARFRRTRYTRRTMRCHNPNYQGAPWYRQQRLNSDPTTSTWLNLSHRDKTAAQNILDCGLMTDA

SEQ ID NO: 2819 - protein, 449 aa, Carpediemonas membranifera
MVFIVACSWLIVSSYGVSPSLRAWFTRYANSVKLWLARTVKTYRDRLQGSLARLEEALAGVGSPAFFQQELAGVHAILGRVNPVILACLPSLFWAAHMGENDGLPVSEAAPRILSCVWAIADGVEKLSGLISHFNGEYSMSLRQPRLVPIVPMAPVRPGFMAYGETMGLLNGNFCHRVGINPTRPHATKPLTEEQEEPYQNNPRSMGRLLSLSTDGVCVAVTIKRGFGHYRPQHDASMPVRKRAKGREKERPRLGTNNADAPPAPDPDAHLMGFDPGARSIGGYYIRHPDGSTSSGVLPKCGYTKTPSFGFDMTAASFKSTRLVSINNSIRFVLDNANDIFEAGMRKSFRQVRFANHILRQKHFARCGQQLAREFGWRRHHPIATPIRLKVFYGSSGFTTPAGMFIPCAPYRKFAREIVPLLKRYNIVVDLNMVNEDQVQFGTYTAQHD

SEQ ID NO: 2820 - protein, 360 aa, Carpediemonas membranifera
MGENDGLPVSEAAPRILSCVWAIADGVEKLSGLISHFNGEYSMSLRQPRLVPIVPMAPVRPGFMAYGETMGLLNGNFCHRVGINPTLPHATKPLTEEQEEPYQNNPRSMGRLLSLSTDGVCVAVTIKRGFGHYRPQHDASMPVRKRAKGREKERPRLGTNNADAPPAPDPDAHLMGFDPGARSIGGYYIRHPDGSTSSGVLPKCGYTKTPSFGFDMTAASFKSTRLVSINNSIRFVLDNANDIFEAGMRKSFRQVRFANHILRQKHFARCGQQLAREFGWRRHHPIATPIRLKVFYGSSGFTTPAGMFIPCAPYRKFAREIVPLLKRYNIVVDLNMVNEDQVQLGTLIVPFRPCLGVGNS

SEQ ID NO: 2821 - protein, 532 aa, Carpediemonas membranifera
MWRDPDITPLVRDFVTAYSYLGLCKPFDTWLGEYSTATRVWLSRASPGYLTRLRAGLERVRPLLHDRPGVRQDFLDTQGELDTELAAISADHGMHHRQMHALPEGQRVGRTDTVAEALVGVLSCVTRMSAAVTKLVTLTRAVNLELSQALPEPKLIPFVPMAPVRPGFMTIERGVTALTPAMKRRLRVHVNWSATKNLTDEQVDRYERDHGDSTKLRRVLFVKTDGVSVAVKVWVGREKYRGGRVADRLTYKKGSNNKRARLGQEDAEATPAPDIQALMGFDPGARSLGGYTIRRPDGQSVSGVLAKCGYTATLSFRMNMSAASFKTTSLEALKQSIRFVHENIVQIINEGTRKCFRRATFANHCMRLKHFARAGRQLLDDLGGRPPEPIHLKVAYGAALFGSAGTPSCAPYRHFARALPGIMLRHKVVVSVTMVSEFRTSIVCPYCKAHFRRVVHAYRTMLCQNPACEGAPWRVERLRRHPEQRDILLNLSHRDKSASENILWCTYDATSDQIEQSPFHYDSQRGALPHYH

SEQ ID NO: 2822 - protein, 620 aa, Carpediemonas membranifera
MPSKIYTVKASVNKAIGEINGGGDNNAPRRGNLEPGMRSFTQAKYTFTCLLACVSASAHALTLPRTVNLFDEEVLAQIVSIAQQKVSKAKAADRCRWIGDLAMWRDPDITPLVQDFVTAYSYIGLCKPFDTWLGEYSTATRVWLSRASPGYLTRLRAGLERVRPLLHDRPGVRQDFLDTQGELDTELAAISADHGMHHRQMHALPEGQRVGRTGTVAEALVGVLSCVTRMSAAVTKLVTLTRAVNLELSQALPEPKLVPFVPMAPVRPGFMTLERGVTALTPAMKRRLRVHVNWSATKNLTDEQVDRYERDHGDITKLRRVLFVKTDGVSVAVTVWVGREKYRGGRVADRPTYKKGSNNKRARLALMGFDPGARSLGGYTIRRPDGQSVSGVLAKCGYTATLSFRMNMSAASFKTTSLEALKQSIRFVHENIVQIINEGTRKCFRRATFANHCMRLKHFARAGRQLLDDLGGRPPEPIHLEVAYGAALFGSAGTPSCAPYRHFARALPGIMLRHNVVVSVTMVSEFRTSIVCPYCKAHFRRVVHTYRTMLCQNPACEGAPWRVERLRRHPEQREILLNLSHRDKSASENILWCTYDATSDQIEQSPFHYDSQRGALPHYH

SEQ ID NO: 2823 - protein, 405 aa, Carpediemonas membranifera
MSAAVTKLVTLTRAVNLELSQALPEPKLIPFVPMAPVRPGFMTIERGVTALTPAMKRRLRVHVNWSATKNLTDEQVAEYERDHGDITKLRRVLSVKTDGVSAAVKVWVGREKYRGGRVADRPTYKKGSSNKRARLGQDDAEATPAPDIQALMGFDPGARSLGGYTIRRPDGQSVSGVLAKCGYTATPSFRVNMSAESFKTTSLEALKQSIRFVHENIVQIINEGTRKCFRRATFANHCLRLKHFARAGRQLLDDLGGRPPEPIHLEVANGAALFGSAGTPSCAPYRHFARALPGIMLRHNVVVSVTMVSEFRTSIVCPYCKAHFRRVVHTHRTMRCQNPACEGAPWRVERLRRHPEQRDILLNLSHRDKSASENILWCTFDATSDQIEQSPFHYDSQRGALPRYH

SEQ ID NO: 2824 - protein, 638 aa, Carpediemonas membranifera
MNSRGLNRFSLTAHLSYTRRVADMRASAMIYTVKASVNKAIGEINGGGDKNAPRRGNLEPDMRSFTQAKYTFTCLLACVSASAHALTPPRTVNLFDQEVLKQIVSIAQQKVSKAKAADRCRWIGDLAMWRDPDITPLVQDFYSTATRVRLSRASPGYLTRLRAGLERVRPLLHDEGVRQDFLDTLGELDTEVAAISADHDMHHRQMHALPEEQRVGRTGTVAEALVGVLSCVTRMSAAVTKLVTLARAVNLEFSQALPEPKLIPFVPMAPAKPGFMTIERGVTALTPAMKRRLRVHVNWSATKNLTDEQVAEYERDHGDITKLRRVLSVKTDGVSVAVTVWVGREKYSGGRVADRPTYKKGSNKRARLGQDDAEATPAPDIQALMGFDPGARSLGGYTIRRPDGQSVSGVLAKCGYTATPSFRVNMSAASFKTTSLEALKQSIRFVHENIVQIINEGTRKCFRRATFANHCLRLKHFARAGRQLLDDLGGRPPEPIHLEVAYGAALFGSAGTPSCAPYRHFARALPGIMLRHNVVVSVNMVSEFRTSIVCPHCKAHFRRVVYIHRTMLCQNPACEGAPWRVERLRRHPEQRDTLLNLSHRDKSASENILWCTYDATSDQIEQSPFHYDSQRGALPRYH

SEQ ID NO: 2825 - protein, 272 aa, Carpediemonas membranifera
MGFDPGARSIGGYYIRHPDGTTSTGVLPKCGYTKTPSFGFDMTAASFKSTRLVSINNSIRFVLDNANDIFEAGMRKSFRRVRFANHILRQKHFARCGQQLAREFGWRRHHPIATPIRLKVFYGSSGFTTPAGMFIPCAPYRKFAREIVPLLKGYNIVVDLNMVNEDRTTVVCPHCHAPYKRVRPRDDQHVHPHRVMLCENPQCRGAQWRATVPDALNVDHRDKSAAENILWRSLATEDELGGSPFSRTSIPRLQTSFQYHQLANRQHSSTDG

SEQ ID NO: 2826 - protein, 240 aa, Carpediemonas membranifera
MTPASFKSTNLDSLQNSIRFVLLHEQEIFDAGMVKSFRRVRLTNHILRQKHFHRAGEQLARTLGWTPRRLPRSIAPPRAAPTRLVVFYGSARFKTPRRVHPCAPYGRFATLLPHIMRAFNITAEVRMTNEFRTSLVCPFCRARFRRTRYTRRTMRCHNPNCQGAPWYRQQRLNSDPTTTNWLNLSHRDKTAAQNILDCGLMTDAQYQASAFRNPARLPNYNPNTPITANQPLVFASGQAN

SEQ ID NO: 2827 - protein, 451 aa, Carpediemonas membranifera
MPLWHDEFIIRLCTALRAARQQCPREFDVWLGEYATSTKLWLVNALEGYCWRLAKIITRVDTALTQRDPDVPRDDITRLRTEQRAVKAIVDEHLAKISTPGRVDEGVLLTLPCVWRISAAPGELTDMVAAFNPAHPPLPGDKPLAGPKLVPMAPVRPGFMHVPCSLNVLNPAWLAQLGVDPEHHATERMTREQLEALPPNIRRVLSVKTDGVAVDLTVQVGALPYVSRRASGNPTMKRKARERLDPDAQVMGFDPGARALGGFFIRHPDGTTSSGVVPKCGYTKTPSFAFDMTPASFKSTNLDSLQNSVRFVLLHEQEIFDAGMVKSFRRVRLTNHILRQKHFHRAGEQLARTLGWTPRRLPRGIAPPRAAPTRLVVFYGSARFKTPRRVHPCAPYGRFATLLPHIMRAFNITAEVRMTNEFRTSLVCPFCRARFRRTRYTRRTMRCHNPN

SEQ ID NO: 2828 - protein, 386 aa, Carpediemonas membranifera
MHVPCSLNVLNPAWLAQLGVDPEHHATERMTREQLEALPPNIRRVLSVKTDGVAVDLTVQVGALPYVSRRASGNPTMKRKVRERLGVDDADARPAPDPDAHLMGFDPGARALGGFFIRHPDGTTSSGVVPKCGYTKTPSFVFDMTPASFKSTNLDSLQNSVRFVLLHEQEIFDAGMVKSFRRVRLTNHILRQKHFHRAAEQIARTLGWTPRRLPRGIAPPRAAPTRLVVFYGSARFKTPRRVHPCAPYGRFATLLPRIMRAFNITAEVRMTNEFRTSLVCPFCRARFRRTRYTRHTMRCHNPNCQGAPWYRQQRLNSDPTTTTWLNLSHRDKTAAHNIVDCGLMTDAQYQASAFRNPRPPARLPNYSPNTPITANQPLVFASGQAN

SEQ ID NO: 2829 - protein, 264 aa, Carpediemonas membranifera
MGFDPGARSIGGYYIRHPDGTTSSGVLPKCGYTKTPSFGFDMTAAPFKSTRLVSINNSIRFVLDNANDIFEAGMRKSFRRVRFANHILRQKHFARCGQQLAREFGRHHPIATPIRLKVFYGSSGFTTPAGMFIPCAPYRKFAREIVPLLKGYNIVVDLNMVNEDRTTVVCPHCHAPYKRVRPRDDQHVHPQRVMLCENPQCRGAQWRATVPDALNVDHRDKSAAENILWRSLATEDELSGSPFSRTLIPRLPTSFQYHQLANRT

SEQ ID NO: 2830 - protein, 612 aa, Carpediemonas membranifera
MPSKIYTVKASVNKAIGEINGGGDNNAPRRGNLEPGMRSFTQAKYTFTCLLACVSASAHALTPPRTVNLFDQEVLKQIVSIAQQKVSKAKAADRCRWIGDLAMWRDPDITPLVRDFREAYVGIAAPFQSWLGEYSTATRVWLSRASPGYLTRLRAGLERVRPLLHDQPGVRQDFLDTLGELDTEGQRVGRTDTVAEALVGVLSCVTRMSAAVTKLVTLTRAVNLELSQALPEPKLIPFVPMAPVRPGFMTLERGVTALTPAMKRRLRVHVNWSATKNLTDEQVAEYERDHGDITKLRRVLSVKTDGVSVAVTVWVGREKYRGGRVADRPTYKKGSNNKRARLGQDDAEATPAPDIQALMGFDPGARSLGGYTIRRPDGQSVSGVLAKCGYTATLSFRMNMSAASFKTTSLEALKQSIRFVHENIVQIINEGTRKCFRRASFANHCLRLKHFARAGRQLLDDLGGRPPEPNHLEVAYGAALFGSAGTPSCAPYRHFAQALPGIMLRHNVVVSVDMVSEFRTSIVCPYCKAHFRRVVHTHRTMLCQNPACEGAPWRVERLRRHPEQRDIHLNLSHRDKSASENILWCTFDATSDQIEQSPFHHDSQRGALPRYH

SEQ ID NO: 2831 - protein, 405 aa, Carpediemonas membranifera
MSAAVTKLVTLTRAVNLELSQALPEPKLIPFVPMAPVRPGFMTIEYGHISLTPAMKRRLRVYRDWSAKSNLTDEQDDRYERDHGDITKLRRVLSVKTDGVSVAVTVWVGREKYRGGRVADRPTYKKGNKNKRARLGQDDAEATPAPDIQALMGFDPGARSLGGYTIRRPGGQGVSGVLAKCGYTATPSFRVNMSAASFKTTSLEALKQSIRFVHENIVQIINEGTRKCFRRATFANHCLRLKHFARAGRQLLDDLGGRTPEPIHLKVAYGAALFGSAGTPSCAPYRHFARALPGIMLRHNVVVTVTMVSEFRTSIVCPYCKAHFRRVVHTYRTMLCQNPACEGAPWRVERLRRHPEQRDILLNLSHRDKSASENILWCTYDATSDQMEQSPFHYDSQRGALPRYH

SEQ ID NO: 2832 - protein, 450 aa, Carpediemonas membranifera
MSLRQPRLVPIVPMAPVRPGFMAYGETMGQLNENFCHRVGINPTLPHATKPLTEEQEEQYQNNPRSMGRLLSLSTDGVCVAVTVKRGGRYRPQHDASMPVRKRAKWREKERPRLGTNNAEAPPAPDPDAHLMGFDPGARSIGGYYIRHPDGTTSSGVLPKCGYTKTPSFGFDMTAASFKSTRLVSINNSIRFVLDNANDIFEAGMRKSFRRVRFANHILRQKHFALCGQQLAREFGWRGHHPIAPPIRLKVFYGSSGFTAPAGMFIPCAPYRKFAREIVPLLKRYSIVVDLNMVNEDRTTVVCPHCHAPYKRVRPRDDQHVHPHRVMLCENPQCRGAQWRATVPDALNVDHRDKSAAETSCGVLLPRKMSSVALRSVAHRSRAFQHHSSIINWLTANIRLRTDDVVQFGTLIVPFRPCLGGSNNVFILRNRSGTVGWDNYLQRGQPPRQR

SEQ ID NO: 2833 - protein, 265 aa, Carpediemonas membranifera
MGLLNDNFCHRVGINHALPHATKPLTEEQKRRYRDNPRSMGRLLSLSTDGVCVAVTIRRGFGHYRPQHDASMPVRKRAKWREKERPRLGTNNADAPPAPDPDAHLMGFDPGARSIGGYYIRHPDGTTSSGVLPKCGYTKTPSFGFDMTAASFKSTRLVSINNSIRFVLDNANDIFEAGMRKSFRRVRFANHILRQKHFARCGQQLAREFGRHHPIATPIRLKVFYGSSGFTTPAGMFIPCAPYRKFAREIVPLLKGITLSSILTW

SEQ ID NO: 2834 - protein, 358 aa, Carpediemonas membranifera
MVAAFNTAHPPLPGDKPLAGPKLVPLVPMAPVRPGFMHVPCSLNVLNPAWLAQLGVDPEHHATERMTREQLEALPPNIRRVLSVKTDGVAVDLTVQVGALPYVNRRASGNPTMKRKVRERLGVDDADARPAPDPDAHLMGFDPGARALGGFFIRHPDGTTSSGVVPKCGYTKTPSFAFDMTPASFKSTNLDSLQNSIRFVLLHEQEIFDAGMVKSFRRVRLTNHILRQKHFHRAGELLARTLGWTPRRLPRGIAPPRAAPTRLVVFYGSARFKTPRRVHPCAPYGRFAKSLPHIMRAFNITAEVRMTNEFRTSLVCPFCRARFRRTRYTRRTMRCHNPNCQGAPWYRQQRLNSNPTST

SEQ ID NO: 2835 - protein, 241 aa, Carpediemonas membranifera
MLMAHRIVVWSESQSPAWFTRYANSVKLWLARTVKTYRDRLQGSLARLEEALAGVGSPAFFQHFARCGQQLAREFGRHHPVATPIRLKVFYGSSGFTTPTGMFIPCAPYRKFAREIVPLLKRYNIVVDLNMVNEDRTTVVCPHCHAPYKRVRPRDDQHVHPHRVMLCENPQCRGAQWRATVPDALNVDHRDKSAAENILWRSLATEDELSGSPFSRTSIPRLPTSFQYHQLANRQHSSTDG

SEQ ID NO: 2836 - protein, 518 aa, Carpediemonas membranifera
MWRDPDITPLVRDFREAYVGIAFPFQSWLGEYSTATRVWLSRASPGYLTRLRAGLERVRPLLHDRPGVRQDCLDTIGELDTEVAAIAADHGMHHPQMHALPEGQRVGRTGTVAEALVGVLSCVTRMSAAVTKLVTLTRAVNLELSQALPEPKLVPFVPMAPVRPGFMTIEYGYMSLTPAMKRRLRVHQVDRYERDHGDITKLRRVLSVKTDGVSAAVTVWVGREKYRGGRVADRPTYKKGSNNKRARLGQDDAEATPAPDIQALMGFDPGARSLGGYTIRRPDGQSVSGVLAKCGYTATPSFRVNMSAASFKTTSLEALKQSIRFVHENIVQIINEGTRKCFRRATFANHCLRLKHFARAGRQLLDDLGGRPPEPIHLEVAYGAALFGSAGTPSCAPYRHFARALPGIMLRHNVVVTVTMVSEFRTSIVCPHCKAHFRRVVHTHRTMLCQNPACEGAPWRVERLRRHPEQRDTLLNLFHRDKSASENILWCTYDTTSDQIEQSPFHYDSQRGALPRYH

SEQ ID NO: 2837 - protein, 469 aa, Carpediemonas membranifera
MTSIYTVKFSISSILHNRRNVIPFIADFYAGLENKLCSFTKAKISTPGRVDEGVLLTLPCVWRISAALGELTDMVAAFNTAHPPLPGDKPLAGPKLVPLVPMAPIRPGFMHVPCSLNVLNPAWLAQLGVDPEHHATERMTREQLEALPPNIRRVLSVKTDGVAVDLTVQVGALPYVSRRASGNPTMKRKARERLVWMTRMLAPRQTPMPTSWVRPGCSGSGWILHPPPRWHHLRCGPETNLDSLQNSVRFVLLHEQEIFDAGMVKSFRRVRLTNHILRQKHFHRAGEQLARTLGWTPRRLPRGIAPPRAAPTRLVVFYGSARFKTPRRVHPCAPHGRFATLLAHIMRAFNITAEVRMTNEFRTSLVCPFCRARFRRTRYTRRTMRCHNPNCQGAPWYRQQRLNSDPTTTWLNLSHRDKTAAQNILDCGLMTDAQYQASAFRNPARLPNYNPNTPITANQPLVFASGQAN

SEQ ID NO: 2838 - protein, 210 aa, Carpediemonas membranifera
MGRLLSLSTDGVCVAVTVKRGGHYRPQHDASMPVRKRARGREKERPRLGTNNAEAPPAPDPDAHLMGFDPGARSIEGYYIRHPDGTTSSGVLPKCGYTKTPSFGFDMTAASFKSTRLVSINNSIRFVLDNANDIFEAGMRKSFRRVRFANHILRQKHFARCGQQLAREFGRHHPVATPIRLKVFYGSSGFSPRLLVCSFLARHIESSRER

SEQ ID NO: 2839 - protein, 508 aa, Carpediemonas membranifera
MCVVNVIGSFTAKRRASHDQHLYGATSTKLWLVKALEGYCWRLAKVITRVDTALTQRDPDVPRDDITRLRTEQRAVKAIVDEHLAKISTPGRVDEGVLLTLPCVWRISAALGELTDMVAAFNTAHPPLPGDKPLAGPKLVPLVPMAPVRPGFMHVPCSLNVLNPAWLAQLGVDPEHHATERMTREQLEALPPNIRRVLSVKTDGVAVDLTVQVGALSYVSRRASGNPTMKRKVRERLGVDDADARPAPDPNAHLMGFDPGARSLGGYTIRRPDGQSVSGVLAKCGYTATPSFRVNMSAASFKTTSLEALKQSIRFVHENIVQIINEGTRKCFRRATFANHCLRQKHFARAGRQLLDDLGGRPPEPIHLEVAYGAALFGSAGTPSCAPYRHFARALPGIMLRHNVVVIVTMVSEFRTSIVCPYCKAHFRRVVHTHRTMLCQNPACEGAPWRVERLRRHPEQRDILLNLSHRDKSASENILWCTFDATSDQIEQSPFHYDSQRGALPRYH

SEQ ID NO: 2840 - protein, 351 aa, Carpediemonas membranifera
MKRRLRVHVNWPANKNLTDEQVDRYERDHGDITKLRRVLSVRTDRVSVAVKVWVGREKYRGGRVADRPTYKKGSNNKRARLGQDDAEATPAPDIQARMGFDPGARSLDGYTIRRPDGQSVSGVLAKCGYTATPSFRVNMSAASFKTTSLEALKQSIRFVHENIVQIINEGTRKCFRRETFANHCLRLKHFARAGRQLLDDLGGRPPEPIHLEVAYGAALFGSAGTPSCAPYRHFARALPGIMLRHNVVVTVTMVSEFRTSIVCPYCKAHFRRVVHTHRTMLCQNPACEGAPWRVERLRRHPEQRDILLNLSHRDKSASENILWCTFDATSDQIEQSPFHYDSQRGALPRYH

SEQ ID NO: 2841 - protein, 327 aa, Carpediemonas membranifera
MVFIVGSYMSSSSMISCTPVVRNKMEIYTIKASIKQAFRQDYTEERRVGDYAAAKYLYSCLLARLTVECYAQRRQLPYMTPTSTKDCSLMYAAVIRVRPTRPSCSRSTLCRCGGRLPYLSINNSIRFVLDNANDIFEAGMRKSFRRVRFANHILRQKHFACCGQQLAREFGRHHPIATPIRLKVIYGSSGFTTPTGMFIPCAPYRKFAREIVPLLKRLDNIVVDLNMVNEDRTTVVCPHCHAPYKRVRPRDDQHVHPHRVMLCENPQCRGAQWRATVPDALNVDHRDKSAAENILWRSLATEDELSGSPFSRIDPTSSNIIPVSSIG

SEQ ID NO: 2842 - protein, 272 aa, Carpediemonas membranifera
MGFDPGARSIGGYYIRHPDGTTSSGVLPKCGYTKTPSFGFDMTAASFKSTRLVSINNSIRSVLDNANDIFEAGMRKSFRRVRFANHILRQKHFARCGQQLAREFGWLRHHPIATPIRLKAFYGSSGFTTPTGMFIPCAPYRKFAREIAPLLKRHNIVVDLNMVNEDRTTVVCPHCHAPYRRVRPRDDQHVHPHRVMLCEKPQCHGAQWRATVPDALNVDHRDKSAAKNILWRSLATEDELSGSPFSRTSIPRLQTSFQYHQLANRQHSSTDG

SEQ ID NO: 2843 - protein, 322 aa, Carpediemonas membranifera
MSAAVTKLVTLTRAVNLELSQALPEPKLVPFVPMAPVRPGFITIERGVTALTPAMKRRLRVHVDRYERDHGDITKLRRVLSVKTDGVSVAVTVWVGREKYRGGRVADRPTYKKGSSNKRARLGQDDAEATPAPDIQALMGFDPGARSLGGYTIRRPDRQSVSGVLAKCGYTATPSFRVNMSAAVVYGAALFGSAGTPSCAPYRHFARALPGIMLRHNVVVSVMMVSEFRTSIVCPYCKAHFRRVVHTHRTMLCQNPACEGAPWRVERLRRHPEQRDILLNLSHRDKSASENILWCTFDATSDQIEQSPFHYDSRRGALPRYH

SEQ ID NO: 2844 - protein, 213 aa, Carpediemonas membranifera
MSAASFKTTSLEALKQSIRSVHENIVQIINEGTRKCFRRETFANHCLRLKHFARAGRQLLDDLGGRPPEPIHLEVAYGAALFGSAGTPSCAPYRHFARALPGIMLRHNVVVTVTMVSEFRTSIVCPYCKAHFRRVVHTHRTMLCQNPACEGAPWRVERLRRHPEQRDILLNLSHRDKSASENILWCTFDATSDQIEQSPFHYDSQRGAHPHYH

SEQ ID NO: 2845 - protein, 530 aa, Carpediemonas membranifera
MWRETTTRDLVAQLEGRAESHGVSPSLRKWFTRYANSVKLWLARTVTTYRDRLQSTLARLEEALAGVGSPAFFQQELAGVHAILNMVNPEILACLPSLFWATHMGENDGLPVSQAAPRILSCVWAIADGVETLSGLISHFNGEYSMSLRQPRLVPIVPMAPVRPGFMAYGETMGLLNDNFCHRVGINPTLPHATRRLLSLSTDGVCVAVTVKRGGRYRPQHDASMPVRKRAKWREKERPRLGTNNADAPPAPDPDSHLMGFDPGARSIGGYYIRHPDGTTSSGVLPKCGYTKTPSFGFDMTAASFKSTRLVSINNSIRFVLDNANDIFEAGMRKSFRRVRFANHILRQKHFARCGQQLAREFGWRRHHPIATHIRLKVFYGSSGFTTPAGMFIPCAPYRKFAREIVPLLKGYNIVVDLNMVNEDRTTVVCPHCHAPYKRVRPRDDQHVHPHRVMLCEKPQCRGAQWRATVPDALNVDHRDKSAAENILWRSLATEDELSGSPFSRTLIPRLPTSFQYHQLANRQHSSTDG

SEQ ID NO: 2846 - protein, 280 aa, Carpediemonas membranifera
MDKLNNNKRARLGQDDAEATPAPDIQALMGFDPGARSLGGYTIRRPDGQSVSGVLAKCGYTATPSFRVNMSAASFKTTSLEALKQSIRFVHENIVQIINEGTRKCFRRATFANHCLRQKHFARAGRQLLDDLGGRPSEPIHLEVAYGAALFGSAGTPSCAPYRHFARALPGIMLRHNVVVTVTMVSEFRTSIVCPYCKAHFRRVVHTHRTMLCQNPACEGAPWRVERLRRHPEQRDILLNLSHRDKSASENIHWCTFDATSDQIEQSPFHSQRGALPRYH

SEQ ID NO: 2847 - protein, 509 aa, Carpediemonas membranifera
MTSIYTVKFSISSILHNRRNVIPFIADFYAGLENKLCSFTKAKYFHTCILSYIAACCHHANLSLPVHDQALHQAIVIVAYRRSGEYRNLAADSLVDRFLGAKKYAAVRQVVTSIAEMPLWHDEFIIRLCTALRAARQQCPREFDVWLGEYATSTKLWLVNALEGYCWRLAKIITRVDTALTQRDPDVPRDDITRLRTEQRALTDMVAAFNTAHPPLPGDKPLAGPKLVPLVPMAPVRPGFMHVPCSLNVLNPAWLAQLGVDPEHHATERMTREQLEALPPNIRRVLSVKTDGVAVDLTVQVGALPYVNRRASGNPTMKRKARERLGVDDADARPAPDPDAQVMGFDPGARALCGFFIRHPDGTTSSGVVPKCGYTKTPSFAFDMTPASFKSTNLDSLQNSIRFVLLHEQEIFDAGMVKSFRRVRLTNHILRQKHFHGAGEQLARTLGWTPRRLPRGIAPPRAAPTRLVVFYGSARFKTPRRVYPCAPYGRFATLLPHIMRAFNILLKGG

SEQ ID NO: 2848 - protein, 336 aa, Carpediemonas membranifera
MGRLLSLSTDGVCVAVTVKRGGHYRPQHDASMPVRKRARGREKERPRLGTNNADAPPAPDPDAHLMGFDPGARSIGWYYIKHPDGTSSGVLPKCGYTKTPSFGFDMTAASFKSTRLVSINNSIRFVLDNANDIFEAGMRKSFRRVRFANHILRQKHFARCGQQLAREFGWLRHHPIATPIRLKVFYGSSGFTTPAGMFIPCAPYRKFAREIVPLLKGYNIVVVLNMVNEDRTTVVCPHCHAPYKRVRPRDDQHVHPHRVMLCEKPQCRGAQWRATVPDALNVDHRDKSAAENILWRSLATEDELSGSPFSCTLIPRLPTSFQYHQLANRQHSSTDG

SEQ ID NO: 2849 - protein, 405 aa, Carpediemonas membranifera
MSAAVTKLVTLTRAVNLELSQALPEPKLIPFVPMAPVRPGFMTIEYDYMSLTPAMKRRLRVHVNWSATKNLTDEQVAEYERDHGDITKLRRVLSVKTDGVSVAVTVWVGREKYRGGRVADRPMYKKGSNNKRAQLGQDDAEATPAQDIQALMGFDPGARSLGGYTIRRPDGQSVSGVLAKCGYTATPSFRVNMSAASFKTTSLEALKQSIRFVHENIVQIINEGTRKCFRRATFANHRLRQKHFARAGRQLLDDLGGRPPEPIHLEVAYGAALFGSAGTPSCAPYRHFARALPGIMLRHNVVVIVTMVSEFRTSIVCPYCKAHFRRVVHTHRTMRCQNPACEGAPWRVERLRRHPEQRDILLNLSHRDKSASENILWCSFDATSDQIEQSPFHYDSQRGALPRYH

SEQ ID NO: 2850 - protein, 288 aa, Carpediemonas membranifera
MGLLNGNFCHRVGINPTLPHATKPLTEEQEEPYQNNPRSMGRLLSLSTDGVCVAVTIKRGFGRYRPQHDASMPVRKRARGREKERPRLGTNNAEAPPAPDPDAHLMGFDPGARSIGGYYIRHPDGTTSSGALPKCGYTKTPSFGFDMTAASFKSTRLVSINNSIRFVLDNANDIFEAGMRKSFRRVRFANHILRQKHFARCGQQLAREFGWLRHHPIATPIRLKVFYGSSGFTTPAGMFIPCAPYRKFAREIVPLLKGYNIVVDLNMVNEDRTTVFVRVMTSTFTHIV

SEQ ID NO: 2851 - protein, 572 aa, Carpediemonas membranifera
MPSKIYTVKASVNKAIGEINGGGDNNAPRRGNLEPGMRSFTQAKYTFTCLLACVSASAHALTPPRTVKLFDQEVLKQIVSIAQQKVSKAKAADRCRWIGDLAMWRDPDITPLVRDFREAYVGIAAPFQSWLGEYSTATRVWLSRASPGYLTRLRAGLERVRPLLHDQPGVRQDFLDTLGELDTEVAAIAADHDRYHPQMHALPEEQRVGRTGTVAEALVGVLSCVTRMSAAVTKLVTLTRAVNLELSQALPEPKLVPFVPMAPVRPGFMTLERGVTALTPAMKRRLRVHVNWSATKNLTDEQVAEYERDHGDITKLRRVLSVKTDGVSVAVTVWVGREKYRGGRVADRPTYKKGSNNKRAQLGQDDAEATPAQDIQALMGFDPGARSLGGYTIRRPDGQSVSGVLAKCGYTATPSFRVNMSAASFKTTSLEALKQSIRFVHENIVQIINEGTRKCFRRATFANHRLRLKHFARAGRQLLDDLGGRPPEPIHLEVAYGAALFGSAGTPSCAPYRHFARALTGIMFRHNVVMSVTMVSEFRTVPILQSTLQTCGVHTPHHALPESRVRGSSMAR

SEQ ID NO: 2852 - protein, 402 aa, Carpediemonas membranifera
MSLRQPRLVSIVPMAPVRPGFMAYGETMGQLNENFCHRVGINPTLPHATKPLTEEQEEPYQNNPRSMGRLLSLSTDGVCVAVTIRRGFGHYRPQHDASMPVRKRAKWREKERPRLGTNNADAPPAPDPDAHLMGFDPGARSIGGYYIRHPDGTTSSGVLPKCGYTKTPRFGFDMTAASFKSTRLVSINNSIRFVLDNANDIFEAGMRKSFRRVRFANHILRQKYFAHCGQQLAREFGRHHPIATSIRLKVFYGSSGFTTPAGMFIPCAPYRKFAREIVPLLKRYNIVVDLNMVNEDRTTVVCPHCHAPYKRVRPRDDQHVHPHRVMLCENPQCRGAQWRATVPDALNVDHRDKSAAENILWRSLATEDELSGSPFSRTSIPRLPTSFQHHQLANRQHSSTDG

SEQ ID NO: 2853 - protein, 254 aa, Carpediemonas membranifera
MGFDPGARSLGGYTIRRPDGQSVSGVLAKCGYTATPSFRVNMSAASFKTTSLEALKQSIRFVHKNIVQIINEGTRKCFRRETFANHCLRLKHFAQAGRQLLDDLGGRPPEPIHLEVAYGAALFGSAGTPSCAPYRHYARALPGIMFRHNVVVSVTMVSEFRTSIVCPYCKAHFRRVVHTHRTMLCQNPACEGAPWRVERLRRHPEQRDILLNLSHRNKSASENILWCTYDATSDQIEQSPFHYDSQRGALPRYH

SEQ ID NO: 2854 - protein, 625 aa, Carpediemonas membranifera
MQAAQYTPMPSKIYTVKASVNKAIGEINGGGDNNAPRRGNLEPGMRSFHVLFTQAKYTFTCLLACVSASAHALTPPRTVNLFDEEVLKQIVIAQQKVSKAKAADRCRWIGDLAMWRDPDITPLVRDFREAYVGIAFPFQSWLDEYSTATRVWLSRASPGYLTRLRAGLERVRPLLHDQPGVRQDFLDTLGELDTEVAAIAADHGMHHRQMHALPEEQRVGRTGTVAEALVGVLSCVTRMSAAVTSLVTLTRAVNLELSQALPEPKLVPFVPMAPVRPGFMTIERGVTALTPAMKRRLRVHRDHGDITKLRRVLSVKTDGVSVAVTVWVGREKYRGGRVADRPTYKKGSSNKRARLGQDDAEATPAPDIQARMGFDPGARSLGGYTIRRPDGQSVSGVLAKCGYTATPSFRVNMSAASFKTTSLEALKQSIRFVHENIVQIINEGTRKCFHRETFANHCLRLKHFARAGRQLLDDLGGRPPEPIHLEVAYGAALFGSAGTPSCAPYRHYARALPGIMFRHNVVVSVTMVSEFRTSIVCPYCKAHFRRVVHTHRTMLCQNPACEGAPWRVERLRRHPEQRDILLNLSHRNKSASENILWCTYDATSDQIEQSPFHYDSQRGALPRYH

SEQ ID NO: 2855 - protein, 270 aa, Carpediemonas membranifera
MGFDPGARSIGGYYIRHPDGTTSSGVLPKCGYTKTPSFGFDMTAAPFKSTRLVSINNSIRFVLDNANDIFEAGMRKSFRRVRFANHILRQKHFARCGQQLAREFGRHHPIATPIRLKVFYGSSGFTTPAGMFIPCAPYRKFAREIVPLLKGYNIVVDLNMVNEDRTTVVCPHCHAPYKRVRPRDDQHVHPHRVMLCENPQCRGAQWRATVPDALNVDHRDKSAAENILWRSLATEDELGGSPFSRTSIPRLPTSFQYHQLVNRQHSSTDG

SEQ ID NO: 2856 - protein, 532 aa, Carpediemonas membranifera
MWRDPDITPLVQDFVTAYSYIGLCKQFDTWLGEYSTSTRVWLSRASPGYLTRLRAGLERVRPLLHDQPGVRQDFLDTLGELDTEVAAIAADHGRYHPQIHALPEGQRVGRTGTVAEALVGVLSCVTRMSAAVTKLVTLTRAVNLELSQALPEPKLVPFVPMAPVKPGFMTLERGVTALTPAMKRRLRVHVNWSATKNLTDEQVAEYERDHGDITKLRRVLSVKTDGVSVAVTVWVGREKYRGGRVADRPTYKKGSNNKRARLGQDDAEATPAPDIQALMGFDPGARSLGGYTIRRPDGQSVSGVLAKCGYTATPSFRVNMSAASFKTTSLEALKQSIRFVHENIVQIINEGTRKCFRRATFANHCLRLKHFARAGRQLLDDLGGRPPEPIHLEVAYGAALFCSAGTPSCAPYRNFARALPGIMLWHNVVVSVTMVSEFRTSIVCPYRKAHFRRVVHTHRTMLCQNPACEGAPWRVERLRRHPEQRDILLNLSHRDKSASENILWCTFDATSDQIEQSPFHYDSQRGALPRYH

SEQ ID NO: 2857 - protein, 642 aa, Carpediemonas membranifera
MQAAQYTPMPSKIYTVKASVNKAIGEINGGGDNNAPRRGNLEPGMRSFAQAKDTFTCLLACVSASAHALTPPRTVNLFDQEVLKQIVSIAQQKVSKAKAADRCRWIGDLAMWRDPDITPLVQDFVTAYSYIGLCKQFDTWLGEYSTSTRVWLSRASPGYLTRLRAGLERVRPLLHDQPGVRQDFLDTRGELDTEVAAIAADHDRYHPQIHASPEGQRVGHTGTVAEALVGVLSCVTRMSAAVTKLVTLTRAVNLELSQALPEPKLVPFVPMAPVRPGFMTIDRGVTALTPAMKRRLRVHVNWSATKNLTDEQVAEYERDHGDITKLRRVLSVRTDGVSAVVTVWVGREKYRGGRVADRPTYKKGSNNKRARLGQDDAEATPAPDIQALMGFDPGARSLGGYTIRRPDGQSVSGVLAKCGYTATPSFRVNVSAASFKTTSLEALKQSIRFVHENIVQIINEGTRKCFRRATFANHCLRLKHFARAGRQLLDDLGGRPPEPIHLEVAYGAALFGSAGTPSCAPYRHFARALPGIMLWHNVVVSVTMVSEFRTSIVCPYCKAHFRRVVHTYRTMLCQNPACEGAPWRVERLRRHPEQRDILLNLSHRDKSASENILWCTFDATSDQIEQSPFHYDSQRGALPRYH

SEQ ID NO: 2858 - protein, 266 aa, Carpediemonas membranifera
MTPKLLLPRTFKLSWASTLVLGRWAATRSSAQTGRVYLSGVLAKCGYTATPTFRVNMSAASFKTTSLEALKQSIRFVHENIVQIINEGTRKCFRRATFANHCLRLKHFARAGRQLLDDLGGCPPEPIHLEVAYGAALFGSAGTPSCAPYRHFARALPGIMLRHNVVVSAHMVSEFLTAKHTSDVWCTHTAPCSARITRARELHGALNGYVGIPSRERHTSQSLSPRYERQREHPLVHLRCNFRSDRAISFPLRLPERCSSSLSLTS

SEQ ID NO: 2859 - protein, 319 aa, Carpediemonas membranifera
MIDAVLSVKTDGVSVAVTVWVGREKYRGGRVADRPTYKKGSSNKRAQLGQDDAEATPAPDSRTALMDFDPGARSLGGYTIRRPDGQSVSGVLAKCGYTATPSFRVNMSAASFKTTSLEALKQSIRFVHENIVQIINEGTRKCFRRATFANHRLRLKHFARAGRQLLDDLGGRPPEPIHLKVAYGAALFGSAGTPSCAPYRHFARALPGIMLRHNVVVSVTMVSEFRTSIVCPYCKAHFRRVVHTRRTMLCQNPACEGAPWRVERLRRHPEQRDTLLNLSHRDKSASENILWCTFDATSDQIEQSPFHYDSQRGALPRYH

SEQ ID NO: 2860 - protein, 319 aa, Carpediemonas membranifera
MRSFTQAKYTFTCLLACVSASAHALTPPRTVNLFDEEVLKQIVSIAQQKVSKAKAADRCRWIGDLAMRRDPDITPLVRDFREAYVGIAFPFQSWLGEYSTATRVWLSRASPGYLTRLRAGLERVRPLHENIVQIINEGTRKCFRRASFANHCLRLKHFARAGRQLLDDLGGRPPEPIHLEVAYGAALFGSAGTPSCAPYRHFARALPGIMLRHNVVVSVTMVSEFRTSIVCPYCKAHFRRVVHTHRTMLCQNPACEGAPWRVERLRRHPEQRDILLNLSHRDKSASENILWCTFDATPDQIEQSPFHYDSQRGALPRYH

SEQ ID NO: 2861 - protein, 439 aa, Carpediemonas membranifera
MHHRQMHASPEGQRVGRTGTVAEALVGVLSCVTRMSAAVTKLVTLTRAVNLELSQALPEPKLVPFVPMAPVRPGFMTIERGVTALTPAMKRRLRVHVNWSATKNLTDEQVDRYERDHGDITKLRRVLSVRTDGVSVAVTVWVGREKYSGGRVADRPTYKKGSSNKRARLGQDDAEATPAPDIQALMGFDPGARSLDGYTICRPDGQSVSGVLAKCGYTATPSFRVNMSAASFKTTSLEALKQSIRFVHENIVQIINEGTRKCFRRATFANHCLRQKHFARAGRQLLDDLGGRPPEPIHLEVAYGAALFGSAGTPSCAPYRHFARALPGIMLRHNVVVSVTMVSEFRTSIVCPYCKAHFRRVVYTHRTMLCQNPACEGAPWRVERLRRHPEQRDTLLNLSHRDKSASENILWCTYDATSDQIEQSPFHYDSQRGALPRYH

SEQ ID NO: 2862 - protein, 401 aa, Carpediemonas membranifera
MSLRQPRLVPIVPMAPVRPGFMAYSETMGLLNDNFCHRVGINPTLPHATKPLTEEQEEQYQNNPRSMCRLLSLSTDGVCVAVTVKRGGRYRPQHDASMPVRKRAKWREKERPRLGTNNAEAPPAPDPDAHLMGFDPGARSIGGYYIRHPDGTISSGVLPKCGYTKTPSFGFDMTAASFKSTRLVSINNSIRFVLDNANDIFEAGMRKSFRRVRFANHILRQKHFARCGQQLAREFGRHHPIATPIRLKVFYGSSGFTTPAGMFIPCAPYRKFAREIVPLLKGYNIVVDLNMVNEDRTTVVCPHCHAPYKRVRPRDDQHVHPHRVMLCENPQYRGAQWRATVPDALNVDHRDKSAAENILWRSLATEDELSGSPFSRTSIPRLPTSFQYHQLANRQHSSTDG

SEQ ID NO: 2863 - protein, 227 aa, Carpediemonas membranifera
MGFDPGARSLGGYTIRPDRQSVSGVLAKCGYTATPSFRVNMSVASFKTTSLEALKQSIRFVHENIVQIINEGTRKCFRRATFANHCLRLKHFARAGRQLLDDLGGRPPEPIHLEVAYGAALFGSAGTPSCAPYRHFARALPGIMLRHNVVVSVTMVSEFRTSIVCPHCKAHFRRVVHTHRTMLCQNPACEGAPWRVERLRRHPEQRDILLNLSHRDAKLSKHALQRA

SEQ ID NO: 2864 - protein, 216 aa, Carpediemonas membranifera
MGFDPGARSLGGYTIRRPDGQSVSGVLAKCGYTATPSFRVNMSAASFKTTSLEALKQSIRFVHEKKNIVQIINEGMRKCFRRATFANHRLRQKHFARAGRQLLDDLGGRPPEPIHLEVAYGAALFGSAGTPSCAPYRHFARALPGIMLRHNVVVSVNMVSEFRTSIVIPRARELHGALNGYVGIPSRETYFSISLTEIRAPARTSFGAPSMQLQIR

SEQ ID NO: 2865 - protein, 309 aa, Carpediemonas membranifera
MPVRKRAKGREKRRKERPRLGENNAEAPPAPDPDAHLMGFDPGARSIGGYYIRHPDGTTSSGVLPKCGYTKTPSFGFDMTAASFKSTRLVSINNSIRFVLDNANDIFEAGMRKSFRRVRFANHILRQKHFARCGQQLAREFGWRRHHPIATPIRLKVFYGSSRFTTPAGMFIPCAPYRKFAREVVPLLKGYNTVVDLNMVNEDRTTVVCPHCHAPYKRVRPRDDQHVHPHRVMLSENPQCRGAQWRATVPDALNVDHRDKSAAENILWRSLATEDELSGSPFSRTSIPRLQTSFQYHQLANRQHSSTDG

SEQ ID NO: 2866 - protein, 395 aa, Carpediemonas membranifera
MSLRQPRLVPIVPMAPVRPGFMAYGDTMGLLNDNFCHRVGINPTLPHATQPLTEEQKRRYRDNPRSMGRLLSLSTDGASAAIGHNMMRACLFESERKGGRKERPRLGENNAEAPSAPDPDAHLMGFDPGARSIGGYYIRHPDGTTSSGVLPKCGYTKTPSFGFDMTAASFKSTRLVSINNSIRFVLDNANDIFEAGMRKSFRRVRVANHILRQKHFARCGQQLAREFGWRRHHPIATPIRLKVFYGSSRFTTPAGMFIPCAPYRKFAREVVPILKRYNIVVDLNMVNEDRTTVVCPHCHAPYKRVRPRDDQHVHPHRVMLCENPQCRGAQWRATVPDALNVDHRDKSAAENILWRSLATEDELSGSPFSRTLIPRLPTSFQYHQLANRQHSSTDG

SEQ ID NO: 2867 - protein, 225 aa, Carpediemonas membranifera
MGFDPGARSLGGYTIRRPDGQSVSGVLAKCGYTATPSFRVNMSAASFKTTSLEALKQSIRFVHENIVQIINEGTRKCFRRATFANHCLRLKHFARAGRQLLDDLGGRPPEPIHLEVAYGAALFGSASTPSCAPYRHFARALPGIMLRHNVVVRVDMVSEFRTSIVCPYCKAHFRRVVYTHRIMLCQNPACEGAPWRVERLRRHPEQRDILLNLSHRDKSASKNIL

SEQ ID NO: 2868 - protein, 441 aa, Carpediemonas membranifera
MPLWHGEFIIRLCTALMAARQQCPREFDVWLGEYATSTKLWLVNALEGYCWRLAKIITRVDTALTQRDPDVPRDDITRLRTEQRAVKAIVDEHLAKISTPGRVDEGVLLTLPCVWRISAALGELTDMVAAFNTAHPPLPGDKPLAGPKLVPLVPMAPIRPGFMHVPCSLNVLNPAWLAPLGVDPEHHTTERMTREQLEALPPNIRRVLSVKTDGVAVDLTVQVGALPYVSRRASGNPTMKRKARERLGVDDADARPAPDPDAHLMGFDPGARALGGFFIRHQDGTTSSGVVPKCGYTKTPSFAFDMTPASFKSTNLNSLQNSIRFVLLHEQEIFDAGMVKSFRRVRLTNHILRQKHFHRAGEQLARTLGWTPRRLPRGIAPPRAAPTRLVVFYGSARFKTPRRVHPCAPYGRFAKSLAHIMRTFNITAEVRMTNEFRTSLV

SEQ ID NO: 2869 - protein, 537 aa, Carpediemonas membranifera
MPLWHGEFIIRLCTALMAARQQCPREFDVWLGEYATSTKLWLVNALEGYCWRLAKIITRVDTALTQRDPDVPRDDITRLRTEQRAVKAIVDEHLAKISTPGRVDEGVLLTLPCVWRISAALGELTDMVAAFNTAHPPLPGDKPLAGPKLVPLVPMAPIRPGFMHVPCSLNVLNPAWLAPLGVDPEHHTTERMTREQLEALPPNIRRVLSVKTDGVAVDLTVQVGALPYVSRRASGNPTMKRKARERLGVDDADARPAPDPDAHLMGFDPGARALGGFFIRHPDGTTSSGVVPKCGYTKTPSFAFDMTPASFKSTNLNSLQNSIRFVLLHEQEIFDAGMVKSFRRVRLTNHILRQKHFHRAGEQLARTLGWTPRRLPRGIAPPRAAPTRLVVFYRSARFKTPRRVHPCAPYGRFAKSLAHIMRTFNITAEVRMTNEFRTSLVCPFCRARFRRTRYTRRTMRCHNPNCQGAPWYRQQRLNSDPTTSTWLNLSHRDKTAAQNILDCSLMTDAQYNKPVLSEIQPVFPTITPIHQLRLTSR

SEQ ID NO: 2870 - protein, 606 aa, Carpediemonas membranifera
MPSKICTVKASVNKAIGEINGGGDNNAPRRGNLEPSMRSFTQAKYTFTCLLACVSASAHALTPPRTVNLFDQEVLAQIVSIAKGRESKAKAADRCRWIGDLAMWRDPDITPLVEDFREAYVGIAAPFQSWLGEYSTATRVWLSRASPGYLTRLRAGLERVRPLLHDQPGVRQDCLDTLGELDTEVAAIAADHDRYHPQMHASPEGQRVGRTGTVAEALVGVLSCVTRMSAAVTKLVTLTRAVNLELSQALPEPKLIPMAPVRPGFMTIEYGHMSLTPAMKRRLRTTEQVDRYERDHGDITKLRRVLSVKTDGVSVAVTVWVGREKYRGGRVADRPTYKKGSNNKRARLGQDDAEATPAQDIQARMGFDPGARSLGGYTIRRPDGQSVSGVLAKCGYTATPSFRVNMSAASFKTTSLEALKQSIRFVHENIVQIINEGTRKCFRRATFANHCLRLKHFARAGRQLLDDLGGRPPEPIHLEVAYGAALFGSAGTPSCAPYRHFARALPGIISEFRTSIVCPYCKSHFRRVVHTHRTMLCQNPACEGAPWRVERLRRHPEQRDILLNLSHRDKSASENIFWCIYDATSDQIEQSPFHYDSQRGALPRYH

SEQ ID NO: 2871 - protein, 346 aa, Carpediemonas membranifera
MRSFTQAKYTFTCLLACVSASAHALTPPRTVKLVPFVPMAPVKPGFMTIEYGYMSLTPAMKRRLRVHVNWSATKNLTTEQVDRYERDHGDITKLRRVLSVRTDGVSVAVTGSSNKRARLGQDDAEATPAPDIQALMGFDPGARSLGGYTIRRPDGQSVSGVLAKCGYTATPSFRVNMSAASFKTTSLEALKQSIRFVHENIVQIINKGTRKCFRRASFANHCLRQKHFARAGRQLLDDLGGRPPEPIHLEVAYGAALFGSAGTPSCAPYRHFARALPGIMLRHNVVVTVTMVSEFRTSIVCPYCKTHFRRVVHTHRTMLCQNPACEGAPWRVERHPEQRDILLSPR

SEQ ID NO: 2872 - protein, 431 aa, Carpediemonas membranifera
MPLWHDEFIIRLCTAFGAARLQCPGEFDVWLGEYATSTKLWLVNALEGYCWRLAKIITRVDTALTQRDPDVPRDDITRLRTEQRAVKAIVDEHLAKISTPGRVDEGVLLTLPCVWRISAALGELTDMVAAFNTAHPPLPGDKPLAGPKLVPLVPMAPVRPGFMHVPCSLNVLNPAWLAQLGVDPEHHATERMTREQLEALPPKIRRVLSVKTDGVAVDLTVQVGALPYVNRRASGNPTMKRKARERLGVDDADARPTPDPDAHLMGFDPGARALGGFFIRHPDGTTSSGVVPKCGYTKTPSFAFDMTPASCKSTNLDSLQNSIKFVLLHEQEIFDAGMVKSFRRVRLTNHILRQKYFHRAGEQLARTLGWTPRRLPRGIAPPRAAPTRLVVFYGSARFKTPRRVHPCAPYGRFAKSLPHIMRLSTTLLKCG

SEQ ID NO: 2873 - protein, 364 aa, Carpediemonas membranifera
MTLEYGYMSLTPAMKRRLRVHVNWSATKNLTDEQVAEYERDHGDITKLRRVLYVKTDGVSVAVTVWVGREKYRGGRVADRPTYKKGSSNKRTRLGQDDAEATPAPDIQALMGFDPGARSLGGYTIRRPDGQSVSGVLAKCGYTATLSFRMNMSAASFKTTSLEALKQSIRFVHENTVQIINEGTRKCFRRATFANHCLRLKHFARAGRQLLDDLGGRPPEPIHLEVVYGAALFGSAGTPSCAPYRHFARALPGIMLRHNVVVSVTMVSELRTSIVCPYCKAHFRRVVHTHRTMLCQNPACEGAPWRVERLRRHPEQRVILLNLSHRDKSASENILWCTFDATSDQIEQSPFHYDSQRGALPRYH

SEQ ID NO: 2874 - protein, 600 aa, Carpediemonas membranifera
MTSIYTVKFSISSVLHNRRNVIPFIADFYAGLENRLCSFTKAKYFHTCLLSYIAACCHHANLSLPVHDQALHQAIVIVAYRRSGEYRNLAADSLVDRFLGAKKYAAVRQVVTSIAEMPLWHDEFIIRLCTAFRAARQQCPREFDVWLGEYATSTKLSLVNALEGYCWRLAKIITRVDTALTQRDPDVPRDDITRLRTEQRAVKAIVDEHLAKISTPGRVDEGVLLTLPCVWRISAALGELTDMVAAFNTAHPPLPGDKPLAGPKLVPLVPMAPVRPGFMHVPCSLNVLNPAWLAQFGVDPEHHATERMTREQLEALPPNIRRVLSVKTDGVAVDLTVQVGALPYVNRRASGNPTMKRKARERLGVDDADAHPAPDPDAHLMGFDPGARALGGFFIRHPDGTTSSGVVPKCGYTKTPSFTFDMTPASFKSTNLDSLQNSIRFVLLHEQEIFDAGMVKSFRRVRLTNHILRPKHFHRAGEQLARTLGWTPRRLPRSIAPPRAAPTRLVVFYGSARFKTPRRVHPCAPYGRFAESLAHMRAFNITAEVRMTNEFRTSLVCPFCRARFRRTRYTRRTMRCHNPNCQGAPWYRQQRLNSDPTTTT

SEQ ID NO: 2875 - protein, 477 aa, Carpediemonas membranifera
MPSKIYTVKASVNKAIGEINGGGDNNAPRRGNLEPGMRSFTKAKYTFTCLLACVSASAHALTPPRTVNLFDEEVLKQIVSIAKGRETKAKAADRCRWIGDLAMWRDPDITPLVRDFVTAYSYLGLCKPFDTWLGEYSTATRVWLSRASPGYLTRLRAGLERVRPLLHDRPGVRQDFLDTLGELETEVAAIAADHGRYHPQMHASPEGQRVGRTGTVAEALVGVLSCTDGVSVAVTVWVGREKYRGGRVADRPTYKKGSSNKRARLGQDDAEATPAPDIQALMGFDPGARLLGGYTIRRPDGQSVSGVLAKCGYTATPSFRVNMSAASFKTTSLEALKQSIRFVHENIVQIINEGTRKCFRRATFANHCLRLKHFARAGRKLLDDLGGRPPEPIHLEVAYGAALFGSAGTPSCAPYRHFARALPGIMLRHNVVVSVTMVSEFRTSIVCPYCKAHFRRVVHTPHHALPESRVRGSSMAR

SEQ ID NO: 2876 - protein, 364 aa, Carpediemonas membranifera
MTIERGVTALTPAMKRRLRVYRDWSAKSNLTDEQVDRYERDHGDITKLRRVLSVKTDGVSVAVTVWVGREKYRGGRVADRPTYKKGSSNKRARLGQDDAEATPAPDIQALMGFDPGARSLGGYTIRRPDGQSVSGVLAKCGYTATPSFRVNMSAASFKTTSLEALKQSIRFVHENIVQIINEGTRKCFRRETFANHCLRLKHFARAGRQLLDDLGGRPPEPIHLEVAYGAALFGSAGTPSCAPYRHFARALPGIMFRHNVVVSVTMVSEFRTSIVCPYCKAHFRRVVHTHRAMLCQNPACEGAPWRVERLRRHPEQRDILLNLSHRDKSASENILWCTFDATSDQIEQSPFHYDSQRGALPRYH

SEQ ID NO: 2877 - protein, 206 aa, Carpediemonas membranifera
MTPRLLLPRTFKLSWASTLVLGRWAATRSAAQTGRVSYTATPSFRVNMSAASFKTTSLEALKQSIRFVHENIVQNINEGTRKCFRRATFANHCLRQKHFARAGRQLLDDLGGRPLEPIHLEVAYGAALFCSAGTPSCAPYRHFARALPGIMLRHNVVVTVTMVSEFRTSIVCPYCKAHFRRVVHTHRTMLCQNPACEGGWTSSMAR

SEQ ID NO: 2878 - protein, 473 aa, Carpediemonas membranifera
MEIYTIKASIKQAFRQNYTEERRVGDYAAAKYLYSCLLARLAVECYAQRRQLPLHDADFHNGLLTHVRGGQPGQAYAAIVQSLDTLPMWRETTTQDLVAQLKGRLALLGVSPSLRKWFIRYANSVKLWLARTVTTYRDRLQGTLARLEEALAGVGSPAFFEQELAGVHAILNMVNPEILACLPSLFWATHMGENDGLPVSQAAPRILSCVWAIADGVETLSGLISHFNGEYSMSLRQPRLVPIVPMAPVRPGFMAYGDTMGLLNDNFCHRVGINHALPHATNPLTEEQKRRYRDNPRSMGRLREFGWRRHHPIPTPIRLKAFYGSSGFTTPAGMFIPCAPYRKFAREIVPLLKRYNIVVDLNMVNEDRTTVVCPHCHAPYKRVRPRDDQHVHPHRVMLCENPQCRGAQWRATVPDALNVDHRDKSAAENILWRSLATEDELSGSPFSRTSIPRLPTSFQYHQLANRHHSSADG

SEQ ID NO: 2879 - protein, 254 aa, Carpediemonas membranifera
MGFDPGARSLGGYTIRRPDGQSVSGVLAKCGYTATPTFRVNMSAASFKTTSLEALKQSIRFVHENIVQIINEGMRKCFRRASFANHCLRLKHFARAGRQLLDDLGGRPPEPIHLEVAYGAALFGSAGTPSCAPYRHFARALPGIMLRHNVVVTVTMVSEFRISIMCPYCKAHFRRVVHTQRTMLCQNPACEGAPWRVERLRRHPEQRDILLNLSHRDKSASENILWCTYDATSDQIEQSPFHYDSQRGALPRYH

SEQ ID NO: 2880 - protein, 351 aa, Carpediemonas membranifera
MRSAGNSPYMTPTSTTDCSLMYAAVIRVRPTRPLCSRYRPQHDASMPVRKRAKWREKERPRLGTNSAEAPPAPDPDAHLMGFDPGARSIGGYYIRHPDGTTSSGVLPKCGYTKTPSFGFDMTAASFKSTRLVSINNSIRFVLDNANDIFEAGMRKSFRRVRFANHILRQKHFARCGQQLAREFGWRGHHPIATPIRLKAFYGSSGFTTPAGMFIPCAPYRKFAREIVPLLKRYNIVVDLNMVNGDRTTVVCPHCHAPYKRVRPRDDQHVHPHRVMLCEKPQCRGAQWRATVPDALNVDHRDKSAAENILWRSLATEDELSGSPFSRTSIPRLPTSFQYHQLANRHHSSADG

SEQ ID NO: 2881 - protein, 280 aa, Carpediemonas membranifera
MHTSSAHLMGFDPGARSIGGYYIRHPDGTTSSGVLPKCGYTKTPSFGYDMTAASFKSTRLVSINNSIRFVLDNANDIFEAGMRKSFRRVRFANHILRQKHFARCGQQLAREFGWLRHHPITTPIRLKVFYGSSGFTKPAGMFIPCASYRKFAREIVPLLKGYNIVVDLNMVNEDRTTVVCPHCHAPYKRVRPRDDQHVHPHRVMLCENPQCRGAQWRATVPDALNVDRRDKSAAENILWRSLATEDELSGSPFSRTSIPRLPTSFQHHQLANRQHSSTDG

SEQ ID NO: 2882 - protein, 336 aa, Carpediemonas membranifera
MVAAFNPAHPPLPGDKPLAGPKLVPMAPVRPGFMHVPCSLNVLNPAWLAQLGVDPEHHATERMTREQLEALPPNIRRVLSVKTDGVAVDLTVQVGALPYVSRRASGNPTMKRKARERLGVDDADARPAPDPDAQVMGFDPGARALGGFFIRHPDGTTSSGVVPKCGYTKTPSFAFDMTPASFKSTNLDSLQNSIRFVLLHEQEIFDAGMVKSFRRVRLTNHILRQKHFHRAGEQLARTLGWTPRRLPRGIAPPRAAPTRLVVFYGSARFKTPRRVHPCAPYGRFATLLTHIMRAFNITAEVRMTNEFRTSLVCPFCRARFRRTRYTRRTMRCHNPN

SEQ ID NO: 2883 - protein, 220 aa, Carpediemonas membranifera
MNSRGLNRFSLTAHLSYTRRVADMRASSMVRATVLGGILVLAPAEEVPFRPCLGGRTLLPSFASVLVCYALICRPLPASEAHVVVGSAGTPSCAPYRHFARALPGIMFRHNVVVSVTMVSEFRTSIVCPYCKAHFRRVVHTHRTMLCQNPACEGAPWRVERLRRHPEQRDILLNLSRRDKSASENILWCTFDATSDQIEQSPFHYDYDEVLFLAIINLLS

SEQ ID NO: 2884 - protein, 365 aa, Carpediemonas membranifera
MRSFTQAKYTFTCLLACVSASAHALTPPRTVNLFDQEALAQIVSIAQQKVSKAKAADRCRWIGDLAMWRDPDITPLVQDFREAFKKGSNNKRARLGQDDAEATPAPDIQALMGFDPGARSLGGYTIRRPDGQSVSGVLAKCGYTATPSFRVNMSAASFKTTSLEALKQSIRFVHENIVQIINEGTRKCIRRASFANHRLRQKHFARAGRQLLDDLGGSPPEPSHLEVAYGAALFDSAGTPSCAPYRHFARALPGIMLRHNVVVTVTMVSEFRTSIVCPYCKAHFRRVVHTHRTTLCQNPACEGAPWPVERLRRHPEQRDMLLNLSHRDKSASENILWCTFDVTSDQIEQSPFHYDSQRGALPRYH

SEQ ID NO: 2885 - protein, 369 aa, Carpediemonas membranifera
MWREPTTQDLVAQLEGRAESHGVSPSLRKWFIRYANSVKLWLARTVTTYRDRLQGTLARLEEALAGVGSPAFFEQELAGVHAILNMVNPEILACLPSLFWATHMGENDGLPVSQAAPRILSCVWAIADGVEEQKRRYRDNPRSMGRLLSLSTDGVCVAVTIKRGFGRYRPQHDASMPVRKRAKGREKERPRLGTNNAEAPPAPDPDAHLMGFDPGARSIRGYYIRHPDGTTSSGVLPKCGYTKTPSFGFDMTAASFKSTRLVSINNSIRFVLDNANDIFEAGMRKSFRRVRFANHILRQKHFARCGQQLAREFGRHHPIATPIRLKVFYGSSGFTTPAGMFIPCAPYRKFAREIVPLLKGYNTVVDQHG

SEQ ID NO: 2886 - protein, 421 aa, Carpediemonas membranifera
MVAAFNTAHPPLPGDKPLAGPKLVPLVPMAPVRPGFMYVPCSLNVLSPAWLAQLGVDPEHHATERMTREQLEALPPNIRRVLSVKTDGVAVDLTVQVGALPYVNRRASGNPTMKRKARERLGVDDADARPAPDPDAQVMGFDPGARALGGFFIRHPDGTTSSGVVPKCGYTKTPSFAFDMTPASFKSTNLDSLQNSIRFVLLHEQEIFDAGMVKSFRRVRLTNHILRQKHFHRAGEQLARTLGWTPRRLPRGIAPPRAAPTRLVVFYGSARFKTPRRVHPCAPYGRFATLLPHIMRAFNITAEVRMTDEFRTSLVCPLCRARFRRTRYTRRTMRCHNPNCQGAPWYRQQRLNSNPTSTWLNLSHRDKTAAQNILDCGLMTDAQYQASAFRNPRPPARLPNYNPNTPITANQPLVFASGQAN

SEQ ID NO: 2887 - protein, 621 aa, Carpediemonas membranifera
MQAAQYTPMPSKIYTVKASVNKAIGEINGGGDNNAPRRGNLEPGMRSFTQAKYTFTCLLACVSASAHALTPPRTVNLFDQVLAQIVSIAQQKVSKAKAADRCRWIGDLAMWRDPDITPLVRDLVTAYSYLGLCKPFDTWLGEYSTATRVWLSRASPGYLTRLRAGLERVRPLLHDQPGVRQDFLDTLGELDTEGQRVGRTGTVAEALVGVLSCVTRMSAAVTKLVTLTRAVNLELSQALPEPKLIPFVPMAPVRPGFMTLERGVTALTPAMKRRLRVHVNWSATKNLTDEQVDRYERDHGDITKLRRVLSVKTDGVSVAVTVWVGREKYRGGRVADRPTYKKGSSNKRARLGQDDAEATPAPDIQALMGFDPGARSLGGYTIRRPDGQSVSGVLAKCGYTVTPSFRVNMSAASFKTTSLEALKQSIRFVHENIVQIINEGTRKCFRRATFANHCLRLKHFARAGRQLLDDLGGRPQEPIHLEVAYGAALFGSAGTPSCAPYRHFARALPGIMLRHNVVVTVTMVSEFRTSIVCPYCKAHFRRVVHTHRTMLCQNPACEGAPWRVERLRRHPEQRDILLNLSHRDKSASENILWCTFDATSDQIEQSPFHYDSQRGALPHYH

SEQ ID NO: 2888 - protein, 234 aa, Carpediemonas membranifera
MGFDPGARSLGGYTIRRPDGQSVSGVLAKCGYTVTPSFRVNMSAASFKTTSLEALKQSIRFVHENIVQIINEGTRKCFRRATFANHCLRLKHFARAGRQLLDDLGGRPQEPIHLEVAYGAALFGSAGTPSCPPYRHFARALPGIMLRHNVVVTVTMVSEFRTSIVWPYCKAHFRRVVHTAPCSARIPRARELHGALNGYVGIPSRETYFSISLTEIRAPARTSFGAPSMQLQIR

SEQ ID NO: 2889 - protein, 483 aa, Carpediemonas membranifera
MNSRGLNRFSLTAHLSYTRRVADMRASSMVRATVLGGILVLAPAEEVPFRPCLGGRTLLSSFASVLVCYALALPEGQRVGRTGTVAEALVGVLSCVTRMSAAVTKLVTLTRAVNLELSQALPEPKLIPFVTMAPVRPGFMTLERGVTALTPAMKRRLRVHVNWSATKNLTDEQVAEYERDHGDITKLRRVLSVKTDGVSVAVTVWVGREKYRGGRVADRPTYKKGSSNKRARLGQDDAEATPAPDIQALMGFDPGARSLGGYTIRRPDGQSVSGVLAKCGYTATPSFRVNMSAASFKTTSLEALKQSIRFVHENIVQIINEGTRKCFRRATFANHCLRLKHFARAGRQLLDDLGGRPRSPFTSKSRMGLHCSVPPALPPCPPYRHFARALPGIMLRHNVVVTVTMVSEFRTSIVCPYCKAHFRRVVHTAPCSARIPRARELHGALNGYVGIPSRETYFSISLTEIRAPARTSFGAPSMQLQIR

SEQ ID NO: 2890 - protein, 292 aa, Carpediemonas membranifera
MVFIVGSYMSSSSSMTSCTPVVRNKMEIYTIKASIKQAFRQNYTEERRVGDYAAAKNLDSCLLARLAVECYAQRRQLPLHDADFHKGLITHLRGGQPGQAYAAIVQSLDTLPMWREPTTQDLVAQLEGRAESHGVSPSLRKWFIRYANSVKLWFIPCAPYRKFAREIVPLLKRYNIVVDLNMVNEDHTTVVCPHCHAPYKRVRPRDDQHVHPHRVMLCENPQCRGAQWRATVPDALNVDHRDKSAAENILWRSLATEDEHSGSPFSRTSIPRLPTSFQYHQLANRQHSSTDG

SEQ ID NO: 2891 - protein, 441 aa, Carpediemonas membranifera
MHHRQMHASPEGQRVGRTGTVAEALVGVLSCVTRMSAAVTKLVTLTRAVNLELSQALPEPKLVPFVPMAPVRPGFMTIERGVTALTPAMKRRLRVHVNWSATKNLTDEQVDRYERDHGDITKLRRVLSVKTDGVSAAVTVWVGREKYRGGRVADRPTYKKGSSNKRARLGQDDAEATPAPDIQALMGFDLGARSLGGYTIRRPDGQSVSGVLAKCGYTATPTFRVNMSVASFKTTSLEALKQSIRFVHENIVQIINEGTRKCFCRATFANHCLRLKHFARAGRQLLDDLGGRPPEPIHLEVAYGAALFGSAGTPSCAPYRHFARALPGIMLRHNVVVSVTMVSEFRTSIVWPYCKAHFRRVVHTHRTMLCQNPACEGAPWRVERLRRHPEQRDILLNLSHRDKSASENILWCTFDATSDQIEQSPFHYDSQRGASSLSLTC

SEQ ID NO: 2892 - protein, 511 aa, Carpediemonas membranifera
MWRDPDITPLVQDFVTAYSYIGLCKQFDTWLGEYSTSTRVWLSRASPGYLTRLRAGLERVRPLLHDQPGVRQDFLDTLGELDTEVAAIAADHDRYHPQMHALPEEQRVGRTGTVAEALVGVLSCVTRMIAAVTKLVTLTRAVNLELSQALPEPKLVPFVPMAPVKPGFMTLERGVTALTPAMKRRLRVHVNWSATKNLTDEQVAEYERDHGDITKLRRVLSVRTDGVSVAVTGSNNKRARLGQDDAEATPAPDIQALMGFDPGARSLGGYTIRRPDRQSVSGVLAKCGYTATPSFRVNMSAASFKKTSLEALKQSIRFVHENIVQIFNEGTRKCFRRATFANHCLRLKHFARAGRQLLDDLGGRPPEPIHLEVAYGAALFGSAGTPSCAPYRHFARALPGIMLRHNVVVSVDMVSEFRTSIVCPYCKAHFRRVVRTHRTMLCQNPACEGAPWRVERLRRHPEQRDILLNLSHRDKSASENILWCSFDATSDQIEQSPFHYDSQRGALPRYH

SEQ ID NO: 2893 - protein, 229 aa, Carpediemonas membranifera
MTAASFKSTRLVSINNSMRFVLDNANDIFEAGMRKSFRLVRFANHILRQKHFARCGQQLAREFGRHHPIATPIRLKVFYGSSGFTTPAGMFIPCAPYRKFAREIVPLLKGYNIVVDLNMVNEDRTTVVCPHCHAPYKRVRPRDDQHVHPHRVMLCENPQCRGAQWRATVPDALNVDHRDKSAAENILWRSLATEDELSGSPFSRTSIPRLPTSFQYHQLANRQHSSTDG

SEQ ID NO: 2894 - protein, 293 aa, Carpediemonas membranifera
MPSKIYTVKASVNKAIGEINDGGDNNAPRRGRGNLEPGMRSFTQAKYTFTCLLAYVSASVHALTPPRTVNLFDEEVLKQIAIAQQKVSKAKAADRAISELVGRVLHSHPGLTLARVTRVPDPSSCWIRTGASVQLLDDLGGRPPEPNHLEVAYGAALFGSAGTPSCAPYRHFAQALPGIMLRHNVVVSVTMVSEFRTSIVCPYCKAHFRRVVHTPRTMLCQNPACEGAPWRVERLRRHPEQRDILLNLSHRDKSASENIIWCTFDATSDQIEQSPFHYDSQRVLFLAIINVLS

SEQ ID NO: 2895 - protein, 478 aa, Dreissena polymorpha
MKRKREDLTLWDAANVHKHKSMWYWWEYIRRKDMVNYEKTDCDVIQLLQSASVKKQKTQSDKFLTSFSVGIRPTKHQKRVLNEMLRVSNYTYNWCLWLVNEKGIRPHQFELQKIVCKTNANDVDPQYRIENDDWFFNNRMTSVKTTSCKNFYTSYKAAKSLKSKLKRPMSVSNIVQGSFCVPKLFIRNLSSKDVSIDNINMLNRYICMIPENFEKRSKPKERFLKLAKPITKIPPFDHDVKIVKRADGMFILNIPCDPKYTRRNASNDTIDKRVCGIDPGGRTFATVYDPIDCCVFQVGIKEDKQYVISKLHNKIDHAQMHLRKAQNKKQQQAARERIVSLKKTHLKLKTFVDDIHLKLSSHLVKEYQFVALGKINVAPLVKKKHLSKRAKRDLLYWQHYRFRQRLTHRTTNTECILDVQNEAYTSKTCGVCGTINKNLEKSETFYCDNCKYNTHRDVNGARNILLKSLRMFPFVNSQ

SEQ ID NO: 2896 - protein, 468 aa, Dreissena polymorpha
MKRKRENFTLWDAANVHKHKSMWYWWEHIRRKDMVNHEKTDCDVIQLLQSASVKKQKTQSDKFLTSFSVGIRPTKHQKRVLNEMLRVSNYTYNWCLWLVDEKGQRPHLFELQKIVCKTTANDVDPYYRMENDDWFFNNKMSTIKLTSCKNFCTSYKSAKSLKSKLKRPMSVSNIIQGSFCVQKLFIRRLSDKDVSIDNTQMQNRYICMMPDNFEKRSNPKERFLKLAKPITKIPPIDHDVKIVKRADGMFIMNIPCDPKYTRRNASNNTIEKRVCGIDPGGRTFATVYDPIDCCVFQVGIKEDKQYVISKLHNKIDHAHMHLTKAQNKKQQQAARERIVSLKKTHLKLKTFVDDIHLKLSSHLVKEYEYVALGKINVAQLVKTDRPKPLSPRAKRDLLYWQHYRFRQRLTHRTTNTECILDVQNEAYTSKTCGVCGTINKNLEKSETFYCDNCKYNTHRDVNGARNIC

SEQ ID NO: 2897 - protein, 480 aa, Dreissena polymorpha
MKRKREDLTLWDAANVHKHKSMWYWWEYIRRKDMVNHEKTDCDVIQLLQSASVKKQKTQSDKFLTSFSVGIRPTKHQKRVLNEMLRVSNYTYNWCLWLVNEKGIRPHQFELQKIVCKTNANDVDPQYRMENDDWFFNNKMTSVKTTSCKNFYTSYKAAKSLKSKLKRPMSVSNIVQGSFCVPKVLLRHLSGKDVSTDNSNMLNRYVCMMPDNFEKRSKPKERFLKLAKRITNIPPINHDVNIVKRADGMFVLNIPCDPKYTRRNASNDTIDKRVCGIDPGGRTFATVYDPIDCNVFQVGIEEDKQYVISKLHNKIDHAHMHLTKAQNKKQQQAARERIVSLKKVHLKLKTFVEDIHLKLSSHLVKEYQYVALGKINVAPMVKKKHLSKRAKRDLLYWQHYRFRQRLINRTTNTGCVLDVQDEAYTSKTCGMCSTINESLEKSETFNCDNCKYNTHRDVNGARNILLKSLSMFPFEKQQQY

SEQ ID NO: 2898 - protein, 482 aa, Dreissena polymorpha
MKRKREDLTLWDAAHVHKHKSMWYWWEYIRRKDMVNHEKTDCDVIQLLQSASVKKQKTQSDKFFTSFSVGIRPTKHQKRVLNEMLRVSNYTYNWCLWLVNEKGIEPHQFELQKIVCKTNANDVDPQYRMENDDWFFNNKMTSVKTTSCKNFYTSYKAAKSLKSKLKRPMSVSNIVQGSFCVPKLFVRNLSSKDVSIDNINMLNRYICMIPENFEKRSKPKERFLKLAKPITKIPPFDHDVKIVKRADGMFILNIPCDPKYTRRNASNDTIDKRVCGIDPGGRTFATVYDPIDCSVFQVGIEEDKQYVISKLHNKIYHAHKHLTKAQNKKQQQAASERIVSLKKTHLKLKTFVDDIHLKLSSHLVKEYEYVALGKINVAQLVKTDRPKPLSPRAKRDLLYWQHYRFRQRLTHRTTNTECILDVQNEAYTSKTCGVCGTINKNLEKSETFFCDQCKYNTHRDVNGARNILLKSLRMFPFEKQQQ

SEQ ID NO: 2899 - protein, 479 aa, Dreissena polymorpha
MKRKREDLTLWDAANVHKHKSMWYWWDYIRRKDLINHEKTDCDVIQLLQSASVKKQKTQSDKILTSFSVGLRPTKHQKQVLNEMLRVSNYTYNWCLWLVNEKGLKPHLFELQKIVCKTNASDVDPQYRIENDDWFFNNKMTRVKGTSCKNFCTSYKSAKALKSKLKRPMPISNIIQGSFGVPKLYIRLLSSKDVCTHNTNMQKRYICMIPDNFEKRSNPKERFLKLAKPITKIPPIEHDVKIVKRADGMFIMNIPCDPKYTRRNASNDTIDKRVCGIDPGGRTFATVYDPIDCSVFQVGIEEDKQYVISKLHNKIDHAHMHLTKAQNKKQQQAARERIVSLKKTHLKLKTFVEDIHLKLSSHLVKEYQYVALGKINVAPMVKKKHLSKRAKRDLLYWQHYRFRQRLINRTTNTGCVLDVQDEAYTSKTCGMCSTINENLKKSETFYCDQCKYNTHRDVNGARNILLKSLRMFPFEKQQQ

SEQ ID NO: 2900 - protein, 479 aa, Dreissena polymorpha
MKRKREDLTLWDAANVHKHKSMWYWWEYIRRKDLINHEKTDCDVIQLLQSASVKKQKTHSDDFLTSFSVGIRPTKHQKQVLNEMLRVSNYTYNWCLWLVNEKGLRPHQFELQKIVCKTNARDVDPQYRMENDDWFFNNKMTRVKGTSCKNFCTSYKSAKALKSKLKRPMPISNIIEGSFGVPNLYIRLLSSKDVCTHETNMQNRYICMMPDNFEKRSNPKERFLKLAKRITNIPPINHDVKIVKRADGMFIMNIPCDPKYTRRNASNDTIEKRVCGIDPGGRTFATVYDPIDCCVFQVGIKEDKQYVISKLHNKIDHAHMHLTKAQNKKQQQAARERIVSLKKTHLKLKTFVEDIHLKLSSHLVKEYHYVALGKINVAPMVKKKHLSKRAKRDLLYWQHYRFRQRLTHRTTNTDCIFEVQNEAYTSKTCGVCGKINENLEKSETFYCDQCKYNTHRDVNGARNILLKSLNMFPFEKKQQ

SEQ ID NO: 2901 - protein, 479 aa, Dreissena polymorpha
MKRKREDLTLWDAANVHKHKSMWYWWEYIRRKDLINHEKTDCDVIQLLQSASVKKQKTQSDKFLTSFSVGIRPTKHQKQVLNEMLRVSNYTYNWCLWLVNEKGLKPHQFELQKIVCKTNARDVDPQYRMANDDWFFNNKMTRVKGTSCKNFCTSYKSAKALKSKLKRPMPISNIIEGSFGVPNLYIRLLSSKDVCTHETNMQNRYICMMPDNFEKRSNPKERFLKLAKRITNIPPINHDVKIVKRADGMFIMNIPCDPKYTRRNASNDTIEKRVCGIDPGGRTFATVYDPIDCCVFQVGIKEDKQYVISKLHNKIDHAHMHLTKAQNKKQQQAARERIVSLKKTHLKLKTFVEDIHLKLSSHLVKEYHYVALGKINVAPMVKKKHLSKRAKRDLLYWQHYRFRQRLTHRTTNTECIFEVQNEAYTSMTCGVCGKLNKNLEKSETFYCDSCNYNTHRDVNGARNILLKSLNMFPFEKKQQ

SEQ ID NO: 2902 - protein, 352 aa, Dreissena polymorpha
MANDDWFFNNKMTSIKTTSCKNFFTSYKAAKSLKSKLKRPMCVSNIIQGSFCVRKEFIRHLSGKDVSTDNMLNRYICMMPDNFEKRSKPKERFLKLAKPITNIPPINHDVKIVKRADGMFIMNIPCDPKYTRRNASNDTIEKRVCGIDPGGRTFATVYDPIDCCVFQVGIKEDKQYVISKLHNKIDHAHKHLTKAQNKKQQQAASERIVSLKKTHLKLKTFVEDIHLKLSSHLVKEYQYVALGKINVAQLVKTDRPKPLSKRAKRDLLSWQHYRFRQRLTHRTTNTDCILEVQNEANTSKTCGVCGEKDDNLGKSETYYCIKCEYNTHRDVNGARNILLKSLHMFPFKKHQK

SEQ ID NO: 2903 - protein, 478 aa, Dreissena polymorpha
MKRKREHFTLWDAANVHKHKSMWYWWAYIRRKDMVNHEKTDCDVMQLLQSASVKKQKTQSDKFLTSFSVGLRPTKHQKQVLNEMLRVSNYTYNWCLWLVNEKGLKPHLFELQKVVCKTNASDVDPYYRMENDNWFFNNKMSTIKLTSCKNFCTSYKSAKSLKSKLKRPMSVSNIIQGSFCVQKLFIRRLSDKDVSIDNTQMQNRYICMMPDNFEKRSNPKERFLKLAKPITKIPPIDHDVKIVKRADGMFIMNIPCDPKYTRRNASNDTIEKRVCGIDPGGRTFATVYDPIDCCVFQVGIKEDKQYVISKLHNKIDHAHMHLTKAQNKKQQQAARERIVSLKKTHLKLKTFVEDIHLKLSSHLVKEYQYVALGKINVAPLVKKKHLSKRAKRDVLYWQHYRFRQRLTNRATNTECILEVQNEAYTSKTCGVCGTINKNLEKSETFYCDNCKYNTHRDVNGARNILLKSLRMFPFVNSQ

SEQ ID NO: 2904 - protein, 442 aa, Dreissena polymorpha
MVNHEKTDCDVIQLLQSASVKKQKTQSDKFLTSFSVGIRPTKHQKRVLNEMLRVSNYTYNWCLWLVNEKGIRPHQFELQKIVCKTNASDVDPQYRMANDDWFFNNKMTSIKTTSCKNFFTSYKAAKSLKSKLKRPMCVSNIIQGSFCVRKEFIRHLSGKDVSTDNMLNRYICMMPDNFEKRSKPKERFLKLAKPITNIPPINHDVKIVKRADGMFIMNIPCDPKYTRRNASNDTIEKRVCGIDPGGRTFATVYDPIDCCVFQVGIKEDKQYVISKLHNKIDHAHKHLTKAQNKKQQQAASERIVSLKKTHLKLKTFVEDIHLKLSSHLVKEYQYVALGKINVAQLVKTDRPKPLSKRAKRDLLSWQHYRFRQRLTHRTTNTDCILEVQNEANTSKTCGVCGEKDDNLGKSETYYCIKCEYNTHRDVNGARNILLKSLHMFPF

SEQ ID NO: 2905 - protein, 483 aa, Dreissena polymorpha
MKRKREHFTLWDAANVHKHKSMWYWWAYIRRKDMVNHEKTDCDVIQLLQSASVKKQKTQSDKFLTSFSVGLRPTKHQKQVLNEMLRVSNYTYNWCLWLVNEKGLKPHLFELQKVVCKTNASDVDPYYRMENDDWFFNNKMSTIKLTSCKNFCTSYKSAKSLKSKLKRPMSVSNIIQGSFCVQKLFIRRLSDKDVSIDNTQMQNRYICMMPDNFEKRSNPKERFLKLAKPITKIPPIDHDVKIVKRADGMFIMNIPCDPKYTRRNASNDTIEKRVCGIDPGGRTFATVYDPIDCCVFQVGIKEDKQYVISKLHNKIDHAHMHLTKAQNKKQQQAARERIVSLKKTHLKLKTFVDDIHLKLSSHLVKEYEYVALGKINVAQLVKTDRPKPLSPRAKRDLLYWQHYRFRQRLTHRTTNTECILDVQNEAYTSKTCGVCGTINKNLEKSETFYCDNCKYNTHRDVNGARNILLKSLRMFPFEKQQQY

SEQ ID NO: 2906 - protein, 282 aa, Dreissena polymorpha
MLNRYICMIPDNFEKRSKPKERFLKLAKPITKIPPIDHDVKIVKRADGMFIMNIPCDPKYTRRNASNDTIDKRVCGIDPGGRTFATVYDPIDCSVFQVGIEEDKQYVISKLHNKIYHAHKHLTKAQNKKQQQAASERIVSLKKTHLKLKTFVEDIHLKLSSHLVKEYQYVALGKINVAQLVKTDRPKPLSKRAKRDLLSWQHYRFRQRLTHRTTNTDCILEVQNEANTSKTCGVCGEKDDNLGKSETYYCIKCEYNTHRDVNGARNILLKSLSMFPFEKKQQ

SEQ ID NO: 2907 - protein, 477 aa, Dreissena polymorpha
MKRKREDLTVWDAANVHKHKSMWYWWEYIRRKDLINHEQTDCDAIQLLQSASVKQQKTQSDKFLTSFSVGLRPTKHQKQVLNEMLRVSNYTYNWCLWLVNEKGLRPHQFELQKIVCKTNARDVDPQYRMENDDWFFNNKMTRVKGTSCKKFCTSYKSAKALKSKLKRPMPISNIIEGSFGVPNLYIRLLSSKDVCTHETNMQNRYICMIPDNFEKRSNPKERFLKLAKSITKIPPIDHDVNIVKRADGMFIMNIPCDPKYTRRNASNDTIEKRVCGIDPGGRTFATVYDPIDCCVFQVGIKEDKQYVISKLHNKIDHANMHLTKAQHKKQQKAAQERIVSLKKIHFKLKTFVDDIHLKLSSHLVKEYKYVALGKINVAPLVKKKHLSKRAKRDLLYWQHYRFRQRLTHRTTNTECILDVQNEAYTSKTCGVCSTINENLEKSETFYCDQCKYNTHRDVNGARNILLKSLRMFPFENQ

SEQ ID NO: 2908 - protein, 482 aa, Dreissena polymorpha
MKRKREQLTLWDAANVHKHKSMWYWWQSIRRKDLVNHDKTACDVMELLQSASHKKQNTQSDKFLTSFSVGIRPTKHQKRVLNEMLRVSNYTYNWCLWLVNEKGLKPLQFTLQKIVCKTNAGDVDPQYRIENDEWFFNNKMSTIKLTSCKNFCTSYKSAKSLKSKLKRPMSVSNIVQGSFCVQKVLLRHLSGKDVFTNNANMQNQYICMMPDNFEKRSNPKERFLKLAKRITKIPPIDHDVKIVKRANGTFVLNIPCDPTYTRRNTSNDTIEKRVCGIDPGGRTFATVYDPIDCSVFQVGIEEDKQYVMSKLHNKINHAHKHLTKAQNKQQQQAAQERIVSLKKIHFKLKTFVDDIHLKLSSHLVKEYQYVALGKINVAQLVKTDRPKPLSPRSKRDLLNWQHFRFRQRLTHRTTNTDCILEVQNEAYTSMTCGVCGKIKKNLEKSETFYCDQCKYNTHRDVNGARNILLKSLHMFPFEKQQQ

SEQ ID NO: 2909 - protein, 482 aa, Dreissena polymorpha
MKRKREDLTLWDAAHVHKHKSMWYWWEYIRRKDMVNHEKTDCDVIQLLQSASVKKQKTQSDKFFTSFSVGIRPTKHQKRVLNEMLRVSNYTYNWCLWLVNEKGIGPHQFELQKIVCKTNANDVDPQYRMENDDWFFNNRMTSVKTTSCKNFYTSYKAAKSLKSKLKRPMSVSNIVQGSFCVPKLFIRNLSSKDVSIDNINMLNRYICMIPENFEKRSKPKERFLKLAKPITKIPPFDHDVKIVKRADGMFILNIPCDPKYTRRNASNDTIDKRVCGIDPGGRTFATVYDPIDCSVFQVGIEEDKQYVISKLHNKIYHAHKHLTKAQNKKQQQAASERIVSLKKTHLKLKTFVDDIHLKLSSHLVKEYEYVALGKINVAQLVKTDRPKPLSPRAKRDLLYWQHYRFRQRLTHRTTNTECILDVQNEAYTSKTCGVCGTINKNLEKSETFFCDQCKYNTHRDVNGARNILLKSLRMFPFEKQQQ

SEQ ID NO: 2910 - protein, 482 aa, Dreissena polymorpha
MKRKREHFTLWDAANVHKHKSMWYWWAYIRRKDMVNHEKTDCDVMELLQSASVKKQKTQSDKFLTSFSVGLRPTKHQKQVLNEMLRVSNYTYNWCLWLVNEKGLKPHLFELQKVVCKTNASDVDPYYRMENDDWFFNNKMSTIKLTSCKNFCTSYKSAKSLKSKLKRPMSVSNIIQGSFCVQKLFIRRLSDKDVSIDNTQMQNRYICMMPDNFEKRSKPKERFLKLAKPITKIPPIDHDVKIVKRADGMFIMNIPCDLKYTRRNASNDTIDKRVCGIDPGGRTFATVYDPIDCSVFQVGIKEDKQYVIRKLHNKIDHAHMHLTKAQNKKQQQAARERIVSLKKTHLKLKTFVDDIHLKLSSHLVKEYQYVALGKINVAQLVKTDRPKPLSKRAKRDLLSWQHYRFRQRLTHRTTNTDCILEVQNEANTSKTCGVCGEKDDNLGKSETYYCIKCEYNTHRDVNGARNILLKSLHMFPFVNSQQ

SEQ ID NO: 2911 - protein, 479 aa, Dreissena polymorpha
MKRKREDLTLWDAAHVHKHKSMWYWWEYIRRKDMVNHEKTDCDVIQLLQSASVKKQKTQSDKFLTSFSVGIRPTKHQKRVLNEMLRVSNYTYNWCLWLVNEKGIGPHQFELQKIVCKTNANDVDPQYRMENDDWFFNNRMTSVKTTSCKNFYTSYKAAKSLKSKLKRPMSVSNIVQGSFCVPKLFIRNLSSKDVSIDNINMLNRYICMIPENFEKRSKPKERFLKLAKPITKIPPFDHDVKIVKRANGTFVMNIPCDPKYTRRNASNDTIDKRVCGIDPGGRTFATVYDPIDCCVFQVGIKEDKQYVISKLHNKIDHAHMHLTKAQNKKQQQAASERIVSLKKTHLKLKTFVEDIHLKLSSHLVKEYQYVALGKINVAPLVKKKHLSKRAKRDLLYWQHYRFRQRLTHRTTNTDCIFEVQNEAYTSMTCGVCGKLNKNLEKSETFYCDSCNYNTHRDVNGARNILLKSLNMFPFEKKQQ

SEQ ID NO: 2912 - protein, 482 aa, Dreissena polymorpha
MKRKREQLTLWDAANVHKHKSMWYWWQSIRRKDLVNHDKTACDVMELLQSASHKKQNTQSDKFLTSFSVGIRPTKHQKRVLNEMLRVSNYTYNWCLWLVNEKGLKPLQFTLQKIVCKTNAGDVDPQYRIENDEWFFNNKMSTIKLTSCKNFCTSYKSAKSLKSKLKRPMSVSNIVQGSFCVQKVLLRHLSGKDVFTNNANMQNQYICMMPDNFEKRSNPKERFLKLAKRITKIPPIDHDVKIVKRANGTFVLNIPCDPTYTRRNTSNDTIEKRVCGIDPGGRTFATVYDPIDCSVFQVGIEEDKQYVMSKLHNKINHAHKHLTKAQNKQQQQAAQERIVSLQKIHFKLKTFVDDIHLKLSSHLVKEYQYVALGKINVAQLVKTDRPKPLSPRSKRDLLNWQHFRFRQRLTHRTTNTDCILEVQNEAYTSITCGVCGKIKKNLEKSETFYCDQCKYNTHRDVNGARNILLKSLHMFPFEKQQQ

SEQ ID NO: 2913 - protein, 482 aa, Dreissena polymorpha
MKRKRENFTLWDAANVHKHKSMWYWWEHIRRKDMVNHEKTDCDVIQLLQSASVKKQKTQSDKFLTSFSVGIRPTKHQKRVLNEMLRVSNYTYNWCLWLVDEKGQRPHLFELQKIVCKTTANDVDPYYRMENDDWFFNNKMSTIKLTSCKNFCTSYKSAKSLKSKLKRPMSVSNIIQGSFCVQKLFIRRLSDKDVSIDNTQMQNRYICMMPDNFEKRSNPKERFLKLAKPITKIPPIDHDVKIVKRADGMFIMNIPCDPKYTRRNASNNTIEKRVCGIDPGGRTFATVYDPIDCCVFQVGIKEDKQYVISKLHNKIDHAHMHLTKAQNKKQQQAARERIVSLKKTHLKLKTFVDDIHLKLSSHLVKEYEYVALGKINVAQLVKTDRPKPLSPRAKRDLLYWQHYRFRQRLTHRTTNTECILDVQNEAYTSKTCGVCGTINKNLEKSETFYCDNCKYNTHRDVNGARNILLKSLRMFPFVNSQL

SEQ ID NO: 2914 - protein, 480 aa, Dreissena polymorpha
MKRKRENFTLWDAANVHKHKSMWYWWEHIRRKDMVNHEKTDCDVIQLLQSASVKKQKTQSDKILTSFSVGLRPTKHQKQVLNEMLRVSNYTYNWCLWLVDEKGQRPHLFELQKIVCKTTANDVDPYYRMENDDWFFNNKMSNIKLTSCKNFCTSYKSAKSLKSKLIRPMSVSNIIQGSFCVQKVLLRHLSDKDVSTDNMLNRYICMMPDNFEKRSKPKERFLKLAKPITKIPPIDHDVKIVKRADGMFIMNIPCDSKYTRRNASNDTIEKRVCGIDPGGRTFATVYDPIDCCVFQVGIKEDKQYVIRKLHDKIDHAHKHLTKAQKKKQQKAAQERIVSLKKIHFKLKTFVDDIHLKLSSHLVKEYKYVALGKINVAQLVKTDRPKPLSKRAKRDLLSWQHYRFRQRLTHRTTNTDCILEVQNEANTSKTCGVCGEKDDNLGKSETYYCIKCEYNTHRDVNGARNILLKSLHMFPFVNSQQ

SEQ ID NO: 2915 - protein, 252 aa, Phytophthora ramorum
MSSPLSTRRQRNQHRKRNNKDSTGGIGSLDKQRFWCRNLRKRETRYRELLAAIPSFKTADYDVYVDRLQCFLQSSGFLLSFTAQHSFRKWRFLTYGMKMKALRVLAKRLVPLRSAQVCVAFGDWSCQDGLRGNLHGPVKAFRKALERRATAVVMDEFRTSKPCSGCHERLHQARLLTKVKDEDTKEVKFVLKGNRNVLHCKNSHCKAHFWNRDVNAARNILELLKRKLLGLGRLAAFKRWRLGRKHDWDGDP

SEQ ID NO: 2916 - protein, 286 aa, Phytophthora ramorum
MILRCAKNHNSTPTLVLLCYVVHLRSVVAIAGTNNVFSSGNVFPTFNSPATQPTPQAQQQGQHRRHWKRKRKRENRHGQRIVEIEYYHSAKLDKQRFWCRNLRKRETRYRELLAAIPSFKTADYDVYVDRLQCFLQSSGFLLSFTAQHSFRKWRFLTYGMKMKALRVLAKRLVPLRSAQVCVAFGDWSCQDGLRGNLHGPVKAFRKALERRATAVPMDEFRTSKLCSGCHERLHQARLLTKVKDEDTKEVKFVLKGNRNVLHCKNSHCKAHFWNRDVNAARNILEL

SEQ ID NO: 2917 - protein, 526 aa, Coccomyxa sp.
MGASHSNEAAHWEDIRHAENLEKERRKRLEEENLALQHRQRELEREKATLDLEVRQLHPTHLLKTSDAILEVKREMFVESDSHINVAVVGLSGTGKSTLINRLRKVPDNLPDSDGVACSVHIERPKGVITADIDPGEDEEPDVRTEDEREEHFVKQTRQLDRALREADISDDIQRRICIDPGGDVMAFGVLDHDSKEEPAVVRCPSAEYRDRAGFPAVLRKRRNWVRSSGVEELMTHAPSGKLVDLRGLREHIRYHLGVLERVLDHFGAARQRRLAFTSHVSKARAMDSMALRIAPRGVKTLVVYGAADFSHAMKGRAAVPYKRLKACVAALEDVTLVEVGECNTSRLCSRCHEELEGVRSEVMERERIVKRGIHAVKVCRHCSTTWNRDLNAARNIRHVFERIRESGVRPEVFRPRRRAMTTAEEGLRSRSLGGLTHPRGIKGQQHGFDADSTVVIKQLYKSFKEQPEFIEFVYRRFTDPGLVASVPDPDKRYTRAMELWKQRKGDASLDTVDVKRHIISMALHA

SEQ ID NO: 2918 - protein, 633 aa, Coccomyxa sp.
MRRPKKPPKDPQLRLQEQCLVYAKNKLFKEKVVREKAVRQDVKERALTNTNSTFTVVKTTWRALGRRAVRLLDLETALSEVNKTIAEAYLLANVHVVRLCTAGIPLCKLDQSFFHQCLSAVSVSKRRKPEAKDFELRMSVRLYRSWRPEGYVPPVSTHLATGFQQQASQQMATNMRNSTVANFYRRFKRYLKVRYSLDGKQAYEALQSIRAVEYEDEDPLVKRYRDLLPPKPEKGRLEDNPELVMPLQHLFLRTFEAAQSDQQTDRPPRLFSLVPTKQGFECSHIKICANGLYSLLKRNGIKHLPKDADTFRPVADAYWRRFFHISKFETANRIFAGEILTDGKGVSIVLRRPKAEACTSGAAIDPNAFGEVWGLDPGRREMFVASNDAQKVQRVTTRQFYHDAKYRESNAKIKGWQDRAPDILQAIRNMPSKKHSHLQGLQAYVGYLLPKLDTLMRWHMRKGFRDLKFKRYVFAKKALAAICLDLTREAGQNTLVGFGDWSNQDSVGIIKKSPAGPVKRLENVLRRHCRVVSVDEHLTSKLHSCCHHRMKQMYQKRMCRDGVMRSVKVHSVLHCDNNGCHGMTVNRDVNASRNILHILRATAGGGPRPETFHRSRTKYSEAPATSGLPLNGQ

SEQ ID NO: 2919 - protein, 344 aa, Sphagnum fallax
MEPDKHGYTFDHMVETDGVSISILLVRKEFVGKKVRKPRVGPPPPEQYINELTDYTKVVDKKLVAIDPNMSDLLYCVDGPDADKTIYHYTQDTRRKDTYVKKHRDYLQTRKHEVIDDKRVVEWEVELSAYNKKTTDFAAFETYVAKKNEMNVRLAPFYQDYTFRRMKMLSFIGRQRTEAKMIQEFKEKFGSGEEVVVAIGDWEQRQHRKFKEPTKGKGFRTLLRKASYDVYLVDEFRTSCRCSHCEEHGECKTFLECENPRPYRTGRILRHGLVRCKTCQRLWNRDTNASSNIWRVADSAINGLPRPEHLRRTVQANYMVGSDASSPRRRTRRGPSPLHKHGKV

SEQ ID NO: 2920 - protein, 238 aa, Mortierella claussenii
MTSSSGKKAPMVYQNLVAKQKAVYQPTFEFRKWLEENRRIVPEGANLSVGDIESNMPALRGEGTDFASYAAYQEVHQQQLEYFYGRRYHKHNWDSRRAKEFEYAALTDQLLRMVGGRIGEQRKNENKVAIGIGLGQFSSNSKLSSLHGSFSRYFIRKARSQGYIVIGVNEFYTSKRCHDCNNIVCEVELRRLCCRHCETYFHRNVMAGHHITNVVQGHLLHLEQPHYLQPVDERGNLI

SEQ ID NO: 2921 - protein, 208 aa, Mortierella claussenii
MPLDGSITISSIEFGLPHLCGPAASIKDYVDRLQDVEVHLNSFYGNVVMKKHKWNARKARDHEDKLIANRLLKQVGGSLGAKRDEKNKVIIGVGLGKFSTKTRLSSLHESFQSFFVQKAKSLGYIVVGVNEYYTSKKCPHREKFVGKVDIRRLYCSECKTYMHRDVMAGHNICNAIRGHLVNQVRPLYLQPMDKDGKYPWMQAAAPSV

SEQ ID NO: 2922 - protein, 297 aa, Mortierella claussenii
MTATALDPARPNVRAFTTIRRSFLYGPYVKYRHLLEKRKAEAGIDLIESSIPPMTLSGIDTYIDYLHKDGEWNRLRDFYHHKWYLRKSWDVKKAQVSAYDYGIDSIFQLAGGSNGNSRNHEMTRRVVFAIGLGSFNTRTGLPSKHSEFEKRFIIRARHQGYQVVGVHEYYTSAKCPRPTCNEFLQNTENRSKYCHGCRAYFDRDIVGSENIARKERLVKFSLTPVQEGNHHTFPGLGQPRSPSISSDHKDIEIHQADRELISGQVVIRQPGSNQFVGTRRHGTMAKREKVVKLFQDV

SEQ ID NO: 2923 - protein, 1222 aa, Mortierella claussenii
MGIQGLYAELKKQGMPPVPAALNDFSGSRLEIDLLGSFRSKIFSLLTDKYSPYKATQVGYTMANIISTLLQPIDQTQCRIHIDGAHNTEKVQEHNKRQQELTRQLGKLDQALHKMELRSDQGKWTSKATMVEIEKVMVQVFVLTDADKIQLGQGLGAKFQVCHCTTEADICIAKALRNSPDPDNHIVVSGDSDLLVHQHVPRVLRPIPRSAAFALYTKSQAAEKLALLGQEHLTLLGIVQKNDYSPNIFGLGMATNLRIIREIPLGSWDWMVHRYLAEAGKYTQEPLVPNRFDSSKRIFVDHVDTPVQSGYMASSLSSSSAPAPISTPSANDAFHLAPRWKPNQFRPVFESEESMFRGRTSNVNNRRPHSPPLRRGPKFTPRTPEQPKEEVKKKKKGALPRKPKGGGDDRKLHPATKHDRDMRRRFQTKTLTVGSIRANVQRSLALQSAGAATAGESASAVASASTSSSASASTTASASSSAPVISTTADAQLIAQRLLSCVQVINKIQIHAYEAIALDIATLIGPPGSGPEGDDDRPGPSSHTPLTARQKEKQRAEEPQSQIPTTAGPKNKKRALAEPQVQDPSSSRKSKRQAKGVKSHPEDPEDSDEPGDPDEPGDPNSTQRLQDLEDILESDTFYYSLLTLLCSGKLGAMSRYERVQHAAPRTMATRSTPAGHRMTMDTPHALRAYNLYKETSGFVPFANQVGFKMFPSTVARLAMRMVKHAIRAHYYSAQFGEDEQRPEDKNAIEYFFERNRRERMFADFPKAKLTPSFVYLSEADIVHILYSGDASTVTAVKRVIEFSSAVLAEIAVDHCKGHLVQQLFFRTDAPGRLNGYHRKVSLQSDRHVNSKLKLRGTICTNGLQLNLLAYDTTAPRRRSTQAPASQDDDDLADLLDMEDIDFNLNEAFLGSEEEDEDEESEEEDEPMEDVAMGGSQSSDVEMGSATGSDQGEEEEEVTQQGASSDQPFDYRKINWKRGSKMLPNVEVVFANAANCPPIGTTPVIALDPGEINTVTATKIDPSRPGERHSIKITRKYLYRPYAQFRRLLEAQKKKAGIDTIETLIPPMTLEGIVAYLQYMSSSEDQSAEGRKSMRTRISEFYNQRWYLRKTWDMRKAQKCAIDLGVKVLLRMAGANESDKVPATGSESEEGSQSEEGSQPEAHSAPAVFAVGLGSFNTRTGLPSKHGVFLKTFIIKAGSCLPHLSMLTMFAVAEDTRRSDHAF

SEQ ID NO: 2924 - protein, 723 aa, Chloropicon primus
MARSGKRRKKKEKQGSGSTSSTRRSHSGESHAQGASKSGQESPTTERPLRRFWNQGLQLLYSLCLLPIADDPASAGEGSSTPRKKRGRKRKEKPLDDPASAFEEGSSTPRKKRGGKRKGKPPEAASSAGESSSSSGKPRKKPRKKGKKKNKKKGKKKKNKRGKKAGKQPGGLADDSVKKTWFSSIKRELEEVKCPKTGWRSCLNLPEDSVVSVEALQSPAKRKRGQKLKTSKLLSERTVIRTRKLRMRLNPEQAKCLCNWMGAARFTYNKCLEAVKKERFPLVWTVLLDRFVTAKPRGPEVFEGLEKELKEIQCSPRPWTKQEAELFAAREKRLESQIGGRAFRIQVGKDRDYVSGAFVNQKHPWLKDTPCAIRQAAVRSLIKAWDSNIAKQEAMKERGEEKGHRFVLKYRQRQQPSSWTIEIDARELKNVETIERPNTRHKDDTKHNKRRKWTKLEVFKKKMAGGPLYLTEEIPGGKIEGAVKITRNRLGQFHMHIPIATPWDRLPPLKPENKRKVVALDPGVRTFQTSYSPQEGVGEYAKGERGFARLFNLCWRIDEIISERKDPKVKLPYLDRRDLKRQQYACMEKLRGLTNELHKKVANDLCRRFDTILLPEFKSQDMVKKNNNGRRRVIRKKTARTLLTLRHYAFRTFLASKVLLHGSELAIVTEEYTSKTCGKCGHIKDNLGGAEVYKCQKCGFKCGRDVNGARNVLLKHLRQPKSV

SEQ ID NO: 2925 - protein, 722 aa, Chloropicon primus
MARSGKRRKKKEKQGSGSTSSTRRSHSGESHAQGASKSGQESPTTEPLRRFWNQGLQLLYSLCLLPIADDPASAGEGSSTPRKKRGRKRKEKPLDDPASAFEEGSSTPRKKRGGKRKGKPPEAASSAGESSSSSGKPRKKPRKKGKKKNKKKGKKKKNKRGKKAGKQPGGLADDSVKKTWFSSIKRELEEVKCPKTGWRSCLNLPEDSVVSVETLQSPAKRKRGQKLKTSKLLSERTVIRTRKLRMRLNPEQAKCLCNWMGAARFTYNKCLEAVKKEGFPLVWTVLLDRFVTAKPRRPEVFEGLEKELKEIQCSPRPWTKQEAELFAAREKRLESQIGGRRFRAEVAKDRDYVSGAFVNQKHPWLKDTPCAIRQAAVRSLIKAWDSNIAKQEAMKERGEEKGHRFVLKYRQRQQPSSWTIEIDARELKNVETIERPNTRHKDDTKHNKRRKWTKLEVFKKKMAGGPLYLTEEIPGGKIEGAVKITRNRLGQFHMHIPIATPWDRLPPLKPENKRKVVALDPGVRTFQTSYSPQEGVGEYAKGERGFARLFNLCWRIDEIISERKDPKVKLPYLDRRDLKRQQYACMEKIRGLTNELHKKVANDLCRRFDTILLPEFKSQDMVKKNNNGRRRVIRKKTARTLLTLRHYAFRTFLASKVLLHGSELAIVTEEYTSKTCGRCGHIKDNLGGAEVYKCQKCGFKCGRDVNGARNVLLKHLRQPKSV

SEQ ID NO: 2926 - protein, 722 aa, Chloropicon primus
MARSGKRRKKKEKQGSGSTSSTRRSHSGESHAQGASKSGQESPTTEPLRRFWNQGLAWLYALCLLPIADDPASAGEGSSTPRKKRGGKRKGKPLDDPASAFEEGSSTPRKKRGGKRKGKPPEADASAGESSSSSGKPRKKPRKKGKKKNKKKGKKKKNKRGKKAGKQPGGLADDSVKKTWFSSIKRELEEVKCPKTGWRSCLNLPEDSVVSVETLQSPAKRKREQKLKTSKLLSERTVIRTRKLRMRLNPEQAKCLCNWMGAARFTYNKCLEAVKKEGFPLVWTVLLDRFVTAKPRRPEVFEGLEKELKEIQCSPRPWTKQEAELFAAREKRLESQIGGRRFRAEVAKDRDYVSGAFVNQKHPWLKETPCAIRQAAVRSLIKAWDSNTAKQEAMKERGEKKGHRFVLKYRQRQQPSSWTIEIDARELKNVETIERPRTRHKDDTKHKKRRKWTKLEVFKKKMAGGPLYLTEEIPGGKIEGAVKITRNRLGQFHMHIPIATPWDRLPPLKPENKRKVVALDPGVRTFQTSYSPQEGVGEYATGERGFARLFNLCWRIDEIISERKDPKVKLPYLDRRDLKRQQYACMEKLRGLTNELHKKVANDLCRRFDTILLPEFKSQDMVKKNNNGRRRVIRKKTARTLLTLRHYAFRTFLASKVLLHGSELAIVTEEYTSKTCGRCGHIKDNLGGAEVYKCQKCGFKCGRDVNGARNVLLKHLRQPKSV

SEQ ID NO: 2927 - protein, 722 aa, Chloropicon primus
MARSGKRRKKKEKQGSGSTSSTRRSHSGESHAQGASKSGQESPTTEPLRRFWNQGLAWLYALCLLPIADDPASAGEGSSTPRKKRGGKRKGKPLDDPASAFEEGSSTPRKKRGGKRKGRPPEADASAGESSSSSGKPRKKPRKKGKKKNKKKGKKKKNKRGKKAGKQPGGLADDSVKKTWFSSIKRELVEVKCPKTGWRSCLNLPEDSVVSVETLQSPAKRKREQKLKTSKLLSERTVMRTRKLRMRLNPEQARTLCNWMGAARFTYNKCLEAVKKEGFPLVWTVLLDRFVTAKPRRPEVFEGLEKELKEIQCSPRPWTKQEAELFAAREKRLESQIGGRAFRIQVGKDRDYVSGAFVNQKHPWLKETPCAIRQAAVRSLIKAWDSNTAKQEAMKERGEEKGHRFVLKYRQRQQPSSWTIEIDARELKNVETIERPNTRHKDDTKHKKRRKWTKLEVFKKKMAGGPLYLTEEIPGGKIEGAVKITRNRLGQFHMHIPIATPWDRLPPLKPENKRKVVALDPGVRTFQTSYSPQEGVGEYAKGERGFARLFNLCWRIDEIISERKDPKVKLPYLDRRDLKRQQYACMEKIRGLTNELHKKVANDLCRRFDTILLPEFKSQDMVKKNNNGRRRVIRKKTARTLLTLRHYAFRTFLASKVLLHGSELAIVTEEYTSKTCGRCGHIKDNLGGAEVYKCQKCGFKCGRDVNGARNVLLKHLRQPKSV

SEQ ID NO: 2928 - protein, 723 aa, Chloropicon primus
MARSGKRRKKKEKQGSGSTSSTRRSHSGESHAQGASKSGQESPTTERPLLRFWNQALKWLYEKCMLPIADDPASAGEGSSTPRKKRGGKRKEKPLDDPASAFEEGSSTPRKKRGGKRKGRPPEADASAGESSSSSGKPRKKPRKKGKKKNKKKGKKKKNKRGKKAGKQPGGLADDSVKKTWFSSMKRELEEVKCPKTGWRSCLNLPEDSVVSVETLQSPAKRKRGQKLKTSKLLSERTVIRTRKLRMRLNPEQAKCLCNWMGAARFTYNKCLEAVKKEGFPLVWTVLLDRFVTAKPRRPEVFEGLEKELKEIQCSPRPWTKQEAELFAAREKRLESQIGGRRFRAEVAKDRDYVSGAFVNQKHPWLKDTPCAIRQAAVRSLIKAWDSNIAKQEAMKERGEEKGHRFVLKYRQRQQPSSWTIEIDARELKNVETIERPNTRHKDDTKHNKRRKWTKLEVFKKKMAGGPLYLTEEIPGGKIEGAVKITRNRLGQFHMHIPIATPWDRLPPLKPEKKRKVVALDPGVRTFQTSYSPQEGVGEYAKGERGFARLFHLCRRIDEIISERKDPKVKLPYLDRRDLKRQQYACMEKLRGLTNELHKKVANDLCRRFDTILLPEFKSQDMVKKNNNGRRRVIRKKTARTLLTLRHYAFRTFLASKVLLHGSELAIVTEEYTSKTCGRCGHIKKNLGGAEVYKCQKCGFKCGRDVNGARNVLLKHLRQPKSV

SEQ ID NO: 2929 - protein, 723 aa, Chloropicon primus
MARSGKRRKKKEKQGSGSTSSTRRSHSGESHAQGASKSGQESPTTERPLLPFWNQGLQLLYALCLLPPADDPASAGEGSSTPRKKRGGKRKGKPLDDPASAFEEGSSTPRKKRGGKRKGKRPEADASAGESSSSSGKPRKKPRKKGKKKNKKKGKKKKNKRGKKAGKQPGGLADDSVKKTWFSSIKRELVEVKCPKTGWRSCLNLPEDSVVSVETLQSPAKRKREQKLKTSKLLSERTVIRTRKVRMRLNPEQAQCLCNWMGAARFTYNKCLEAVKKEDFPLVWTVLLDRFVTAKPRRPEVFEGLEKELKEIQCSPRPWTKQEAELFAAREKRLESQIGGRAFRLQVAKDRDYVSGAFVNQKHPWLKETPCAIRQAAVRSLIKAWDSNTAKQEAMKERGEKKGHRFVLKYRQRQQPSSWTIEIDARELKNVETIERPNTRHKDDTKHKKRRKWTKLEVFKKKMAGGPLYLTEEIPGGKIEGAVKITRNRLGQFHMHIPIATPWDRLPPLKPENKRKVVALDPGVRTFQTSYSPQEGVGEYAKGERGFARLFNLCWRIDEIISERKDPKVKLPYLDRRDLKRQQYACMEKLRGLTNELHKKVANDLCRRFDTILLPEFKSQDMVKKNNNGRRRVIRKKTARTLLTLRHYAFRTFLASKVLLHGSELAIVTEEYTSKTCGRCGHIKKNLGGAEVYKCQKCGFKCGRDVNGARNVLLKHLRQPKSV

SEQ ID NO: 2930 - protein, 723 aa, Chloropicon primus
MARSGKRRKKKEKQGSGSTSSTRRSHSGESHAQGASKSGQESPTTERPLLRFWNQGLAWLYALCLLPNADDPASAGEGSSTPRKKRGGKRKEKPLDDPASAFEEGSSTPRKKRGGKRKGKPPEADASAGESSSSSGKPRKKPRKKGKKKNKKKGKKKGNKRGKKAGKQPGGLADDSVKKTWFSSIKRELEEVKCPKTGWRSCLNLPEDSVVSVETLQSPAKRKREQKLKTSKLLSERTVIRTRKLRMRLNPEQAKCLCNWMGAARFTYNKCLEAVKKEDFPLVWTVLLDRFVTAKPRRPEVFEGLEKELKEIQCSPRPWTKQEAELFAAREKRLESQIGGRAFRIQVGKDRDYVSGAFVNQKHPWLKETPCAIRQAAVRSLIKAWDSNTAKQEAMKERGEKKGHRFVLKYRQRQQPSSWTIEIDARELKNVETIERPNTRHKDDTKHKKRRKWTKLEVFKKKMAGGPLYLTEEIPGGKIEGAVKITRNRLGQFHMHIPIATPWDRLPPLKPENKRKVVALDPGVRTFQTSYSPQEGVGEYATGERGFARLFNLCWRIDEIISERKDPKVKLPYLDRRDLKRQQYACMEKLRGLTNELHKKVANDLCRRFDTILLPEFKSQDMVKKNNNGRRRVIRKKTARTLLTLRHYAFRTFLASKVLLHGSELAIVTEEYTSKTCGRCGHIKDNLGGAEVYKCQKCGFKCGRDVNGARNVLLKHLRQPKSV

SEQ ID NO: 2931 - protein, 722 aa, Chloropicon primus
MARSGKRRKKKEKQGSGSTSSTRRSHSGESHAQGASKSGQESPTTEPLRRFWNQGLAWLYALCLLPIADDPASAGEGSSTPRKKRGGKRKGKPLDDPASAFEEGSSTPRKKRGGKRKGRPPEADASAGESSSSSGKPRKKPRKKGKKKNKKKGKKKKNKRGKKAGKQPGGLADDSVKKTWFSSIKRELEEVKCPKTGWRSCLNLPEDSVVSVETLQPPAKRKRGQKLKTSKLLSERTVIRTRKLRMRVNPEQARTLCNWMGAARFTYNKCLEAVKKEGFPLVWTVLLDRFVTAKPRRPEVFEGLEKELKEIQCSPRPWTKQEAELFAAREKRLESQIGGRAFRIQVAKDRDYVSGAFVNQKHPWLKETPCAIRQAAVRSLIKAWDSNTAKQEAMKERGEKKGHRFVLKYRQRQQPSSWTIEIDARDLKNVETIERPNTRHKDDTKHNKRRKWTKLEVFKKKMAGGPLYLTEEIPGGKIEGAVKITRNRLGQFHMHIPIATPWDRLPPLKPENKRKVVALDPGVRTFQTSYSPQEGVGEYATGERGFARLFNLCWRIDEIISERKDPKVKLPYLDRRDLKRQQYACMEKLRGLTNELHKKVANDLCRRFDTILLPEFKSQDMVKKNNNGRRRVIRKKTARTLLTLRHYAFRTFLASKVLLHGSELAIVTEEYTSKTCGKCGHIKDNLGGAEVYKCQKCGFKCGRDVNGARNVLLKHLRQPKSV

SEQ ID NO: 2932 - protein, 751 aa, Chloropicon primus
MARSGKRRKKKEKQGSGSTSSTRRSHSGESHAQGASKSGQESPTTEPLRRFWNQGLAWLYALCLLPIADDPASAGEGSSTPRKKRGGKRKEKPLDDPASAFEEGSSTPRKKRGGKRKRKGKPPEAASSAGESSSSSGKPRKKPRKKGKKKNKKKGKKKKNKRGKKAGKQPGGLAGDSVKKTWFSSMKRELEEVKCPKTGWRSCLNLPEDSVVSVETLQPPAKRKRGQKLKTSKLLSERTVIRTRKLRMRLNPEQAKCLCNWMGAARFTYNKCLEAVKKERFPLVWTVLLDRFVTAKPRGPEVFEGLKKELKEIQCSPRPWTKQEAELFAARENRLESQIGGRAFRLQVAKDRDYVSGAFVNQQHPWLKETPCAIRQAAVRSLIKAWDSNIAKQEAMKERGEEKGHRFVLKYRQRQQPSSWTIEIDARELKNVETIERPNTRHKDDTKHKKRRKWTKLEVFKEKMAGGPLYLTEEIPGGKIEGAVKITRNRLGQFHMHIPIATPWDRLPPLKPENKRKVVALDPGVRTFQTSYSPQEGVGEYATGERGFARLFNLCWRIDGIISEREDPKVKLPYLDRRDLKRQQYACMEKLRGLTNELHKKVANDLCRRFDTILLPEFKSQDMVKKNNNGRRRVIRKKTARTLLTLRHYAFRTFLASKVLLHGSELAIVTEEYTSKTCGRCGHIKDNLGGAEVYKCQKCGFKCGRDIEIEECRRPRRSTAQGIKLLIKDFAYHPAFKRWDDSFTSIPFKPA

SEQ ID NO: 2933 - protein, 722 aa, Chloropicon primus
MARSGKRRKKKEKQGSGSTSSTRRSHSGESHAQGASKSGQESPTTEPLRRFWNQGLAWLYALCLLPIADDPASAGEGSSTPRKKRGGKRKEKPLDDPASAFEEGSSTPRKKRGGKRKGKRPEADASAGESSSSSGKPRKKPRKKGKKKNKKKGKKKKNKRGKKAGKQPGGLADDSVKKTWFSSIKRELVEVKCPKTGWRSCLNLPEDSVVSVETLQSPAKRKREQKLKTSKLLSERTVIRTRKLRMRLNPEQAKCLCNWMGAARFTYNKCLEAVKKEGFPLVWTVLLDRFVTAKPRRPEVFEGLEKELKEIQCSPRPWTKQEAELFAAREKRLESQIGGRRFRAEVAKDRDYVSGAFVNQKHPWLKDTPCAIRQAAVRSLIKAWDSNIAKQEAMKERGEEKGHRFVLKYRQRQQPSSWTIEIDARELKNVETIERPNTRHKDDTKHNKRRKWTKLEVFKKKMAGGPLYLTEEIPGGKIEGAVKITRNRLGQFHMHIPIATPWDRLPPLKPENKRKVVALDPGVRTFQTSYSPQEGVGEYATGERGFARLFNLCWRIDEIISERKDPKVKLPYLDRRDLKRQQYACMEKIRGLTNELHKKVANDLCRRFDTILLPEFKSQDMVKKNNNGRRRVIRKKTARTLLTLRHYAFRTFLASKVLLHGSELAIVTEEYTSKTCGRCGHIKDNLGGAEVYKCQKCGFKCGRDVNGARNVLLKHLRQPKSV

SEQ ID NO: 2934 - protein, 618 aa, Chloropicon primus
MARSGKRRKKKEKQGSGSTSSTRRSHSGESHAQGASKSGQESPTTERPLLRFWNQGLAWLYALCLLPIADDPASAGEGSSSSGKPRKKPRKKGKKKNKKKGKKKKNKRGKKAGKQPGGLADDSVKNTWFSSIKRELEEVKCPKTGWRSCLNLPEDSVVSVETLQSPAKRKRGQKLKTSKLLSERTVIRTRKLRMRLNPEQAKCLCNWMGAARFTYNKRQSFSRPERRDSRAKLEADDFASEVAKDRDYVSGAFVNQKHPWLKETPCAIRQAAVRSLIKAWDSNTAKQEAMKERGEKKGHRFVLKYRQRQQPSSWTIEIDARELKNVETIERPRTRHKDDTKHKKRRKWTKLEVFKEKMAGGPLYLTEEIPGGKIEGAVKITRNRLGQFHMHIPIATPWDRLPPLKPENKRKVVALDPGVRTFQTSYSPQEGVGEYATGERGFARLFNLCWRIDEIISERKDPKVKLPYLDRRDLKRQQYACMEKLRGLTNELHKKVANDLCRRFDTILLPEFKSQDMVKKNNNGRRRVIRKKTARTLLTLRHYAFRTFLASKVLLHGSELAIVTEEYTSKTCGRCGHIKKNLGGAEVYKCQKCGFKCGRDVNGARNVLLKHLRQPKSV

SEQ ID NO: 2935 - protein, 723 aa, Chloropicon primus
MARSGKRRKKKEKQGSGSTSSTRRSHSGESHAQGASKSGQESPTTERPLLRFWNQGLAWLYALCLLPIADDPASAGEGSSTPRKKRGGKRKETPLDDPASAFEEGSSTPRKKRGGKRKGRPPEADASAGESSSSSGKPRKKPRKKGKKKNKKKGKKKKNKRGKKAGKQPGGLADDSVKKTWFSSIKRELEEVKCPKTGWRSCLNLPEDSVVSVETLQSPAKRKRGQKLKTSKLLSERTVIRTRKLRMRLNPEQAKCLCNWMGAARFTYNKCLEAVKKEGFPLVWTVLLDRFVTAKPRRPEVFEGLEKELKEIQCSPRPWTKQEAELFAAREKRLESQIGGRAFRIQVAKDRDYVSGAFVNQEHPWLKDTPCAIRQAAVRSLIKAWDSNTAKQEAMKERGEEKGHRFVLKYRQRQQPSSWTIEIDARELKNVETIERPNTRHKDDTKHNKRRKWTKLEVFKKKMAGGPLYLTEEIPGGKIEGAVKITRNRLGQFHMHIPIATPWDRLPPLKPENKRKVVALDPGVRTFQTSYSPQEGVGEYAKGERGFARLFNLCWRIDEIISERKDPKVKLPYLDRRDLKRQQYACMEKLRGLTNELHKKVANDLCRRFDTILLPEFKSQDMVKKNNNGRRRVIRKKTARTLLTLRHYAFRTFLASKVLLHGSELAIVTEEYTSKTCGRCGHIKKNLGGAEVYKCQKCGFKCGRDVNGARNVLLKHLRQPKSV

SEQ ID NO: 2936 - protein, 566 aa, Chloropicon primus
MVTELNQLRAEREGGPVADIQLLKRRFWRCVPAMDRVSIGHYLRTVSHTPNSRESTSEEWTLLQASMAELVQAATAAETSLRLPSRALLSHVITEAEQVLRTNWSNFLKYGTFNHMKQYLRAKYQLNKSQAAALRAALLSESQPRSPDLVQHYHNELALVQGFGVADFMHGTDNVLDPAEQERNMVVFRYMMLKTVEASDLPIKRFTLVPVCRVQYPMINVSRSCLELWGYDGGRGWEKIFTKKVNNIAKKGHTNGRTKAFARHFRTDGLSVVVVVEEVILARPDNNYIGQGERCATKPSQFDPRNTVGVDPGRIFVVYANILERGRKRTFSLHLSAYRDRCGFTKRNILAHQWLSRAPNNLQQKLNDRAISLKLTSVDRLQAAIGTRLTFLSNAIDFFGQRRWRRKGLETFGRKQRTMEFIASKLFPTASHIVFYGAANFPSGIRGRPPGPCIGLKRFLVTKTTPGRFFFVDEYNTSKMCAACSQKNISTALRRVHKSDRSRGNGPPSKKGRPQYGVLSCPKCSMEVPRDDNGSDNILAIASAFLHAQNWSVPREIWPPALRRPL

SEQ ID NO: 2937 - protein, 722 aa, Chloropicon primus
MARSGKRRKKKEKQGSGSTSSTRRSHSGESHAQGASKSGQESPTTEPLRRFWNQALKWLYEKCMLPIADDPASAGEGSSTPRKKRGGKRKEKPLDDPASAFEEGSSTPRKKRGGERKGKQPEADASAGESSSSSGKPRKKPRKKGKKKNKKKGKKKKNKRGKKAGKQPGGLADDSVKKTWFSSMKRELEEVKCPKTGWRSCLNLPEDSVVSVETLQSPAKRKREQKLKTSKLLSERTVIRTRKLRMRLNPEQARTLCNWMGAARFTYNKCLEAVKKERFPLVWTVLLDRFVTAKPRRPEVFEGLEKELKEIQCSPRPWTKQEAELFAAREKRLESQIGGRAFRIQVGKDRDYVSGAFVNQKHPWLKETPCAIRQAAVRSLIKAWDSNTAKQEAMKERGEKKGHRFVLKYRQRQQPSSWTIEIDARELKNVETIERPNTRHKDDTKHKKRRKWTKLEVFKEKMAGGPLYLTEEIPGGKIEGAVKITRNRLGQFHMHIPIATPWDRLPPLKPENKRKVVALDPGVRTFQTSYSPQEGVGEYATGERGFARLFNLCWRIDEIISERKDPKVKLPYLDRRDLKRQQYACMEKLRGLTNELHKKVANDLCRRFDTILLPEFKSQDMAKKNNNGRRRVIRKKTARTLLTLRHYAFRTFLASKVLLHGSELAIVTEEYTSKTCGRCGHIKKNLGGAEVYKCQKCGFKCGRDVNGARNVLLKHLRQPKSV

SEQ ID NO: 2938 - protein, 746 aa, Chloropicon primus
MARSGKRRKKKEKQGSGSTSSTRRSHSGESHAQGASKSGQESPTTERPLRRFWNQGLALLYALCMLPIADDPASAGEGSSTPRKKRGGKRKETPLDDPASAFEEGSSTPRKKRGGKRKETPLDDPASAFEEGSSTPRKKRGGKRKGKPPEAASSAGESSSSSGKPRKKPRKKGKKKNKKKGKKKKNKRGKKAGKQPGGLADDSVKKTWFSSMKRELEEVKCPKTGWRSCLNLPEDSVVSVETLQPPAKRKREQKLKTSKLLSERTVIRTRKLRMRLDPEQARTLCNWMGAARFTYNKCLEAVKKEGFPLVWNVLLDRFVTAKPRGPEVFEGLEKELKEIQCSPKRRTKQEAAREKRLVSLIGGRRFRAEVAKDRDYVSGAFVNQKHPWLKDTPCAIRQAAVRSLIKAWDSNTAKQEAMKERGEKKGHRFVLKYRQRQQPSSWTIEINARDLKNVETIERPNTRHKDDTKHKKRRKWTKLEVFKEKMAGGPLYLTEEIPGGKIEGAVKITRNRLGQFHMHIPIATPWDRLPPLKPENKRKVVALDPGVRTFQTSYSPQEGVGEYAKGERGFARLFNLCWRIDKIISERKDPKVKLPYLDRRDLKRQQYACMEKLRGLTNELHKKVANDLCRRFDTILLPEFKSQDMVKKNNNGRRRVIRKKTARTLLTLRHYAFRTFLASKVLLHGSELAIVTEEYTSKTCGRCGHIKDNLGGAEVYKCQKCGFKCGRDVNGARNVLLKHLRQPKSV

SEQ ID NO: 2939 - protein, 572 aa, Chloropicon primus
MVTELNQLRAEREGGPVADIQLLKRVWRCVPAMDRVSIGHYLRTVSHTPNSREPTSQEPTSQEWRLLQASMAALVQAATAAETSLRLRLPSRALLSHVITEAALVLRTNWSNFLKYGTFNHMKQYLRAKYQLNKSEAAALRAALLSESQPRRPDLVQHYHNELALVQGFGVADFMHGTDNVLDPAEQERNMVVFRYMMLKTVEASDLPIKRFTLVPVCRVQYPMINVSRSCLKLWGYDGGRGWEKIFTKKVNNIAKKGHTNGRTKAFARHFRTDGLSVVVVVEEVILARPDNNYIGQGERCATKPSQFDPRNTVGVDPGRIFVVYANILERGRKRTFSLHLSAYRDRCGFTKRNILAHQWLSRAPNNLQQRLNDRAISLKLTSVDRLQAAIGTRLTFLSNAIDFLGQRRWRRKGLETFGRKQRTMEFIASKLFPTASHIVFYGAANFPSGIRGRPPGPCIGLKRFLVTKTTPGRFFFVDEYNTSKMCAACSQKNISTALRRVHKSDRSRGNGPPSKKGRPQYGVLSCPKCSMEVPRDDNGSDNILAIASAFLHAQNWSVPREIWPPALRRPL

SEQ ID NO: 2940 - protein, 696 aa, Chloropicon primus
MARSGKRRKKKEKQGSGSTSSTRRSHSGESHAQGASKSGQESPTTERPLLRFWNQALKWLYALCLLPTADDPASAGEGSSTPRKKRGGKRKGKPPEADASAGESSSSSGKPRKKPRKKGKKKNKKKGKKKKNKRGKKAGKQPGGLADDSVKNTWFSSIKRELEEVKCPKTGWRSCLNVPEDSVVSVETLQPPAKRKREQKLKTSKLLSERTVIRTRKLRMRLNPEQARTLCNWMGAARFTYNKCLEAVKKEGFPLVWTVLLDRFVTAKPRRPEVFEGLEKELKEIQCSPRPWTKQEAELFAAREKRLESQIGGRAFRLQVAKDRDYVSGAFVNQEHPWLKETPCAIRQAAVRSLIKAWDSNTAKQEAMKERGEEKGHRFVLKYRQRQQPSSWTIEINARDLKNVETIERPRTRHKDDTKHKKRRKWTKLEVFKEKMAGGPLYLTEEIPGGKIEGAVKITRNRLGQFHMHIPIATPWDRLPPLKPENKRKVVALDPGVRTFQTSYSPQEGVGEYAKGERGFARLFNLCRRIDEIISERKDPKVKLPYLDRRDLKRQQYACMEKIRGLTNELHKKVANDLCRRFDTILLPEFKSQDMVKKNNNGRRRVIRKKTARTLLTLRHYVFRTYLASKVLLHGSELAIVTEEYTSKTCGRCGHIKKNLGGAEVYKCQKCGFKCGRDVNGARNVLLKHLRQPKSV

SEQ ID NO: 2941 - protein, 635 aa, Chloropicon primus
MARSGKRRKKKEKQGSGSTSSTRRSHSGESHAQGASKSGQESPTTERPLLPFWNQGLQLLYALCLLPPADDPASAGKPRKKPRKKGKKKNKKKGKKKKNKRGKKAGKQPGGLADDSVKKTWFSSIKRELVEVKCPKTGWRSCLNLPEDSVVSVETLQSPAKRKREQKLKTSKLLSERTVIRTRKVRMRLNPEQAQCLCNWMGAARFTYNKCLEAVKKEGFPLVWTVLLDRFVTAKPRRPEVFEGLEKELKEIQCSPRPWTKQEAELFAAREKRLESQIGGRRFRAEVAKDRDYVSGAFVNQKHPWLKETPCAIRQAAVRSLIKAWDSNTAKQEAMKERGEKKGHRFVLKYRQRQQPSSWTIEIDARELKNVETIERPRTRHKDDNKHKKRRKWTKLEVFKEKMAGGPLYLTEEIPGGKIEGAPENKRKVVALDPGVRTFQTSYSPQEGVGEYATGERGFARLFNLCWRIDEIISERKDPKVKLPYLDRRDLKRQQYACMEKLRGLTNELHKKVANDLCRRFDTILLPEFKSQDMVKKNNNGRRRVIRKKTARTLLTLRHYAFRTFLASKVLLHGSELAIVTEEYTSKTCGRCGHIKKNLGGAEVYKCQKCGFKCGRDVNGARNVLLKHLRQPKSV

SEQ ID NO: 2942 - protein, 564 aa, Chloropicon primus
MARSGKRRKKKEKQGSGSTSSTRRSHSGESHAQGASKSGQESPTTERPLLPFWNQGLQLLYALCLLPPADDPASAEVKCPKTGWRSCLNLPEDSVVSVETLQSPAKRKRGQKLKTSKLLSERTVIRTRKLRMRLNPEQAKCLCNWMGAARFTYNKCLEAVKKERFPLVWTVLLDRFVTAKPRGPEVFEGLEKELKEIQCSPRPWTKQEAELFAAREKRLESQIGGRAFRIQVGKDRDYVSGAFVNQKHPWLKDTPQPSSWTIEIDARELKNVETIERPNTRHKDDTKHNKRRKWTKLEVFKKKMAGGPLYLTEEIPGGKIEGAVKITRNRLGQFHMHIPIATPWDRLPPLKPENKRKVVALDPGVRTFQTSYSPQEGVGEYAKGERGFARLFNLCWRIDEIISERKDPKVKLPYLDRRDLKRQQYACMEKLRGLTNELHKKVANDLCRRFDTILLPEFKSQDMVKKNNNGRRRVIRKKTARTLLTLRHYAFRTFLASKVLLHGSELAIVTEEYTSKTCGRCGHIKDNLGGAEVYKCQKCGFKCGRDVNGARNVLLKHLRQPKSV

SEQ ID NO: 2943 - protein, 722 aa, Chloropicon primus
MARSGKRRKKKEKQGSGSTSSTRRSHSGESHAQGASKSGQESPTTEPLRRFWNQALKWLYEKCMLPIADDPASAGEGSSTPRKKRGGKRKEKPLDDPASAFEEGSSTPRKKRGGKRKGKPPEAASSAGESSSSSGKPRKKPRKKGKKKNKKKGKKKKNKRGKKAGKQPGGLADDSVKKTWFSSMKRELEEVKCPKTGWRSCLNLPEDSVVSVETLQPPAKRKRGQKLKTSKLLSERTVIRTRKLRMRLNPEQAKCLCNWMGAARFTYNKCLEAVKKERFPLVWTVLLDRFVTAKPRGPEVFEGLEKELKEIQCSPRPWTKQEAELFAAREKRLESQIGGRRFRAEVAKDRDYVSGAFVNQKHPWLKDTPCAIRQAAVRSLIKAWDSNIAKQEAMKERGEEKGHRFVLKYRQRQQPSSWTIEIDARELKNVETIERPNTRHKDDTKHKKRRKWTKLEVFKEKMAGGPLYLTEEIPGGKIEGAVKITRNRLGQFHMHIPIATPWDRLPPLKPENKRKVVALDPGVRTFQTSYSPQEGVGEYATGERGFARLFNLCWRIDEIISEREDPKVKLPYLDRRDLKRQQYACMEKLRGLTNELHKKVANDLCRRFDTILLPEFKSQDMVKKNNNGRRRVIRKKTARTLLTLRHYAFRTFLASKVLLHGSELAIVTEEYTSKTCGKCGHIKDNLGGAEVYKCQKCGFKCGRDVNGARNVLLKHLRQPKSV

SEQ ID NO: 2944 - protein, 658 aa, Chloropicon primus
MARSGKRRKKKEKQGSGSTSSTRRSHSGESHAQGASKSGQESPTTERPLLPFWNQGLQLLYALCLLPTADDPASAGEGSSSSGKPRKKPRKKGKKKNKKKGKKKKNKRGKKAGKQPGGLADDSVKKTWFSSIKRELEEVKCPKTGWRSCLNLPEDSVVSVETLQPPAKRKRGQKLKTSKLLSERTVIRTRKLRMRLNPEQARTLCNWMGAARGRAFRIQVGKDRDYVSGAFVNQKHPWLKETPCAIRQAAVRSLIKAWDSNTAKQEAMKERGEKKGHRFVLKYRQRQQPSSWTIEIDARELKNVETIERPNTRHKDDTKHKKRRKWTKLEVFKKKMAGGPLYLTEEIPGGKIEGAVKITRNRLGQFHMHIPIATPWDRLPPLKPENKRKVVALDPGVRTFQTSYSPQEGVGEYAKGERGFARLFNLCWRIDEIISERKDPKVKLPYLDRRDLKRQQYACMEKIRGLTNELHKKVANDLCRRFDTILLPEFKSQDMVKKNNNGRRRVIRKKTARTLLTLRHYAFRTFLASKVLLHGSELAIVTEEYTSKTCGRCGHIKDNLGGAEVYKCQKCGFKCGRDVNGARNVLLKHLLTGADAVEYYYHLYDSDLMHLAAFQGSKQVLQWLRSQDPPCPWIPNRCRIVAKHRNHQRVIEWINANS

SEQ ID NO: 2945 - protein, 815 aa, Chloropicon primus
MARSGKRRKKKEKQGSGSTSSTRRSHSGESHAQGASKSGQESPTTERPLRRFWNQALKWLYEKCMLPIADDPASAGEGSSTPRKKRGAEGEAAGRPRLCFRGGFEHASQEAGEAAARQKEEGQKLKTSKVLSERTVIRTRKLRMRLNPEQAKCLCNWMGAARFTYNKCLEAVKKERFPLVWTVLLDRFVTAKPRGPEVFEGLKKELKEIQCSPRPWTKQEAELFAAREKRLESQIGGRAFRTEVAKDRDYVSGAFVNQKHPWLKDTPCAIRQAAVRSLIKAWDSNIAKQEAMKERGEEKGHRFVLKYRQRQQPSSWTIEIDARELKNVETIERPNTRHKDDTKHNKRRKWTKLEVFKKKMAGGPLYLTEEIPGGKIEGAVKITRNRLGQFHMHIPIATPWDRLPPLKPENKRKVVALDPGVRTFQTSYSPQEGVGEYATGERGFARLFHLCRRIDEIISEREDPKVKLPYLDRRDLKRQQYACMEKLRGLTNELHKKVANDLCRRFDTILLPEFKSQDMVKKNNNGRRRVIRKKTARTLLTLRHYAFRTFLASKVLLHGSELAIVTEEYTSKTCGRCGHIKKNLGGAEVYKCQKCGFKCGRDVNGARNVLLKHLLWKRELVRWLGSEVYVKLGVSDIEGVGVIAIRDIPKGTNPFTSCNEGLLRRETMVTLTETEVREVSRRAGSTAVLELIKSFFAPLTEECNRTGMEREATTASGDLLYGVNATGTNTLDVSWYLNHSDRPNIQFVECAEENGFNTYVAKDTIRQGTELTVDYREMGKVYHQHATAAGPRRSEEDTIKRATTDDDDSLEKEKK

SEQ ID NO: 2946 - protein, 484 aa, Chloropicon primus
MRTRKLRMRLNPEQARTLCNWMGAARFTYNKCLEAVKKEGFPLVWTVLLDRFVTAKPRRPEVFEGLEKELKEIQCSPRPWTKQEAELFAARENRLESLIGGRAFRTEVAKDRDYVSGAFVNQKHPWLKDTPCAIRQAAVRSLIKAWDSNIAKQEAMKERGEEKGHRFVLKYRQRQQPSSWTIEIDARELKNVETIERPNTRHKDDTKHKKRRKWTKLEVFKEKMAGGPLYLTEEIPGGKIEGAVKITRNRLGQFHMHIPIATPWDRLPPLKPENKRKVVALDPGVRTFQTSYSPQEGVGEYAKGERGFARLFNLCWRIDEIISERKDPKVKLPYLDRRDLKRQQYACMEKLRGLTNELHKKVANDLCRRFDTILLPEFKSQDMVKKNNNGRRRVIRKKTARTLLTLRHYAFRTFLASKVLLHGSELAIVTEEYTSKTCGKCGHIKDNLGGAEVYKCQKCGFKCGRDVNGARNVLLKHLRQPKSV

SEQ ID NO: 2947 - protein, 723 aa, Chloropicon primus
MARSGKRRKKKEKQGSGSTSSTRRSHSGESHAQGASKSGQESPTTERPLLRFWNQGLAWLYALCLLPPADDPASAGEGSSTPRKKRGGKRKGKPLDDPASAFEEGSSTPRKKRGGKRKGKPPEADASAGESSSSSGKPRKKPRKKGKKKNKKKGKKKGNKRGKKAGKQPGGLADDSVKKTWFSSIKRELEEVKCPKTGWRSCLNLPEDSVVSVETLQPPAKRKRGQKLKTSKLLSERTVIRTRKLRMRLNPEQAKCLCNWMGAARFTYNKCLEAVKKEGFPLVWTVLLDRFVTAKPRRPEVFEGLEKELKEIQCSPRPWTKQEAELFAAREKRLESQIGGRAFRIQVGKDRDYVSGAFVNQKHPWLKETPCAIRQAAVRSLIKAWDSNTAKQEAMKERGEKKGHRFVLKYRQRQQPSSWTIEIDARELKNVETIERPNTRHKDDTKHKKRRKWTKLEVFKKKMAGGPLYLTEEIPGGKIEGAVKITRNRLGQFHMHIPIATPWDRLPPLKPENKRKVVALDPGVRTFQTSYSPQEGVGEYAKGERGFARLFNLCWRIDEIISERKDPKVKLPYLDRRDLKRQQYACMEKIRGLTNELHKKVANDLCRRFDTILLPEFKSQDMVKKNNNGRRRVIGKKTARTLLTLRHYAFRTFLASKVLLHGSELAIVTEEYTSKTCGRCGHIKKNLGGAEVYKCQKCGFKCGRDVNGARNVLLKHLRQPKSV

SEQ ID NO: 2948 - protein, 723 aa, Chloropicon primus
MARSGKRRKKKEKQGSGSTSSTRRSHSGESHAQGASKSGQESPTTERPLLPFWNQGLQLLYALCLLPTADDPASAGEGSSTPRKKRGGKRKEKPLDDPASAFEEGSSTPRKKRGGKRKGKPPEADASAGESSSSSGKPRKKPRKKGKKKNKKKGKKKKNKRGKKAGKQPGGLADDSVKKTWFSSIKRELEEVKCPKTGWRSCLNLPEDSVVSVETLQSPAKRKREQKLKTSKLLSERTVIRTRKLRMRLNPEQAKCLCNWMGAARFTYNKCLEAVKKEGFPLVWTVLLDRFVTAKPRRPEVFEGLEKELKEIQCSPRPWTKQEAELFAAREKRLESQIGGRRFRAEVAKGRDYVSGAFVNQEHPWLKETPCAIGQAAVRSLIKAWDSNIAKQEAMKERGEEKGHRFVLKYRQRQQPSSWTIEIDARELKNVETIERPRTRHKDDTKHKKRRKWTKLEVFKKKMAGGPLYLTEEVPGGKIEGAVKITRNRLGQFHMHIPIATPWDRLPPLKPENKRKVVALDPGVRTFQTSYSPQEGVGEYAKGERGFARLFNLCWRIDEIISERKDPKVKLPYLDRRDLKRQQYACMEKIRGLTNELHKKVANDLCRRFDTILLPEFKSQDMVKKNNNGRRRVIRKKTARTLLTLRHYAFRTFLASKVLLHGSELAIVTEEYTSKTCGRCGHIKKNLGGAEVYKCQKCGFKCGRDVNGARNVLLKHLRQPKSV

SEQ ID NO: 2949 - protein, 477 aa, Chloropicon primus
MRLNPEQAKCLCNWMGAARFTYNKCLEAVKKEGFPLVWTVLLDRFVTAKPRRPEVFEGLEKELKEIQCSPRPWTKQEAELFAAREKRLESQIGGRRFRAEVAKDRDYVSGAFVNQEHPWLKETPCAIRQAAVRSLIKAWDSNIAKQEAMKERGEEKGHRFVLKYRQRQQPSSWTIEIDARELKNVETIERPRTRHKDDTKHKKRRKWTKLEVFKKKMAGGPLYLTEEIPGGKIEGAVKITRNRLGQFHMHIPIATPWDRLPPLKPENKRKVVALDPGVRTFQTSYSPQEGVGEYAKGERGFARLFNLCWRIDEIISERKDPKVKLPYLDRRDLKRQQYACMEKIRGLTNELHKKVANDLCRRFDTILLPEFKSQDMVKKNNNGRRRVIRKKTARTLLTLRHYAFRTFLASKVLLHGSELAIVTEEYTSKTCGRCGHIKDNLGGAEVYKCQKCGFKCGRDDNGARNILLKHLRQPKSV

SEQ ID NO: 2950 - protein, 697 aa, Chloropicon primus
MARSGKRRKKKEKQGSGSTSSTRRSHSGESHAQGASKSGQESPTTERPLRRFWNQGLQLLYSLCLLPIADDPASAGEGSSTPRKKRGRKRKEKPLDDPASAFEEGSSTPRKKRGGKRKRKGKPPEAASSAGESSSSSGKPRKKPRKKGKKKNKKKGKKKKNKRGKKAGKQPGGLADDSVKKTWFSSIKRELEEVKCPKTGWRSCLNLPEDSVVSVETLQSPAKRKRGQKLKTSKLLSERTVIRTRKLRMRLNPEQAKCLCNWMGAARFTYNKCLEAVKKEGFPLVWTVLLDRFVTAKPRRPEVFEGLEKELKEIQCSPRPWTKQEAELFAAREKRLESQIGGRRFRAEVAKDRDYVSGAFVNQKHPWLKDTPCAIRQAAVRSLIKAWDSNIAKQEAMKERGEEKGHRFVLKYRQRQQPSSWTIEIDARELKNVETIERPNTRHKDDTKHNKRRKWTKLEVFKKKMAGGPLYLTEEIPGGKIEGAPENKRKVVALDPGVRTFQTSYSPQEGVGEYATGERGFARLFNLCWRIDEIISERKDPKVKLPYLDRRDLKRQQYACMEKLRGLTNELHKKVANDLCRRFDTILLPEFKSQDMVKKNNNGRRRVIRKKTARTLLTLRHYAFRTFLASKVLLHGSELAIVTEEYTSKTCGRCGHIKDNLGGAEVYKCQKCGFKCGRDVNGARNVLLKHLRQPKSV

SEQ ID NO: 2951 - protein, 477 aa, Chloropicon primus
MRLNPEQAKCLCNWMGAARFTYNKCLEAVKKEGFPLVWTVLLDRFVTAKPRRPEVFEGLEKELKEIQCSPRPWTKQEAELFAAREKRLESQIGGRRFRAEVAKDRDYVSGAFVNQKHPWLKDTPCAIRQAAVRSLIKAWDSNIAKQEAMKERGEEKGHRFVLKYRQRQQPSSWTIEIDARELKNVETIERPNTRHKDDTKHNKRRKWTKLEVFKKKMAGGPLYLTEEIPGGKIEGAVKITRNRLGQFHMHIPIATPWDRLPPLKPENKRKVVALDPGVRTFQTSYSPQEGVGEYATGERGFARLFNLCWRIDEIISERKDPKVKLPYLDRRDLKRQQYACMEKLRGLTNELHKKVANDLCRRFDTILLPEFKSQDMVKKNNNGRRRVIRKKTARTLLTLRHYAFRTFLASKVLLHGSELAIVTEEYTSKTCGRCGHIKDNLGGAEVYKCQKCGFKCGRDVNGARNVLLKHLRQPKSV

SEQ ID NO: 2952 - protein, 695 aa, Chloropicon primus
MARSGKRRKKKEKQGSGSTSSTRRSHSGESHAQGASKSGQESPTTEPLRRFWNQGLAWLYALCLLPIADDPASAGEGSSTPRKKRGGKRKGRPPEADASAGESSSSSGKPRKKPRKKGKKKNKKKGKKKKNKRGKKAGKQPGGLADDSVKKTWFSSIKRELVEVKCPKTGWRSCLNLPEDSVVSVETLQSPAKRKREQKLKTSKLLSERTVMRTRKLRMRLNPEQARTLCNWMGAARFTYNKCLEAVKKEGFPLVWTVLLDRFVTAKPRGPEVFEGLEKELKEIQCSPRPWTKQEAELFAAREKRLESQIGGRRFRAEVAKDRDYVSGAFVNQKHPWLKETPCAIRQAAVRSLIKAWDSNTAKQEAMKERGEEKGHRFVLKYRQRQQPSSWTIEINARDLKNVETIERPRTRHKDDTKHKKRRKWTKLEVFKEKMAGGPLYLTEEIPGGKIEGAVKITRNRLGQFHMHIPIATPWDRLPPLKPENKRKVVALDPGVRTFQTSYSPQEGVGEYATGERGFARLFNLCWRIDEIISERKDPKVKLPYLDRRDLKRQQYACMEKLRGLTNELHKKVANDLCRRFDTILLPEFKSQDMAKKNNNGRRRVIRKKTARTLLTLRHYAFRTFLASKVLLHGSELAIVTEEYTSKTCGRCGHIKDNLGGAEVYKCQKCGFKCGRDVNGARNVLLKHLRQPKSV

SEQ ID NO: 2953 - protein, 723 aa, Chloropicon primus
MARSGKRRKKKEKQGSGSTSSTRRSHSGESHAQGASKSGQESPTTKRPLRRFWNQGLQLLYSLCLLPIADDPASAGEGSSTPRKKRGGKRKEKPLDDPASAFEEGSSTPRKKRGGKRKGKPPEAASSAGESSSSSGKPRKKPRKKGKKKNKKKGKKKKNKRGKKAGKQPGGLADDSVKKTWFSSIKRELEEVKCPKTGWRSCLNLPEDSVVSVETLQSPAKRKRGQKLKTSKLLSERTVIRTRKLRMRLNPEQAKCLCNWMGAARFTYNKCLEAVKKEGFPLVWTVLLDRFVTAKPRRPEVFEGLEKELKEIQCSPRPWTKQEAELFAAREKRLESQIGGRRFRAEVAKDRDYVSGAFVNQKHPWLKETPCAIRQAAVRSLIKAWDSNTAKQEAMKERGEKKGHRFVLKYRQRQQPSSWTIEIDARELKNVETIERPRTRHKDDNKHKKRRKWTKLEVFKEKMAGGPLYLTEEIPGGKIEGAVKITRNRLGQFHMHIPIATPWDRLPPLKPENKRKVVALDPGVRTFQTSYSPQEGVGEYATGERGFARLFNLCWRIDEIISERKDPKVKLPYLDRRDLKRQQYACMEKLRGLTNELHKKVANDLCRRFDTILLPEFKSQDMVKKNNNGRRRVIRKKTARTLLTLRHYAFRTFLASKVLLHGSELAIVTEEYTSKTCGRCGHIKKNLGGAEVYKCQKCGFKCGRDVNGARNVLLKHLRQPKSV

SEQ ID NO: 2954 - protein, 698 aa, Chloropicon primus
MARSGKRRKKKEKQGSGSTSSTRRSHSGESHAQGASKSGQESPTTERPLRRFWNQGLQLLYSLCLLPIADDPASAGEGSSTPRKKRGGKRKEKGKPPEAASSAGESSSSSGKPRKKPRKKGKKKNKKKGKKKKNKRGKKAGKQPGGLADDSVKKTWFSSMKRELEEVKCPKTGWRSCLNLPEDSVVSVETLQPPAKRKRGQKLKTSKLLSERTVIRTRKLRMRLNPEQAKCLCNWMGAARFTYNKCLEAVKKERFPLVWTVLLDRFVTAKPRGPEVFQGLKKELKEIQCSPRPWTKQEAELFAARENRLESQIGGRAFRIQVGKDRDYVSGAFVNQKHPWLKDTPCAIRQAAVRSLIKAWDSNTAKQEAMKERGEEKGHRFVLKYRQRQQPSSWTIEIDARELKNVETIERPNTRHKDDTKHKKRRKWTKLEVFKKKMAGGPLYLTEEIPGGKIEGAVKITRNRLGQFHMHIPIATPWDRLPPLKPENKRKVVALDPGVRTFQTSYSPQEGVGEYATGERGFARLFNLCWRIDGIISERKDPKVKLPYLDRRDLKRQQYACMEKLRGLTNELHKKVANDLCRRFDTILLPEFKSQDMVKKNNNGRRRVIRKKTARTLLTLRHYAFRTFLASKVLLHGSELAIVTEEYTSKTCGRCGHIKDNLGGAEVYKCQKCGFKCGRDVNGARNVLLKHLRQPKSV

SEQ ID NO: 2955 - protein, 662 aa, Chloropicon primus
MARSGKRRKKKEKQGSGSTSSTRRSHSGESHAQGASKSGQESPTTEPLRRFWNQGLAWLYALCLLPIADDPASAGKPRKKPRKKGKKKNKKKGKKKKNKRGKKAGKQPGGLADDSVKKTWFSSIKRELEEVKCPKTGWRSCLNLPEDSVVSVETLQSPAKRKRGQKLKTSKLLPERTVIRTRKLRMRLNPEQAKCLCNWMGAARFTYNKCLEAVKKEGFPLVWTVLLDRFVTAKPRRPEVFEGLEKELKEIQCSPRPWTKQEAELFAAREKRLESQIGGRRFRAEVAKDRDYVSGAFVNQKHPWLKDTPCAIRQAAVRSLIKAWDSNTAKQEAMKERGEEKGHRFVLKYRQRQQPSSWTIEIDARELKNVETIERPNTRHKDDTKHKKRRKWTKLEVFKKKMAGGPLYLTEEIPGGKIEGAVKITRNRLGQFHMHIPIATPWDRLPPLKPENKRKVVALDPGVRTFQTSYSPQEGVGEYATGERGFARLFNLCWRIDEIISERKDPKVKLPYLDRRDLKRQQYACMEKLRGLTNELHKKVANDLCRRFDTILLPEFKSQDMVKKNNNGRRRVIRKKTARTLLTLRHYAFRTFLASKVLLHGSELAIVTEEYTSKTCGKCGHIKDNLGGAEVYKCQKCGFKCGRDVNGARNVLLKHLRQPKSV

SEQ ID NO: 2956 - protein, 331 aa, Chlorella vulgaris
MGKRFVASRNIEEPWLKQCPQVIRSCAIRDLKAAFDSNFAKRKINPNHTFDVKFKAKKDDVTAVRIERVNGAFKVLDDGKHVSFFPKSLKPMGVDPRALQGIELKHDITLTKDRLGRFTLHVPYRRENQAAQEPDTWCAIDPGVRTFATVFSPTDACKIGDGAATRLAKLCAHLDKLTSDTTKASGLQRRRRMKKAQVRVRNRIVHLVDELHWQAASFLCKHYTDILLPVFETKKMACRLSRKIGSKTARSMLTLSHYKFRMRLIHKAAEHGCRVHLCTEEYTSKTCTRCGALKHNLGGAKVYRCPVCMLRIDRDIAGGRNIFLKNAVALD

SEQ ID NO: 2957 - protein, 320 aa, Chlorella vulgaris
MRKYAVKDATQAFVTNFAKKRKNSGHSFRVGFKTKKHSTKVLKLEAAKMGVKIVDGRPRLVVGDARQRQLGREGISFDRRGEALVRDTKDPVLQIDDLGRFWLITVCTRQPETQGQRTQGVVALDPGVRTFQTTYSPDGTSYKLGDTASNRVYRLLLVRDKYIGLAHMRGPSRRVRRSYGKKAAKIMARIQHIVDELHWKTARFLAQGWSEILIPVFGTAAMSKKYQASRAKRRCIGRKTTRQMLHLRHYTFRQRLHHVAKLTGTVVREVTEEYTSKTCGNCGEIKANLGGAKTYRCQECGVCLDRDGNGARNIFIKSVL

SEQ ID NO: 2958 - protein, 1367 aa, Chlorella vulgaris
MSDEEQAWEDESSEAKRARKGKAAMTDEDYRRAEEEEERAAQERDAMALLVGGLHVSPEEARQLMDADTAASAYYETATVMAQRQGRRQPMEHTAAEEEAGPSNAPHRRLSQAAHRQGRRQQQLSPAQQTPPQPRTYCEVAASQGQATPPPPVRQAARSASKKQATRAQKLQAGGGRRVAQPTGQAAPRPGPQPSRGQHDSINKQIASDAILAQYFTALDDLPPPDETTSESADLTQSPQEEQSDPLEPAEDVEQAAAAAAPAARRKDRRSKTQRKNQNKRLRKQKAREEARQDDLVLEEAYKQASSNSDRTASEEEEEGGAGGQQAADTDRPVFVAPGRGQAAPSEAAAAAAKGKSRNKRKRKKKASSNSDRTASEEEEEGGAGGQQADPQALAPPKQKRQKKQAKLKQEGAELFTIKTGLGSIIRLSVLWRAIEAAVVDMTQVCVETWNGLLILVARSCWAQQPQQPHDLEDLDDELQQLLQQPLPLMDQKFILSVMIALTGTRMPARANTIAPSAFVQKVLEHFYKPRNFWKRLRGWITMKIRQLESWHHQQLSCKKRKLLVDAVQKSIWNNVAFASPAAVAADHRALSDDVGALVAHVRQARVGLLPVKEHLYSEWHKFFPWLHTMLQDIEEHNRATRQRIVIARTALNTAKGVVEDLEAKLHAAQHDQPGQAAPRHKKRKQKQDPPTPKGRLRNVLRKPRALDPPPPQQGAHPPLAAQQVQQERQMHRPPMMPTPSWQHNASSARLTKHRNKANHSTWKQQRSRQWHYKDRKKAATAAAGSGVGEDEPAALAGHQPAAFVGNAPAGTSAARIATGPAAARDPRTPAQLKQALKEARKTVAALLEDLVKLRKTLAKTFKLVPSAALTPHFVPITPEIARARVNAFLEEEKELEEADKGLAQGKDKKRRSRTYQKYPRLDRPANITKAEWRKMLRQRRMPLLWETYFDLSGLRTAHHEPQAFLMTNGVQAHVQVKRKSQPARSLAVIADELKRHPERGEELERQLQEKRRELLKGKQWVAVDPGKRAWITAVSRSDNKSHHVAHQCTTKHHYQQTGSIKRRMRMERDLAAAPNGLQHWQSHLQRQDTANPVALETRLANLTTRLREVLVFYDAFKQRKWKWAAVVQRQRVLANEARRLCGGLPKHEYATVIPTREHLTSQSCPRCRLGWGRGQRSYSVRRCDKCQTYWDRDVAAAKNILQAARADVAGVARPRHLRRKPPPQPAPAAQHQPPPVQADDYAEDVVVWPAHLYDEQAPMEEMHGLEGGLGAMEVEFAPGWGVQELAAAAPWADPFYVLAALAGCLSDPEAEAADLNTRLLQRFSEAFGYWNADKRHAVATALAPLIVHRAYHHLVPNLKSYLGEVP

SEQ ID NO: 2959 - protein, 557 aa, Chlorella vulgaris
MAGPSSTPSHTYTRTGSGNGRCGSDGGGGGGGGSGNGNATESGGDTQEKLERQQADAQAEANSKLRKKQQEKGDQKKMKQRGQQRRRPLLPKEVRAVLRELRQQIKERTHKMFTPIPVGSLTLSHITVEPHVLQFIDPIARVSKLSKDDAFKARFDFSSVIPEGSSWSFSGMTTNGVEACVHMQRAARPPPPPPPSLDDMPAYDTSGVVVCWGADPGRISMFTAVSHVDCKMWHDVRQLSTGKYYQAVGFTQHQRWLQQQLASSEITAAGGTGLQAWQSHMPTANTSSADDLCKRIRHMSEGLRPTIVHYSSMQHLHWKLMLYGNKRRMLLSLVRQMTGGRRKDQVLVGFGNGTGGWRGPIKGHRMPPIKEFRQLLGRFATVVLVPESYTSKRCPCCEGLLKRTSTHAVNRCPECCYWDRDVAAAKNFLNVLLSHMAGQGRPAYLQKAANPPRAKKQSAAKAPAPAAANAVAPPRGPKPAPHGLPDHIGPGFFCPDALAPAVATVDASLGGPQQQAPHGMPAATALPLPAAEPAAAPSGSGQAGAGGEVDGSMMELD

SEQ ID NO: 2960 - protein, 378 aa, Cichorium endivia
MLRRQAYKFRIEPTGEQQRKLRQFAGACRFVFNKALAVQQVNREEGGKYIGYVAMAKYLTAWRNGDETPWLKDAPVHPLQHALKDLDRAYQNFFAQRADFPRFKKRGQRDSFRYPRSQTDQARPGKFTHQPAQAGLAALSQQQAGAGHGEERQREPQRRALETVLQPLNSFKRHQHRLAKAQRQMSHKTKFSNNWKKAKARVQRINRQIADARNDYLHKATHAISQSHALVCVEDLKVGNMSRSAKGTVEQPGQSVRQKSGLNRAILDQGWGEFRRQLDYKAQWAGGWLVAVPPQQTSQQCPECGHTHAGNRQTQALFLCLACGHSDNADRVGSRNIRERGLKTLEGQGHAPIACEVNGAVWPSAAGTRRSEEAAFAA

SEQ ID NO: 2961 - protein, 699 aa, Cichorium endivia
MTSIVLSNVARSAQELPRRGPDRGHHVYPFYDGHLAHKYRSLVRPEQANQLSHESINTFDPTEMALSRCWTYAMVTDFAATAGQQKRWPFTHTTVLDCSSDYFPTDQGRLPVEDLGDEVVQAILQAADVGPAFPSAGSGAADPLAPVAGQVPSSAANALALAPLARQAPSSVVTAEPTPMDLDDPPAPPGPTPSAAAAAPPPRPPPTPTQPTPPSSQTLVNKPEMTNTRTAVYRIYAPTELKDRIRTFRRRTRLVKNEAVRLVNMATSPSHEHLNERRLYTLLANNGSAFSRKHPELLRCPVHARRQVILEAIAQRKSIITRYDNLPGGRRRPLPSICPPTKQTDKRFGFSVAFPNTTGKIEALYDVTGTEVTGLKLVMPAVTIGGTRYSEVRARICLRGERQRLRLLELCRWSRANAFKLPREWRVRCGADGRWYLHVSYELVDPKRFNADQQAEKKRRGITVLNGAIKVKSIDPGARTPFTVYTSEGETIEIGGQDDRARLRELRLAADRIQSRINEMKRLNRRPSSRVSREMRKRRFARPARERSELHKRWRRIMADSKNLVKEVHCRTAHFLALSSNIVVMPRMEVLGMVRRRRSRLKISTKRELLTWSHSAFVNRLAIKCHDIAYDARFPHKAGHPTLLLVQPEAYTSKTCPACGRLNDSLGSRTDFHCPHQNCTYTAGRDHNGAFNMIIKAIR

SEQ ID NO: 2962 - protein, 759 aa, Amoeboaphelidium protococcarum
MVYEITRKCKLNTALNLDAFDKSALIAFVKTCSTSLSSAQRFLYICLNVWQEEGTQLPDLSHQQYVASMLEFLCNPQFPHDRQSFHTQLLGDAIGPAVLEQLHHASLAGPNPNLYEFGARRVMQAVRWHLTTTLFVYQKRILQAQLEPFGITGRKLTLYIALLNALKFDNPSEAFQFDHPELLLLDRSVKVSISAEYDADDQEHQEVADAELVSQIYDQMDWDEDLVWFTKVHRSFLLDIVTSSYEPPEPRREYVMQRRSPRNLEKKVGVHRQVRARSRQQLSMKSRAGPAFDSLMGQQSLVQYMGYLRDETKGLEVPSFSIFPMGTDVPRYVQVDRRVLHYSGIQSLSDCSVKSIINLKKTRLRKIAVDVDEVTLLSDGYGCSIAVKVKDRPWQYANVKSDLESNRQSDVSGKLFGAVYLTDAKKLAERMEGAQVFGVDPGKKNPMVWTKDRDPVLAANRSLAQQKYRRTGHITAGHWRKLTLEKQYEAAASRIKPVSINVYENDLAQVSSKRQYLNVLMANFPQVVDFYSSSFHRSWRFRRYCATQSGYDNVMNHMLHGRETPQAAVVHDHRRRKRARRRKKKQRKKHERMVDPAAPTKPPVIAYGNAGVMHVKKNPPVPVRGFAYHLSRRGLVVSIPEYQTTKLCSCCHHGLRLEKVGVYDCHHTKRRRRVPEKSHPVLCCFDASGSFLQVSSNCPDRQQKQVESRLSVCSNCQVLGQPYFVDRDVNASLNMLLIVVYFAETRRRPDWNRRAGRRT

SEQ ID NO: 2963 - protein, 639 aa, Amoeboaphelidium protococcarum
MEQFTSVKLKFADVWKGDVDTRLALEKLHADSIQFRVVASMFVQYYIVLRCNNSGVYEKFQRRVRDGRTGEAIDLTFMHFNDSMMDRIMRPFSGAGGKLEFLDSALEYIEINKALREFAVQVLEQTDFEPLDNQLLSLSYREIAKEFYKNLKTYVKVNFSLHLANFFISHLKVDCQFDNFYMKSLVKKLVDQAKRDFHRRVVSLELLAKVYVGDLYNNHGHLKRITDETFDEFLVVMFCLQKHLEELKDSSMVPIKILQLIPQYKVKAAHIFLTNQMFSNQQQHPLLAQEEWIQSCFNTDSFKQQFAGSITTDLYSVSFLVYSHGVAAPLAAEAQVALEYFLDEQDAEDADEDDVDADELEIEEEDVEQDLQEDVPHVDWSFLNDESFSNLRRDTNTVFGAIDPGINKAIQMAFFSHMNGNISPLDEFCLLNSRRQLKFATESDLGQHQATRRTPPLISLPIGVTNKTSDLVSLQQYCVTYLQLSSVAIVRVLSGDARKIQFEYWEHRRAVLQNAVKRLLGLEQLDETRRYQFIIFFGRGGEFGFAGFGRKRVPPLVQLRYILNKYATVVVTPEPWTSSRCCACHSFGTRYRRPQDKFVCMRDPNHQMNGDSNAAVNILYIGLYMMMHGGTFPQHFINQ

SEQ ID NO: 2964 - protein, 696 aa, Amoeboaphelidium protococcarum
MADPPIEVADIGGALPPRKRQREVNCKACGRDDHKRSSSKLCPNYVPRAKNAAKPQDNMGIPVAEAYVAVPIGLNVFCKIDAVKHEISDLVSRCTDLKVEACRLLLSFVLNHLVYNPDTPMPDIRFGANGQMRNFFSSLIANPRRRDLLNRNTCNWAALNEFIEAHYVPRRPADLFWCDMRGYSNMVTALASAHNDDCARHISTNLPSRLKQWLRHKFRKHLGFCLEEDDVCTLAVYVLALINPPEDIEEMPPYPAEIIDNCGNGELVVYYMDYYETRARQYILCNLPMDKASLQNNWHLYLKSMWRILRTFESNHQMYEEEYLLNNEGPLLNVYALLPLNGFTQKHILITSNVLKEICVAANLPDVRQMDVHALWSQCFKLNKVSTTGNQRRRFGYSITSDGVGCSASVLRPAYPAPPASRYGFAFDGTGYQPLDVNNETRVIGIDVNRGVLLAASCGPDDRIADVPTDQTPFADGTHELVYTTARWREENGEKFGEKKKAAWNEIAPEVVNAMAQIPSAKSTSFLGIIQHLQYVLQHRDAFTGFYRPEMWRKLRRKLFSKRQRAYDNLARMLTLRQDGQFDHNTIIAYGAGNFDTASPGYPATPNKRLFYELKKRCRVRLVPEYRTSQRCSNCESELGQSRVWRIKHCPNNNCLAIWHRDVNAARNIRYIFLARNRDGGERPVPFRYDPPRPQQ

SEQ ID NO: 2965 - protein, 772 aa, Amoeboaphelidium protococcarum
MAKKVTRKCKLNSVLNLDDGDKEILISQIQLSSVHLTFASRLIYLCLNVWNEAGKALPELSHQQYFASMLEYLCNSAFHRDNDHTRMLSETIAPEVRQRLRHESLIGPNPNLYVFQARKIIQAISWHLTETIWVYQKKVIKAQMEAFNVKGRRLTVFLQLLNSLLTEEAVNTMEHFGGEYLEIDPATQIYLPPDYDAGEDEETIAQQDAAIRDELLQLLQVEEVRHLVSLHRHHLLDIVTTSFQDKAPRKRYSKRKQESSRQLKGSIGFKRQKSGKLKQRDTHHTYMPSRAHHAFQNQEGQKVLVQYLMYLRQTLKELGLSSFKIFPTGTDVPRHISFDNRVLAQWGFGQYHLGDQSEEKEEHVQKQEEEKQCILKLKYLGLQQRMANSQDVSISSDGFACSISVSGQGGKAYANEAKDLERKARNTDVSQVDVGAFALENCRNLAQRLDGTRLIGIDPGKKNVLVWGDEANVEGATTLKDAKREFKDTGRISSGYWQRLALTTEYEAHLQYNKPAEITLMEQEMAQSNNSQQYLGVYIRYFEDVYAFYSQSFHRNWRFRRFCATKSAFGNVINMMHGRPKPPVPKINDRHRGRAAKKRKRELRKSHGTLLPPDKPPVIALGDAGVKHVRGNPPVPVRKFAFELSRRALVVITPEYHTNKQHSICHADLHWEHEVVLKCRDKKVKKILPGRHRAQTVCIKADGPEILSHECPDRFNRRVQSRFGVCQNCQNTGSDVFVDRDVNAYRSMAQIVRHYAIHGYRPQWNCRAERRA

SEQ ID NO: 2966 - protein, 695 aa, Amoeboaphelidium protococcarum
MEYRTITAKDNLDSVFAGTDEELNLLKQTILDNHYLRFLGSTAVYHYAMDFLHGHTDWAVDKQYPQLDAHVLSSFFKEFAQGFRRQNRSPISSRFINIHEEIVGVAEKIQFGRGRDFQFIHQNVWHDYELAATNHLSSNLMKVLKRVVVHFLHCDASVLDRYSVKKLSTYLISQISLGLYIVNEDQEDGYDLSPDLLACLKKHKNVLDGDMHLFHEFISPYIDDVRRIREQLRLRDDYNAAYNVVRRVKVYDKLWYVYLPLFFRCNQYLEQQDLKFCSLLPIPSKSVCFFKLYSSGLQVLYPGKSFEDLFQIPHQQYGQLHGISTDSHTVQFLFECGHQALAPVVVQCRRVVLNPGHELRDAERRRLELQVQNIYVDEDEDEDEDEDEDEDDDDLHNEEADVDAADGQAQDQRRYSCQQIWYDFPNISLEGKKKAAVDPGLNNYVSIFRPADFQQNQYWDAIEFDYAEKHVISKQRFNELGITEELARKIAEHTQQAQQLRAGLKSYDFDRFQMMLQERYRLFDDELSYYSQEHVLELRLQRIFARRRAYLDVVKKILGVQVLHTSARDQFAVYYGDFVHSTRSLKGQFALQRLVQILNEYAMVFIVPELMTSRLCYECARSGDESFVRRKKDSSECPRCGKQYHADLLGGANIYSLSEQLQRSGGLVPPMNMPTKFIPIAREYGHRIQLARCAD

SEQ ID NO: 2967 - protein, 236 aa, Amoeboaphelidium protococcarum
MATSVGIRATDEHNALQNLVASSPQDLESVMLATDDYYHELHGRSRPYDRERAKDLWAQPRYCFTLEDCLLKSKDAAAKTNQRMPSHLDLSIQKYKFTILKVEKRLMMDKAAQLLGLANFSHQQKDKTIIFWGTGGTSRYGRRYLRGHHFHPPIQKLLACLRQLGRIIVTHEKGTSKHCYHDLQPVKRRRSGKLDEVTCHHCNQTINGDVLGGANILRVGLTMSTNGGNFPMEQTR

SEQ ID NO: 2968 - protein, 759 aa, Amoeboaphelidium protococcarum
MVYEITRKCKLNTALNLDAFDKSALIAFVKTCSTSLSSAQRFLYICLNVWQEEGTQLPDLSHQQYVASMLEFLCNPQFPHDRQSFHTQLLGDAIGPAVLEQLHHASLAGPNPNLYEFGARRVMQAVRWHLTTTLFVYQKRILQAQLEPFGITGRKLTLYIALLNALKFDNPSEAFQFDHPELLLLDRSVKVSISAEYDADDQEHQEVADAELVSQIYDQMDWDEDLVWFTKVHRSFLLDIVTSSYEPPEPRREYVMQRRSSRNLAKKVGVHRQVRARSRQQLSMKSRAGPAFDSLMGQQSLLLYMEYLRDETKVLDVPTFSIFPMGTDVPRYVQVDKRVLRYSGIQSLSGCSVKSIINLKKTRLRKIAADVDEFTLLSDGYGCSIAVNVKEKPWQYANVKSDLESNRKTDVSGKLFGAVYLTDAKNLTERMEGAQVFGVDPGKKNPMVWTKDRDPVLAANRSLAQQKYRRSGHITAGHWRKLTLEKQYEAAASRIKPVSINVYENDLAQVSSKRQYLNVLIANFPQVVDFYSSSFHRSWRFRRYCATQSGYDNVMNHMLHGRETPQAAVVHDHRRRKRARRRKKKQRKKHERMVNPAAPTKPPVIAYGNAGVMHVKKNPPVPVRGFAYHLSRRGLVVSIPEYHTTKLCSCCHHGLRLEKVGVYDCHHTKRRRRVPEKSHPVLCCFDASGSFLQVSSNCPDRQQKQVESRLSVCSNCQVLGQPYFVDRDVNASLNMLLIVVYFAETRRRPDWNRRAGRRT

SEQ ID NO: 2969 - protein, 759 aa, Amoeboaphelidium protococcarum
MVYEITRKCKLNTALNLDAFDKSALIAFVKTCSTSLSSAQRFLYICLNVWQEEGTQLPDLSHQQYVASMLEFLCNPQFPHDRQSFHTQLLGDAIGPAVLEQLHHASLAGPNPNLYEFGARRVMQAVRWHLTTTLFVYQKRILQAQLEPFGITGRKLTLYIALLNALKFDNPSEAFQFDHPELLLLDRSVKVSISAEYDADDQEHQEVADAELVSQIYDQMDWDEDLVWFTKVHRSFLLDIVTSSYEPPEPRREYVMQRRSPRNLEKKVGVHRQVRARSRQQLSMKSRAGPAFDSLMGQQSLVQYMGYLRDETKGLEVPSFSIFPMGTDVPRYVQVDRRVLHYSGIQSLSDCSVKSIINLKKTRLRKIAVDVDEVTLLSDGYGCSIAVKVKDRPWQYANVKSDLESNRQSDVSGKLFGAVYLTDAKKLAERMEGAQVFGVDPGKKNPMVWTKDRDPVLAANRSLAQQKYRRTGHITAGHWRKLTLEKQYEAAASRIKPVSINVYENDLAQVSSKRQYLNVLMANFPQVVDFYSSSFHRSWRFRRYCATQSGYDNVMNHMLHGRETPQAAVVHDHRRRKRARRRKKKQRKKHERMVDPAAPTKPPVIAYGNAGVMHVKKNPPVPVRGFAYHLSRRGLVVSIPEYHTTKLCSCCHHGLRLEKVGVYDCHHTKRRRRVPEKSHPVLCCFDASGSFLQVSSNCPDRQQKQVESRLSVCSNCQVLGQPYFVDRDVNASLNMLLIVVYFAETRRRPDWNRRAGRRT

SEQ ID NO: 2970 - protein, 428 aa, Amoeboaphelidium protococcarum
MNFDCLPMGTEQPRYIKVDKSVLVLAIGKLELAVDDRQSLLAKNRAKDIINLKSVRLHRKAADLDEVILSTDGFGCSITIELNKEFPPYSNTREDLLVKKSKSVDLSQMRVGAVALTNCKQLGSRVQGANVIGVDPAAAHRQLRQTGRLTAKHWPRLSQVKSKAEYLQIYLEMHEHVWHYYCAPFHRQWRLRKFCARQSAFDNVANSMVHNRETPSAPLKDDYYRRYAAHWRKKRLRQSFGRMLDPTVPAGDRPKPPVIAYGNAAVQPVKKTSHVPVRGFAYKLSRCALLVMVLEPNTSKLHAPCHQEMHMQNVDVMRCHHRNKKVKIDGHCRPVFCCVAEGEDGQLIVLHAAGQCPDRERKVVQSRLGVCQNCQVEGVTVFVHLDVNAGVNLQEVVVYYAEHWEDKARRKFRPEWNKRAVGRIRDIQ

SEQ ID NO: 2971 - protein, 772 aa, Amoeboaphelidium protococcarum
MAKKVTRKCKLNSVLNLDDGDKEILISQIQLSSVHLTFASRLIYLCLNVWNEAGKALPELSHQQYFASMLEYLCNSAFHRDNDHTRMLSETIAPQVRQRLRHESLIGPNPNLYVFQARKIIQAISWHLTETIWVYQKKVIKAQMEAFNVKGRRLTVFLQLLNSLLTEEAVNTMEHFGGEYLEIDPATQIHLPPDYDAGEDQETIAQQDAAIKDELLQLLQVEEVRHLVSLHRHHLLDIVTTSFQDKAPRKRYSKRKYESSRQLKGSIGFKRQKSGKLKQRDTHHTYMPSRAHHAFQNQEGQKVLVQYLMYLRQTLKELGLSSFKIFPTGTDVPRHISFDNRVLAQWGFGQYHLGDQSEEKEEHVQTQEEEKQCILKLKYLGLQQRMANSQDVSISSDGFACSVSVSGQGGKAYANEAKDLERKARNTDVSQVDVGAFALENCRNLAQRLDGTRLIGIDPGKKNVLVWGDEANVEGANTQKEAKREFKDTGRISSGYWQRLALTTEFEAHLQYSKPAEITLMEQEMAQSNNSQKYLGVYIRHFEDVYAFYSKSFHRNWRFRRFCATKSAFGNVINMMHGRPKPPVPKINDLHRGRAAKKRKRELRKSHGTLLPPDKPPVIALGDAGVKHVRGNPPVPVRKFAFELSRRALVVITPEYHTSKQHSICHADLHWEHEVVLKCRDKKVKKILPGRHRAQTVCIKADGPEILSHECPDRFNRRVQSRFGVCQNCQNTGSDVIVDRDVNAYRSMAQIVRHYAIHGCRPQWNCRAERRA

SEQ ID NO: 2972 - protein, 804 aa, Amoeboaphelidium protococcarum
MVYETTRKCTLRQALNMNQASKKELISWLRVASEHLSSASRLVYIALNVWHERGDKMPDLSHQQAFANMLEFLVNSQFNVARHHPETVTHIDKLAESVGAAAMARLKHPSLEGPNPNLYEYQSRHMIAAVKWHLTQTLFDYQKRVLKVQLEPFGITGGKLVVFLILLNTVMTEGKSLAKEHLDASFLDIDPDTPVQLSADDDLSSEGEEVNSTQQLKQDVLDIIGNNEPLQALIQVHREFLLDILFTSYQKREPRQRRQHVRNPNPRSLSVLKVARKSREVKSKKPVAPNKKVATNMAGRAGNAFENLHGQNVLLKYMEYLQLTANNLEIKSFDCLPMGTDQPRYIKVDKRILVSAIGKLELAVNDRQSLLAKNYAKDFVNLKSVKLGQKGKALQEISLSTDGFGCSITVALNKECPPYANTREDLLVKKSRSVDVSQMRVGAVALTNCKQLGSRVQGANVIGVDPGKINVMVWTAGPVLAAESEAAAHRQLRQTGRLTAKHWRKLTLESQFDSAERQFKSYYPEVLQFEARLSQVKSKAEYLQIYLEMHEHVWHYYCAPFHRQWRLRKFCARQSAFDNVANSLVHNREMPSAPLKDDYYRRYAAHRRKKRLRQSFGRMLDPTVPAGDRPKPPVIAYGNAAVQHVKKTSPVPVRGFAYKLSRCALVVMVPEPNTSKLHAPCHQEMHMQNVGVMRCHHRHKKRRIDGHRRPVFCCVAEGEDGQLNVLHAAGQCPDRERKVVQSRLGVCQNCQVEGVTVFVDRDVNAGVNMREVVVYYAEHWEDKARRNFRPEWNYRAVGRIRNIQ

SEQ ID NO: 2973 - protein, 675 aa, Amoeboaphelidium protococcarum
MADPPIEVADIGGALPPRKRQREVNCKACGRDDHKRSSSKLCPNYVPRAKNAAKPQDNMGIPVAEAYVAVPIGLNVFCKIDAVKHEISDLVSRCTDLKVEACRLLLSFVLNHLVYNPDTPMPDIRFGANGQMRNFFSSLIANPRRRDLLNRNTCNWAALNEFIEAHYVPRRPADLFWCDMRGYSNMVTALASVHNDDCARHISTNLPSRLKQWLRHKFRKHLGFCLEEDDVCTLAVYVLALIDPPEDIEEMPPYPAEIIDNCGDGELVVYYMDYYETRARQYILCNLPMDKASLQNNWHLYLKSMWRILRTFENNHQMYEEEYLLNNEGPLLNVYALLPLNGFTQKHILITSNVLKEICVAANLPDVRQMDVHALWSQCFKLNKVSTTGNQRRRFGYSITSDGVGCSASVLRPAYPAPPASRYGFAFDGTGYQALDVNNETRVIGIDVNRGVLLAASCGPDDRIADVPTDQTPFADGTHELVYTTARWREENGESLIPSAKSTSFLGIIQHLQYVLQHRDAFTGFYRPEMWRKLRRKLFSKRQRAYDNLARMLTLRQDGQFDHNTIIAYGAGNFDTASPGHPATPNKRLFYELKKRCRVRLVPEYRTSQRCSNCEFELGQSRVWRIKHCPNNNCLAIWHRDVNAARNIRYIFLARNRDDGERPVPFRYDPPRPQQ

SEQ ID NO: 2974 - protein, 802 aa, Amoeboaphelidium protococcarum
MPSNTARKCTLNQALDLNPAEKKDFVAWARSTSVSLSFASRMVYLALNVWHEQKAKLPDLSHQQEYATMLEHCCNRILSRSRKRKTAEHTGALTDLFTQDLLDIVHQEDLARANPNLYNFQARKMEAAIRWHLTETMFVYQKRVLGKQLETYGITGKKLIIFQQLMNALVLDSEEHAHEHLDNRYLSIDPTTSVSAPSEEDLGRTDEEQQHHQRLKDEILEMIAGNQDVQLIVEHHRQYLLDIVTCSYNPKAKRRRYSRREKNPRQLSGAVGIPAQVRHPSESKKKQSNRHQMNMANRAGPAFGNVEGQKDLLQYMSYLQQLSKDLKVKQFDMFPTSSDVPSYFQIDMNVLQHSGLKRMKQAKSVRSIINFKKVGLRKYNDQIKGDNQAGNEDVTFTTDGYGCSVVVEVENRAWTYANKKEDLLTKHHRKDVSKLMYGAVALADCDNLNERLQNCESFGVDPGQENPLVCSTDTVVDNQTSMSGAKRQFRQSPHLTGVHWRKLTLEKQYEAAEARLKPAAIKEFERLASEIESKVEYVALYKRYFAEIFEYYSRAFHRVWRLRKFMARQSAYDRVLNHILNGRDKPSVPKVNDAARTKQSANFQRLQRARYGKMLDPTVPVGKRPKPPVIGYGNAGVKHMKKHPPVPVRGFAYKMSRRALVVMIPEYCTTKLHANCHHELHMHDMSVNRCNHTKKLRMPPDRDRVDDRGVVKLRRPVFCCINEEGQQLHAASNCPDRERKLVKSRLGICQNCRVQDAAVFVDRDVNASCGMKQVLVFYAENHRRPDWNQRRVVGRTQTIQGV

SEQ ID NO: 2975 - protein, 486 aa, Amoeboaphelidium protococcarum
MPSRAHHAFQNQEGQKVLVQYLMYLRQTLKELGLSSFKIFPTGTDVPRHISFDNRVLAQWGFGQYRLGDQPEEKEEHVQSHEEEKQCILKLKYLGLQQRMANSQDVSISSDGFACSVSVSDQGGKAYANEAKDLERKARNTDVSQVDVGAFALENCRNLAQRLDGTRLIGIDPGKKNVLVWGDEANVEGATTLKEAKREFKDTGRISSGYWQRLALTTEYEAHLLHIKPAEITLMEQEMAQSNSSQQYLDVYIRHFEDVYAFYSKSFHRNWRFRRFCATKSAFGNVINMMHGRPKPPVPKINDQHRGRAAKKRKRELRKSHGTLLPPAKPPVIALGDAGVKHVRGNPPVPVRKFAFELSRRALVVITPEFHTSKQHSICHADLHWEHEVVLKCRDKKVKKILPGRHRAQTVCIKADGPEIPSHECPDRFNRRVQSRFGVCQNCQNTGSDLFVDRDVNAYRSMAQIVRHYAIHGYRPQWNCRAERRA

SEQ ID NO: 2976 - protein, 1090 aa, Amoeboaphelidium protococcarum
MATSALGSQFKIMVDFNGTFYRHLRRIYNHSKNPLEASIHLVKTALPLNWMVMVQGEARPIKDIVTLVFEGEQTCEKSQTSLKRVNARLKQILKLRNCLENLPVDKKELIKAGYNVEVACGEADVHIAKCKDPVVAVSFDSDLFMHKNVLVAAKPAFDCGLMKFFVLDRKVVCDKLNLTNSAWVALAVVSGNDYSDNVKGFGFGRNLKIIRKLMEAGHSDVKSIVSQYQNVMEVGPIFCQALRVFDSNQESLIIQSLEGDPNYKKNSLDNLFKPVEDEVFVSMGTLEWIRREISARSLTAAHRQYHEVYALLNLYSKWHESVLQLKSVKLDAYQEWKIQSRQVGKSREEVSYLSLQERWKGYNRFLPLYKKEFVDDRQSGTSVQSGGRYMFQEVEWNRKSKSEIPQPKKQTPKFVRDIESHEERQEESDDTTQSDDIEVAPRKKRRVQSSQTARRGNYRASSSVTRDKCDARSGGQKRINTEETLLMKKLKSAHSMSTLEVGSLRKCLSKGSLSQQLQKQLAATIQTVVRDINLLKRMAQLGVQWFIGIILEQYPDEISLLDDICYSDTPGQGGRKFWQGVIRFLRNGRSNASQKGAAVLKFGQLLGQQMNIMNGLERKFDRTLNITQIVDQLAIQLDSEFASQVIGRVELLAAQVLEHDPELRSRIEEIDKMPSVFQKFQSLNDLLPKERQYGYPLSSPQDCYVTFTENSMMILLQSSIINNPQMEQERKQELLRDLQCYYSEGGLVKQKGHTLRECYGIKLKKGLRLLSQYMPEACDTTRKILSNTFITNGKVLKVHLIDIRRKQQVRRLAGSQSEGLLEAAQRKRLSKVTMQVSETVNVQPDKLSEYWICCLDIGERYTAGVVAVKGQGESRIIRALALKSSAVNEPGRKFRKYHQGRPSDISKLERSMCRGEEESMECYWERYIDIYQQLRSYYSSEIRQKRHWDFKKAQRAEFDRATNAILKMVDASVFQKSNGRVVFGIGNAQFDSKQTIHLSFQRHFVQKVKSLGYPVVFLNEYLTSQKAPCCGCVCESFGMRIKYCRKCHKFYHRDIMAAENLTQVLICLICDEPRPKYLCSKNQSRFQESE

SEQ ID NO: 2977 - protein, 488 aa, Amoeboaphelidium protococcarum
MTGRSGNAFANLHGQNVLLNYMEYLQFAAQNLENKSFNCLPMGTDRSRYIKVDKIVILTAVDKLRLPDNDRQSLRNKINLKDFINIKSVRLHNKLGILKNLVCLPMALAVLLQVSSSVDVSQMLVGAVTLTNCKELGSLVQGANVIGVDPGKINVMVWTAGPVLAAKSEAAAHRQLRQTARLTAKHWRRLTLESQFDSAERQFKSYYPEVLQFEARLSQVKSKAEYLQIYLEMHEHVWHYYCAPFHRQWHLRKFCVTQSAFDNVANSIVHNREMPSAPLKDDYYRRYAAHRRKKRPCQSFGRIMDPTVPAGDRPKPPVIAYGNAAVQHIKKTSHVPVRGFAYKLSRCALVVMVPEPNTSKLHAPCPQEMHMQNVGVMRCHHRHKKRRIDGHCRPVFCCVAEGEDGQLNVLHAVGQCPDRERKVVQSRLGVCQNCQVEVVTVFVDRDVNAGVNMREVVVYYSEHWEDKARRKFRPEWNYRAVGRIRDIQ

SEQ ID NO: 2978 - protein, 772 aa, Amoeboaphelidium protococcarum
MAKKVTRKCKLNSVLNLDDGDKEILISQIQLSSVHLTFASRLIYLCLNVWNEAGKALPELSHQQYFASMLEYLCNSAFHRDNDHTRMLSETIAPEVRQRLRHESLIGPNPNLYVFQARKIIQAISWHLTETIWVYYKKVIKAQMETFNVKGRRLTVFLQLLNSLLTEEAVNTMEHFGGEYLEIDPATQIHLPPDYDAGEDQETIAQQDAAIKDELLQLLQVEEVRHLVSLHRHYLLDIVTTSFQDKAPRKRYSKRKQESSRQLKGSIGFKRQKSGKLKQRDTHHTYMPSRAHHAFQNQEGQKVLVQHLMYLRQTLKELGLSSFKIFPTGTDVPRHISFDNRVLAQWGFGQYRLGDQPEEKEEHVQSHEEEKQCILKLKYLGLQQRMANSQDVSISSDGFACSVSVSDQGGKAYASEAKDLERKARNTDVSQVDVGAFALENCRNLAQRLDGTRLIGIDPGKKNVLVWGDEANVEGATTQKEAKREFKETGRISSGYWQRLALTTEYEAHLQYNKPAEITLMEQEMAQSNNSQQYLGVYIRYFEDVYAFYSQSFHRNWRFRRFCATKSAFGNVINMMHGRPKPPVPKINDRHRGRAAKKRKRELRKSHGTLLPPDKPPVIALGDAGVKHVRGNPPVPVRKFAFELSRRALVVITPEYHTSKQHSICHADLHWEHEVVLKCRDKKVKKILPGRHRAQTVCIKADGPEILSHECPDRFNRRVQSRFGVCQNCQNTGSDVFVDRDVNAYRSMAQIVRHYAIHGYRPQWNCRAERRA

SEQ ID NO: 2979 - protein, 802 aa, Amoeboaphelidium protococcarum
MPSNTARKCTLNQALDLNPAEKKDFVAWARSTSVSLSFASRMVYLALNVWHEQKAKLPDLSHQQEYATMLEHCCNRILSRSRKRKTAEHTGALTDLFTQDLLDIVHQEDLARANPNLYNFQARKMEAAIRWHLTETMFVYQKRVLGKQLETYGITGKKLIIFQQLMNALVLDSEAHAHEHLDNRYLSIDPTTSVSAPSEEDLGRTDEEQQHHQRLKDEILEMIAGNQDVQLIVEHHRQYLLDIVTCSYNPKAKRRRYSRREKNPRQLSGAVGIPAQVRHPSESKKKQSNRHQMNMANRAGPAFGNVEGQKDLLQYMSYLQQLSKDLKVKQFDMFPTSSDVPSYFQIDMNVLQHSGLKRMKQAKSVRSIINFKKVGLRKYNDQIKGDNQAGNEDVTFTTDGYGCSVVVEVENRAWTYANKKEDLLTKHHRKDVSKLMYGAVALADCDNLNERLQNCESFGVDPGQENPLVCSTDTVVDNQTSMSGAKRQFRQSPHLTGVHWRKLTLEKQYEAAEAKLKPAAIKEFERLASEIESKVEYVALYKRYFAEIFEYYSRAFHRVWRLRKFMARQSAYDRVLNHILNGRDKPSVPKVNDAARTKQSANFQRLQRARYGKMLDPTVPVGKRPKPPVIGYGNAGVKHMKKHPPVPVRGFAYKMSRRALVVMIPEYCTTKLHANCHHELHMHDMSVNRCNHTKKLRMPPDRDRVDDRGVVKLRRPVFCCINEEGQQLHAASNCPDRERKLVKSRLGICQNCRVQDAAVFVDRDVNASCGMKQVLVFYAENHRRPDWNQRRVVGRTQTIQGV

SEQ ID NO: 2980 - protein, 719 aa, Amoeboaphelidium protococcarum
MSMRTIVAKSPLSELLKNEYTVQGDNAPINMSLLEYLQLIVKNNHQINSLATASILHYAINYLSSTKDDHQRRFYPELDLKVVRDFFKAFARYRKRSNPSVVVSEFLSQQQAQLLENQDYQIDCPNGEFFCNIYDKAAQTYELACQMHISVNLVKALKRVIAHKIVSSAPSLIIRFDASRLVSVLMGCIGRCKFLDYQNYVALHACLKKAAAQSSNDFGQLNNLMKPYIKIARLIKKELESKDGINFDFESVLSNVKRFKSFWFVFLPLFYQCCDYLNQSGCKSFVLLPVVSNKLSLVSITELGLRQSVMHNKSFADIFKDIPKYSKAELFGIRTDGYQVQYIYQCNDDFQARTIEEARCVEAVPTPAAGDNHPQVEEDGVLEDLAVLNYVFDLYEDDDGEDVLVVQGHNRDQQQAIEQVEALAWVNDMNLEQLDLEDFQLLQRKRSCQSIVYEIPGQKVEYHGKKELAVDAGIRNYVAVCRPRDNYQDLDCSQIPINKYHHFVLSQSQYLQMVGGEQFQAEYREFSLQARQFSKAFQTVDLCKLRMELQKYFGQFAARLVFYSDLALLKLSLDQYLYQQDALLLMVQKALNEEKLNPERREEFLVYYGSFISGQLGVNGRYALKRYAQLLNVYARVIIMPELMTSTVCYECVRKGVETFVVRNKDAAYCPICQKVYHADVLGSVDIFFLARFIITHEGHVHPAFIPRKFIPVVQQPLN

SEQ ID NO: 2981 - protein, 438 aa, Amoeboaphelidium protococcarum
MGSTWRFNTFYTDLYSVSVPCHAKSKEDASGQQIAPQPAQSSSSTSQAREPALAPGIEIQGTQADEPEDLVTFELPPGKRRLRSDTSSNSQKRQRKSLQQMYRQEDDCPGDPTDQEFTEGQQELVIPLGDDWLWEEDDQNEISDQLEDLLDEVPDNEEEIDDAAEQEQGRDYRWLNNPALPQIDISDSDVTFVGVDLGVAFMATSCIIKASPGNDALQVLQSSDKNAIPFFMLNSEESRARIRAELSQQDRELSEDVFAEPKYCFSLEMCKRKSANATVVTNERMPQYLDFSVQKAKYTKFLIRRDVLREYAARLVGLNSFEDSRKKQIVVFWGSSGIQKLGRVFLPGGRYHPACKQLLQYVVQQIATVYVSHEKGTSNHCSDCVQRVVIRRTAERDVVTCGNCHLEINGDVNAAINIIKIVLTMATNHGMFPMQFTL

SEQ ID NO: 2982 - protein, 696 aa, Amoeboaphelidium protococcarum
MADPPIEVADIGGALPPRKRQREVNCKACGRDDHKRSSSKLCPNYVPRAKNAAKPQDNMGIPVAEAQVAVPIGLNVFCKIDAVKHEISDLVSRCTDLKVEACRLLLSFVLNHLVYNPDTPMPDIRFGANGQMRNFFSSLIANPRRRDLLNRNTCNWAALNEFIEAHYVPRRPADLFWCDMRGYSNMVTALASAHNDDCARHISTNLPSRLKQWLRHKFRKHLGFCLEEDDVCTVAVYVLALINPPEDIEEMPPYPAEIIDNCGNGELVVYYMDYYETRARQYILCNLPMDKASLQNNWHLYLKSMWRILRTFENNHQMYEEEYLLNNEGPLLNVYALLPLNGFTQKHILITSNVLKEICVAANLPDVRQMDVHALWSQCFKLNKVSTTGNQRRRFGYSITSDGVGCSASVLRPAYPAPPASRYGFAFDGTGYQPLDVNNETRVIGIDVNRGVLLAASCGPDDRIADVPTDQTPFADGTHELVYTTARWREENGEKFGEKKKAAWNEIAPEVVNAMAQIPSAKSTSFLGIIQHLQYVLQHRDAFTGFYRPEKWRKLRRKLFSQRQRAYDNLARMLTLRQDGQFDHNTIIAYGAGNFDTASPGYPATPNKRLFYELKKRCRVRLVPEYRTSQRCSNCESELGQSRVWRIKHCPNNNCLAIWHRDVNAARNIRYIFLARNRDDGERPVPFRYDPPRPQQ

SEQ ID NO: 2983 - protein, 772 aa, Amoeboaphelidium protococcarum
MAKKVTRKCKLNSVLNLDDGDKEILISQIQLSSVHLTFASRLIYLCLNVWNEAGKTLPELSHQQYFASMLEYLCNSAFHRDNDHTRMLSETIAPQVRQRLRHESLIGPNPNLYVFQARKIIQAISWHLTETIWVYQKKVIKAQMEAFNVKGRRLTVFLQLLNSLLTEEAVNTMEHFGGEYLEIDPATQIHLPPDYDAGEDEETIAQQDAAIKDELLQLLQVVEVRHLVSLHRHHLLDIVTTSFQDKAPRKRYSKRKQESSRQLKGSIGFKRQKSGKLKQRDTHHTYMPSRAHHAFQNQEGQKVLVQYLMYLRQTLKELGLSSFKIFPTGTDVPRHISFDNRVLAQWGFGQYRLGDQPEEKEEHVQSHEEEKQCILKLKYLGLQQRMASSQDVSISSDGFACSVSVSDQGGKAYANEAKDLERKARNTDVSQVDVGAFALENCRNLAQRLDGTRLIGIDPGKKNVLVWGDEANVEGATTLKEAKREFKDTGRISSGYWQRLALTTEYEAHLQYNKPAEITLMEQEMAQSNNSQQYLGVYIRYFEDVYAFYSQSFHRNWRFRRFCATKSAFGNVINMMHGRPKPPVPKINDRHRGRAAKKRKRELRKSHGTLLPPDKPPVIALGDAGVKHVRGNPPVPVRKFAFELSRRALVVITPEYHTSKQHSICHADLYWEHEVVLKCRDKKVKKILPGRHRAQTVCIKADGPEILSHECPDRFNRRVQSRFGVCQNCQNTGSDVFVDRDVNAYRSMAQIVRHYAIHGYRPQWNCRAERRA

SEQ ID NO: 2984 - protein, 696 aa, Amoeboaphelidium protococcarum
MADPPIEVADIGGALPPRKRQREVNCKACGRDDHKRSSSKLCPNYVPRAKNAAKPQDNMGIPVAEAYVAVPIGLNVFCKIDAVKHEISDLVSRCTDLKVEACRLLLSFVLNHLVYNPDTPMPDIRFGANGQMRNFFSSLIANPRRRDLLNRNTCNWAALNEFIEAHYVPRRPADLFWCDMRGYSNMVTALASAHNDDCARHISTNLPSRLKQWLRHKFRKHLGFCLEEDDVCTLAVYVLALINPPEDIEEMPPYPAEIIDNCGNGELVVYYMDYYETRARQYILCNLPMDKASLQNNWHLYLKSMWRILRTFESNHQMYEEEYLLNNEGPLLNVYALLPLNGFTQKHILITSNVLKEICVAANLPDVRQMDVHALWSQCFKLNKVSTTGNQRRRFGYSITSDGVGCSASVLRPAYPAPPASRYGFAFDGTGYQPLDVNNETRVIGIDVNRGVLLAASCGPDERIADVPTDQTPFADGTHELVYTTARWREENGEKFGEKKKAAWNEIAPEVVNAMAQIPSAKSTSFLGIIQHLQYVLQHRDAFTGFYRPEMWRKLRRKLFSKRQRAYDNLARMLTLRQDGQFDHNTIIAYGAGNFDTASPGYPATPNKRLFYELKKRCRVRLVPEYRTSQRCSNCESELGQSRVWRIKHCPNNNCLAIWHRDVNAARNIRYIFLARNRDGGERPVPFRYDPPRPQQ

SEQ ID NO: 2985 - protein, 696 aa, Amoeboaphelidium protococcarum
MADPPIEVADIGGALPPRKRQREVNCKACGRDDHKRSSSKLCPNYVPRAKNAAKPQDNMGIPVAEAQVAVPIGLNVFCKIDAVKHEISDLVSRCTDLKVETCRLLLSFVLNHLVYNPDTPMPDIRFGANGQMRNFFSSLIANPRRRDLLNRNTCNWAALNEFIEAHYVPRRPADLFWCDMRGYSNMVTALASAHNDDCARHISTNLPSRLKQWLRHKFRKHLGFCLEEDDVCTLAVYVLALIDPPEDIEEMPPYPAEIIDNCGDGELVVYYMDYYETRARQYILCNLPMDKASLQNNWHLYLKSMWRILRTFENNHQMYEEEYLLNNEGPLLNVYALLPLNGFTQKHILITSNVLKEICVAANLPDVRQMDVHALWSQCFKLNKVSTTGNQRRRFGYSITSDGVGCSASVLRPAYPAPPASRYGFAFDGTGYQPLDVNNETRVIGIDVNRGVLLAASCGLDDRIADVPTDQTPFADGTHELVYTTARWREENGEKFGEKKKAEWNEIAPEVVNAMAQIPSAKSTSFLGIIQHLQYVLQHRDAFTGFYRPEMWRKLRRKLFSKRQRAYDNLARMLTLRQDGQFDHNTIIAYGAGNFDTASPGYPATPNKRLFYELKKRCRVRLVPEYRTSQRCSNCEFELGQSRVWRIKHCSNNNCLAIWHRDVNAARNIRYIFLARNRDGGERPVPFRYDPPRPQQ

SEQ ID NO: 2986 - protein, 672 aa, Amoeboaphelidium protococcarum
MVDNFVCIKERFNDYWIGGDELRQRLTRLHKDSIVVRVVSSLFIKYYLVSRLQQSDAYNQMLQIFQQGEGVVQLDTQFLHLSQNSIETMMRPFRGSPNDNGLDYNITGPDYPGVNTKLREFVQRVIIPSQLEIPRNDLMAHVLPQIASEYFTHLQNHVQANFLKILSCFVGYLLRVECQYDALDRNKLVKEMVRLLQKHENVDVSWQFLYRCVPADTPLAQKQLLRQRVLSIQQKARWLLRQMYNDFGALRRVTNENFDQYLVLAYCMLRHVEDLAHQSAQTASLPFLLPQFSIAPHHIKLTDAMFRRCNEEPVLRRRGWASEVFNTRSFQDKFTGHILTDMHSVSFIIRAGNHREAIGEGQLQQFLIEENIAAGDNFLEVFEDGDENLVDENGVEVPQEEHQPALQPNRLDNPDFTRLPQAWGTKYLAIDPGIRVAVALAGFEYQMPDQIPQDQSPLDQFNELNQLRELQVLRVRNLGQHDVAFASPPVLGLPAGVTRRTVNLERIVQYCQAYLSQTLAAVDLVLQGERRETRFQSWQRRRDQLLDVVKTVLGVHVLEEATRDKYVVFFGAAAEHAFAGFGRRRLPPLVEFRRLLNRYAIVALTPEPYSSQRCSLCNCLGTRHPRPHDQFVCIGNKNHQRNGDTNAAANILYIGLHMMMMNGQFPRHFLNI

SEQ ID NO: 2987 - protein, 473 aa, Amoeboaphelidium protococcarum
MFNICPDIKLSPFHITLNKTIASRTQLFGDNGQKSENNFESSFKFSALDKKYKRYKEFYTDLYSASVPFQIKADDKTTKASSQSNPELKSSQKSSQKQSSSLQLSPGISVTSMNPADLEPEDFETFQPLRAKRKQGDEAQPLEWKKPRKSLAQKYAQSQDCPDDPIDDPEEVEAGIEEVDSIIAGEEDPLADEDFEDALDEREEESDGEEYELAPSVAGKTDYSWLNNPKFPQIDIADPMSSIVKAKDGADALQVLEATPKNSIQSVMLKTSDFRAAVRDKLSQQDRQLSEYVYAEPRYCFNSEMAKRKAANAAVVTHQRMPLYINRSVQRAKYTRHLLRRTLLQERAARLLGLKSYSNSQKDKIIVFWGTGGMKKFKNRYLPGRKCHPASKELLHYVQMIATVYVTHEKGTSVHCSNCEQRVVRRRTADQDIVTCAHCHLVINGDVNSAINILKIGLTMATNIGRFPMQFTL

SEQ ID NO: 2988 - protein, 1119 aa, Amoeboaphelidium protococcarum
MATSALGSQFKIMVDFNGTFYRHLRRIYNRSKNPLEAGIHLVKTALPLNQMVMVQGEARPIKDIVTLVFEGEQTCEKSQTSLKRVNARLKQILKLRNCLENLPVDKKVSKAKWCMIGKLERSTWHFKADDASNLQQELKIAGYNVEVACGEADVHIAKCKDPVVAVSFDSDLFMHKNVLVAAKPTFDCGLLKFFVLDRKVVCDKLNLTNSAWVALAVVSGNDYSDNVKGFGFGRNLKIIRKLMEAGHSDVKSIVSQYQSVMEVGPIFCQALRVFDSNQESLIVQSLEGDPNYKKNSLDNLFKPVEDEVFVSMGTLEWIRREISASSLTAAHRQYHEVYALLNLYSKWHESVLQLKSVKLDAYQEWKIQSRQVGKSREEVSYLSLQERWKGYNRFLPLYKKEFVDDRQSGTSVQSGGRYMFQEVEWNRKSKSEIPQPKKQTPKFIRDIESHEERQEESDDTTQSDDIEVAPRKKRRVQSSQTARRGNYRASSSVTRDKCDARSSGQKRINTEETLLMKKLKSAHSMSTLEVGSLRKCLSKGSLSQQLQKQLAATIQTVVRDINLLKRMAQLGVQWFIGIILEQYSDEISLLDDICYSDTPGQGGRKFWQGVIRFLRNGRSNASQKGAAVLKFGQLLGQQMNIMNGLERKFDRTLNITQIVDQLAIQLDSEFASQVIGRVELLAAQVLEHDPELRSRIEEIDKMPSVFQKFQSLNDLLPKERQYGYPLSSPQDCYVTFTENSMMMLLQSSIINNPQMEQERKQELLRDLQCYYSEGGLVKQKGHTLRECYGIKLKKGLRLLSQYMPEACDTTRKILSNTFITNGKVLKVHLIDIRRKQQVRRLAGSQSEGLLEAAQRKRLSKVTMQVSDTVKVQPDKLSEYWICCLDIGERYTAGIVAVKGQGESRIIRALALKSSAVNEPGRKFRKYHQGRPSNITQLERSMYRGEEESMECYWERYIDIYQQLRSYYSSEIRQKRHWDFKKAQRAEFDRATNAILKMVDASVFQKSNGQVVFGIGNAQFDSKQTIHLSFQRHFVQKVKSLGYPVVFLNEYLTSQKAPCCGCVCESFGMRIKYCRNCHKFYHRDIMAAENLTQVLICLICDEPRPKYLCSKNQSRSQESE

SEQ ID NO: 2989 - protein, 885 aa, Amoeboaphelidium protococcarum
MTMATKDTLLTLLGEMGLFELAKNLATIPFQSIYEYSVNDWIEFGAILLQAKAIYNHLHASPQLDYHNVAAVELVGINVWPLLESLPKAEVLGSVLNSPLPFSLYDSSQDVLPGILNDQHSANAVCCSELGHICGGILTMYKQLPSATASEDCWHYVYDNLITAPLKMVSKCRGIEIDTQRNSIDITGTTKRLQRPDYLVIMDNHLLVMKGEHKSALVNIRTSTEELVQKMSSGWSVLTYGSLDYIIGFATAGSQIQFFAITKAHQLVPLSKILDLRIIDQCAQIIKIAVNLVRVFEVFSKYWPPKWANFSVQAYQSVNRSDGVVLEFGDCDLVKKTSGLSLEKLQRLAEIHECLRSIPGDAQSLHMIRVYNLKVYSTTIRAHLGPLGFQIVPKDLGELVEAIHSVLRALSIWHSLGWCHGDIRWSNIVYVPTSVENGFWMLIDFDHSRKPGTTYVNWNFHPATKLGQKLIPLHDLIQVGNLMSERLHAVDKAPELLELMQLLCDVENRAWTYANKKEDLLTKHHRKDVSKLMYGAVALADCDNLNERLQNCESFGVDPGQENPLVCSTETEVDNQTSMSGAKRQFQQSPHLTGVHWRKLTVEKQYEAAESRLKPDAIKEFERLASEMESKVEYVALYKRYFAEIFEYYNRAFSQSLAFKEVFGTAICGNDAARTKQSVNFQRLQRARYGKMLDPTVPVGKRPKPPVIGYGNAGVKHMKKHPPVPVRGFAYKMSQHALVVMIPEYCTTKLHANCHHELHMHDMSVNRCNHTKKLRMPPDRDRVDDRGVVKLRRPVFWCINQKGQQLHDASNCPNREQKLVQSRIGICQNCRVQDEPVFVDRDVNASCGMKQVLVFYADNHKRPNWNQRRVVGHTQTIQGFDASFS

SEQ ID NO: 2990 - protein, 772 aa, Amoeboaphelidium protococcarum
MAKKVTRKCKLNSVLNLDDGDKEILISQIQLSSVHLTFASRLIYLCLNAWNEAGKALPELSHQQYFASMLEYLCNSAFHRDNDHTRMLSETIAPEVRQRLRHESLIGPNPNLYVFQARKIIQAISWHLTETIWVYQKKVIKAQMEAFNVKGRRLTVFLQLLNSLLTEEAVNTMEHFGGEYLEIDPATQIHLPPDYDAGEDQETIAQQDAAIKDELLQLLQVEEVRHLVSLHRHHLLDIVTTSFQDRAPRKRYSKRKQESSRQLKGLIGFKRQKSGKLKQRDTHHTYMPSRAHHAFQNQEGQKVLVQYLMYLRQTLKELGLSSFKIFPTGTDVPRHISFDNRVLAHWGFGQYRLGDQPEEKEEHVQTQEEEKQCILKLKYLGLQQRMANSQDVSISSDGFACSVSVSDQGGKAYANEAKDLERKARNTDVSQVDVGAFALENCRNLAQRLDGTRLIGIDPGKKNVLVWGDEANVEGAPTLKEAKREFKDTGRISSGYWQRLALTTEFEAHLQYNKPAEITLMEQDMAQSNNSQQYLGVYIRYFEDVYAFYSQSFHRNWRFRRFCATKSAFGNVINMMHGRPKPPVPKINDRHRGRAAKKRKRELRKSHGTLLPPDKPPVIALGDAGVKHVRGNPPVPVRKFAFELSRRALVVITPEYHTSKQHSICHADLHWEHEVVLKCRDKKVKKILPGRHRAQTVCIKADGPEILSHECPDRFNRRVQSRFGVCQNCQNTGSDVFVDRDVNAYRSMAQIVRHYAIHGYRPQWNCRAERRA

SEQ ID NO: 2991 - protein, 662 aa, Amoeboaphelidium protococcarum
MTVQFYALSYLCGDSGLTRSRSSPMLDSKVIRDIFHLFVYGHKRKKESGVSIEVSKLLLTVFDQNQFKSLQVEYPSGSDFKYLFASAADQFGVACQNHIISNLRKTLKRVVAYHLKIAGLGAVFKLSDLVNLALRRLNRLEKFAGNDGSSDELQKVVKKNREFNADSIAMLDDVLQEYFEEVMDIKGQLEADLTLGTVQYPLTVSKFKSSWFVYLRLFLKCIRQLACVHLKYPKLLPFPAKKLHMVPFTKSGLDCLLQQSQFQKLLHIPTLTTKYKATLTSFSTNFKNLSFKYEVQKDVTSDLIYAKCISVVPNISCSNQSTIGNDYIAAYQDFSSEDEAESMEVDDDDDGNLDEIDDLIEDVEDQNDAGEDEDQDSDTEEGNKRRSVQSCQAIRYFIMSTEDAKSTIKHKVELSADLGINQLIAVFRPNDLQQCLPKEQIQFDKAYRYTLKGEQYLQMIGGQELAQRQQSFNQCCQQFAFHYFPDSSIFANQMQACCRSLDQQIELYSSDQALQLKFDQQELKRQAILGMVSKFLGITGALKSQDRDSYGVYIGDFYKKGEVNHRFSLKSFVKVLNQYAVVYIVPELRTSSLCYECLRKQIISFVVRRKNIADCPKCNRRYDADQLGAANTFFLTRSIITDKAGSIPKAFIPSKYIPKVDE

SEQ ID NO: 2992 - protein, 737 aa, Amoeboaphelidium occidentale
MKKKRKLPDHDEDYDPVVEDDFDSEPMGEPEEKEEEDMTPIPMTSIVTRKTGLNSLIPNEILRTKIRDMVDTMNFIRYHGSRLLNLYVVQMCSEGHDLGLLTCGYGGILRHFFVAVCNNAGHPRTTRLDDNVAPLAEIYRSRAFEYGIEFSLSTGISSTLNSIVASYETNLMNYITTTTVGRVRSALLEENNELPELPDILEKFAKKHDRARIMRALRTVHRILVAETVEKKLSLEKEFLKEYWYKFFHLQYHILKHFTKYSEADAQARLEENRRGKGLRVYTMVPLADVKTSHVFFDGSGLSEVVHRAFEEESFVGPPNHSRDLNATKRKALFTGKKSRVPLWNWAVKLKCVKHKNLDFNYSFTTDGVSVSVHFEKAGFKERLNDKGFLWNNHEKYSPIGIENRVVVGVEPGRIDLVVCSDGSRKSFGCSGKEWQEIAGFRYQRWRQKSWLEKNDNIQTIVKDMPSAKVTKVEVYLTYLNYILRHYTALSNFYGSLRWRQLRRKTDMKKTKAFDIVKSFGCSGKEWQEIAGFRYQRWRQKSWLEKNDNIQTIVKDMPSAKVTKVEEYLTYLNYILRHYTALADFYGSQRWRQLRRKTEIKKTKAFDIVCRRIAGNNFERVVAYGSGGFSSCSRGHAPLPVKGLFKALKQRNALVRLVWEHRTSKLCCQCEGELPEGKRWQVRICKTCKIHWNRDFNAANNIRKILIHMEENSGDRPYNFLTKKQQKSKGNDFIVGG

SEQ ID NO: 2993 - protein, 639 aa, Amoeboaphelidium occidentale
MRVYENEMPKTFTTEEFLGMSMVEHSGVAVDVGDSSGIGPSAGGKKRKEPEGGKRCKCGSTEHQRISNKNCPLNKPRLKLQYRDTELPEKTVTTTTGLNSELRIAPLKDIIMDAVACCNDIQVEVSRLLNGYVIWMIEENRPILDLRFSDGIMREFYQAVCSIDAVKNPHQHKVVSTPSINEYMDEVYSRCRPDHLAWNDATKLTQLISNMAKMHSTNCQNHVFTNRLKWIKKCADDSNQVVTVAMNEITRTEEDEGFYAIPLNIIEAVTPELLKTFVNNYKQDAQNRLENGIHGRGLRLFSLTPISTFKQKFIIIDTDALHDLMTSENIGIVVPRDQVVFRVNAMEWWRRAFNVDKLTTATKRFGFSVSTNGVEYHQHNIKQFERSEINDWGYNYEGEFIPLEINGQTRVVALDSGRNSLYVAVSGNTAADVLECSNSRWQEISVTRYSTKKANTWITADRDRHMEITLTPTPCCYNTDDYITHLLHVLEYRDEFLGLYRAMRWRRLRWKTRIKRQKAYDTLYKELAAGAEDVVIAHGGRGFIHNSRGHPPTPNKHLFLELKRRTRCRLVPEFRTSKLCSLCDNELVQSEVWSIKSCNNNNCWTRWNRDVNGARNIRRVFLHMNANGGEKPEAFRRGN

SEQ ID NO: 2994 - protein, 1219 aa, Amoeboaphelidium occidentale
MGGNPAFWKAVKAARQFYDSASGLSRCQWLQSQITFTQVVCIVDVSVIMRTILPLNPKLAVDLFEGTRDNVTKSLRSLSAKVKDYVEQFIPKEYSIVYVLEKPGVGFSKLKTQKRSSQRASRINNGIRKLYLSSGDFKKRQGRRLIAKHLSLNSEMVQCLALGLNGYVANHYESDSLIIALARSHRAAGFFTIAVSSDADLIALSDSNTIDVLLTPQKKFFSILKKEDALKTLQCNQVVLAYSYLLAGCDNYKQVRFRKGFNFWRAHLIKNDISSYEAFTLNCSCYMCSITEVLNEFNVDLPALSILLLKTVANEGFETALKFSFVNAQKDDGSFVRPGLRLKILSHYESAALLDSQSVTEIESHAKSKTAKGKERKAVAERRASNAIAFQSEIKVIAGLESRSPINEPAMKETQETPKVKLCARKPNETKQEDYHHKAMFQSLSLRCGDWNHLLRTELRQLHDIASLRTQNSSDSSESTSFNFAIYVEKYFQFYRSILNESRMKFHSLLLADISGLASWKHFSQMLQGVVDRAVNFLTNDLKKYCMESLFNSAGIRQVLILELWSYKSLFLTGIFRVLEQDFKDQLIALFPQCSAECSGIIAGLLVSLLFGAPSKEHKDDEDLEDSQENAETNDTSWFYRVLVQLRPVCVEDKTIILWFLEHTWSKQELMIKFMPESLRPLVANGKRQFQENIRDDNYLLILQFFHHYNLKCGRVVQLMGLQPSTAASFTLLNTYILAQLICGYQNFLHSAGVDNKAVFGFLEPENMSASSALVTGANNYSFAVPPELLKPDSRKHPGKSKRIKQSYSSFIDRIKFRYQHWCRFPDFVWFLAFPGLYEDVLLNGTNKNLFFLHSAQVREGSIHVLCTDTRRHTARSKADEYAAEDTGGGYHFRHFLKYKNGNEDNILDFHSIVGVVDEPDKLHRGLASYHNCANGTPNFRGLIYLDHNIEHFAVGSKAAKDLLDNHIIISIDFGILSEISAVFIDGKFNSEGTLEGRFTKLQFSNGAKYQNSGYLKFTGDYAAINEKSLEHSTALSVATKRTNDASEYEKFSELYKVHGKAILEENTRPEMIKLKNELEKNKQRQLFEIVNVLVAHAEALRGTKTGVPLIVAGNPTFSPTVKGQRSVAPKSLLRWLSKFFTVLVVDEYNTSKNCPMCFEPLDKYGNEGTRMWKCKDCKTSTGHDLIVNKDVSAAINMANIAVHYFLTGERHPSFSRQV

SEQ ID NO: 2995 - protein, 1563 aa, Amoeboaphelidium occidentale
MSAPPPPPPPAAPKAPSVSAAASKPPAASQDKGALLKQIQKGAKLKKAETNDRSAPIVDAPKASPAASSGGGGGSRPGAGGGSSGPTPQLGGLFAGGMPKLRPAGGNAVGGGKVNADTSVKPSTITPMPSKAPAAQSSFRPPMIPKPNDSVSNASAKPLGKPPSKVPPPVPAVSNATPSIGKNGPPLPGRRPSEIAALKSPTSSGPPPVPSIPKPTKSPTSSNENISGSVFVSEKIVVPKRGSVSAKLAPPVPGRPRSISTGSSEKINTSAGKLPPAVPNRPPQGNSRTNEKINDNDGSQKVSSPGQLRKQPPVPGGSVTKPATLGRSPSIPLSSGPLSDDMDDGRYKFKPDSELPPPHAFTPSIKVYYSGAVTGSKYNIDSLLGIKANSPGSARRPQPSVPGRAPPPPPPRRAFAKKHQLYSETVNLQEFKEMFKGYKVYVDLYGSFFDLIRYYALDERYRAFAKCSNEIFDGMDVIFVLDGARSAEKHEAHLARETQRDLRMQSFSHNLNSVDPQSRVSTSVWKRLDKLRASCFRLMKYHTNCISEAFEKENLSFVQAPYEADVAIARLLSPSNSDKMSNTIIISNDSDLLFYGHPIVGKSFFKNKLDCLSLHFTLFREQIALKKIGISRECWRALAVVTGNDYVSNLRGFGIARCLKEFQKINENGACTAEEMVETFEQSHDKKGHFQIASAVFLNYQETSCAVCVESLQEQMFKDCCSQLQLLKENYGAARAANRQTTQGRSLQELKHLKVPSQNNRYSPMVHIHFGPYKVKSVGLNKLRNLSITPAATLNSSVSIKPRPYNKSKKRKGKKKNKRARYLKSAMFTRSVPSENPHGAHKLSQATLNIKMLKQKYQMKTWELGTLKSQVKKSSLDATIQNTILKRLQNVVKLVNKASQAAIIIADLFFQNVQNNLIVENELLFGVGGGCKVWYNLISFLLSPEKRGRKGRKLFQKMKKFVEDNELGLNLTEEELEYVSFCSGNTLQAQSKLMDSIVARHFVGSAPLLAQSVMKNSPFQTDQVEVLLNALMSAVEQKGTLPGSLESLKSMKDHGVNLDLIENINNTEMMTSHCSTSKMKLRPRKRKLEESADETKPEPTIPQFDPTRLETYSVVRWFFLLNDMLPVSQRYRSFPNYQPSFFPLSLTEDCLLGIIGTKDSRLWFADFLDPLKAGPLMKRDKTGELLQLSFGLKSAKYRKYRLIGQKDLGERFVLNTSFETDGFSLSIHVIDTKYRKLKKNPPPPVVSRDRAYIKGKDIIMGLDMGQAYTVGAVSWLPDGSKKNLAVNKKALGEPYYLHRNWLNKTKMKDENKPVRDAENCGLSRNSDETITIYFNRMMERYSVWANFYNSHAIRKRTFEYHCAKQREMDRVFNALISMVGLKPHQKVKKKQRIYVGIGTGDFDATGSLHTSFLEYFVRKARPLGITILGVDEYFTSQKCVRCHEFTESLSMRAKKCSKCNVVFHRDILAADNMCAALSAILQNGERPEYLCKPPDDKSDDDNDEQDDGLNKKDRNGRNPKEKKKKKPKDKESGQSTSSEYALENAAKKKSASYVLGSARVIVQ

SEQ ID NO: 2996 - protein, 799 aa, Amoeboaphelidium occidentale
TVSCGLRGLVQNKKLLPVLQEVVERINTILFHGSRLLNFYLIRQLSEGRDLVLLTTGLNGKLRHFFTALLTSRQINYDQDVLAAAAGYRAITDAHNIDFGSTAGITSLLNNAVANYEVTLMNSVTTTIHGRILRWLRHMLEVHCSVCFRNKKRGTAGAKYIISYLAWQANERADKPEFPLLLDKFLARNDHLRVVVLAALLTAWVELYSISYALGYSLSKDYIKENWYKYFPLLFHILSYFNEHSIADAQDRFLERRRGKGLRTFTLAPVTKMRNGFILVDTTSLGEILAFAYARGRNRVPKSFPAKKGIIQRNQTKLRNPGKYWKDVLKIDKLSNSSKTFGFSIKTDGVSARVHFKKTCYTTDVGKDVCFRNKKRETAGAKYIISYLAWQANERADKPEFPLLLDKFLARNDHLRVVVLAALLTARDYIKENWYKYFPLLFHILSYFNEHSIADAQGRLLERRRGKGLRTFTLAPLTKMRNGFILVDTTSLGDILAFAYARGRNRVPKSFPAKKGIIQRNQTMLRNPGKYWKDVLKIDKLSNSSKTFGFSIKTDGVSARVHFKKTCYTTDVGKDGFKTFGDKEYVQLNVENKRVVGLDPGRKDMFTTQDGSKKSYHCSGKEWRVISGAKSSKKQRDLWVSKRDDIQTINSGMPSAKVCTVQKFSQYLGVVLENCSRLFDFYGSLKWRQLRRKTDIRRQKAYDVLCKRIAGEKLDSVVAYGSAKFSASSRGSPPIPTTHLYKKLLEKKVCVRLVWEHRTSVVCSVCHSDLPKGQKWRVKICPFCKIYWNRDVNEAANIR

SEQ ID NO: 2997 - protein, 542 aa, Amoeboaphelidium occidentale
MALHFIGSSTVLAAKVKEICPEKGQEVDKLINMIDQTILNKGKKQKKNVEVEIDTTGQSSSKTNDEPVSNVVVRDNASSAKKTTKKRKRDETEKDEEEVTNEVLYKAGDLDTYSIVRLFTAMNEMLPATERFKSFPQYSPTHGSLDLTEDLLLSIIGMEDSKKYLAGFLVKNGKITHFKLNHDCKGMVLQSVFGLRSKDYRSYCFIGNQDMRKRFVLMTSFSTDGFSLLVNVIDKHAKKVKNETGPPMAAKEPEFNKSTDIILGLDLGQTYTVGAVSWLPDGSKKIVAVKKTALGELGRLYRNWLNKTTMDDQNKLLRDAENSVVEQGTDEPDEMYFNRIMERDSTLSQFYNSHAVRKRSFEYNCAMQREMDRVFNALISMVGLKPNQKVKGNKRIYVGVGTGEFDSNGSFHTSFLKYFVRKAKPMGLTILGVDEYFTSQKCVRCHDFTESLSMRAKQCPKCKVVFHRDILAADNMCAALSAMLEKGERPEYLCKPPDDETEEATEEPVQDVKKGSIKGRNPKEKDKDKQEGLRRSSRQKKR

SEQ ID NO: 2998 - protein, 1047 aa, Amoeboaphelidium occidentale
MEADVDLMVVDEDVMDIDNDVGVLESTEKNSLWDLFTKYLNNNYSDVDIFTDILVVPLHEGGTVPLLPYDIEDLAINEDVTNGTETYSIKVGVNTGLCLENRELAGVKAALEEISQRVSIVRFWATRFINYVALYYLENNLGIPNLSRSADGMLRKCFTIVASDGIIQNSKDSKKAINGRFLAALYRGFAEHSGLNSDNISSLKGFSQLLAGVSRQYEANAKTHVKMNFPKKLKRWIMWKLECILPAVFKANTRSGYAADYIISCVKYVQKILKTEPKFPEKLHKSIKKATKFDHALFFKSLAAVSRVTNDALFLLGPLSLDSKKMKIHFCDYLGVMHQIQKDFYNNFQSNAASRKEERRTGKGLRLFNLFPMTKARCGNVLYSTDGYYELLKYAKNQNNLFQEEDFPVSLAKFKAEGVKEYWFKRCINVQYFESLGSYRKFGFSFSQMVKFGFSFYSDGVTLCPTMIRPKTFTLTDDYGFVDESRTKFLKHDLNDVEVVGVDPGRKDLFYSVLGDKKDVASLSVQQWCWLRGDYHFRNKQKKWLKERNEVQQADKSILTSKVPTVDGFIDFARSCVARFNVAFDFYGAVRWRKLKWNLYIRRQKANKQKKWLKERNEVQQADKSMLTSNVPTVDSFIDFARSCVARFNVAFDFYGAVRWRKLKWNLYIRRQKAYDFACKKLKFGKKLKNIVVAYGDGSFSGSSRGYAPVPTKQLYIQMKIRMKQRIVKVDEFRTSKLCYHCEGEFEQQREWRLKYCPNCKVWWHRDINASLNIRKLYLHQNQHNGARPQAFSRSIRKNDPEETAQKNSDFMGGFAPMTVETPSVSAYKAAQDGQLNVLRTLLPENPNLIRSKDEDGRTLLHHAVKHSSVVELLLEQDRCDVEAKDEAGWTPLHIAASTNQEMTVKLLIAKDADVNATNDSGVTPLCYACSKGYKNIVTILLDNGADALLRDKFGRSVFHRAVLKGQLSILKLLFEKVKSASVNQPDADNNTLLHLAVEEENGEIVKFLLLEKHADATYKNKEGKSVSEVASKTFLPYFQRLLENAI

SEQ ID NO: 2999 - protein, 855 aa, Amoeboaphelidium occidentale
IAQELLECLVVAVEKKGELSELEGSSGARTEINDTKTPARTSGSMKLRSRKRKLGEYAEDTKPEPKIPEFDPSKLETYSVVRLFFAMNNLLPVSQRYKYMPKYQPSLFPLSLTEDCLLGITGIRDSRLWFKDFLDPKKDGPLMKRDRTGYKKYRKYRLIGQKDLGERFVLNTSFETDGFSLSIHVIDTNKKYRKYRTIGQKDSGERLVLMTSFATDGFSLSVNVIDTRCRKVKHTPPPPVVSRDLAYRKDKDIIMGMDLGQAFTVGAVSWLPNGSKNNLAVKKKALGEPYTLYRNWLNKTKMKDENKPDFLDPKKDGPLMKRDRTGELLQLIFGLKSKKYRKYRLIGRKDLVYQFTLSIQTVSWLPNGSKNNLAVKKKALGEPYTLYRNWLNKTKMKDENKPVRDAENCGLSRNSDETITIYFNRMMKRYSVLANFFNSHAIRKRTFEYHCAKQREMDRVFNALISMVGLKPHQKVKKKQRIYVGIGTGDFDATGSLHTSFLEYFVRKARPLGITILGVDEYFTSQKCVRCHEFTESLDRAYIKGKDIIMGLDMGQAYTVVAVSWLPDGSKKNLAVNKKALGEPYYLHRNWLNKTKMKDENKPVRDAENCGLSRNSDETITIYFNRMMERYSVLANFYNSHAIRKRTFEYHCAKQREMDRVFNALISMVGLKPHQKVKKKQRIYVGIGTGDFDATGSLHTSFLEYFVRKARPLGITILGVDEYFTSQKCVRCHEFTESLSMRAKKCSKCNVVFHRDILAADNMCAALSAILEKGERPEYLCKPPDDKSDDDNNDGGQDDGLNKKDRNGRNPKEKKKKKPKDKESGQSTSSEYALENAAKKKSASYVLGSVRVIVQ

SEQ ID NO: 3000 - protein, 678 aa, Amoeboaphelidium occidentale
PAAGKRKANSASPVYKCGISDHKRTSHGLCPLNKKKKVVETFGSNVPGAVKDVLKIPALNAEHAEARGASGPHLLNDVDSPLGAETKTPCKSGSTEHQKISHKSGTLFRGAIKERFKVGDEEESFCTVKMGLNQFLACSLEDNEKQALTDVVNDAVQRLTDLSCEASRMLNGYSDGIMCQVFQAVQQKTLKAPYTFKSQKNELLKTYMNDVYSKIRDPKMAYCDASGLASIVNSIAKEYATNALNHIQMNIVRFTRQYVDFILSREVGYELGRKNYNQVKQFILAELERNSSDSNLKRFPFESLMFTKKKLVKRPQSEHDPLFTSLIKIWDSARNVLRCRNLTKSVVKKEWWLCIPYIFQMLKVVRAKYKEVPSRRFGYHITTDGVQVGISVLKPLNEAKVNEWGLDDEVVFHPLPTNSETQIVAIDPGRRNLYDAVAGDEDSRETRITRQKAYDVVPKELTDGDSNCIVAYGASKFNCLSKGHAPTPNKHRVVELRKRCRTRLVSEYRTSQVCANCNSQLEAVYIKYQTKDHKKKKKSKQKLRKKKLCWGLKKCINHSAEGIPYNFRCLTLWNRDLNAARNIRFMFLYRNANKNEMPDEFRKKKEGETKSNEQADISEACNSNQDSSQPQAADRVTAQAEAAAKTKKTVAITYDGVCRVPGKRLVNTEHQRELVLNN

SEQ ID NO: 3001 - protein, 1047 aa, Amoeboaphelidium occidentale
MNVIFYLDGARSKQKHNTHTLRHTARQFKVQQLNNLVDGLKPLQKSCFRITKDHTEALRTSFESIELKTVISNYEADVAIAKIISDMNDDKRNSVVVVSGDSDLIIHNAPLVARPCFNNKTQILKCLNISSFGLIALGILSGNDYCENIKGFGLSKVHQFIISCDADKTMTTKEIINAFTQIHGVCNHFDIAYNVFVNHKEEQCLLCITHTVQEHYEKILFKVDEFKKLYENWKAEQKAAYEIRSLEQLKHLVLNGQRTRFSPLVNAEYGRYKTKLLNKTKISSITGPEANAKDPEETSPPSNPSKRKSKRKAYPKKPRNGKTKKTPRRKKSNMATRSTKSDKPRKTAVHTQATKDMQGLKKQYETKTWKLGTLKACLRRSSLPEDFKSTLLDRIQGVVALINRATYAAVIITELYYKQSTASKDTDDEFLIDVGGGKQYWGNLIAFLVKPCDFGKNGPRLYQKVRKFMDDNKLKFTLTEAESKYVEFIYCKLLHYHGTSVDRIMALHFIGSSTVLAAKVLEVCPEKAKKVEKLMEMVDQTILNKGKKNKKNVEVEIDISGQSSSNITDQLVPNVVLKLSTTGAKKLSKKRKRDEAEKDEEKVKNEVLYKPGVFETYSLVRSFATMNEMLPQCERFKAFPQYSPSHSSVDLTEDFLLSIIGKEDSKEYLADYLVKNGEKTNFKLNHDCNGMVLQHVFGLRSRGYRSYSLIGNQDTQKRFVLMTSFSTDGFNLLVNVIDKHAKKVKHETGPPMAAKDLRFNKSTDIILGLDLGQTYTVGAVSWLPDGSKKILAVKKTALGEPGRLHRNWLNKTKMKDEHKILRDAENSVVGQVTEESDEIYFTRIMERYSTISLFYNSHAVRKRSFEYQCAMQREMDSVFYALISMVGLKPNQKVKGNKRIYVGVGTGDFDSTGSFHTSFLKYFVRKAKPMGLTILGVDEYFTSQKCVRCHDFTESLSMRAKQCPKCKVVFHRDILAADNMCAALSAMLEKGERPEYLCKPPDDETEEATEEPVQDVKKSSIKGRNPKEKDKKDKQEGLRRSSRHKKR

SEQ ID NO: 3002 - protein, 1144 aa, Amoeboaphelidium occidentale
MGIKGFSAFAKKHNLFSQCLKAVEFKKDYKDFEILVDLYGSFYNLCVNYATKNDFRELAYCMKSLFEGLNVTFFIDGARSLEKHETHVIRDAKSKSKLSSLSNLASHLDPNKKLKKSKWKQINILSKSCFRFTRTHAETIKNMFESVSLKVIIADFEADVAIAKHVSTMDENKKTHLMVISNDSDLLIHDIPLLARPRFSNKFDIHSMYLQMEMRSNVLKRLKLTSNGMIALGILSGNDYCQNLRGYRINKVHEFIISIDADKTKDVIFIVNEFEQCTGKVGHFCSAKEIFLAHSEHQCMQCLTDSNQTEYEESLSLIKDYYKKHNDLKDEKKATFTIRSKQELKHLLLEGQRNRFSPLVNSTYGRYKPKVLDTTKLSSTVEAEADVKDLEQTKPLRNTSKTQSTRKANPKKPRKGKKKKAPRRKKSNMATRSIMSDKPRKKAEHTQATKDMQSLKKQYETKTWKLGTLKACLKRSSLPEEFKSTLLDRIQGVVALINWATYAAVIITELYYKQSTASKDTDNEFLIEVGGGSQYWGNLIAYLIDPTKLGKKGPRLYQKVRNFMDSHELKFTIAEAESKYVEFIYCKLLHYHGTSVDRIMALHFIGSSTVLAAKVKEICPETAQEVDKLMEMKNVEVEIDISGQSSSKNSDQPVPNVVSKRSTTGAKNTSKKRKRDEIDKDEEDVKKEVHFKPGMLETYSLVRLFTTMNEMLPQSDRFKSFPQYSPSHSSLDLTEDFLLSIIGIEDSKEYLADYLVKNGEKTNFKLNHDCKGMVLQHVFGLRSRGYRSFSLIGNQDTQKRFVLMTSFSTDGFNLLVNVIDKHAKKVEHETGPPMAAKDLRFNKSTDSILGLDLGQTYTVGAVSWLPDGSKKILAVKKTALGEPGRLHRNWLNKTKMEDRHKTLRDAENSVVGQGAEESDLNYFNRIMERYSIISQFYNSHAVRKRSFEYHCAMQREMDRVFNALISMVGLKPNQKVKGNKRIYVGVGTGDFDSTGSFHTSFLKYFVRKAKPMGLTILGVDEYFTSQKCVRCHDFTDSLSMRAKQCPKCKVVFHRDILAADNMCAALSAMLEKGERPEYLCKPPDDETEEATEEPVQDVKKSSIKGRNPKEKDKKDKQEGLRRSSRQEKALENAATKKKANCHGI

SEQ ID NO: 3003 - protein, 317 aa, Amoeboaphelidium occidentale
MVTLTPTARCFTTVSYIEHLSHVLELRDELLGFYREMSWRRLRWKTRIKRQKAYDTLFTELTGGLDNVVIAYGGGKFSHNSRGHPPTPNKHLILELKRRTKCRLVPEFRTSKLCSKCDAELVQYDIWSIRSYNNNNCWTRWNRDINGARNIRRVFLHMNANEHLSHVLELRDELLGFYGEMRWRRLRWKTRIKRQKAYDILFTELTGGLEDVVIAYGGGKFSHNSKGHPPTPNKHFFLELKRRTKCRLVPEFRTSKLCSKCDNELVQSNIWSIKSCNNNNCWTRWNRDVNGARNIRRVFLHMNANGGEKPEAFRRGN

SEQ ID NO: 3004 - protein, 391 aa, Amoeboaphelidium occidentale
RVVPKNRSFSYSISTDGISLHLNLKKQTSKSESTIDEFGYKTDGSKEYSPVDLKYRTVVGIDPNRKDLFMAYDGKHKFQVTGKEWRQMAGITAAKKKRENWLKKRNDIVNANSNVPTSKFGYKTDDSKEYVPVDLKDRTVVGIDPNRKDLFMAYDGKQKFQVTGKEWRHMSGITAAKKKRENWLKKRNDIVNANSNVPTSKVSHVSDLHNHFFYLFAHLNLWFDFYGSRQWRQLRKRSSIKRQQALDLIVNRIIGKAERKWYLGHKGVNAKHSRSYNNVFVAFGGSQFSSTSRGHHPIPRRSLINALKQRKIPMRLVDEFRTSMLCCKCKEPLPKRGMWHVKRYDNCNIFWNRDVNAAVNIREVFISVNASKGVRPGKFSRSYKFCSSTKA

SEQ ID NO: 3005 - protein, 578 aa, Amoeboaphelidium occidentale
MRNVDASYEYATSTIKVGLLKNVKPQDFLMKLKRYVERINLIRIHSSNLFNLYLIDMLAAGKIIGLVTTGKDGILCNFFVAGDLERKVNDYASMLKQVGLELPNGDGLSQSIVHLAGEYETRCKTFVSTTLLIRITRWLQFLLETALPEVFMSMARSKSAAGYLIAMLIYEMSDDPKKQEPTLAKKVVENCKKYSSIGLMGIALEQVYGGLRAFTLAHIYHNRNGYVNIDTSCLFEVYQFGKEDRRDWVFPFDKDLIEKEKTTQQYFMDTAEARWGETIEMKPWLRPDDFGFNRVNNKKVYVPIDLKDTVVIGLDPGRKDLFDAYDENGSFGCSGGEWRQLSGIEFSAKKRKFWLSKRTDIGKINADLPFSKVATVLEFKQYLSYFAEIFNTLMSFYGSHRWRLLRRKCDIHKQWAYDHLIKRIKRRGKKVFVAFGGGKFSSCSRGHAPIPKVGFYKALKQRNIPCRYVWEYNTSKICAKCFTVLPKGRKWLLKICSKITCGRYWNRDVNAAKNMKFVFTFMNNNNGENPEQFKPKQQKQEQNNNNKTEVTEGRKSAQDHNRGHVTNVTSDVDGVTVA

SEQ ID NO: 3006 - protein, 1744 aa, Amoeboaphelidium occidentale
MDLDLNMRVDENEMPKTFTTDGFLSMSMVEYSGVAVDVGDLGGIGPSAGGKKRKEPEGGKRCKCGITEHQKISNKECPLYKPRLKLVDQPFDRTERTVTTSTGLNSVLRIAPLNDIIMDANRPIPDLRFSDGIMREFYQAVCSIDALRNPHQHKIVSTPSINEYMAEVYSRCRPDNLAWNDATKLAQLISNMARMHSTNCQNHVVTNLLKWIKKWLIWKLGKQLRAFLSADDFNEDGVDLDLNMRVDENEMPKTFYTDEFLSMNLVEHSGVEVDVGNSSGIRPSVGGKKRKEPEGGKRCKCGSTEHQRISNKNCPLIYEHKNTFHLLRVEDGVDLDLNMRVDENEMPKTFYTDEFLSMNLVEHSGVEVDVGNSSGIRPSVGGKKRKEPEGGKRCKCGSTERQRISNKNCPLYKPRLKLLYRDTELPEKTVTTITGLNSHSGVEVDVGNSSGIRPSVGGKKRKEPEGGKRCKCGSTEHQRISNKNYTELPEKPVTTTTGLNSVLRNAPLNDIIMDAVARCTDIQVEVSRLLNGYVIWMIEENRPIPDLRFSDGIMTEFYQAVYSIDAVRNPHQHKIVSTPSINEYMDEIYSRCRPDHLAWNDATKLTQLISNMARMHSKNCQNYVVTNLLKWIKIWLILKLGKQLRAFLSADDFNQVVTVAMNEITRTKENEEFYAIPLNIIEAVTPEQLNLIYDRINHYYEKLTIILNNQPLDEDSIKGSWWTYLKPISRLLNTFVNNYEQDAQNRLENGIHGRGLRLFSLTPISTFKQKFILIDTDALHDLMTSENIGIVVPRDKVVFRVHAMEWWRRAFNKWLIWKRGKQLRAFLCADDFNEVVTVAMNEITRTEEDEGFYAIPLNIIEAVTPEQLNLIYDRINHYYEKLRITLNNQPLDEDSLKASWWTYLKPMSRLLKTFVNNYKQDAQNRLENGIHGRGLRLFSLTPIKDEGFYAIPLNIIEAVTPEQLNLIYDRINHYYEKLRITLNNQPLDEDSLKASWWTYLKPMSRLLKTFVNNYKQDAQNRLENGIHGRGLRLFSLTPISTFKQKFILIDTDALHDLMTSENIGIVNRPIPDLRFSDGIMREFYQAVCSIDALRNPHQHKIVSTPSINEYMDEIYSSCRPDHLAWNDATKLAQLSSNMARMHSTNYQNHVVTNLLKWIKKWLIWKLGKQLRAFLSADDFNEVITVAMNEITRTEEDEGFYAIPLNIIEAVTPEQLNLIYDRINHYYEKMRIILNNQPLDEDSLKASWWTYLKPMSRLLKTFVITVAMNDITRTEEDEGFYAIPLNIIEAVTPEQLNLIYDRINHYYEKLRIILNNQPLNEDSLKASWWTYLKPMSRLLKTFVKNYEQDAQNRLENGIHGRGLRLFSLTPISAFKQKFILIDTDALHDLMTSENIGIVVPRDKVVFRLNAMEWWRRAFNVDKLTTDTKRFGFSVSTNGVKYHQHNMKQFERSEINDWGYNYEGEFIPLEINGQTRVVALDPGRNSLYVAVAGNTAADVLESDRDRHMAITLTTTPCCYNTDDYITHLLHVLEYRDEFLGFYRDMRWRRLRWKTRIKRQKAYDTLYKELAAGGLDNVVIAYGGGKFIHNSRGHPPTPNKHLFLELKRRTSCRLVPEFRTSKLCSLCDNELVQSDIWSIKNVVIAYGGGGFSHNSRGHPPTPNKHRFLELKRRTRRRLVPEFRTSKLCSLCDNELVQSDIWSIKSCNNNNCWTRWNRDVNGARNIRRVAFHMNANGGEKPEAFRRGN

SEQ ID NO: 3007 - protein, 558 aa, Amoeboaphelidium occidentale
MLAKIRQCDLPSIEGLSKSIDTVVMQYQTNCQVYVSTTLWGRVHRWARHLLEIQLPAVFKNCARSKAAATYLMSCLLYEEPSEKERKRPSLQKKLVEFCKKKGLEQELDLALIDVYSILLQHTHCAGLCLNTVSVKTNWDKYFGLMWGILRHFEEYGPKDCESRAQEQRRGRGLKLFNLVPLAQIRNGFVTIDTSGLYELSRNLNINSKKDPLQSASNNIHQQPKIYVSPVQRFLANAEEEWGKVLRLKQVVPKNRYFSYSISTDGISLHFNLKKQILKTESTIHEFGYSIEDPKVYSPVDLKDRTAVGIDPNKKDLFMAYDGKQKFQVTGKEWRQMAGITAAKKKRENWLKKRNDIVNANSNVPTSKVSHVSDLHNHFFYLFAHLNLWLDFYGSRQWRQLRKRSSIKRQQALDLIVNRIIGKTERKCYLGHKGANAKHSRSYNNVFVAFGGGQFSSTSRGHHPIPRRSLINALKQRKIPMRLVDEFRTSMLCCKCKEPLPKRGMWHVKRYDNCNIVWNRDVNAAVNIREVFISVNACKGVRPEKFSRSYKFCSSTNA

SEQ ID NO: 3008 - protein, 576 aa, Amoeboaphelidium occidentale
VPDNAEIAQELLECLVVAVEKKGEFSELEGSSGARTEIKESIDKLNESDTKTPPRTSGSMKLRSRKRKLGEFAEETKPEQKIPEYDPSKLETYSVVRLFFAMNNLLPVSQRYKYMPRYQPSLFPLSLTEDCLLGITGTRDSRLWFKDFLDPKKDGPLMTRERTGELVQLVFGLKSKKYRKYRTIGQKDSGERLVLMTSFATDGFSLSVNVIDTRCRKVKHTPPPPVVSRDPAYRKDTDIIMGLDLGQAFTVGAVSWLPEGSKKNLAVKKKALGEPHALYRNWLNKTKMNDENKPKNLAVKKKALGEPHALYRNWLNKTKMNDENKPVRDAENCGLSRLPDETITKYFNRIMERYTVLANFYNSHAIRKRTFEYHCAKQREMDRVFNALTSMVGLKPHQKVKKKQRIYVGIGTGDFGATGSLHTSFLEYFVRKARPLGITILGVDEYFTSQKCVRCHELTESLSMRAKKCSKCNVVFHRDILAAENMCAALSAILEKGERPEYLCKPPDDKSDDDDNDEQDDGLNKKDRNGRNPKEKKKKPKDKESRQSTSSEYALENAAKKKSASYLLGSARVIVQ

SEQ ID NO: 3009 - protein, 588 aa, Amoeboaphelidium occidentale
MSYLAWQANERADKPEFPLFLDKFLAKNDDLRAVVLAALLTARVKLFSISYASEGTAGAKYIMSYLAWQANERVDKPEFPLFLDKFLAKNDDLRAVVLAALVTARVELFSISYASEYSLSKDYIKENWYKYVRLLFHVLSYFNEHSIADAQGRLFERRCGRGLRRFTLAPLTKMRNEFILVDTTSLRNFGFCLRSWKKPSSKVIISKEGYYSKESDNVMKPRKTDGVSARVHFKKNCYTTDVGKDGFKTFGDKEYVQLDVENKRVVGLDPGRKDMFCCHDGSKKADKPEFPLFLDKFLAKNDDLRAVVLAALLTARVKLFSISYASEYSLSKDYIKENLYKYFPLLFHVLSYFNEHSIADSQDRLLERRRGRGLRTFILAPLTKMRNEFILTDGVSARVHFKKTCYTTDVGKDGFKTFGDKEYVQLNVENKRVVGLDPGRKDIFSCFDGTKAWRQLRRKTDIRRQKAYDVLCKRIAGEKLDSIVAYGSAKFSASSRGSPPIPTTHLYKKLLEKKVCVRLVWEHRTSVVCSVCHNDLPKGKKWRVKICPICKIYWNRDVNAASNIRQIFLFMNGNNGQRPMQFRTFKER

SEQ ID NO: 3010 - protein, 395 aa, Amoeboaphelidium occidentale
MSYLAWQANERADKPEFPLVLDTFLARNNDFRVVVLAALLTARVELYSQTYASDYSLSKEFIKKNWYKYFPLLFHILSYFNEHSTADAQGRLLERRRGRGLRTFTLVPLTKMRNGFVLVDTTLLGEILAFASARGRNRVPKSFPGKLGIIQRNQTILRNQGKYWKDVMKIDKLSNSSKKFSFSINTDGVSARVHYKKTCYTSDLGRDGFKIFGDKEYVPLDVENRRKVGLDPGRKDMFSCHDGSKKSYHCSGKEWRVISGAKSSKQKRDLWISKRDDIQTIKSGMPSAKLYWKIIHVCLLFYGSLKWRQLRRKIDIRRQKAYDVLCKRIAGEKLDSIVAYGSAKFSGSSRGSPPIPTTHLYKKLLEKKVCVRLVWEHWTSVVCSVCHNDLPKGKK

SEQ ID NO: 3011 - protein, 1107 aa, Amoeboaphelidium occidentale
MPVITRSQKKPKHHPYQTRQRPPRATAAPKAPVTTTQAKQAQQLKHAPWWTDQSKVMSQRLAVQSSGTRSAQSALTKFKVTKKKISWCTANYYEPLAKLNNKIEIHENPPAPYHLNRQSPESKKRKKTKPLQSGMSSYDKKICSRMKSGPDENETMRSVKIRVYPEATQKAALKQIFGIVRVVWNQGLDEMFLRGHPKNWQSLRNKIVTASNVSEEEQASRPWLYDGSICSASIKGEAIHKLVSSIKATEELLRAQNRAFNYQMTRKKKKDSRQSLSFYPGGAYALRCIESTSTRNGTKKNNFGLKLPFDALAQPLKVTSESEFQGAKSIMENEMDKKESNEYKRLVEVVWEKPDQYYVCFPYTKANQEKTIDDHPIAAALDPGVRDIRRVERLCVNLDRLISKAAGVKTGRKNRYKRRRMNAAIQRARQRIKNLISDFHGKLAHDLTSRYNAILIPTFYVSKMVIKNNRKINSKTARNMLNWSHYKFKQKLLQKAEENPNCEVHVVTEEYASKACGICGRLNHKLGGNKTFNYLNKRAKLNLDTGNYKPMDLMPQPQPNRKKATELELKEEPLKGPATDQPELPLNTIVKRFHHTTSSFVARCYLFPLVGDGIERDHALLMVDVLRSVKQVLLWFATHEKSPSFEWTLIRAKSLDLVKKWKRSVILKAHEMTKNRAVDFREESRKMMDQFIEEFEEFVTFLNAQLGYYNKTKSLMSVDDYTLMRNKVHASSRAQSREKNPKIDIQEQGSRIARSRSTPHIYPDDQPNNSSTEKTHIQTVLVPSPDDSDTATIIPEVTSPVESIKTLHRHSNIRPRARTVEFEHESEPLSPTKLSKPQWDIKKLFDNLQELKQKYEEDINEKKEKQKMLINTIRRYSKDDPNTNYVKLASALDAVLPSAILPSAATDLSKFDTGNSVNVPISAIDPHTSGTKSLSAEQNAALKRSHTINVPSKAVAPSLTLVIPDYVPPPIPKLESAKLRPSNSMDVIVKDKKTKAFSPSISAPNLVNKAQNEVMAAPGDGNHRFRKVALLEDIRHSFRTLFSRTDKKKLVKGVDFKSTKKYEGHEKCQVCEDRFSFGGGKVKCVQCDLIVHQKCRENADLGYFDCL

SEQ ID NO: 3012 - protein, 728 aa, Amoeboaphelidium occidentale
MKKKRKLPDDDVEEYDPAAEDDVAAEPIDEPEEEEEDDMTPIPMTSIVTRKTGLNSLLPNEILRTKIRDLVDAMNFIRYHGSRLLHLYVVQMCSEGRDLGLLTCSYGGILRHFFVAVCYNSGNIHAKRLDNNVAPLAEIYRNTAFEYGIEFPLNTGISSTLNNMITTTTVGRVRRWLMHLLELEYPDCFKVKKRSTSGANYCISSLSALLEENNELPELPDILEKFAKKHDRARIMRALRTKRNFLKEYWYKFFYLQYHILEHFTKYSEADAQARLEENRRGKGLRLFTMVPLADIKTSHAFFDSSGLSEVVHMAFEDESFVAPPNHPRNLNVTSRKALFTGKKSRVPLWNWAVELKCVKHTNLDFNYSFSTDGVSVSVHFKKPGFKERLNDKGFLWSNQMKYSPIGIENRVVVGVDPGRIDLVVCSDGSRKSFGCSGKEWQEIAGFSTDGLSVSVHFKKPGFKERLNDTGFLWSNQMKYSPIAIENRVVVGVDPGRIDLVVCSDGSRKSFGCSGKEWQEIAGFRYQRWRQKSWSDKNDNIQTIIRDMHSAKVRKVEVYLTYLNYILRHYASLADFYGSQRWRQLRRKTDIMKTKTFDIVCRRIAGNNFERVVAYGSGGFSSCSRGHAPLRVKGLFKALKQKNALVRLVWEHRTSKLCCQCEGELPEGKRWQVRICKTCKIHWNRDFNAANNIRKILKHMEENSGDRPCNFLTKKQQKSKGNDLIVGG

SEQ ID NO: 3013 - protein, 377 aa, Amoeboaphelidium occidentale
MLRNPGKYWKDVLKIDRLSNSSKKFGFSIKTDGVSVRVHFKKTCFTTDLGKDGFKTFGDKEYVQLDVENKRVVGLDPGRKDIFSCFDGTKAVHCSNKEWQEISDGFKTFGDKEYVQLDVENKRVVGLDPGRKDMFCCHDGSKKSYHCSGKLKETKRFVDFKKGRYPDFKFWYAFSQGLHCQKFSQYLGVVLENHSHLFHFYGSLKWRQLRRKTDIRRQKAYDVLCKRIAGEKLDSIVAYGSAKFSASSRGSPPIPTTRLYKKLLQRNVCVRLVWEHRTSVVCSVCHNDLPKGKKWRVKICPTCKIYLNRDVNAASNIRQIFLFMNGNNGQRPMQFKTFKQRMLASSASNPAVPNDGQQADDRGEENTLSDIPAQIPL

SEQ ID NO: 3014 - protein, 314 aa, Amoeboaphelidium occidentale
MIVTVNTQQKEWRVISGAKSSKKQRDLWISKRDDIQTLNSGMPSAKVCTVQKFSQYLGVVLENHSRLFHFYGSLKWRQLRRKTDIRRQKAYDVLCKRIAGEKLDSIVAYGSAKFSASSRGSPPIPTTRLYKKLLQRKVCVRLVWEHRTSVVCSVCHNDLPKGKKWRVKICPTCKIYLNRDVNAAIAGEKLDSIVAYGSAKFSASSRGNPPIPTTRLYKKLLEKKVCVRLVWEHRTSVVCSVCRNDLPNGKKWRVKICPSCKIYWNRDVNAASNIRQIFLFMNGNNGQRPMQFKTFKQRMLASSASNPAIPNDGQ

SEQ ID NO: 3015 - protein, 344 aa, Amoeboaphelidium occidentale
MYQVVRLTKFYKDLWPQNREQTINKAREFWIQIINVEKHERCNRRFGYHVCSNGVEIGVQYLKSIAVSSFDNHGYDKNNTFHPLNLTSTTRIIGLDPGRASLYVAAGGSSEQLEIFKCSNSRWREISGATHGLQKRKNWNKKNPVLIVQITSGPSHKVSTTAAYCEYLRHVLSLRDDVLGFYRDLQRRRLRFKTRITRQKAYEAPARELTDGDKNCIVAYGSGGFISTSKGHAPTPNKHLFVELKKRCKVRLVSEYRTSQVCSNCGSQLQQTKYWGIKKCNNHFAEGKLNRLHCLTLWNRDINAARNIRYMFLERNSNGDNLPEVFKKKEECSKENKYKCFKNE

SEQ ID NO: 3016 - protein, 783 aa, Amoeboaphelidium occidentale
MVKRITTIIPKSKHITIVFDGGSTEEKQVTHIKRLESKRQSVQALQYFVDSLCKGNGDQEGAEDIVSLKRVSKAKKILMKQLIKKAFVLTKQDKKEIMALLKRLGYTIEQAAGEADVFIGTRKGRVNVISPDSDMVFHLNDGIWAVPSLQGNNLMIRYIDVAEARNKLKLNLASLRALAVLGGNDYCSNVRGWAIASVYKRIRQYRKADLESCNKLVQSFLETVGSDSNFDKALMIFECKEEHVLPHDARTEILLQLSLYNKESEKFNDDNESLTRYKYKTVDRKSLCVSEVPPLTLKNRPKQPEEILESQIEALQENLYGSESNEENDINKLQKLCKSKVEYFYKLNQLLPSNKRWSMISLSRVPDLAITVNESGLLDVLKQVVPVFKRISNDFVIQNKGWFFMELFGKNFGDNRNRHLRLQNDTSNKRYILQNTLQTGGVELRVHVLDTAEKKKRNVLQPTQEIDFDEELFDNAGVKPSDVVYDKVPIMTEDEAKDCYFVGVDLGYKYSAGVCAVQESSNTIRNLAIRKNFLREPFKKYNRWFYKQKNENEWVYETERLMERTESETASNFATRWFNCYSKLYVFYNSLSMKKNRWDLKKALRGELDRAVHAILRMVEMKINFNLKHEAFKNKRTVIGIGASKFEMGDNTHTLFEKHLVMKLRSLGYTVVCVEEYLTGQMCRRCFNRTEQLKMRVKYCRHCHVFYHRDVMAGENMARVLRDEVTGKGRPEHLRYKPPNKPSPDYSASIGDEIGDKTLDDSAEDNVSVSLVKKGKRRLDMSH

SEQ ID NO: 3017 - protein, 510 aa, Amoeboaphelidium occidentale
MKQITNTTEALQILQNEIITKRLGRGLPVAVLTGAGISTDSGIPDYRGPNGTYVKYKNYRPIRYQEFMSSDLSRKRYWARSFVGYPEMTKAKPNPSHYALAKLGLPVITQNVDSLHIHAGSEDCTELHGSLKHVVCTKCGKLFERSWYQAELKQLNPSLSISADSIRPDGDVDLGSFDYSQFRYPSCPCTAASIIKPHVVFFGENIDAKVRDASFETIDKSSSLLVVGSSLEVYSAFRLVKRAIDQLKPVIILNIGDTRAERDVANNALITKLEVHCSKTRVVALDPGRNSLYVALSGITAADVLECSNSRWQEISGTRYSTKKANTWITADRDRHMAITLTPTPCCSNTDGYITHLLHVLEYRDEFLGFYRAMRWRRLRWKTRIKRQKAYDTLYKELAAGAEDVVIAYGGGGFSHNSRRHPPNPNKHLFVELKRRTRCRLIPEFRTSKLCSLCDNVLVQSDILSIKSCNNPDCWTRWNRDVNGARNIRRVALYMNANGGAKPWAFRRGN

SEQ ID NO: 3018 - protein, 782 aa, Amoeboaphelidium occidentale
MSDQRFVPPDTGQDHSEIDTHVYQAMPMDLDDRDQPTDIVEIEMKPVQRTAASADDVITTDDDVVGVSSSTSKRKRRTQCKCGSTTHLNISHSACPLNKRHKSTSQTETVSANASPVAAVNDQSADIENPVKKCPSCGGTDHQRKSSKKCAHYQGKFADRYKQHDHEESECTVKLGLSYMYNRQLHPEQKQLLHNLIQDAVHRMTEIYCETTKLLQGYLIGLLERGDKIPDIRFSDGILTQLFQAIQFENENSHRIPKTVSTASINTFVSEVYSVARGDRSFCDGSGISHMISSVAEQYNTNCMLHLSLKMKRYLKQWLQCGIKRSILWSLKLLALKQSKNLGGPILSHSIICWLSLGENFYSEAERRRTNRLKGRSLRLFNLVPQASHHLIHVPIDSTILIDLLSSVGVKKFGYRDRNECSADPLKVWQSLFYFDRIITARKRFGLRIATNGVEVSVLLMKIVTNGPKLNDFGIDQNDQFIPFSVAGNVRIVVLDPGRSCLYDAVAATHVDGLIQNDNEVLSCSNKRCQDLSGAHRGRQKRSHWMLWNQTLMKTLTQAKWRRLKFKTRISRQKAYDQLAKELTKGDPDTIIAYGAGKFDCCSKGHAPAPNRHLFKELKKRCRVRLVSEYRTSQVCFNCHSQLEKVYGAVIMSDKHGRLGKNGKMKSNRTGRRKLCWGLKKCINHSANVNGRSFCLTLWDRDVNAALNIRQVFLYRNAHNNESPEEFKRKKKEGEKVCAAEIQDSTTSEAMNTDTLREDGLGSNGYGIKSQVAQKYSEIPAI

SEQ ID NO: 3019 - protein, 1479 aa, Amoeboaphelidium occidentale
MEIDTALTIEIKEDSTESKENEKDDKENDNVIPMEIDDAASPELPTCNACGLVGHSRRSSKHCLQHIPRVAERNLDPLEEYSNVTVKVGFKKAIRGIELASAIENYVRTMNLVRIHGSRVVLKYVLDKVQRGLPVGNLQSSEGGIMRQLFVGAFHYFHKGNGAGLDNEDIALSIHEYVMLAKIRQCDLPSIEGISKSIDTVVMQYQKNCQVYVSTTLWGRVHRWARHLLEIQLPAVFKNCARSKAAATYLMSCLLYEEPSEKERKRPSLQKKLVEFCKKKGLEQELDLALIDVYSILLQHTHCAGLCLNTVSVKTNWDKYFGLMWVILRQAQEQRRGRGLRLFNLVPLAQIRNGFVTIDTSGLYELSRNLNINSKENPLQSASNNIHQQPKIYVSPVQRFLANAEEEWGKVLRLKRVVPKNRSFSYSISTDAESTIDEFGYKTDYSKEYSPVDLKDRTNDDVIPMEIDGAASPDLPTCNACGLVGHSRRSRKHCRQHIPRIAERNLDPDEEYSNVTVKVGFKKAIRGIELAFAMEKYVRTMNLVRIHGSRVVLKYVVDKAQRGLPVGNLQSSEGGIMRQLFVGAFHYFHKGHGAGLSNEDIALSTHEYVMLAKIRQCDLPSIEGLSKSIDTVVMQYQTNCQVYVSTTLWGRVHRWARHLLEIQLPAVFKNCARSNAAATYLMSCLLYEEPSEKERKKPSLQKKLVEFCKKKGLEQELDLALIDVYSILLQHTHCAGLHLNSAAVKKNWGRYFGLMWVILRHFEEYGPKDCESRAQEQRRGRGLRLFNLVPLAQIRNGFVTIDTSGLYELSRNLNINSKENPLQSASNNIHQQPKIYVSPVQRFLANAEEEWGKVLRLKRVVPKHRSFSYTIVQRGLPVGNLQSSEGGIMRQLFVGAFHYLRKGIGAGLDNEDIALSIHEYVMLAKIRQCELPSIEGLCKSIDTVVMQYQTNCQVYVSTTLWGRVHRWARHLLEIQLPAVFKNCARSKAAATYLMSCLLYEEPSEKERKRPSLQKKLVEFCKKKGLEQELDLALIDVYTILLQNTHCAGLCLNNISVNTNWDKYFGLMWVILRQFEEYGRKDCESRAQEQRRGRGLKLFNLVPLAQIRNGFVTIDTSGLYELSRNLNINSKKDPLQSASNNIHQQPIIYVSPVQRFLANAEEEWGKVLRLKRVVPKNRYFSYSISTDGISLHLNLKKQIFKTESTIDEFEYSIEDPKVYSPVDLKDRTVVGIDPNRKDLFMAYDGKQKFQVTGKEWTHMSGITAAKKKRENWLKKRNDIVNANSNVPTSKVSHVSDLHNHFFYLFAHLNLWFDFYGSRQWRQLRKRSSIKRQQALDLIVNRIIGKTERKCYLGHKGVNAKQSRSYNNVFVAFGGGQFSSTSRGHHPIPRRSLINALKQRKIPMRLVDEFRTSMLCCKCKEPLPKRGMWHVKRCDNCNIVWNRDVNAAVNIRDVFISMNASNGVRPEKFSRSYKFCSSTNA

SEQ ID NO: 3020 - protein, 242 aa, Amoeboaphelidium occidentale
MKWWRRAFNIDKLTSATKRFGFSVSTYGFEYHQLNMKQFERSEINDWGYNYEGEFIPNSLYVAVAGNTAADVLECSNSRWQEISGTRYSTKKANTWITADRDRHMAITLTPTPCCSNTDGYITHLLHVLEYRDEFLGFYRAMRWRRLRWKTRIKRQKAYDTLYKELAAGAEDVVIAYGGGGFSHNSRGHPPTPNKHLFVELNRRTRCWLVPEFRTSKLCSLCDNILVQSDIWSIKSCNNPNC

SEQ ID NO: 3021 - protein, 1369 aa, Amoeboaphelidium occidentale
MCSKYSRSKDWDHMIKRITTIITKIKHLTIVFDGGSTEEKQVTHIKRLESKRQSIQDLQYFVDSLCKDNGDQEGAEDKVSLKRAVFYPLLCSKYSRLKDWDHMVKRITTIIPKSKHLTIVFDGGSTEEKQVTHIKRLESKRQSVQALQYFVDSLCKDNGDQEGAEDKVSLKRVSKSKKILMKKLIMKAFVLTKQDKEEIMALLKRLGYQIEQAAEEKQVTHIKRLESKRQSIQDLQYFVDSLCKDNGDQEGAEDKVSLKRVSKAKKILMKKLIKKAFVLTKQDKEEIMALLKRLGYKIEQAAGEADVFIGTRKGRVNVISTDSDMVFHLNDGIWAVPSLQGNNLMIRYIDVAEARNKLKLNLASLRALAVLSGNDYCSNVRGWAIASVYKWIRQYRKADLESCNKIVQSFLETVGSDSNFDKAIMIFECKEEHVLHHDARTEKLLQLSLLIRRKITVCVSEVPPLPLKKRPKQPEEILESQIEALQENLDGSESNEDSGFTASTTVHNSSKKRKKKSAKHQPSSRNFRNKPDAAEAEEHVLHHDARTEKLLQLSLFNKESIKKWDNYNIAWKDKQENYIGNSDNLDLKRWTHKNPFRVLGEKFNDDNESLTRYKYKTVDRKSLCVSEVPPLPLKKRPKQPEEILESQIEALQENLDGSKSNEESGSSASTTVHNSSKKRKKTSAKHQPSSRNFRNKPDAAEAGATGSRNVTDESREMSSLKAKFVTKTWSIGALSTRNRQRQYAQYEKEIIHCFKSIIKLNENTLKLDDMILGDTKGQGGRKFWQPCMSFLNGTGRDETESVGLNLFKNDMILGDTKGQGGRKFWQPCMSFLNGTGRDETESVGLNLFKSCINKKLFSGREVKSLKLYTLSKFSMCQATDFIAKQLDTEFAGQVVGRVKLLEEVVFEYDSNLKDDINKLQKLCKSKVEYFYKLNQLLPSNKRWSMFSLSRVPDLAITVNESGLLDVLKQVVPVFKRISNDFVIQNKGWFFMELFGKNFGDNRNRHLRLQNDTSNKRYILQNTLQTDGVELRVHVLDTAEKKKRNVLQPTQEIDFDEGLFDNAGVKPSDVVYDKVPKMTEDEAKDCYFVGVDLGYKYSAGVCAVQESSNTIRNLAIRKNALRGPLKKYNRWFYKQKYENEWVYETERLMERTESETASNFATRWFNCYSKLYAFYNSLSMKKNRWDIKKALRGEFDRAVHAILRMVEMKINYNLKREAFKNKRIVIGIGASKFEMGDNTHTLFEKHLVMKLRSLGYTVVCVEEYLTSQMCPRCFNRTEQLKMRVKYCRHCHVFYHRDVMAGENMARVLRDEVTGKGRPEHLRYKPPDKPSPDYSASISDEIGDKTLDDSAEDNVSVSLVKKGKRRLDMSH

SEQ ID NO: 3022 - protein, 251 aa, Amoeboaphelidium occidentale
MTFGYSMVTDGVSVEFHVMKKIHDGDKGPDDFGLNMVDDKKFYVPVDLKDTVVIGLDPGRKDLFDAYDENGSFGCSGGEWRRLLSKRTDIGKINADMPSAKCLFTDLTSGVFLRRTCDIHKQWAYDHLIKRIKRRGKKVFVAFGGGKFSSCSRGHAPIPKVGFYKALKQRKIPCRYVWEYNTSKICAKCFTVLPKGRKWRLKICSKITCGRYWNRDVNAAKDMKFVFTFMNKNNGERPEQFKPKPTEAGTK

SEQ ID NO: 3023 - protein, 717 aa, Absidia glauca
EPSAATIKKVCGLIVDLLRKKDEDYCINTNDLLERVPTLNPHTVEPIAKIYRFFRRFVLQDVGEDDIDGHILVNLHILDMCNAVLFSTGYTRHLRKLLPEPDMSTLHALHLNLEGLYYFTRAFFDEGKKKESVMMIDPSTPITSLEIATLNKSSVFDTCIGMEEVERSCRERKVEFDNKLVITSSGVVHLQVTYHAPTASLPPVAPAKKSKASKSAQAEQARQQLDNLKNQTNQLKHDLRLVKLSLSPTKKKIKAITDRIGKADDDMTRKQLIEERTEEKKQRDNTYRRMLEVYGQIDKINKDKATIYNTLYPKPTSSSSSAVPASSSSSSSSSAVPASSSSSSSSSSAVPASSSSSSSSSVPASSPLSSPSCPFIPKETLYIGIYIGIDPGVKTMATAVQLDSYQAGAFLLLPNKLQHLSTDINTQQQKRLALAMKVPTKEIRASSIASRSRSNHSRKVMETKKKQATNDQPSIQAIESRLGGDQMQYTWDRGHSIQRRLETAKEHRPTLVSFYRESSWAKKQTNGRKRFSEKAYAAAARSLFHPSSKHVVFFGDAGRGYGSTIKGHIRRSPDKLLAHLKERTTVIATNEYLSSKLCCFCNTRVLHPNKPSGKQNLGVVNCINPDCYSRTSGCSSRSRDKNAAINMITIGLHKEITGMHHPTFSPFQTTATAAAAAAAASTTAIETAFFGHITSWLERMGVPPSMKGTGDGRSLRT

SEQ ID NO: 3024 - protein, 984 aa, Absidia glauca
IRCNGSLTVFGYIRSGDALFVQGYVNAGTYLDCGGSLFVHSYVKIGTALSTGGTVNAHANIQVGGDMKSMGKIAVKKDIVIGGKLTVIGGVDCGGSMQVNGNVESNGDIEVDGDLIVTANMLLTGELVVMKNFTLGGDMTSTGMIVAGGNILHSDIANINVPRLAQDMHAEYDDDNNQYGDHDGPVSSFSLHDIQSSLADIDPDGTASGASGANFAGAASDASGASGAGAASGAGAASGAGAASGAPTGAAVEDDEDIYDVADQDVFEGDDEFASMMDPLANSQNLRGMCPIMFSKEFFYGCMQLVLGNKVTNKNTKMPVRVMESVFSDYRQLFSSEDMFLEKMPPGKSYSASLASMALTMATSMKNIVVETFEKRCLLYLEHRLRVEIPDIDTKTVKKLRIYLYNELSGVEDPPWPTSLDKTEDLMVHLNRITLTEYLGPQPITHKSLVTNICEHMSVLHQILRNYEQYNNVSSNELADQVSPWWAYQQLKDHDEFLNLTKKQRQQVSRQLRQHANGNDGDTILFTTTISDGLRNVLLELVTDTRARIANSRRVKAGDDEINLDDCFVPTRSSLKPDHRLFNLLPHRSFGMPFVEVPIGSLVALVNKSLPPGSPLPKARVSALKGIHRIREDGKTFERVFNLGAVRLARGVDNLDQYDDEEGAAGRKMPIFNNLVSTDGHTVNVSLVRPTAGPPLPDLELEDFTPELVNNHFRLWGIDPGMTHIFTATDGSSQYLKYSSAEWRAKSGFTRRLTAQRQRMTTQITDIQSRLPTTKTASVSTYATAVTSIMAHLNTLVSFYADVSWSNDRLLNYSGRRRLDEEVVKIFVDGGKKYAHNTASAPSTSSNASRFHKAAFTPSPAIPLLGMGDGSFAMTMRGTKPGMASRVKKVLKRAELEGKLVLVPVNESYTSKCLTNNQENKVLEDGSRLHSVLVCKDCNTVWNRDINACNNIFFLATEEIAKRSRPSVFCHPNHHPPQLPQTMG

SEQ ID NO: 3025 - protein, 988 aa, Absidia glauca
MEFTIAASTDPPEPSDRFYGMSGKQIILALKNEKARRLRAQTSNRQQFTCRHCGGNHRDARSTECPQNSRWTGSGARPLKRNLSAAEKTFDKKQKGEGSRQLRLQHRNEDASLCQPCSRKGLFDRNEVAPHHSTGSSLCPDHSATKGDVQNRIYGSQHTLATRKVSLDKILKLDGDNKDTFVAETRHMVERLRNIGIKTQMFVNYYFLRQLEYDNPPPRFTAPAHASDPAPAPAHASDPAPAHASDPAPAVAPATAPDSDPAPALSHLTDATAAPLALSDATAEVYTQHMLDSLDVSVRTPTPRDPALEEPDTTNPDLAGQIHDGNYHHIGDLVLDGTFFITGNLMATGKIRCNGSLTVFGYIRSGDALFVQGYVNAGTYLDCGGNLFVHNYKPLKNAVSYILNTVCVLKFRRPALAHQLGQNGGHDGAPQPDHFDRISWSPPITPKSLVTNICEHMSVLHQILRHYEQYNNVSSNELADQVSPWWAYQQLKDHDEFLNLTKKQRQQVSRQLRQHANGNDGGTILFTTTISDGLRNALLELVTDTRARIANSRRVKAGDDEINLDDCFVPTRSSLKPDHRLFNLLPHRSFGMPFVEVPIASLVALVNKSLPPGSPLPKARVSALKGIHRIREDGKTFERVFNLGAVRLARGVDNLDQYDDEEGAAGRKMPIFNNLVSTDGHTVNVSLVRPTAGPPLPDLELEDFTPELVNNHFRLWGIDPGMTHIFTATDGSSQYLKYSSAEWRAKSGFTRRLTAQRQRMTTQITDIQSRLPTTKTASVSTYATAVTSIMAHLNTLVSFYADVSWSNDRLLNYSGRRRLDEEVVKIFVDGGKKYAHNTASAPSTSSHASRFHKAAFTPSPAIPLLGMGDGSFAMTMRGTKPGMASRVKKVLKRAELEGKLVLVPVNESYTSKICSKCLTNNQENKVLEDGSRLHSVLVCKDCNTVWNRDINACNNIFFLATEEIAKRSRPSVFCHPNHPPPQSPQTMG

SEQ ID NO: 3026 - protein, 713 aa, Absidia glauca
MMDPLANSQNLRGMCPIMFSKEFFYGCMQLVLGSKVTNKNTKMPVRVMESVFSDYRQLFSSEDMFLEKMPPGKSYSASLASMALTMATSMKNIVVETFEKRCLLYLEHRLRAEIPDIDTKTVKKLRIYLYNELSGVEDPPWPTSLDKTEDLMVHLNRITLTEYLGPHPITPKSLVTNICEHMSVLHQILRNYEQYNNVSSNELADQVSPWWAYQQLKDHDEFLNLTKKQRQQVSRQLRQHANGNDGDTILFTTTISDGLRNALLELVTDTRARIANSRRVKAGDDEINLDDCFVPTRSSLKPDHRLFNLLPHRSLGMPFVEVPIDSLVALVNNSLPPGSPLPKARRSTLKGIHRIREDGKTFERVFNLGAVRLARGVDNLDQYDDEEGAAGRKMPIFNNLVSTDGHTVNVSLVRPTAGPPLPDLELEDFTPELVNNHFRLWGIDPGMTHIFTATDGSSQYLKYSSAEWRAKSGFTRRLTAQRQRMTTQITDIQSRLPTTKTASVSTYATAVTSIMAHLNTLVSFYADVSWSNDRLLNYSGRRRLDEEVVKIFVDGGKKYAHNTASAPSTSSHASRFHKAAFTPSPAIPLLGMGDGSFAMTMRGTKPGMASRVKKVLKRAELEGKLVLVPVNESYTSKICSKCLTNNQENKVLEDGSRLHSVLVCKDCNTVWNRDINACNNIFFLATEEIAKRSRPSVFCHPNHPPPQPPQTMG

SEQ ID NO: 3027 - protein, 551 aa, Absidia glauca
MEEVERSCRERKVEFDNKLVITSSGVVHLQVTYHAPTASLPPVAPAKKSKASKSAQAEQARQQLDNLKNQTNQLKHDLRLVKLSLSPTKKKIKAITDRIGKADDDMTRKQLIEERTEEKKQRDNTYRRMLEVYGQIDKINKDKATIYNTLYPKPTSSSSSAVPASSSSSSSSSAVPASSSSSSSSSAVPASSSSSSSSSVPASSPLSSPSCPFIPKETLYIGIDPGVKTMATAVQLDSYQAGAFLLLPNKLQHLSTDINTQQQKRLALAMKVPTKEIRASSIASRSRSNHSRKVMETKKKQATNDQPSIQAIESRLGGDQMQYTWDRGHSIQRRLETAKEHRPTLVSFYRESSWAKKQANGRKRFSEKAYAAAARSLFHPSSKHVVFFGDAGRGYGSTIKGHIRRSPDKLLAHLKERTTVIATNEYLSSKLCCFCNTRVLHPNKPSGKQNLGVVNCINPDCYSRTSGCSSRSRDKNAAINMITIGLHKEITGMHHPTFSPFQTTATAAAAAAAASTTAIETAFFGHITSWLERMGVPPSMKGTGDGRSLRT

SEQ ID NO: 3028 - protein, 606 aa, Absidia glauca
MNSGSRTGKQPYQEARPKPSNDLETILNRIVQNEDLGPSPITEKSLTSNICDYTGVLYRILKKYEALNVSSASISSEPTIDDLAENVSPWWAYGQLKDLDDFTSLGKRQRQKVSRQLRSQINNPVGPTPTFTIPLPEELRAVLSTLVVDTRKLIANSTRLKSGDQVPLNDCFAPRKSSQNAPHRLFQLLPMRSFRMPFITLDIHTLVSLYNNSITRTNDTDWAGVSNKQGIHRIREDSQTFSRVFNLSKVRLGRSDEAFDDIEDHPPETRRRPLFNNMVLTDGFTVNILLTRATSSTKLPDLELEDIAKPHVAQYFDLWGADPGLKDIFVATDGQQQYRKFSAAEYRCKTGQTRRKAERDRLHRQANITTIESAIPTTKTSSSSSLIAAIRYILEHLSPLLALYGDVMWAQHRLWNYSGAQKLDHELVQVFLNGGRKYDPSTAPHPTMQHRTSAHPTRFRQAPSTRKTRIPLIGMGDGSFGMTMRGTKPGLATHFKKVLKHAELQGKLLVVSVDEAYTSKVCSRCQVKEMENMKIGADSRLHSVLTCKGCNTVWNRDVNAANNIFSLAARAIDGLPRPAIFCRPPTTSVAATTTTTTTTTTTTLTM

SEQ ID NO: 3029 - protein, 393 aa, Absidia glauca
MAEEELVLMLERNVATRKSVPLIYDKATDLWNTNQGIKTKGDKPTTATKAEMKRVCDKYYFPMMKLWREYVAAHCREVFRETSQRPRPPTRHLPPALFLLIAFGLGSSTTSSTSASIFSNKIDSEDRASDSNKEGVIRYHGYPTKHIGLTIITLKPDNEGCFVFTTCIKELDDIARPHAANDFGLWGVDPGIKEIFVAIDGAHQYRLFSATEYRPKTGQTRTSSEQHQAHRRSNIWAIESAIPTTKISSSSIIVAARYILENLLALVDFHGAAIWPQHRLQTYTGRQKLDHEMVQIFLNGGMKYKPVTAQHPTLHHRPSTSTHPTRFHQVAYSQGTRIPLIGIRGGPFGMAMRGIKPGLVSKIKKILKRAEVQGIIHALAARSINGLPCPATF

SEQ ID NO: 3030 - protein, 531 aa, Absidia glauca
LSADPGSLVPVCIAIINIYDQYGAEEHEDPVRTYGFSILPVPSTHRRFVSLVPENVKKRTGYNGRISREDGPSFLHSYRIFYEVFQFRKLGIASFQDFLTRHEARLPMFYGYILTDGVSMNFVFARIPPPSRIELYAPDFNNSRDIIGRRMNTIGLDPGRRDIITTASGIGDATYATRQVSTIEYQAISGAAKRSQYLEIQKATTFITNDDGAVSTMENLKSTLPTLKTASTDEMRQSIQTHLSYLNHASTFYGIDQSRRRFKAYQGTQRTIATTANIVLNGGKKFDRNRRNKEQTKRNRKHRRNKTKKRRRNATRRQELIKAQYYAVAGQISQLRQQMDLVDGAIMALEQVNAFDTSGFLEGMRNQRISMDETHQQQVIEEQRLQYNYLFELGGSTIKGRKKDRHGSNHTTTTTVPLVAFGAGMMGTDQSHIHGYPVGSTNIIRRHLLERQRRALCVVAHTNEYLTSQICHVCETRMPNTVLDCREVYALKSCDHCAKIVNRDKNAASNMYRIMESGLAGLGRPLSLSRS

SEQ ID NO: 3031 - protein, 427 aa, Absidia glauca
MFYGYILTDGVSLNFVFSRLPRPTHYDLYAPDFSRHSIQGHFRIAGLDPGRRDIVTTAGGVGDGIYPTRQVSTAEYRSISGVTKRQQHLENLKNTTMITELDGNIVPFSTFESNLPTLKTTSPEVLQESIRVRLSTLNQSLDFYDIRQSRNRIKAFQGQQRAIATTTNIALNGGKKFRHDRPASKRNQKLRKNRKAKRRRLRQQRQQAIKDKYDLVVEQLVVVNRQIKLMDDALLNLARLNSLISVESVDLGILHANSSQAQRTWTETLRQQLTDQKIELQASYLAEVGGSKMKQWKKNRHGSNDTTATALPLVAFGAGMISTNHNHIHGYPVGSTNLIRNHMLQRQRRALCIVGHTNEYLTSQICSLCESRMPNAVIDGQQVYALKSCPTCHRTINRDKNASSNMYKIMATSVDGLGRPLSLSRTM

SEQ ID NO: 3032 - protein, 204 aa, Absidia glauca
MNGQISEHQRQLDLLDGAALNLQLINVFDTTELLQTIRRQKASLEALQQTNVDEKESLQQKYLDQVGGSTMKRWKKNRHGSRDTTITAIPLVAFGAGMLHTNHSHIHGYPVGSTNVVRRHMLERQRRALCLVGHTDEYLTSQICASCGERMNNAEINNQQIYALKHCQRCNKIMNHDKNAASNMFSIMQSSIIGDGRPPALSRS

SEQ ID NO: 3033 - protein, 496 aa, Ustilago bromivora
MASATLSNYARTERAINRGPDVYPFWDADLNTQLRDNRSPFVNRRPHLLKCPVSVRQAAIDEALAARKAILTTYWNKNPPRGPIPTLSHRSKAKDRQNGFSIFLSPSSSTIVFDEGAAVKAPRTVSSVDVHTFSRSAHEDGSLGAPKLKITPKTVKRCSGGQDNTLGCEEDTWVKICLRSQRGRHFLKDHCKAVSQSRTTKLKAGHEWGIQLDRYGDWCFLLSYNVPTSVVPQEQSLKQAIVVKSVDPGVRTPFAVYSSDGCMLDVGSQDNGIRLEQLRRCNDKIQSCRHRRRQPHHQQPLPPPQTTSDPQSSQQAQSQPQETRQRRPALPFALSSVQRRKLQKRSKKVHKKLQQLINDLHFRMANYLATSSDIVIMPRMEVRKMIQRKNGNLHRNTRRRLLGWGHCNFINRLLVKCHDVAHDPRYLHKRGRPTVLLIQPEAYTSKTCSQCGNLNQRLGASKQFRCPTCLYSADRDHNGAFNMLIKAIRRTPLSSM

SEQ ID NO: 3034 - protein, 938 aa, Sporisorium reilianum
MQRMRPRLDAWSSPNVLRFVAPRQSLRSGTPSRPTRLAPASRWPTAGRPRPLRPSTPSSRRDPPIRIRDGAGRSTPPRSSSGTPTRSQRTSVCSTPKTSATRWSLRLLPPVTMRPNTTTMRSNTTTSVPPTPRRLFSAERTTSAPRAPRTTSTSPVSPAGPASASSSARRGNADPPSDVIDLTLSSPPPSQHGRAEATTESDRQRAMATPRRHVDHISSSVAPSSSPSSSSGSTDFIVGSPTSSFDAASYSPSSTSCPSSVRMADSGSSWCSSPSSRNLSTSPGLASPTSLDAASASSTSSVRFVDIASSPLPLVAASSPPGQDVVLEASRGRSASSSATGSVYSSRPRSESSTSDMSVDSAPPSPPSPAHSVPSVIVISDDESDTDRPRVDAAAPDTARPAAPAPRPASSVKKPTVRNFRTRKYRIVVPPELREVLRDWRASARIVKNEAIRLANMAEQHSHPNLKPFRVMREIVNNGSDFVRERPHLAKCPTYIRRQVVIEAISARKSILTQHYNKPRSQRGPIPTISPSTARRDKRQGFSLALDPQSGSIDFEVAEARAPRRAANDTAPASTPGRHERRITSLTLKIAPRHVRRRGASLDVKICLRGQRQRQFLVDSCNVRGMGRGDKYQMPHEWLIQCDRYSRWYLVVYHKVASDADFEANKLARQDRGGETTLQGTYHVCRSSCRCLSPLLKTVPPLLFSSGSVRVKSCDPGVRTPYSIYTSEGETIDIGDDADKDRLHRLRLEMDELKSRRHKTRPLDRRPSRNISRKKRAKRKRFMLNSKERQDVLGKQLRVSEKIRNLVTDLHCRTANFLAVSSDVVVMPRMEVGRMISRKGGLAVSTKRQLKGWSHAKFIDRLATKCHDVQFDPKHQRPRETVLLVQPEAYTSKTCGRCGVLNERLGSNRVFECPNPGCGYVADRDHNGAFNMIVKAIR

SEQ ID NO: 3035 - protein, 796 aa, Ectocarpus sp.
MTRPISPEIYDAFKKCDAQWMQRRRKLDTSSVFYTITKCCTRERGVSHVLKMEAEEYSSQAVHLARKKLPIGAFKEVNRFLHRGPHEPRIFAIDGSKVHVHPSFIKAGYKTRTNDKPVPRPAKRPLVMLSSMVDVRTKSCIDFELTKHFDERRAAVSMLRSVRKSDTLLFDRGYYSKDLLRSVHDSGAFGVWRLRIMPCLILGVRVRLLKYFIKGKTYVCLTNDPSLSRRDIKTMYAWRWRVEESFKRLKSNLKLEKAHAKTPALYIQEVEARVLLDTITLRMQSSTKESSYLYTLDTHVTHILRNVKRVSGHTSYRGDLVYKKYATKLYDLAKKIITEFDGTPEYAEDLRQKAQSIDPGTDIDTILDFARNKRYEFVKNELGEEFTYAPPKDTAVLPICSTGSVFIYIDMKTLKSWGLLHSNDAWWYKDVLRPFSKEANIKCLANKENSRYASSEHGYLSSLLGSGPDKCPWMIGESFLTDGVQIKLLLVTLEHGRKAFPGSTQLNEAGYNKLPRADVQLESLLREGRGVYNISSLLDSPSIREDVVVMSADPGQAKVINVSSATARTWARQDPGVILNSSTCVFGDDYRRDTLASRSDKYETFRRKDQPYGVAIDRLRNEKKRTSCLATFIRYCKSWCANGAALLLETLQEARKFLRFDRFRATQKTLAKIADKYMGHVGDPCRVMLFGKASFRAQKGRASAPRKALIREMASRGVVLMVEEYNTSKKCPGCGEDTVEDKERRIRSCKNFKIGSPEESCRLHPLTPEFEMDRDDVGSTNIGMRGFGKLLGQEWF

SEQ ID NO: 3036 - protein, 599 aa, Ectocarpus sp.
MPKYIRDRLERMSRYTGSFRYIVGLFSNYVVIRRLEQGLQPPEVKKVFYDRCWAAINIRISGKNTRNDFSDLLDEFIDQSGFDTSLFPPKVPCRLQETVTREMEVSAKNSIVVHLEAKIKGFLRFRLMNDSQLAFQHLPAKDRSRIIVSLSNDCLEREMREDLDPGYVPHVLQVRDLLAQVYSTEPDVPVLKILKKKPHLFLELISMISRVAEEASDNNRALREETKTRSDEEKVRKAFYISERIKRGLVDRPKMCTVLPVWKLAPCFPYYSSSVVGSIFHKEGHDFSSVSRFISEHFDLRRVNRKGYKPSGFRSDGYQVQVTFMALVSKKPHVPGTTDLAKSGYQIAKKVVSLETQERGLFVLSQARKDSRKIVADRVLAYNLTVVDPGCASVVSVRSCPLEFCRCVGSVREKSTDWEMKGTEYSVKSGRTMLEGREKKRRSNDEYGRCFPRFSAVKKKTARKSSFLAYCRVAAETFKVMFAEKMKRARKRSRFHSSRLVQKTVDKLASNIAACPSDRKNIVLFGNGSFRAMKGHASAPRKKLVRAICSRVNVGMLDEFRTSKMCPGGCGGEMTDVQGDCKARLLIHTRGLFSDEYVD

SEQ ID NO: 3037 - protein, 509 aa, Tilletia controversa
MADNPPTGAAGPAPDRRAWTVSIQQESRYWPSARQSDQQDRWSPRQPRRVGPSWFSIREADLESQVRVPDVQARLHDATAFLQSVLPPPSHRQIRHNRLWTRDTQRNDGETWRTHKVRILPTTPQKEILRQALGTYRWTYNRALNILKTSTGRSPDLTALRQQCVNRSAFGGDDSMAWVFRTSYRIREQACIEAFEAFAEMRKRQGNINRLRFRKKRALFGSMRVRGDAWKGRTDITEEYGSGGVINGLKDSDGRPFGDIDAGEPITATIEGNITILWENGVWYLMVPFQTSRTPSDVATGPRICAIDPGIRTFATVYDPLRQRALQWGGKNNHQQLLKVARKVDSLLSRMAKPEVGHRKRYKMKIAANRYRRKLKSLATEIHRKLAHWLSKHYDTVLLPSLSAPQISARGQRRIGTPSVRQMSAWAHGKFRQRLMDKMHYLEVPEDYTSRTCSECGTDHPGLGGNSTFACPSEQCRMRADRDVNAAKNIFIKWLFDIRQNRTAVVKRR

SEQ ID NO: 3038 - protein, 748 aa, Tilletia controversa
MSQPSSGIILPAPLQNEGTSTTHKGTLRVAINPNPHRKSKILSRIRTWVLVAHKVQYIASWLALFILESEHRRPTKLKTLERAGAFTDFTDVLTDTSGTRGGSGLNLLYEECINYVNSGNVRKTIRSGTKRLACEEMVGIHAAAFHALWPFAPNDANIPSSVLVHLAAQWTSSVLNQIQEHLMKALAHIVNKVADIKKAQAHLHDANPGVAAASKNRLAAIRQYKAWLFEHTNNPAPPDVTDASIARVHGKMGPLLERLPCNDRTRLDQDVSRNPLRYLDFFLSVLRFFADDSVFSENRAPLAFPAAHRLVPKNIQLDAHALSQLSNSITYVAQQTETAAAAKHGKSKEQLKKEAWAFVFDLSKPLFGSTTRWILNASVRTDGVAISVHKRKNTKKLSKSQAKARRYKSARGSSAQKRANAKVLRARGPFPELETLNDEEIFGAIGRAVFIDPGKRNLLTAVGEHSKSKKNGAVVLRYSAPQRAAMLGTAMFTRRLTKRECQMDPQLPDVIASLSRLNRRAFSASAIASWVHSMYIHFDRLAKVYTDPFYRQVLLRKYSMQQVETARLVKEFAREFGPDAVLIFGTWTQTVIRKQPSTLRGSTLQETFSKAGFTVYSVDEYLTSSRCPFCLGKVIKAPNTVQVRRKDEFDHQVRPHGLLVCDSTTCKEACGGSARFMNRDVMAAMNFRIVFQKHVNDIESGTQRRRPAHLSRRRHDNLSQAHNEDHSDSEGNGDSDEEDGEEDEDEEE

SEQ ID NO: 3039 - protein, 968 aa, Tilletia controversa
MGILGGYNAFLHLLGCLGVRAPNEVLVDRLTRHSAEQLAELLGEGLFAILAERVGALGGLTDGSELRDDWVVLNVTGSHEDPDPAMHLFFKTEFVARLLQQTHGATPVTMSNSLEYTKKKDKKAHIVFKKDETVPRDDVYKSSTVLVPTGEAPGSLSRPPARRSEARYRKASHDRQTDPTGRTELRPRSSRSLNTPRDPEAGAEVARRSVGGCCFFGRDQASAQQSQSLMDVEPGQLERRENTGATAAHKAWLGPTLAGPRRKIRKTRFKIHQCVTTASSADHIASWLVAFVIEKEWRHPSIRQDVRSNISSFRSSMELLSHTKGTRNSTAIGFLFEEAMRFALSGEPRTTRGGQGSGPRRECQQLIALHGPTFKAIFDFPTSKIQLPTEVIVDIGEQWATAYQNQIQEHLFTTILHIVNVLTAAKDVRAGARFGSSQQKRAAQRRLKAIATYKKWLANDPDGAIRINDNAIRRTHNVLGPIIAAHGSPPSFIQHRSRRSQVNENPLIFLPLFLATLEVLAAEPMLKSARPRLSLPVRRSFIPKHIRLDAGALSTLSPSLQYDPSNNSNKSQDEREQERHSIFRYHFDLTKRPFASEDEDGNTRDVRWTLGSSIVTDGYAISVIKARSGAAPKGRAERSKSSRGDAAARRRQGQDASSFPDLTKMTDEEVLHTQGRAIFVDPGKQNIAFALPDKDDRRVTFRYTSAMRRRGLGTVILRRRLVQLERNLPPDLKTALKIYRENPLPSSRVFSEEGIAAWLRVLNTHFRSMTAIYSKPLFRTQRMLSYSRNQREWSRVIKTIVDKFGADAQVFLGNWGASNIKGSPPSPSRKSFQNELFKAGFDVYTIDEFRTSSYCPDCSEKVYKSKKTTHPNPALKKLGWIRQESPRGLLICTSETCRARCKGGDRYFDRDLLGAANMRLVYRTRIAAINGSSESARPPHLSRQRRNEDNEEAIASSDESSGSGSSTR

SEQ ID NO: 3040 - protein, 453 aa, Tilletia controversa
MTAEERASVDQNRQRLIELPHNFQREQVLKVAANARAAQTNLERGWTKSYRLDSADEDNKSVLFFTSDAIDKRGALFPRILKHIDSNLYVRDRMLAGPGERRRKRSDWVKLLTGASRSFSIHRTGRKWYLLLSHDAWTGPYTEEGKRQGLDKGWNSRNTAVFEPTKRAGNCIALDPGARDLLTGYDAQRQQFYTYLTGFNEHIERAHASIASAQSKLDKLKNETGPTVDTDTGRRRRRARRRVNKQRGGKKKKGRSSSAEQRAARKAAKKSHPHFVRPNERSILRAHERLRVHITQAQNCTVNALVSNYDLVVLPEFMTARMIKRRRRRQGMPYSNVPQREAAVQGDEANEEPAAKFVLAKRSRATLARFGHRQFRERLVAKAQADPNHQKDVIVTSEEYTTKQHPFQRGLHSKIGGNKTWHYCHLRGKRDNVGAFNILLRALTKDEVRLSSQ

SEQ ID NO: 3041 - protein, 310 aa, Tilletia controversa
MGRAVFIDPGKRNLLTAVGEHSKSKKHGAIVLRYSAAQRAASLETAMFKKRLTKRELRMDPSLSEVIASLSRLNSRAFSASAISAWLQSMASHFDRLANVYGDLFYRQVLLRKYSMQQIETTKLIKNFSQKFGSDAILIFGTWNQTSIRKQPSTLKASTLQKAFSKAGFTVYSVDEYLTSSCCPFCFGRVTSSSNTIQLRRKVGFDHLVRPHGLLVCNRKTCKDECGGSGRFMDRDVMAAMNFRLIFQHHANAIQAGTERGRPAHLSRSKHPSLSQAHDEVNPDFDEEDDEHGEEEEEEEEEEEEEEEEE

SEQ ID NO: 3042 - protein, 262 aa, Tilletia controversa
MRRRGLGTVILRRRLVQLEQNLPPDLKTALKIYRENPLPSSRVFSEEGIAAWLRVLNTHFRLMTAIYSKPLFRTQRMLSYSRNQREWSRVIKTIVDKFGADAQVFVGNWGASNVKGSPPSPSRKSFQNELFKAGFDVYTIDEFRTSSYCPDCSEKVYKSKKTTHPNPSLKKLGWIRQESPRGLLICTSETCRARCKGGDRYFDRDLLGAANMRLVYRTRIAAINGSSESARPPHLSRQRRNEDNEEVIASSDESSGSGSSTR

SEQ ID NO: 3043 - protein, 739 aa, Tilletia controversa
MDVEPGQLKRRENTGATAAHKAWLGPTLAGPRRKIRKTRFKIHQCVTTASSADHIASWLVAFVIEKEWRHPSIRQDVRSNISSFRSSMELLSHTKGTRNSTAIGFLFEEAMRFALSGESRTTRGGQGSGPRRECQQLIALHGPTFKAIFDFPTSKIQLPTEVIVDIGEQWATAYQNQIQEHLFNTILHIVNVFTAAKDVRAAARFGSSQQKRAAQRRLKAIATYKKWLANDPDGAIRINDNAIRRTHNVLGPIIAAHGSPLSFIQHRSRRSQVNEKPLIFLPLFLATLEVLAAEPMLKSARPRLSLPVRRSFIPKHIRLDAGALSTLSPSLQYDPRDNSNKSQDEREQERHSIFRYHFDLTKRPFASEDEDGNTRDVRWTLGSSIATDGYAISVIKARSGAAPKGRAERSKSSRGDAAARRRQGQDASSFPDLTKMTDEEVLHTQGRAIFVDPGKQNIAFALPDKDDRRVTFRYTSAMRRRGLGTAILRRRLVQLERNLPPDLKTALKIYRENPLPSSRVFSEEGIAAWLRVLNTHFRSMTAIYSKPLFRTQRMLSYSRNQREWSRVIKTIVDKFGADAQVFVGNWGASNIKGSPPSPSRKSFQNELFKAGFDVYTIDEFRTSSYCPDCSEKVYKSKKTTHPNPALKKLGWIRQESPRGLLICTSETCRARCKGGDRYFDRDLLGAANMRLVYRTRIAAINGSSESARPPHLSRQRRNEDNEEVIASSDESSGSGSSTR

SEQ ID NO: 3044 - protein, 846 aa, Tilletia controversa
MLNADHDDGDARHPSPAPPPRPPWLDPDLPPRLGPADYGHYQSNPAPPSPPPPTPQDLAPPPLPWLDPTLAERDRPPPPPGLELQPLQPPQPPTSSWESIARLPAKDKQDALIQALRSSQKDDWKAKVNNLLDFATSSLVEEVRVAILLAAAPIFAPWFTDESSRLSRRLWGITGESWTQESARLSDAFSAGKDREWATTVHQPRANREHSIISASSLRFSRQQLISRNDMGQNVSDAREGASFWECRTWATQRLWDAFVARGLNTSSLTKPKGSKRDTGKRKMEDGEGSSDSKKVRKLSYDADSKAAFERRAAKDKKRAPPKRKEPECLRALRLRLYPSAELGAKLREWESLAASLRQMVRARLQKAKDVGEKTDAFVLADQTCLSQTKWNKMTAEERASVDQNRQRLIELPHNFQRELVLKVAANARAAQTNLERGSTKSYRLDSADEDDKSVLFFTSEAIDKRGALFPRILKHIDSNLYVRDRMLAGPGERRRKRSDWVKLLTGASRSFSIHRTGRKWYLLLSHDAWTGPYTEEGKRQGLDKRWNSRNKAVFEPTKRAGNCIALDPGARDLLTGYDAQRQQFYTYLTGFNEHIERAHASIASAQSKLDKLKNETGPTVDTDTGRRRRRARRRVNKQRGGKKKKGRSSSAEQRAARKAAKKSHPHFVRPNERSILRAHERLRVHITQAQNCTVNALVSNYDLVVLPDFMTARMIKRRRRRQGMPYSNVPQREAAVQGDEANEEPAAKFVLAKRSRATLARFGHRQFRERLVAKAQADPNHQKDVLVTSEEYTTKQHPFQRGLHSKIGGSKTWHYCHLRGKRDNVGAFNILLRALTKDEVRLSSQ

SEQ ID NO: 3045 - protein, 249 aa, Chlamydomonas reinhardtii
MSGLERLQPNRPQLAPALQAYVGGIPTAATASAARFEERLRYLFASGAAGQAAGQAAGQEAGQVEAAGPAEAGPPGAVHVLWHYHFSAFRRKRWAAFIQRDRALHRVAKQLTGGRPKEEVVVGWGSWAFQGGKGGSPISVRGGRAPTGRLIKLLRERYAKHVFIIDEYKTSKTCYNCGCQEMAIKRLGGLKEGQRPWSVKVCNDCLTTWNRDVSAANVIRVLLLLKLMGFERPTKLQRPPWPPAAAGPG

SEQ ID NO: 3046 - protein, 205 aa, Chlamydomonas reinhardtii
MCVPALQWGGRAGGGAGGGGGAGGGGGAGPRGTVHVLWHYHFSAFCRKRWAAFIQRDHALHQVAKQLTGGRPKEEVVVGWGLWAFQGGKGGSPISVRGGRAPTGRLIKLLRERYTKHVFIINEYKTSKTCYNCGCQEMAIKRLGGLKEGQRPWSVKVCNDCLTTWNRDVSATNVIRVLLLLKLMGFERPTKLQRPPWPPPAVWPG

SEQ ID NO: 3047 - protein, 222 aa, Chlamydomonas reinhardtii
MRAEHELAAVKAETADFEAYRNYLRTYLSVLRPLLAHRTARGYRNMRFLRKVGRDKLVNTISRSIAPHKPDGSGMIAVGMGDWQGPGNTPIKRRTSGPLELVRLHLKHRKDVVLVPVKEPGSSCLCHNCHNRLTNMRANTTRYNKEGEKVTKMSKVHKVLYCRAPATKAGNNLKNSDSGKPRCGTTWNRDVNAAKNMLMLLMCILQGEPRPKAFRLAHAKNG

SEQ ID NO: 3048 - protein, 290 aa, Chlamydomonas reinhardtii
MLWVRVSNVCCGRSFPHACALNCQLPLARLSTSANCTCASLQSAALQRRRPTAATASAARFEERLRYLFASGAAGQAAGQAAGQAAGQAAGQAAGQAAGQAAGQVEAAGPAEAGPRGAVHVLWHYHFSAFRRKRWAAFIQRDRALHRVAKQLTGGRPKEEVVVGWGSWAFQGGKGGSPISVRGGRAPTGRLIKLLRERYAKHVFIIDEYKTSKTCYNCGCQEMAIKRLGGLKEGQRPWSVKVCNDCLTTWNRDVSAANVIRVLLLLKLMGFERPTKLQRPPWPPAEAGPG

SEQ ID NO: 3049 - protein, 225 aa, Chlamydomonas reinhardtii
MAPKRRRDEAEKAEEEKGQAAGQAAGQAAGQAAGQAAGQAEAAGPAEAGPRGAVHVLWHYHFSAFRRKRWAAFIQRDRALHRVAKQLTGGRPKEEVVVGWGSWAFQGGKGGSPISVRGGRAPTGRLIKLLRERYAKHVFIIDEYKTSKTCYNCGCQEMAIKRLGGLKEGQRPWSVKVCNDCLTTWNRDVSAANVIRVLLLLKLMGFERPTKLQRPPWPPPAAGPG

SEQ ID NO: 3050 - protein, 329 aa, Chlamydomonas reinhardtii
MARLLGLPSPHCSDGGSGGGDDNNGGNSGGSSDSSGGVGGGRNGGGGARGAGGGRARGRWLWQQARLEEQPALKRCQAGIPSARVASAADHELRIRYLYSGGRVDAAAAAGSAPAPVQQYGLWPLRRFYRQWGQRLWRLTVHARTQKVLEHTARPKEEVIIGWGNATTGHGGCISRLGRGPNRALLRLLVDKYAHLVVYLDEFYTSRDIGRDVNSATNILHALVEMLLGHKRPSSLQTGGGGGRLVAAAAAAAAAAAAAAAAAAAAAAAAAAAAAAAAAAAAAAAQRQRRWRRRQQRGRVRASCSGGGGKGHVEEESAAPPKKRRKRAG

SEQ ID NO: 3051 - protein, 937 aa, Chlamydomonas reinhardtii
MAPKRRRDEAEKAEEEKDHTTSTKCGLAGLLPEKIEADGEAVTREESLAAFDFLVAALTRLRFEALCLLGLVAVRMCEDARREGQGLQPHCATCRRLRKTELVEDDMYAAICAVSVCDLTEQGRKRGRPSKRDQHPEDDLFRHVCEEHFPRDEEAAGARVNRSGLTPFLPPLSKGVFTNVKNHYAANFAAWLARSFRCRIDDELRELRTPATKKLDKLAWSMAHAVLYDGELEQPRWWVGWAQGAAAQAAGAAAAAAAHGAGPAGGAAAAQAAGAAAAAAAHGAGPAGGAAAAQAAGAAAAAAAHGAGPAGGAAAAQAWTALVDYVNAQRASKRAAELLLREVKGTQATYKKASTRHMEWAAEILAGLEARRDQLGAQVQQLTQAQPLTREDTQRLASLRRELHRARPFTLTPSPSFAPIYVPLDNTSMARLPGLLPTLARRHGEVFAGAGAGAVAPSSFVQAAFGGGGMQSSATLNAVGWGLFQLGGVTSRNAPFANYITTDGVACSVAREAHNKPLANLKPATAPADAGELCTLEEMKATQIIGVDPCGGRNWFMAARSPLYQPGPWAWEGVGPAQRYLLELHDKQLDEELFPGQLPPEPRRRRKGGGRKGGGRTGGHRRKQSKHWQPRARTARRRRQKRGRFHMSMGHWRHMSGLERLQPNRPQLAPALQAYIGGIPTAATASAARFEERLRYLFASGVAGQAAGQAAGQAAGQAAGQAAGQAAGQAAGQAAGQAAGQAAGQAAGQAAGQAAGQAEAGPRGAVHVLWHYHFSAFRRKRWAAFIQRDRALHRVAKQLTGGRPKEEVVVGWGSWAFQGGKGGSPISVRGGRAPTGRLIKLLRERYAKHVFIIDEYKTSKTCYNCGCQEMAIKRLGGLKEGQRPWSVKVCNDCLTTWNRDVSAANVIRVLLLLKLMGFERPIKLQRPPWPPAAAGPG

SEQ ID NO: 3052 - protein, 746 aa, Chlamydomonas reinhardtii
MCDLTEQGRKRGWPSKRDQHPEDDLFRHVCEEHFPRDEEAAGARVNRSGLTPFLPPLSKGMFTNVNNHYGANFAAWLARSFRCRIDDELRELRTPATEKLDKLAWSMAHAVLYDGELEQPRWWVGWAQGAAAQAAGGAAAAAAQGAGPAGGAAAAQAAGAAAAAAAQGAGPAGGAAAAQAWTALVDYVNAQRASKRAAELLLREVKGAQATYKKASTRHMEWAAEILAGLEARRDQLGAQVQQLTQAQPLTREDTQRLASLRRELHRARPFTLTPSPSFAPIYVPLDNTSMARLPGLLPTLARRHGEVFAGAGAGAVAPSSFVQAAFGGGGMQSSATLNAVGWGLFQLGGVTSRNAPFANYITTDGVACSVAREAHNKPLANLKPATAPADAEELCTLEEMKATQIIGVDPCGGGNWFMAARSPLYQPGPWAWEGVREGVSPAQRSLLELHDKQLDEELFPGQLPPEPRRRRKGVRREGGGRKGGGRKGGHRRKQSKHWQPRAYIGGIPMAATASAARFEERLRYLFASGAAGQAAGQEAGQAAGQAEAAGQAAGQAEAAGPAEAGPRGAVHVLWHYHFSAFRRKRWAAFIQRDRALHRVAKQLTGGRPKEQVVVGWGSWAFQGGKGGSPISVRGGRALTGRLIKLLRERYAKHVFIVDEYKTSKTCYNCGCQEMAIKRLGGLKEGQRPWSVKVCNDCLTTWNRDVSAANVIRAWAPPAEADGLRAADQAAAAAMAAGNGGAGLRA

SEQ ID NO: 3053 - protein, 917 aa, Chlamydomonas reinhardtii
MAPKRRRDEAEKAEDEKDHTTSTKCGLAGLLSEKIEADGVAVTREESLAAVDFLVAALTRLRFEALCLLGLVAVRMCEDARREGQGLQPHCATCRRLRKTELVEDDTTRHAAICAVSVCDLTEQGRKRGRPSKRDQHPEDDLFRHVCEEHFPRDEEAAGARVNRSGLTPFLPPLSKGVFTNVKNHYAANFAAWLARSFRCRIDDELREVGQAEVGQAEVGQAELRTPATKKLDKLAWSMAHAVLYDGELEQPRWWVGWAQGAAAQAAGAAAAAAAQGAGPAGGAAAAQAAGAAAAAAAHGAGPAGGAAAAQAWTALVDYVNAQRASKRAAELLLREVKGTQATYKKASTRHMEWAAEILAGLEARRDQLGAQVQQLTQAQPLTREDTQRLASLRRELHRARPFTLTPSPSFAPIYVPLDNTSMARLPGLLPTLARRHGEVFAGAGAGAVAPSSFVQAAFGGGGMQSSATLNAVGWGLFQLGGVTSRNAPFANYITTDGVACSVAREAHNKPLANLKPATAPADAGELCTLEEMKATQIIGVDPCGGGNWFMAARSPLYQPGPWAWEGVGEGVGPAQRYLLELHDKQLDEELFPGQLPPEPRRRRKGVRRKGGGRKGGHRRKQSKHWQPRARTARRRRQKRGRFHMSMGHWRHMSGLERLQPNRPQLAPALQAYIGGIPTAATASAARFEERLRYLFASGAAGQAAGQAAGQAAGQAAGQAAGQAAGQAEAGQAEAGQAEAGPRGAVHVLWHYHFSAFRRKRWAAFIQRDRALHRVAKQLTGGRPKEEVVVGWGSWAFQGGKGGSPISVRGGRAPTGRLIKLLRKRYAKHVFIIDEYKTSKTCYNCGCQEMAIKRLGGLKEGQRPWSVKVCNDCLTTWNRDVSAANVIRVLLLLKLMGFERPTKLQRPPWPPAAAGPG

SEQ ID NO: 3054 - protein, 488 aa, Chlamydomonas reinhardtii
MARLPGLLPTLARRHGEVFAGAGAGAVAPSSFVQAAFGGGGMQSSATLNAVGWGLFQLGGVTSRNAPFANYITTDGVACSVAREAHNKPLATATAPADAEELCTLEEMKATQIIGVDPCGGGNWFMAARSPPYQPGPWAWEGVREGVREGVSPAQRSLLELHDKQLDEELFPGQLPPEPRRRRKGGGRKGGGRKGGHRRKQSKHWQPRARTARRRRQKRGRFHMSMGHWRHMSGLERLQPNRPQLAPALQAYVGGIPTAATASAARFEERLRYLFVSGAAGQAAGQEAGQAAGQEAGQAAGQAEAAGPAEAGPRGAVHVLWHYHFSAFRRKRWAAFIQRDRALHRVAKQLTGGRPKEEVVVGWGSWAFQGGKGGSPISVRGGRAPTGRLIKLLRERYAKHVFIIDEYKTSKTCYNCGCQEMAIKRLGGLKEGQRPWSVKVCNDCLTTWNRDVSAANVIRVLLLLKLMGFERPTKLQRPPWPPPAAGPG

SEQ ID NO: 3055 - protein, 213 aa, Chlamydomonas reinhardtii
MPRVQVLEHTAQQLAGGRPKEEVIVGWGNANTGYGGCISRLGRGPNRALPRLLVDKYAHLVVYMDEFYTSQVCAKCGRRLLGDGQRCLQAVVPWGGGSRAHQVQECTHCGTVWGRDVKSATNIRHALVEMLLGHKRPASLQTGGGGGGSGGGGGGGSGSSGGGGGGGGGGGGGGGGGGSSGGACAHLGSGRGGKGHVEEESAAPPKKRRKRAG

SEQ ID NO: 3056 - protein, 226 aa, Chlamydomonas reinhardtii
MAGQAAGQAAGQAAGQAAGQEAGQEAGQAAGQEAGQAAGQAEAAGPAEAGPRGAVHVLWHYHFSAFRRKRWAAFIQRDRALHRVAKQLTGGRPKEEVVVGWGSWAFQGGKGGSPISVRGGRAPTGRLIKLLRERYAKHVFIIDEYKTSKTCYNCGCQEMAIKRLGGLKEGQRPWSVKVCNDCLTTWNRDVSAAKVIRVLLLLKLMGFERPTKLQRPPWPPPAAGPG

SEQ ID NO: 3057 - protein, 916 aa, Chlamydomonas reinhardtii
MAPKRRREAEKAEEEKDDTTSTKCGLAGLLSEKIEADGVAVTREESLAAVDFLVAALTRLRFEALCLLGLVAVRMCEDARREGQGLQPHCATCRRLRKTELVEDDMYAAICAVSVCDLTEQGRKRGRPSKRDQHPEDDLFRHVCEEHFPRDEEAAGARVNRSGLTPFLPPLSKGVFTNVKNHYAANFAAWLARSFRCRIDDELRELRTPATKKLDKLAWSMAHAVLYDGELEQPRWWVGWAQGAAAQAAGAAAAAAAHGAGPAGGAAAAQAAGAAAAAAAHGAGPAGGAAAAQAAGAAAAAAAQGAGPAGGAAAAQAWTALVDYVNAQRASKRAAELLLREVKGTQATYKKASTRHMEWAAEILAGLEARRDQLGAQVQQLTQAQPLTREDTQRLASLRRELHRARPFTLTPSPSFAPIYVPLDNTSMARLPGLLPTLARRHGEVFAGAGAGAVAPSSFVQAAFGGGGMQSSATLNAVGWGLFQLGGVTSRNAPFANYITTDGVACSVAREAHNKPLANLKPATAPADAGELCTLEEMKATQIIGVDPCGGGNWFMAARSPLYQPGPWAWEGVGEGVGPAQRYLLELHDKQLDEELFPGQLPPEPRRRRKGVRRKGGGRKGGHRRKQSKHWQPRARTARRRRQKRGRFLMSMGHWRHMSGLERLQPNRPQLAPALQAYIGGIPTAATASAARFEERLRYLFASGAAGQAAGQAAGQAAGQAAGQAAGQAAGQAAGQAEAGPRGAVHVLWHYHFSAFRRKRWAAFIQRDRALHRVAKQLTGGRPKEEVVVGWGSWAFQGGKGGSPISVRGGRAPTGRLIKLLRERYAKHVFIIDEYKTSKTCYNCGCQEMAIKRLGGLKEGQRPWSVKVCNDCLTTWNRDVSAANVIRVLLLLKLMGFERPTKLQRPPWPPPAAGPG

SEQ ID NO: 3058 - protein, 257 aa, Chlamydomonas reinhardtii
MSGLERLQPNRPQLAPALQAYVGGIPTAATASAARFEERLRYLFASGAAGQEAGQAAGQEAGQAAGQAEAAGQAEAGPRGAVHVLWHYHFSAFRRKRWAAFIQRDRALHRVAKQLTGGRPKEEVVVGWGSWAFQGGKGGSPISVRGGRAPTGRLIKLLRERYAKHVFIIDEYKTSKVDLLQLRVSGDGHQAAWGAEGGAAALVGQSLQRLLDDLEPRLSAANVIRVLLLLKLMGFERPTKLQRPPWPPQCSYLPSTL

SEQ ID NO: 3059 - protein, 645 aa, Chlamydomonas reinhardtii
MVETRAQAQGKPLKKPGAYNTDAYYQEKDEGYGDVGVDQEPDAGAIDNPSDPDFKVSAAEVAGATEEATRDPEGLDMSQLKEEVADLQRPADTGVEELDARGEPVPIVEAGAPGGGPSIEEQRASKRAAELLLREVKGTQATYKKASTRHMEWAAEILAGLEARRDQLGAQVQQLTQAQPLTREDTQRLASLRRELHRARPFTLTPSPSFAPIYVPLDNTSMARLPGLLPTLARRHGEVFAGAGAGAVAPSSFVQAAFGGGGMQSSATLNAVGWGLFQLGGVTSRNAPFANYITTDGVACSVAREAHNKPLANLKPATAPADAGELCTLEEMKATQIIGVDPCGGGNWFMAARSPLYQPGPWAWEGVGEGVGPAQRYLLELHDKQLDEELFPGQLPPEPRRRRKGGGRKGGGRTGGHRRKQSKHWQPRARTARRRRQKRGRFHMSMGHWRHMSGLERLQPNRPQLAPALQAYIGGIPTAATASAARFEERLRYLFASGAAGQAAGQAAGQAAGQAAGQAAGQAAGQGGKGGSPISVRGGRAPTGRLIKLLRERYAKHVFIIDEYKTSKTCYNCGCQEMAIKRLGGLKEGQRPWSVKVCNDCLTTWNRDVSAANVIRVLLLLKLMGFERPIKLQRPPWPPAAAGPG

SEQ ID NO: 3060 - protein, 366 aa, Chlamydomonas reinhardtii
MAAAAAAAAATAATASAGAETEVAAQGWRGTRQHTHQRAATERRRQQRACFTRLSGAGYRHYTGQTGRRLWLQARLKEQPALKRCQAGIPSARVASAADHELRIRYLYSGGGVDAAAAAGSAPAPVQQYGLWHLLRFYRQWGQRRWRLTVHVRTQKVLEHKTQQLAGGRPKEEVIVGWGNANTGYGGCISRSGRGPNRALLRLLVDKYAHLVVYVDEFYTSQVCAKCGRRLLGDGQRCLQAVVPWGAYVLTKSKCATTAGRCGDVTSTPQPTSGTRWWRCCWGTSDLHRCRLAAAAAVAAAAAAAAAAGVRAHILVAEGAGKATWRRRAQRRPRSGASAQAEEPAGVQVAVRGGAGRACVAACVAA

SEQ ID NO: 3061 - protein, 328 aa, Chlamydomonas reinhardtii
MRRWVAALLPEELVDRLLQSGAITILERDMDGDLVEFVRVEGPADRLQRQRQQYRANRKQQKGRKRRQWRQHGSRWKHAPGRRRRPNGRQQAATRARRKQRSRFYSCSGAGHRQQCGYNDRRRWQEWQLNANLALTTWQSNIPSTRVLTVQEHDLRLRWLFTGPGAAPPGPGPGGGGGGGGGGGGLPLPPPLPQGLRLRVVDILVHYFNPQQRKKRLEVYIRKQRVMHREARNLTGGRPKQQVLVGWGNGSAGWNSRISRKGQPPRKEFVRLLRDHYAAHVVIVNEFRTSRVCFKCGHMALQARLKPGMRRAHGVQVCNHCGTGGTAM

SEQ ID NO: 3062 - protein, 1123 aa, Chlamydomonas reinhardtii
MTSPNIHFQFLLIPSSDTHGRPAIGEKFHFEQARAAQERFDWGRGPRLPPRRVLEACGEAPLSRDCSQGTIKTTFKSIADPPGLEQLLHAQHPTAAAADVQRLASQHRDSAVLLQKALQVLVWVMTAVRQEAFDLLLLVVALCAEDTRLQAAGQPPNPERFRGQSSIAEGFRRQRQRACGSDQPHHVTNDAAQRALRGFPDLNQRVMEDCITAVTTSEHHQEVQHSDQRAGRDPHSHNLAQYVYGHVFQVHRSEDRVGPPRSVTGLTSVVHQLARQMETNVGVHLATNLFRWLKTRCRVQLHRTLHPEAAAAAPDAGAGGGGGGGGAYGGDGMGVDQAAAAAPDAGAGGGAGVELPRQQQTIVLALAAAIARDEPLCAYPDAAAALQSQPDVLQELELWVQQEQDRWRPRGLLVPGCSFKRHSLPHGERYLAWAAEVLHEIEQHRSQLRARGVPEAEVARHFPVFGLLPEPSYQQVHIGLGQEAVKELLVHRDHFASEHHLIPPAAVPTGLRRAARSGGQRQRRRRGRGGSGGGSTAAGSGGSAAGSGGSGGGAAGSGGSGGGAAGSGGGSGGGGADQPLRWGPKGGKFRNIPACFKEWVADHGLDPGDVWAAAGLRLGISQHEHRGSKFDGFVTTDAFDMCLTMRRRYHSSWDEAKEAGKQVRVSEEELLRLSLRGVDPGCSPIYWTCAMRWPWLPAWVVALLGVDLVLRLPEVRNGSCPVRWPDDLTKDQQAAAEAQLAAHLTASKAAAARDTIVTRTQAADRATAAASTAAARWAKEVQAAPQQGRPELVPPRPLALMVAQSAEHSKAAAVAAADAAAREAADAANGVAREATMSALVQGFRRYVEVMAAAHCAMLQLHRCLQQQQQQQQLAARVWDIAFTHCSGAEHRTNCGYAQHQRWQQWRVKADPALCAWQSSLPTARTVDVQNVLGRLDYKYGGSTGAGGQQGEAVVRELGFVDLLARYAAPAWRQKRLQVYCQKQRVLCREAVRLMGGEPEVTQQNGVVGWGGGSAGFHGTVSRADQPPRKGFVRLLRERFARHVIMINEYRTSMVCANCGRLSLRRKEPPQGGADFRVLVCNDCHTTWDRDENAALNMRLLLVLQLLGRDRPAVFCRPEGGVD

SEQ ID NO: 3063 - protein, 508 aa, Chlamydomonas reinhardtii
MQSSATLNAVGWGLFQLGGVTSRNAPFANYITTDGVACSVAREAHNKPLANLKPATAPADAGELCTLEEMKATQIIGVDPCGGGNWFMAARSPLYQPGPWAWEGVGEGVGPAQRYLLELHDKQLDEELFPGQLPPEPRRRRKGGGRKGGGRTGGHRRKQSKHWQPRARTARRRRQKRGRFHMSMGHWRHMSGLERLQPNRPQLAPALQAYIGGIPTAATASAARFEERLRYLFASGAAGQAAGQAAGQAAGQAAGQAAGQAAGQAAGQAAGQAAGQAAGQAAGQAAGQAAGQAAGQAAGQAAGQAAGQAAGQAAGQAAGQAAGQAAGQAEAGPRGAVHVLWHYHFSAFRRKRWAAFIQRDRALHRVAKQLTGGRPKEEVVVGWGSWAFQGGKGGSPISVRGGRAPTGRLIKLLRERYAKHVFIIDEYKTSKTCYNCGCQEMAIKRLGGLKEGQRPWSVKVCNDCLTTWNRDVSAANVIRVLLLLKLMGFERPIKLQRPPWPPAAAGPG

SEQ ID NO: 3064 - protein, 257 aa, Chlamydomonas reinhardtii
MSGLERLQPNRPQLAPALQACVGGIPTAATASAARFEERLRYLFVSGAAGQAAGQEVGQAAGQEAGQAAGQAEAAGPAEAGSRGAVHVLWHYHFSAFRRKRWAAFIQRDRALHRVAKQLTGGRPKEEVVVGWGSWAFQGGKGGSPISVRGGRAPTGRLIKLLRERYAKHVFIIDEYKTSKTCYNCGCQEMAIKRLGGLKEGQSPWSVKVCNDCLTTWNRDVSAANVIRVLLLLKLMGFERPTKLQRPPWPPPAAGPG

SEQ ID NO: 3065 - protein, 253 aa, Chlamydomonas reinhardtii
MSGLERLQPNRPQLAPALQAYIGGIPTAATASAARFEERLRYLFASGAAGQAAGQAAGQAAGQAARQAEAAGPAEPGPRGAVHVLWHYHFSAFRRKRWAAFIQRDCALHRVAKQLTGGRPKEEVVVGWGSWAFQGGKGGSPISVRGGRAPTGRLIKLLRERYAKHVFIIDEYKTSKTCYNCGCQEMAIKRLGGLKEGQRPWSVKVCNDCLTTWNRDVSAANVIRVLLLLKLMGFERPTKLQRPPWPPPAAGPG

SEQ ID NO: 3066 - protein, 574 aa, Chlamydomonas reinhardtii
MDGDLVEFVRVEGPADRLQRQLQQYRADRKQQKQRKRRQWRQHGSRWKHAPGGRRRPNGRQQAATRARRKQRSRFYSCSGAGHRQQCGYNDRRRWQEWQLNANPALATWQSNISSARVLAVQEHDLRLRWLFTGPGAAPPGPGPGGGGGGGGGGAYGGGLPLPPPLPQGPRLGVVDILVHYFNPQQRKKRLEVYIRKQRVMHREARNLTGGRPKQQVVVGWGNGRAGWNSLISRKGQPPRKEFVRLLCDHYAAHIVIVNEFRMSRVCFECGQMALQARLKPGMRRAHGVQVCNHCGTTWKRDVNSACNMLLLLVLQLLHGDDGWPKVFGGRPHADADADGGDQQQQQQQQQQQQRAMTRTAHPLRRRLWVSEKRMAQEGYDADGTSIAATAMGEKRMAQEGYDADGKSIAATAMGEKRMAQEGYDADGTSIAATAMGEKRMAQEGYDADGTSIAATAMGEKRMAQEGYDADGKSIAATAMGAAVMAVDGYDEAGKSIAARSAGVARAEKAGMFIWAPVWPKLHEWVKAHPSSTVDWTAAEKHLRREFPDIPVGAFERGGAGRTKYSKWKRLYDP

SEQ ID NO: 3067 - protein, 320 aa, Chlamydomonas reinhardtii
MAAAAAAAAATAATASAGAETEVAAQGGREVEGQETGRRLWLQARLKEQPALKRCQAGIPSARVASAADHELRIRYLYGGGVDAAAAAGSAPAPVQQYGLWHLLRFYRQWGQRRWRLTVHVRTQKVLEHTAQQLAGGRPKEEVIGGWGNANTGYGGCISRLGRGPNRALLRLLVDKYAHLVVYVDEFYTSQVCAKCGRRLLGNGQRCLQAVVPWGGLRAHQVQVCNHCGTVWGRDVNSATNIRHALVEMLLGHKRPASLQTGGGGGGGSGGGGSGGGGSGGGGSGSSGGACAQLGSGGGGKGHVEEESAAPPKKRRKRAG

SEQ ID NO: 3068 - protein, 200 aa, Chlamydomonas reinhardtii
MAGTKAGTVLERTVQQLAGGRPKEEVIVGWSNADTGHGGCVSRSGRGPNRALLRLLVDKHAHLVVYVDEYYTSQVCAKCGQRCLQVVIPFGGSCARDVQVCQHCGTVWGREANSATNMRHALMEMLLGRARPAALRRGGGGGSHGGGGGPGPTSSSSGSSSSSSGGGSSSGTGPGGSGPGPSSCGVRVRSGGGEQGHVEE

SEQ ID NO: 3069 - protein, 279 aa, Chlamydomonas reinhardtii
MRWQAGIPSARVGSAAEHELRIRYLYSGGGVDAAAATGSAAAAAAGSAAAAAGSAAADIHQCGLWHLLRHYRQWGQRRWRQTVHVRTQKVLEHTAQQLAGNRPKGAVIVGWGNANTGHGGSISRPGRGPNRALLLLLVDKYAHLVVYVDEYYTSQVCAGRRLLDNGQRCLQEIVPCGGSRAHHQVQVCNHCGTVWGRDVNSATNIRHALVEMLLGNVRPAPLQPGGGGGGGGGGGGPAAAQQRHSDSGACAHVGSGGGGKGHVEEESAASPKKRRKRAG

SEQ ID NO: 3070 - protein, 606 aa, Chlamydomonas reinhardtii
MILRHEAWTALVDYVNAQRASKRAAELLLREVKGTQATYKKASTRHMEWAAKILAGLEARRDQLGAQVQQLTQAQPLTREDTQRLASLRRELHRARPFTLTPSPSFAPIYVPLDNTSMARLPGLLPTLARRHGEVFAGAGAGAVAPSSFVQAAFGGGGMQSSATLNAVGWGLFQLGGVTSRNAPFANYITTDGVACSVAREAHNKPLANLKPATAPADAEELCTLEEMKATQIIGVDPCGGGNWFMAARSPLYQPGPWAWEGVREGVSPAQRSLLELHDKQLDEELFPGQLPPEPRRRRKGGGRKGGGRKGGHRRKQSKHWQPRARTARRRRQKRGRFHMSMGHWRHMSGLERLQPNRPQLAPALQAYVGGIPTAATASAARFEERLRYLFVSRAAGQAAGQEAGQAAGQAAGQAAGQAAGQAAGQAEAGPRGAVHVLWHYHFSAFRRKRWAAFIQRDRALHRVAKQLTGGRPKEEVVVGWGSWAFQGGKGGSPISVRGGRAPTGRLIKLLRERYAKHVFIIDEYKTSKTCYNCGCQEMAIKRLGGLKEGQRPWSVKVCNDCLTTWNRDVSAANVIRVLLLLKLMGFERPIKLQRPPWPPAAAGPG

SEQ ID NO: 3071 - protein, 293 aa, Chlamydomonas reinhardtii
MVSSSDSTLTPSVHTHTAPSHHGLSHPRASAARFEERLRYLFASGAAGQAAGQAAGQAAGQAAGQAAGQAAGQAAGQAAGQAAGQAAGQAAGQAAGQAAGQAAGQAAGQAAGQAEAGPRGAVHVLWHYHFSAFRRKRWAAFIQRDRALHRVAKQLTGGRPKEEVVVGWGSWAFQGGKGGSPISVRGGRAPTGRLIKLLRERYAKHVFIIDEYKTSKTCYNCGCQEMAIKRLGGLKEGQRPWSVKVCNDCLTTWNRDVSAANVIRVLLLLKLMGFERPIKLQRPPWPPAAAGPG

SEQ ID NO: 3072 - protein, 762 aa, Chlamydomonas reinhardtii
MASPTASRTTMHSHSRNAPTASLRRPPPCSDAASHTHARSTASSHLRACRLAPTTRVHHPDQLRTPATEKLDKLAWSMAHAVLYDGELEQPRWWVGWAQGAAAQAAGAAAAAAAQGAGPAGGAAAAQAAGAAAAAAAQGAGPAGGAAAAQAAGAAAAAAAQGAGPAGGAAAAQAWTALVDYVNTQRASKRAAELLLREVKGAQATYKKASTRHMEWAAEILAGLEARRDQLGAQVQQLTQAQPLTREDTQRLASLRRELHRARPFTLTPSPSFAPIYVPLDNTSMARLPGLLPTLARRHGEVFAGAGAGAVAPSSFVQAAFGGGGMQSSATLNAVGWGLFQLGGVTSRNAPFANYITTDGVACSVAREAHNKPLANLKPATAPADAEELCTLEEMKATQIIGVDPCGGGNWFMAARSPLYQPGPWAWEGVSPAQRSLIELHDKQLDEELFPGQLPPEPRRRRKGGGRKGGHRRKQSKHWQPRARTARRRRQKRGRFHMSMGHWRHMSGLERLQPNRPQLAPALQAYVGGIPTAATASAARFEERLRYLFVSGAAGQAAGQEAGQAAGQEAGQEAGQAKAAGPAEAGSRGAVHVLWHYHFSAFRRKRWAAFIQRDRALHRVAKQLTGGRPKEEVVVGWGSWAFQGGKGGSPISVRGGRAPTGRLIKLLRERYAKHVFIINEYKTSKTCYNCGCQEMAIKRLGGLKEGQRPWSVKVCNDCLTTWNRDVSAANVIRVLLLLKLMGFERPTKLQRPPWPPPAAGPG

SEQ ID NO: 3073 - protein, 287 aa, Chlamydomonas reinhardtii
MSGLERLQPNRPQLAPALQAYIGGIPTAATASAARFEERLRYLFASGAAGQAAGQAVGQAAGQAAGQAAGQAAGQAAGQAAGQAAGQAAGQAAGQAAGQAAGQAAGQAEAGPRGAVHVLWHYHFSAFRRKRWAAFIQRDRALHRVAKQLTGGRPKEEVVVGWGSWAFQGGKGGSPISVRGGRAPTGRLIKLLRERYAKHVFIIDEYKTSKTCYNCGCQEMAIKRLGGLKEGQRPWSVKVCNDCLTTWNRDVSAANVIRVLLLLKLMGFERPTKLQRPPWPPAAAGPG

SEQ ID NO: 3074 - protein, 243 aa, Chlamydomonas reinhardtii
MARLLGLPSPHCSDGGDGNSGDGSGSSGGSGDSSDGVGGGRNGGGGARRAGGGRARGQTGRRLWLQARLKEQPALKRCQWGQRRWRLTVHVRTQKVLEHTAQQLAGGRPKEEVIVGWGNANTGYGGCISRLGRGPNRALLRLLVDKYAHLVVYVDEFYTSQGRDVNSATNIRHALVEMLLGHKRPASLQTGGGGGGGSGGGGSGGGGSGGGGSGGGGMTSSAAVENCAVPGCGWLCCGIATTR

SEQ ID NO: 3075 - protein, 1353 aa, Chlamydomonas reinhardtii
MVRGKPAGAVKAPVLEAGLRGYCDSLERDNALQQFRVPQRTPLLQLLGWALRHGVLTGDEVAASTPLACQTRPCYLQPLLQHLPATLEPALERYVVASSLAGHRGSVILGIGANTAIGARSPSALAPSMRRRRAAASRHSTASTPATATVASLSDGDVLRDLQLAAAAAVFSGVPEWARPKPALPSARRQAAAGSGGGGGSGVGGAGGGGGGDGGGRGRSRSSSSGLGSIGNDSWSSSSSRFCVDPAWASLPQRHPEQQLVAAAGQAVAASGGHAVVASVAVGGAVDISIDAVTDALRQAASATSRRRYPAWHASLPTGHAAAASGLLARPRWLAGAGATTRPAAVAELRASTASAGQRAIAATRAQPRLAAAVTSAASSCSEAAAASMASASNNDVAAFCLENERTDASSTQLWELLNTQKLLKQAFLPEYYPSPRGTPLHPLLATVMTGPFTDVLPPAPDWQGVFKTPGCWHKPLDQLASKYLANVKVHVQARVRKRVEQHVRAMELQPDTPRGTKGLLIASVLGRPRPLIAHNQDYSQVMDFRTAMGAVGTEPPPKDPKYSHDLFLLHLHLARYGPKERSYLPVVKLGRRFCYVDGRVAAGLTGVSYECVESNSGGGGGGGTPRRGRRGGRRRGQAASGDAAAATIAVQLALAGLPGRQLPDAAPSGTPAAGAAGGPGLPLHAAAVAAAEQSQAQARAVAAARKIICEAAPAAAAAASSQDTEPSSNRHRSLAELWGLTPGQLAAKGKAERRRKRQLLRRAARAATKEEQPELRRHERQLGRRAVHRTVQILSMETDGLSARLTITRPQDVRPHIQPLPLSSGTIADAATTAAHPAAYRSSSSAAAGRVAASPSSATAAAAAAAAAGRVAASPSSATAAAAVAAAAGRVAASPSSTTAVAAAAAAAGRVAVSPSSRPAFAGIDEGCVKLLVVAYSHDGKTPPHVIVVTRSWYYHEMRYRELTAYGKDWRRQQRSGILVAHQALSASGGLYNCDPAKWRAYLAVQRQYWPALLQESVISKQFAQRRMLLLSNKRSAQDRAANRVMRALTHGLPKERPLVIGVGSASFSPTAGGGALAAPNTAMREALSRVAQRERQATGRSVKIVPVWEHRTTLCCSTCGAETQGAWVRRNGVLSRSGRIRHCMECGTSRDRDVQGARNMLRIVEDEYDGRGRPLYLCRQEHLPKPPPMAPAVPRCILPQLPDGLIEALDGRPRGTVAVIDALSALQAEGDVAAQRAAQAVAAAMDQQVEASGGNSLVGEPQLQAIDVRLAAGPPAEVMDAASGRPRGTVAVIDALSALQAEGDVAAQRAAQAVAAAMEQQVAEASGGNSLVGEPQLQAIDARLHRDSVLS

SEQ ID NO: 3076 - protein, 219 aa, Chlamydomonas reinhardtii
MSGLERLQPNRPQLSPALQAYVGGIPTAATASAARFEERLRYLFASGAAGQAAGQEAGQAEAAGPAEAGPRGAVHVLWHYHFSAFRRKRWAAFIQRDRALHRVAKQLTGGRPKEEVVVGGGRAPTGRLIKLLRERYAKHVFIIDEYKTSKEMAIKRLGGLKEGQRPWSVKVCNDCLTTWNRDVSAANVIRVLLLLKLMGFERPTKLQRPPWPPAAAGPG

SEQ ID NO: 3077 - protein, 411 aa, Chlamydomonas reinhardtii
MKATQIIGVDPCGGGNWFMAARSPLYQPGPWAWEGVGEGVGPAQRYLLELHDKQLDEELFPGQLPPEPRRRRKGGGRKGGGRTGGHRRKQSKHWQPRARTARRRRQKRGRFHMSMGHWRHMSGLERLQPNRPQLAPALQAYIGGIPTAATASAARFEERLRYLFASGAAGQAAGQAAGQAAGQAAGQAAGQAAGQAAGQAAGQAAGQAAGQAAGQAAGQAAGQAAGQAAGQAEAGPRGAVHVLWHYHFSAFRRKRWAAFIQRDRALHRVAKQLTGGRPKEEVVVGWGSWAFQGGKGGSPISVRGGRAPTGRLIKLLRERYAKHVFIIDEYKTSKTCYNCGCQEMAIKRLGGLKEGQRPWSVKVCNDCLTTWNRDVSAANVIRVLLLLKLMGFERPIKLQRPPWPPAAAGPG

SEQ ID NO: 3078 - protein, 870 aa, Chlamydomonas reinhardtii
MCEDARREGQGLQPHCATCCRLRKTELVEDDMYAAICAVSVCDLTEQGRKRGRPSKRDQHPEDDLFRHVYEEHFPRDEEAAGARVNRSGLTPFLPPLSKGMFTNVNNHYGANFAAWLARSFRCRIDNELRELRTPATEKLDKLAWSMAHAVLNDGELEQPRCWAGWAQGAAAQVAGAAAAAAAQGAGPAGVAAAAQAAGAAAAAAAQGAGPAGGAAAAQVAGAAAAAAAQGAGPAGGAAAAQAAGAAAAAAAQGAGPAGGAAAAQAAGAAAAAAAQGAGPAGGAAAAQAWTALIDYVNAQRASKRAAELLLREVKGAQATYKKASTRHMEWAAEILAGLEARRDQLGAQVQQLTQAQPLTREDTQRLASLRRELHRARPFTLTPSPSFAPIYVPLDNTSMARLPGLLPTLARRHGEVFAGAGAGAVAPSSFVQAVFGGGGMQSPATLNAVGWGLFQLGGVTSRNAPFANYITTDGVACSVAREAHNKPLANLKPATAPADAEELCTLEEMKATQIIGVDPCGGGNWFMAARSPLYQPGPWAWEGVREGVSPAQRSLLELHDKQLDEELFPGQLPPEPRRRRKGVRRKGGGRKGGHRRKQSKHWQPRARTARRRRQKRGRFLMSMGHWRHMSGLERLQPNRPQLAPALQAYVGGIPTAATASAARFEERMRYLFASGAAGQAAGQAEAAGPAEAGPRGAVHVLWHYHFSAFRRKRWAAFIQRDRALHRVAKQLTGGRPKEEVVVGWGSWAFQGGKGGSPISVRGGRAPTGRLIKLLRERYAKHVFIIDEYKTSKTCYNCGCQEMAIKRLGGLKEGQRPWSVKVCNDCLTTWNRDVSAANVIRVLLLLKLMGFERPTKLQRPPWPPAAAGPG

SEQ ID NO: 3079 - protein, 298 aa, Chlamydomonas reinhardtii
MARLLGLPSPHCSDGGSGGGDGNSGDGSGSSGGSGDSSDGVGGGRNGGGGARGAGGGRARGQTGRRLWLQARLKGQPALKRCQAGIPSARVASEADHERRIRYLYSAGGGVDAAAAAGSAPAPVQQYGLWHLLRFYRQWGQRRWRLTVHVRTQKVLEHTAQQLAGGRPKEEVIVGWGNANTGYGGCISRLGRAGTAPPAGGQGRDVNSATNIRHALVEMLLGHKRPASLQTGGGGGGGGGGGGGSGGGGSGGGGGGSGGGGSGSGGGACAHLGSGGGGKGHVEEESAAPPTKRRKRAG

SEQ ID NO: 3080 - protein, 783 aa, Chlamydomonas reinhardtii
MAEAPAKRQCSAPTGVSLLWRAKELGQLHAGALVFAAWVARNESRFPEAVYYCSSDMSEEQLGRADHEQLLGALQSLTSQHLLGQLCGLAPEQVATSSAATRSAYSGCWKAQGSAWMGPSWLTYVLTAGHKVVVKQLVGGGLARATFCSEAWGAAFDDKMYIARTTWPPGAMSMELPAGHLGWWEPNPHALRAHYRGFERDAYWHFLLEQRLGQPPRMTCTCSSFSVVGAAVSSCLHTAYVSSVEWLLEAGPPPPRLVPAARCARLVDGRVMPGDYIWLPGRTLVACTRQTGALRCCHSGCGAACQHVTEARSAFEQHMLPAVAVAAAAASTGQIRTPAGAEGDADDTQSQQAGAPAAAAAAVADEAVEEAVPPPSEVRYPYAPDKATIIAMMTFELSLMQRQDAVGPVRAHLFELYSGCSCLMRACVMAYVGVADGWRLFRRSSRSSFFCLRHMYTYADQLLGSGMNVEAYVSSQRRLAATTLLADAQRPKQFSATLFRRTWHQFEARLDRFHTFKCPIQHQRPQQQQQQQPSMPPPRVHSTAGPGGGGGSGGPGGGAGARAAGCVAHRRRAGARCWQFGSERGGRSGRGPNRALLRLLVDKYAHLVVYVDEYYTSQVCAKCGRRLLGNGQRCLEVVIPFGGSRARDVQVCQHCGTVWGRDANSATNMRHALMEMLLGKPRPAALRPAGGGGGGGGGGGGGGGGGGGGGGAGPGDGGGGGGGTAPTGGNSSGHGVGPGGGGGTGGPGPSGSGGAHVRSRGGGQGHVEEDSAAPPSKRRRRAG

SEQ ID NO: 3081 - protein, 262 aa, Chlamydomonas reinhardtii
MNHRQFLLAQRLSRRLWLQARLKEQPALKRCQAGIPSARVASAADHERRIRYLYSGGGVDAAAAAGSAPAPLQQYGLWHLLRFYRQWGQRRWRLTVHVRTQKVLEHTAQQLAGGRPKEEVIVGWGNANTGYGGCISRLGRGPNRALLRLLVDKYAHLVVYVDEFYTSQGRDVNSATNIRHALVEMLLGHKRPASLQTGGGGGGGGGSGGGGSGGGGGGGGSGGGGSGSGGGACAHLGSGGGGKGHVEEESAAPPKKRRKRAG

SEQ ID NO: 3082 - protein, 264 aa, Chlamydomonas reinhardtii
MGHWRHMSGLERLQPNRPQLAPALQAYVGGIPTAATASSAQFEERLRYLFASGAAGQAAGQAAGQAAGQAAAGQAAGQAEAAGQAEAGPRGAVHVLWHYHFSAFRRKRWAAFIQRDRALHSVAKQLTGGRPKEEVVVGWGSWAFQGGKGGSPISVRGGRAPTGRLIKLLRERYAKHVFIIDECKTSKTCYNCGCQEMAIKRLGGLKEGQRPWSVKVCNDCLTTWNRDVSAANVIRVLLLLKLMGFERPTKLQRPPWPPAAAGPG

SEQ ID NO: 3083 - protein, 217 aa, Chlamydomonas reinhardtii
MGARTPCCNILLSAPPSTKAAAWAGAAGRGPNRALLRLLVDKYAHLVVYVDEYYTSQVCAKCGRRLLGNGQRCLEVVIPFGGSRARDVQVCQHCGTVWGRDANSATNMRHALMEMLLGKPRPAALRPAGGGGGAGPGGGGGGGGGAGPGDGGGGGGGTAPTGGNSSGHGVGPGGGGGTGGPGPSGSGGAHVRSRGGRQGHVEEDSAVPPSKRRRRAG

SEQ ID NO: 3084 - protein, 322 aa, Chlamydomonas reinhardtii
MARLLGLPSPHCSDGGDGNSGDGSGSSGGSGDSSDGVGGARNGGGGARGAGGGRARGQTGRRLWLQARLKEQPALKRCQAGIPSARVASAADHERRIRYLYSGGGVDAAAAAGSAPAPVQQYGLWHLLRFYRQWGQRRWRLTVHVRTQKVLEHTAQQLAGGRPKEEVIVGWGNANTGYGGCISRLGRGPNRALLRLLVDKYAHLVVYVDEFYTSQGRDVNSATNIRHALVEMLLGHKRPASLQTGGGGGGGGGSGGGGSGGGGSGGSGGGSGGGGSGGGGSGGGGSGSSGGACAHLGSGGGGKGHVEEESAAPPKKRRKRAG

SEQ ID NO: 3085 - protein, 529 aa, Chlamydomonas reinhardtii
MATPNHPHFGKSYLGKPYRSKKTGKWRRNTCYFGLDPSFAPIYVPLDNTSMARLPGLLPTLARRHGEVFAGAGAGAVAPSSFVQAAFGGGGMQSSATLNAVGWGLFQLGGVTSRNAPFANYITTDGVACSVAREAHNKPLANLKPATAPADAEELCTLEEMKATQIIGVDPCGGGNWFMAARSPLYQPGPWAWEGVGEGVSPAQRYLLELHDKQLDEELFPGQLPPKPRRRRKGVRRKGGGRKGGHRRKQSKHWQPRARTARRRRQKRGRFLMSMGHWRHMSGLERLQPNRPQLAPALQAYVGGIPTAATASAARFEERLRYLFAGGAAGQAAGQAAGQAAGQAAGQAAGQAAGQAAGQAAGQAAGQAAGQAAGQAAGQAAGQAEAAGGAGRGGRPKEEVVVGWGSWAFQGGKGGSPISVRGGRAPTGRLIKLLRERYAKHVFIIDEYKTSKTCYNCGCQEMAIKRLGGLKEGQRPWSVKVCNDCLTTWNRDVSAANVIRVLLLLKLMGFERPTKLQRPPWPPAAAGPG

SEQ ID NO: 3086 - protein, 486 aa, Chlamydomonas reinhardtii
MCPLTTRPWPAFLLPTLARRHGEVFAGAGAGAVAPSSFVQAAFGGGGMQSSATLNAAGWGLFQLGGVTSRNAPFANYITTDGVACSVAREAHNKPLANLKPATAPADAEELCTLEEMKATQIIGVDPCGGGNWFMAARSPLYQPGPWAWEGVREGVSPAQRFLLEPHDKQLDEELFPGQLPPEPRRRRKGVRRKGGGRKGGGRKGGHRRKQSKHWQPRARTARRRRQKRGRFHMSMGHWRHMSGLERLQPNRPQLAPALQAYVGGIPTAATASAARFEERLRYLFASGAAGQAAGQEAGQAEAAGPAEAGPRGAVHVLWHYHFSAFRRKRWAAFIQRDRALHRVAKQLTGGRPKEEVVVGWGSWAFQGGKGGSPISVRGGRAPTGRLIKLLRERYAKHVFIIDEYKTSKTCYNCGCQEMAIKRLGGLKEGQRPWSVKVCNDCLTTWNRDVSAANVIRVLLLLKLMGFERPTKLQRPPWPPAAAGPG

SEQ ID NO: 3087 - protein, 290 aa, Chlamydomonas reinhardtii
MRQKSRKRKKLADEEDSEEEEDPSTFSVKTRRRRRNDRRKRRLQAGKPTQPPRYWSKKLRKLEAATAAVAAGAGGGEAAGQGAWAPLQLHWSDIRFRSRKFGVYSQSQRVLHREARRLTGGAPMSRVSIGYGNASTGHNSVIKRPSRGPHKAMQRLLRRCYARSVVMIDEYCTSQVCYNCGLRELRKILPHNGTRRYTVLACDGCGTVWNRDANAAANIRLITACLEEGLPRPEALTRPIHGSGGGGAGRQGGGQRAPCTRSAPGAAAAATAAAAAADADAAVQGGGAYG

SEQ ID NO: 3088 - protein, 781 aa, Chlamydomonas reinhardtii
MGITIFLGITCGQPNAHLPGVSSAGEDVAAAAVGLRCAPGSGAASDGRGLHAGGPHGYVGLRPAGGGRGAVEHFADHLLIRRLVCVLVHYNHYGANFAAWLARSFRCRIDDELREVGQAEVGPAEVGQAEAAGQEAGQEAGQEAGQEAGQRAAAQLTTTAAQHFHNNPVALDPWLHRTSAAAGLQNTPLRTPATEKLDKLAWSMAHAVLYDGELEQPRWWVGWAQGAAAQAAGAAAAAAAQGAGPAGGSAAAQAAGAAAAAAAQGAGPAGGAAAAQAWTALVDYVNTQRASKRAAELLLWEVKGAQATYKKASTRHMEWAAEILAGLEARRDQLGAQVQQLTQAQPLTREDTQRLASLRRELHRARPFTLTPSPSFAPIYVPLDNTSMARLPGLLPTLARRHGEVFAGAGAGAVAPSSFVQAAFGGGGMQSSATLNAVGWGLFQLGGVTSRNAPFANYITTDGVACSVAREAHNKPLANLKPATAPADAEELCTLEEMKATQIIGVDPCGGGNWFMAARSPLYQPGPWAWEGVSPAQRSLLELHDKQLDLAPALQEYVGGIPTAATASAARFEERLRYLFVSGAAGQAAGQEAGQAAGQAEAAGPAEAGSRGALHVLWHYHVSAFRRKRWAAFIQRDRALHRVAKQLTGGRPKEEVVVGWGSWAFQGGKGGSPISVRGGRAPTGRLIKLLRERYAKHVFIIDEYKTSKTCYNCGCQEMAIKRLGGLKEGQQPWSVKVCNDCLTTWNSDVSAANVIRVLLLIFLRNHPYKVEQGQTRCPPAA

SEQ ID NO: 3089 - protein, 239 aa, Chlamydomonas reinhardtii
MTSVRRKCATKTQQTASRHKEPVTVVHFCSGSLSRLFLPGPSATPSGRVRTSQWQAAGQAEAGPRGAVHVLWHYHFSAFRRKRWAAFIQRDRALHRVAKQLTGGRPKEEVVVGWGSWAFQGGKGGSPISVRGGRAPTGRLIKLLRERYAKHVFIIDEYKTSKTCYNCGCQEMAIKRLGGLKEGQRPWSVKVCNDCLTTWNRDVSAANVIRVLLLLKLMGFERPTKLQRPPWPPAAAGPG

SEQ ID NO: 3090 - protein, 668 aa, Chlamydomonas reinhardtii
MKRSAAAWQALVAGAAAAVGVSFFLQLMRRLGLRAKSGLTPYGTPLPRVAHRRLEPVKPGRLIVVGDLHGTPELFTLLERLSFRPSHDNLVLVGDLVNKGPASLRLLEALPGLGAVAVRGNHDDAALAAWLAWRQKGQPLPSKFEWSRDMSPAQADLLAQLPFTLAVPQYGVAVVHAGLVPGVPLKQQKLWACYKMRNLVPHPHGDGGGGGGGGGSTSGSGGADPATATSASTSTSTSAGTLTATASSTVTGHAPGARYTAVEKAKEGGQAWAPLWPGAEPPAQHVFFGHDAKRRLQLAPHATGLDTGCVYGGELTAAVLPPLGELVASSPGFVAAMRHGRPLTREDLRVQLVSVPAARVYSAPDGHADTAAAGAATAAAAGASAGSGSGSSSGGMAKEAGRVGAASGAGVELVHPASRGAAGQAAGQAAGQAAGQAAGQAAGQAAGQAAGQAAGQAAGQAAGQAAGQAAGQAAGQAAGQAAGQAAGQAEAGPRGAVHVLWHYHFSAFRRKRWAAFIQRDRALHRVAKQLTGGRPKEEVVVGWGSWAFQGGKGGSPISVRGGRAPTGRLIKLLRERYAKHVFIIDEYKTSKTCYNCGCQEMAIKRLGGLKEGQRPWSVKVCNDCLTTWNRDVSAANVIRVLLLLKLMGFERPIKLQRPPWPPAAAGPG

(The sequence listing continues in the following parts.)
